United States Patent Application Publication US 2026/0103690 A1 - sequence listing, part 32

SEQ ID NO: 147028 - protein, 333 aa, unidentified
MKILKQSIGIDVSKNDFKVCLGIIEERLEKMEIYEHTYINGKKGIRQFIKDIEVKMDKTIPVFFVMEATGVYHQELAYALAANELPVVILLPNKAKSFSKSINIRAKSDIIDAKLLCQMGLERKLTTWQPPETIFATLKTLTREREALVLQRSKLKNQLHAYQTAFVKTDKTISRIKKHILFLTKQIKEAEVDMKSLIKQDKGVENKVKKITKVKGLSFLSVVTILAETDGFNIILNQKQLIGYSGLDVRVDQSGAKSIKGRITKKGNSHLRKALYMPALNACRTNKTMKLFYTQLNERQKARKQGVIAVQRKLLLLTYSLWKTGQDYLEKCA

SEQ ID NO: 147029 - protein, 471 aa, unidentified
MGKGSGNGTTRGDRRRNARRERLRALLPRDGAVIGIDLAEDKQALAVIDHDGRVLARKTVKVKAFRLGEALDWAVGQARAKGFAQVTVACEPTGPRWLQVQRLCAERGLPLVCIQPLMSHIAREQQDYTTHKTDESDCVLIARLAVELHCYVPEELDEAWAHLRHLGRRRQQLITMATASGQRILDFLSVAWPTVTETCVDPLKSVTWLAALQVVTARCGADPGRLAAMGTEAFTAAAGGAVAGWGGKKAWGPISRRVFAALTDTEGVVVCSRRGLLRRVADELGDLQRTRAQLRAVEADMVAVLGELGLSKLADIPALSAVGAAAILAETGDPRRYDSSSSLVKHAGMSPSDNASGTFLGDAHISRRGRPGLRLTVWRAVWPMLRFNPVMAAKYAAMTQAADDAAAAADTGSRQASAAAAAARARRAKARVACAASLLRWIYCLVVHGTSWDPDAASGPARRPAVPAEAA

SEQ ID NO: 147030 - protein, 355 aa, unidentified
MNSEKYIGLDVHQATIVVAVTDSTGKLVMESILETEAATILQFFAGLRGNLAVTFEEGTWSAWLYDLLNPHVEKLVVCNPRKNALLKDGNKSDHIDARKLAELLRGNQLKPVYHGENGVRMLRELSRSYLAIVKDLSRVMNRLKAVYRSWAIPCAGRDVYYRRHRAQWLDKIREAGVRRRAERLYEQLDMLQHLRQQARRELLAESRKHAITARLRQIPYLGPIRSALAVALMQTPHRFRSKRQLWAYSGLALETRISAEYRLVEGQVRRSKKLLSIRGLNKDHNHDLKGLFKGAATMASVRPGPFQDFYQAALAKGIKPTMARLTPARKIAAITLTLWKKGESFDAEKLKSQAA

SEQ ID NO: 147031 - protein, 318 aa, unidentified
MGGLLGVESFPTNEQGYRRLIEWLRGLGTVMLVGVEGTGSYGAGLTRHLQQAGLQVVEVDRPNRQARHRAGKSDPLDAIAAARAALSGTANGAPKSRTGNVEAIRVLMVARRSAVEERITTLNQLRHLCITAPEPIRRRFSGLTPAALAKRAAALKPRRRDPLRYSTLLAIRTLGRRVLYLRDETKELNAVLRPLIQTTAPGLLGVFGVGYDTAAKLLVAAGDNPQRLRSEAAWAHLCGVAPLPASSGKTIRHRLNRGGDRQANSALYHVMITRLSHHEPTKAYVARRLANGKTLGETGRMLKRYIAREVYKQLPRPA

SEQ ID NO: 147032 - protein, 402 aa, unidentified
MNAVGIDVSKGKSMVAIMRPFGEIVSAPFEIKHTASGINSLVELINSVEGESRIVMEHTGRYYEVLAHQLSKANLFVSAINPKLIKDFDNDSLRKVKSDKADAVKIARYALDKWQNLKQYNVMDELRNQLKTMNRQFGFYIKHKTAMKNNLIGILDQTYPGVNTYFDSPARSDGSQKWVDFASTYWHVDCVRKMSLNSFIDHYQNWCKRKKYNFSQSKAEEIYGKAKELVPVLPKDAITKLIIKQAVDQLNSASTTVESLRTLMNETASKLPEYPVVMAMKGVGTSLGPQLIAEIGDVSRFTHKSAITAFAGVDPGVNESGSYEQKSVPTSKRGSSDLRKTLFQVMDVLIKTHPQDDPVYQFLDKKRAQGKPYYVYMTAGANKFLRIYYGRVKEYLSSLPES

SEQ ID NO: 147033 - protein, 309 aa, unidentified
MKQAIVYIGIDVAKAHLDVAWAGTFRRLPNERSGHAALVRWIKQSATPVQLICEASGGYEQALLESLQKSEVKVTLVQTVRVRQYARAAGMLAKTDRIDAKVLAAFGSALQPQPTSPLSGEQKRLRQYEAQRRHLSRILVAEENRLAQLSCTELRTLSRSLISKIKTQIKTLDRGISDLIAQDQTLCVKAQKLTAISGVGVRTAALLLAQMPELGQLNRRQAAALAGLAPFNHDSGSVRGKRAIFGGRPALRSGLYMAALSAARFNPILSSFYQRLRAKGKPHKLALTAVMRKLLLALNQTLKPLPCST

SEQ ID NO: 147034 - protein, 349 aa, unidentified
MRFYNKIHTHYCGIDLHARTMYLCILGSSGEPLLEKNIKCRPEAFLRTIEPFRENLVVSAECIFTWYWLADLCRREKIDFVLGHALYMRLIHGAKAKNDKLDAMKIAMLLRGGTMPLAYAYPPEMRATRDLLRRRLHLVRKRAELLSHIQNTHHQYNLKPPAAKIAYKANRDGVAEAFTEPDARKSMEVDFLLIEQHDQIIKDLELHLSRQAKLHDPDTYHRLRSVPGIGKVLALTILYEIHDISRFPRVQDFVSYSRLVKPEHSSAGKKVGSGGGKKGNAHLKWAFSEAASLFLRHCDEGEKMARRLQSKHGKSKGLSILAAKLGRSVYYMLSHEKSFDLERFLKGNK

SEQ ID NO: 147035 - protein, 315 aa, unidentified
MAQQVTPVSIGVDVDSRYLQIAHHGSSEVYRIDNQPGAIRQWLRSLSGPVCLAVEATGRYHFELVDRAHAAGVTVYLIDPYRLSRYRDGIGQRNKTDQVDAVLLARYLAHERAELRAYQPVSAGHRQAWALLKRRAKLVQAEGIVTETMKAVSGLRSPVKALKQRFARLKQAIERQLAEQIHKLGLQADYQRCQRINGVGRLTAAALVLAFHRGRFTKADALVAYLGMDIRIRQSGRYRGQSKLSKKGDAECRRLLHNAARAAARGDLQPYYDRLLTRGYAATQAHVAVGRKLIRIAFSLLKNQYHYDPKMLKMT

SEQ ID NO: 147036 - protein, 410 aa, unidentified
MKVLNRRCAGLDVHKAEVVACARVFAGRKVAHEVRRFGTTTRELMALGDWLESLHVTHVAMEATGVYWKPVWHMLDERFALILANAQQVRNVPGRKSDVNDASWIADLLAHGLISASFVPPRPIRELRDLTRTRRQAVGEVVRHKHRIDKILQDANIKLSSVLSDPMGPSGRRMLAAIVAGESDAGKIAELGSARLECPRGALIEALSGRVSEHHRYLLGWELRLIGEIEARIDELDRRIEGQIAPFRAAVERLMGVPGVKGAAAPAIIAEIGADMSAFPSAGHLLSWARIVPRLDESAGKKRSRRVKKGGAWLKPLLVQCARAAMRKRGSYYGAQYRRLKARVGDKKAIIAVAASILTAIYHMLRDATDHRDLGAAYLAHRQGDKQAVAQRLARQIRALGYHVDVRAAA

SEQ ID NO: 147037 - protein, 342 aa, unidentified
MQITVLGIDLGKNSCSVVGLDASGKVVLRRRLQRDGVVKLAMGLPGCVMAMEACCGAHHLGRRLRDQGHRIRLMSPEYVQPYVKAQKNDDRDAEAIAEAATRPTMRFVELKSEEQLDMQSLHRARDRLVGERAALINQLRAFLLERGVIVPKGRRNLELHLETLLAAEQVALSPRTRLLVEDQRAEWRELDRRILAFDEEFGLQARTDERARLLTTIPGIGPLNATAMVAAIGKAETFRRGRDLAAWVGLVPKQMTTGGKQKLLGINKRGNVYLRKMLIHGARAALPTLSKSETPLGEWLRGLLARAHVNTVVVALAAKLARIICAVLRSGQRFEIAAAAVS

SEQ ID NO: 147038 - protein, 369 aa, unidentified
MDKIMICGTDLHDRNLVCRVAVDRDEPRTRAYPNTSLGKSSLLDSLKRQARKHGCGRIAMAYEASTQGFCLHDDCVDAGVECFVLAPTKIRKSKRDQKRKADEKDAQLILETLRGHLLAGNELPSVWIPDDATRADRETVRSRLDLGRKLTAAKTQVRTLLKAHRLRKPEGTSANWTKSYRCWLGSLCGEGQWPALATLVRQIEFVECEIQAIEGEITSLSETPRYAEPYRALTSKLKGVGLMTAMVFLTEIGDMRRFPNRRTLGAFLGLVPSSNESGEKGDRKGHITREGSPRLRYVLCQATWSRVRSDPDASLVYDRIVRKNPKHKKIAAVAMMRRLGIRMWHVARKAQVRCGIFAPEQMTAGAPAA

SEQ ID NO: 147039 - protein, 374 aa, unidentified
MKHYSTLYVGMDVHRDSFTLAHFALDMKQPTGIVKTDSDYRRIVTYVHRLREKYGQEARIVCGYEAGCLGYTLYHQLTKAKIESIILAPTTLPSPRGGKRVKTDGRDAANIAQCLAYGTYSPVHVPSAEDEQVKEFIRMRNDHCQMLKKLKQQILSFCLRHGYQYSGTRSNWTQAHMKWLDALQPEGLLGDTLEEYLTSFRYHQNKLERLDRRIEEISREETYREPVGKLCCLIGVKPLTALSVVSEVSDMHRFPTAEKFAAYLGLVPGEHSSGNSVRRSSITKAGNVHVRALLTEAAQSYTRGKVGYKSSALKKRQSGQSETVIAYADRANERLRRRYYQMTLQNGKRGNVAKTAIARELACFMWGLLTDHVV

SEQ ID NO: 147040 - protein, 343 aa, unidentified
MNNLRRVGVDLAKNIFQLHGVDRTETSTWCRRLKRDNWISVLLKKVEPGCEIGMEACTGAHHWARLLQSQGYTIKLIAPQFVKPYVKSNKNDANDAEAICEAMSRPNMRFVTVKSIEQQEIQAVHRIRSELIGQRTAKGNQIRGLVAEYGLVAPQQMNQLRMAIPTWLEDAENGLSVRFRRLLKGLWDDLKRLDERITEMDKEIVLIANNDPVAKRLQQLRGVGPMVATALLAAVGDGKQFANGRQMAASLGLTPRQHSSGGKDRLFGISKRGDAYLRSLLIHGARSAIYAARGKEDRLSQWVINIASRRHPNVAAAALANKTARIAWAKLPRPAHAPYLQSM

SEQ ID NO: 147041 - protein, 421 aa, unidentified
MHEERRWFVGIDWASKEHVVSLCDGQGKKIGQRKFAHGGTGFSDMIAWLLKTSGGEPSEIHVAIETPHGPIVEALLERGFNVYSINPKQLDRFRDRFTVAGAKDDSLDAYVLADSLRTDMALFRKLGVAEPLIVELREWSRIDEELKVERLRLANRLRDQLWRYYPQMLELGDLDEDWMLDLWEAAPTPEKASRASKAAIARVLKKHRIRRFDAAQVLSELRKPALSVAQGTIEAATAHIRVAIERLRLVNRQLADAGLQLDRLCKKLAEPVAGADGENVPGQRQEHRDVTILDSLPGVGRVVLATMLAESPDALQRRDYHALRTLCGTAPVTRRSGKSCIVTRRHACNRRLRNAAFNWGTIAVRHDSISKAKYQALRARGHGHARALRSVVDRLLYVACTMLEKGTLFDPSFAETKNAAA

SEQ ID NO: 147042 - protein, 415 aa, unidentified
MKEEKEKVKQYYLGVDWSDEFHQVWVSDPEGKKVMEKKVLENVEGLAEFGRWLDESRAKGIELWAAIEKPAGRIVDFLLDHGVVVYPVNPKALDRVRDRFRMSQSKSDSFDAYVLAEFLRTDHVHLRALEPSSEQAQELKLLTRDHHRLGRHKTRILNLLGRTLKEYYPRPLEVFGDLESKIALDFLTKYPTPQALSNLNRRQWNRFAKREHHLAEARCKELWDNLNKPQLKVPEHVVRAKAQLTGVLLIQLRGLIQAVESYSERVKSFFGSMPAAELVQSLPGGKSGTILPMLWAELGDAKSRWDSFKHLQAEAGAVPVTRSSGKSAYVQFRFSCNKHMRYAAYWFAFVSLNRCEWANKYYRDQRARGKSHHQALRALGAKWLKIIFVMWRDHKPYDENYHLANITRQQMRQAA

SEQ ID NO: 147043 - protein, 400 aa, unidentified
MRVVFGIDVSKASSEVAILVNGEKVHGYTMSNDAIGFSRLLGDLKTVHKPEIIFEATGVYSRHLQTFLDEHGYAYTRLNPLEAKKQLDSLRVRKTDQIDAEKLAQSQFVLNRKTTYVQKEVYQNLRDLSRFYQNLTEDIVRAKNRLHKALQVTFPELENILSTPTGEQYWNLVIAFPCKDFVLDLSKDELSESIRQSTSKRISDKRVAYLAEKLIALANQSYCAVKKNSPMLEEVRYYTKELLRLSEQRQAVLDEMVELAQPLPEYDILLSIPGIAETTATSIIGELGDIRRFQSANQINAFIGIDLRHYESGNFLAKEHITKRGNPYARKILFKCIHNIASASHTNPCHIADFYEKRKRQSQTTSTKPHTIASIHRLIRTMYYLIMHNKLYDYASTQNR

SEQ ID NO: 147044 - protein, 345 aa, unidentified
MELHTIGIDLGKTVFHLVGLNSRGEVVMRKKFSRTQLLRFTANVHVGLIGMEACGGAHFLGRALREQGHEVRLIPAQYVKPYVKTNKSDYIDAEAIAEAVARPTMRFVPIKTDDQLDLQSLHRVRERWVMRRTAVINQIRGLLLERGITLRKGRCHVGAALPGILEDADAKLSGALRMLLAQLKLELDHLDLRIDEADEMIKKTARENEACQRLVAIPGIGPVTATALIAAIGNGGAFRKGREFAAWMGVVPREQSTGGKQKLLGISKRGNSYLRRLFVQGARAVMQQRTKQSSGLSRWLAQLTSRSHRNVAAVALANKIARMAWAVLAKNEPYRPPVLADVAAA

SEQ ID NO: 147045 - protein, 335 aa, unidentified
MQVYGIDLSKEKFDVNFIDAKGKEKNREVKNAVVSISRFLSSVSEDSILCAEHTGVYGDILVYLCNQMNISIALVPGYTIKHSLGLLKGKSDPLDSKRIREYGERFSDKLEYAEYAEENIAEIKQLYTLRNQLVKQRRSLRTVDTGRGHLPMQSISVHNHIHAVFSSLDNEITSIEDEIEALIKANQDLNENYELAKSVFGIGPVIATELLIKTGNFKTIDTHRKAASYAGVCPFPNTSGKMVGKSRTSPHADKKLKSLLYMGAKAVVKNNKEFRLYYQKKQLEGKPHYLIMNNVSNKLLRIVFSVVRNKTPYTSDHVCLDPREKNNNSSTKKVA

SEQ ID NO: 147046 - protein, 320 aa, unidentified
MNKEQKYVGVDISKDRLDMAVLDSDQRRHFNNSTIGIERAIAALEVLRPVLVVFEATGGMEIPFWEALSKAGIDSAPINPRQIRDFAKAKGRLAKTDAIDAQVIAHYAQAMKPRPQPFPDTQALKEVMARRSQLVEMISAEKNRLKATRRESIKKDIQAHIEWLETRLDNVDKELRKAIEASPVFREKDQLLRSTPGVGPVLSATLLTQLPELGELNRHQVAALVGVAPLNRDSGLMRGKRTIWGGRGRIRAALYMAALVATRCNSVIRVFYERLCSLGKPKKLALTACMRKLLAILNSMVKHHTLWTHNSTLILIGSCQ

SEQ ID NO: 147047 - protein, 444 aa, unidentified
MASSGMILIREVADAPVIMGISKPAGLKSPCGEVKIVNPLFVGIDVSSKNNVAYLMKPDGSKHSSFSVQNNLGGAKLLSERIVSALGSMQLERVVIGLEATSIYGDSLVYALREDGRLGRFQRKIHVLNPKQVRKFKEAYSDLPKNDWVDAFVIADHLRFGRINREVYMDDYRYKALQTLTRARFDVIQNLTREKQRFANYLFLKCSGMAQDKDIQNTSATTIALMEHFETVDDLANADLEELTAFITETGRGKFADPDATAKAVRAAAKGSYRLPKTVNDTVNQAMAVSIASMRALKGQVKVLDKAIEQQFEIIPNTLTSIPGIGKVYSAGIIAEIGDIHRFDSQASVAKYAGLVWNRSQSGDFEAEHSRMIKSGNRYLRYYLLEAANSVRRCDSEFRRYYDLKFKEVNKYQHKRALALTARKLVRLVFRLLKDNRLYIPPEG

SEQ ID NO: 147048 - protein, 347 aa, unidentified
MKRIAVDLAKSVYQVAESVQVGRVDRRKRLDAGAFARYVQEQIEPVEWVMEACGTAHHWGRLMQEKGHRVVLLHPRYVRPYRRRNKTDRNDCDAILEAARCQDIRPVPVKSVQQQQVQQLHKLREGWKKSRVQRINLLRGILREAGVETPNDIKPFLRQACELIERPEVRALRGALQVVLAEINLYEQSMRECEEQLARWHADDEIVRKLDEVSGIGLLTASAFKTAVGKPERFASGRHLSAWLGMTPNEYSSGERRRLGRISCKGNVYVRTLLIHGARAALLAAKRCKARTPERLTQLQSWALQTAERIGHNKAAVALANKLVRICWAVWCHERRFSGNWHSTKPA

SEQ ID NO: 147049 - protein, 406 aa, unidentified
MAKVINFEEIHANGAGIDIGSRGVFVSIDGEQVVTFKTFTSDYHLCCKYLKENGIDSVAIEATGVYWMSLYAMLEEYGITVCLVHPQEVQQVKGRKSDPKDSRWIQKMYSAGLLRESIVAKGQLKDLRIMIRERLDLIEMGSTYVNKMQKYLELMNIKLRNVISQIHGVSGLRVIRAIISGERDPEKLVLLCHESIQRKKREDVIKSLEGNYHESYILLLKENLRLWEEHQASIRYIEQQIEKLLEELNKDNTHIEVTSQSKPARHHQPSINELHTKMVQMYGGINLTTIAGINDSTMLRLLGEVGNDMSRFPTKKHFISWLGLSPKNKQSGKMKKRLKCPATNAGLIFRQSAQSLSISKDNAIGVFINRLKGRKGSKVAIKAGARKIAGAYSEFLTLFSYVVEYE

SEQ ID NO: 147050 - protein, 458 aa, unidentified
MVTKKKKDKRGSAALPIVHRHAAGLDVGSTFHVVAVPEDADDEPVRTFKSFTGDLHRLADWLAEVGITTIAMESTSVYWIPVFEILEARGFEVVLVNARDAKNVPGRKTDVNDAQWIRQLHAYGLLRGSFRPHEQIVSLRAYLRHRERLVEYAASHIQHMQKSLMQMNVQLHHVVTDITGITGMKIIRAIVDGERTPSTLAAFRDIRCKASVETIGEALTGNYRDEHVFALRQAVELYDFYALKIEECDLQVERCLKALNDQREPPIVPLPKARSKSRPKHEPGFEVRDSLYTLVGGVDLTQIHGLGPYSALRIVSECGTDMSRWRTAKHFTSWLTLAPGNKISGGKVLSSRTRRSANRATVLLRMAAVGVGRSATALGAFFRRLAARVGKAKAVTATARKIAVIFYNTLRHGAAYVDPGVDYYEERYRRRTLDNLRRRAESLGFRLVATATDPNGVS

SEQ ID NO: 147051 - protein, 412 aa, unidentified
MEVVYPRCSGLDVHKRFVVACLSIIQHGQRHKEVRQVSTMTSDILALKAWLKASGCRQIAMESTGVYWKPIFHLLEDEFEIVLVNAQHMKAVPGRKTDVKDAEWIADLLQHGLLKASFIPSSEQQAVRDLTRSRMTLLQERSRLINRIQKVLEDANIKLASVVTDIMGMTGHAILTALVKGEDDPERLAHLARGSLIKKQDQLKAALAGKLTPHHRVLLEELLHLIATLDRSIARLDREIAERLRPHDALIERVDAVTGLSRRSIEVLLGELGWDMSHFPDAAHAASWVGICPGNHETGGKRLSGRIRQGNRWAKTVLVQAAHAAGHTQSYLGEQYRRVSARRGAKRAAVAVGHSILVIFYHMVKTGEPYQEKGADYFTAVNKEKIQQRLVRQLERLGNTVILQPKAEMPRA

SEQ ID NO: 147052 - protein, 425 aa, unidentified
MHSKMNNKINQVTENTLVVGIDIAKHVHYACFVDERGRVIEKAFSVHQSKEGFESLYEKIRQTLLETQKTEVIVGIEPTGHYWMNLAYFLDQYDIPLVMVNPMHVKRSKELDDNLPTKNDKKDALVIARLLKDGRFSYPQILKEVEAELRIGSTLRSKLTEDLASIKNRIIRWLDRYFPEFTQVFPSFGKMALTALERTPMPQDIQGKTAEELVFLYRQVGGMRAPQLPKAKLLIEKASNSIGLTEGQKMAKHEIATLLRQFRLLEAEIEAVNDQLTEMAKTTMEYDLLASVPGLGDATIVDLLSEVGSFSLYENPRQLIKLAGLTLRENSSGQHKGQKHISKRGRKRLRHILFKVIVPLIRHNLAFKQLHEYYTTRNQNPLRGKQSMVVLCGKLLKILHGICKKKVYFNEQLMMKDLYCLGEAA

SEQ ID NO: 147053 - protein, 410 aa, unidentified
MRRIRDRVAGLDVHRDSVVACVQLFENGEVRVEKTRFKTTLGGVRALAGWLADREVTTVAMEATGVYWKPVFYPLEGLFAELWLCNAQHVKNVPGRKTDMADAEWLADVVAHGMVRPSLVPAEPIRAVRETTRYRKTLVITRGQEIQRLDKVLQDAGIKLSSVASTVLSKSGRAMIEALIGGERDPEALAEMALRRMRAKIPELVEALEGRFRGHHALLCRQIIDHIDFLDRQIGQLDETIIEALRPFEPAIELLCSIVGWQRRTAEVFFAETGGDMTKFATAAHLAAWTRLAPANHESAGKRRSLSQRPGNSWLGRALIEAARAAARTKDTYFAAQYRNIARRRGPNKATVAVAHSMVVAAWHILTSGEPYQDPGGDYFQRRRDPQRQTDRLVRQLRDLGYDVNLKPAA

SEQ ID NO: 147054 - protein, 422 aa, unidentified
MNVVYPICCGVDVHKTFFVATLITTEGIVPKYKKRRFSTFNNEILAFKAWLLENNCRHVCMESTGKYWVPVYNLLEDSIHVTIANPKWVKAIKGNKDDTKDSKWIGDLFRIGLVPGSFIPNLETRILREYTRYRFKLVSCKSSEKNRYQNVFTVCNVALDAVVSDMFGKSASSITDYIVNSDTFEPEHCVSLLQRSLKKKADEVVASIEGFKMTAPQKQRAKMVKAHYDYLCTHIQDLNALIDTLVEPLQPAINLLCTIPGIKRDSAIIILSEVGTDMSQFNSSKRFCRWAGLTPGNNESAGKKKVRITRAGAYLKPAMVEIAHAAVKSTTFPYYKIKYERISKRRGKKRAIIAIARMILTAIFHMLSTGEPWNPVDMKQIDMPPELRVKEVQLSLRRAVKLLETHGIVPPDTIQIPKAAPA

SEQ ID NO: 147055 - protein, 373 aa, unidentified
MNYTTVYVGMDVHKKSFSLCCYTNEKEQAEYCQKVKAHYSKVLNYLDAMRFHYGNDAVFICGYEAGCLGFTLYHQLTQHHVKCVILAPTSMAKPTGKKKVKTDKLDAALIARCLAHHDYSPVHIPTDKDEQVKEYIRMRSDHKAALKKIKQQISAFCLRHNYRYEATKSHWTQAHLNWLRALKPEGLYEEILSEYLSTYDQLTDKLERIDKRIEELASDPDYQEKVSKLTCFLGIKTHTALTTMVEVGDFNRFPSAQKFAGYLGLVPGEDSSGDSRNGLSITKAGNSHVRMLLTEAAQSYTRGRSGCKSQALKARQYGNTAQVITYADKANERLRRKYYRMVLTQNKKPNVAKTAIARELSCFIWGMMTENMQ

SEQ ID NO: 147056 - protein, 396 aa, unidentified
MRVQRVWVGVDVGKAHHWAVAVDHEGRRLLSRKVANDEEAILAMVAAACEWAGEVRWAVDISSRLSALLLALLVSHGQQVVYVPGRTVNRMAGAFAGEGKTDAKDAQVIADVARMRSGFRLITTSPETIHELALLTSCRRDLASHRVRMINRLRELLVGICPALEREFEYKSRTGLVLLTGFQTPAALRRIGVKRLTDWLVRRKVRSAADIAERAVMAGRAQQTILPGEARAARLVADLAQQILDLDERVKQLDAEITEVLAGDETAEIIQSLPGMGPLLTAELIARTGDLSSYRNAGHLAAHAGIAPVPNDSGRRLNNLHRPAHYDRRLCRIFYLSAQTAMSRPGPSQEYYRRKRDEGKSHVQAVLSLARRRVDVLWAMSRDRRRYTAVPPTVAA

SEQ ID NO: 147057 - protein, 392 aa, unidentified
MSQHFRFDASRSLTALEQDSTIVAVIEMSQTKWLVAALVPGVERQPLKKFDAQEEMLLKLLHRWRCEAGKTGRNIKRIVVAFEAGRDGFWLARWLRARDVEAYVIHPTSIAVSREHRRAKTDRLDTELLMRVFLGWLRGETRHCSMVAIPTIEEEDARRPNRERQNLVTEQTRIINQIKAIFARFGLRTLRLTMRKLAEGLEDLRTAEGTSLPQNTLSELRRHLARLRFVRDQIRAVEQERLRKLAGAPAAETKSPDAMVRLIARVFGAGVETADMLVNEIFSRHWRDRKAVARYAGLTGSPDESGSRRRERGLARAGNARVRCGMIQLAWRFVRFQKKSALAQWFAARTADGRASTRKTMIVALARKLLIALWRLVTRGEVPQGIVLRPAS

SEQ ID NO: 147058 - protein, 295 aa, unidentified
MKHYAGLDVSVKETSICIVDEAGRICREMKVVSHPEDLLAVLCDPAWRLERVGLEAGPLSQWLFSGLAEAGVPAICIETRHAKAFLKAQVNKSDRNDARGIAQMMRVGLFQPVHVKTLASQKRRALLAARKILQEKALAIENDIRGLLRNFGLKVGIVGVVGFEQRIHDLVEGVPELADIMEPLLAARRVLREKFAKLHRKVLLLARDNEVCQRLMTIPGVGPVVSLAFISTVDVPARFRNSKAVGPSLGLTPVLNQSGESHRVGRISLCGDEAMRALLYEAAQVMLTRVQKWCG

SEQ ID NO: 147059 - protein, 326 aa, unidentified
MKNTVMDIDISKDKIDYCLINSESHQVIQRGEVVNDRKELLKFLNKIDFQQTSFAMEHTGHYGAMLSWVLSEKKAFYYLLNPLELKRSLGVHRGKTDAIDAYRIANYAIKNSHAHKAFELPCENLRKLKAMVSTKHQIVKISVQLQNSIKANVILSKTLDIKRMIKEQKAQLKSVKKLINSLAEQMQAVIDSCEQLKKSYRKITQVIGVGPLTAIKCISETDNFTRFINARKFSCHCGLAPFPYQSGSSIKGRTRTHYLKNANLKSILFKAATSAIQHDPQLRNYYNRKLDEGKHKLSVLNAVANKIVLRIFAVVNRDETFIKLNA

SEQ ID NO: 147060 - protein, 398 aa, unidentified
MTESSDYESVQVFIAVDVGKDTHHAVAINRSGKRLFDKALPNDENKLRSLISDLKQHGQILLVVDQPATIGALPVAVARSEGVLVGYLPGLAMRRIADLHAGEAKTDARDAAIIAEAARTLPHALRTLKLADEQIAELSMLCGFDDDLAAQTTQASNRIRGLLTQIHPALERVLGPRLEHPAVLDLLQRYPSPEKLASLGEKKLAAQLCKLAPRLGKRLAADIAQALAEQTVVVPGTNAAAVVLPRLALQLITLRKQRDEVALEVEQRVLAHPLYPVLTSMPGVGVRTAARLLTEVACRAFASAAHLAAYAGLAPVTRRSGSSIRGEHPSRWGNKALKRALFLSAFAALRDPLSRAYYTRKMSQGKRHNQALIALARRRCDVLFAMMRDGTFYTPQGS

SEQ ID NO: 147061 - protein, 429 aa, unidentified
MAYRIAGIDVHKKMLAVVVADVASEGAYQFERRKFATTPEQLRGLAAWLAEQQVEEVVMESTAQYWKPVWEALERYWKPLCEKREGARRKSGTLHLAQALSNRGRRGRKRDFPDAERLVKRLVARELTLSFVPDAEQRLWRTVTRKKYQLRCDRIRLQNQLESLLEEAHIKLSSLVSDLLGLSARRMLKAIAEGATNPVTLAALADERLRATPEQLCDALGACTELHAVYRRLLKMALEELRLIDEQISRLDQEMASLLSEHQDAVQRLAEVPGLGVDSAQQIIAEVGPTAATFPSEKCLSSWVGACPGDDETAGVNYSHRSPKGNRHMRRLLNQAANAAARTKGSIFELAYRRSVPRLGHNQAIGAIAHRQCRLIWLILHQGVRYEERGPAVNKRSKQLRTWRMIRQLRNLGYRIEPPNPQPSQASAQ

SEQ ID NO: 147062 - protein, 478 aa, unidentified
MSDIRYVGMDVHKSQITVCIIDATGRIVQRCEIPLTRGRLESFASKRLRAADQVALEATTNCWAVVEILKPRVARVVVSNAMATKAIAQSKVKTDKVDAQVLAELLRCDYLPSVWHPDTATQHLRQLTGRRASLVQDRTGVRNRIHSVLAMRLVVEPEGGLFTAAGLQWLEDALVQLDAVGQKLIRSDLALLQTLDQQIAAFDDELFQRAYQEQRVQLLLTLPGVNVTVAESVLAALGDLDRFSTPDAAASYLGLVPSTRQSANHCYHGPITKQGNAQARWMLIEAAQNVGRHPGPLGHFFRRMKRRKNHNVAIVAVARKLVVIAWHMLRNNEPYRYAQPQTTATKLANLRIRATGQRRRGGVPKGEKPAAKLPGGSVTIKALDRVYQQEGLPARQPLTPGEQRTVRATESARFVESLAHDRVVPRGHATQALPETTPTDKDPPQDDARPARVRSSASKSASSKTKIQKSPRKSAGPT

SEQ ID NO: 147063 - protein, 346 aa, unidentified
MKILALDLGKYKTVGCDYESESGAHQFKRGFTTPTGLAKMVQEVKPDRVVIEVCSIAGWVCDLLWGLGIEVQVANTSDDAWRWRKVKQKDDRRDALKAARLSAVNQLREVYIPGPEVRQWRALITYRQQVIRRRTKIKNHIRDLLLREGQLLGRGSSCWSELGIAALAAQARPFSECGPAELWRGELQLELEQLQEIQRQVATVTAQLDKLGAGDARVQLLRTVPGVGARLAEAIVALLDQPQRFRKASQVSGYIGMVPKAMDSGETERRGHITRQGSRLVRSLLVEVAWAGLRHNAWVRQTYQRLSGGKKARKKIAIVAVGRKLLVKCWAMLRDNRAWDWQPQIT

SEQ ID NO: 147064 - protein, 424 aa, unidentified
MKPKPDVEFAAFAGIDWADAKHDICLQTAGNEEREWVVVPHRPAAIDAWASTLRQRFQGRPVAVCLELAKGPLVYALQKHDFLVLFPVHPATLAKYREAFTPSHAKADPTDAELALELLLRYRAKLKPLTPPSGPMRMLLRLVEQRRRLVGDQNRISSRLADALKQYFPDVLTWFPEKDTLLFCDFLTRWPTLKQLQRARRATLLSFFHEHHVRSQSRIDERLLAIKSAIPLTDDLAVIRPNQLLVLTLVEQLRVTLRAIESFDAEIATVSQTLPDYDLFRALPGAGATLAPRLLVAFGEQRERYQSAAEIQRYAGIAPVTESSGKKCWVHWRLQCPTFLRQTFVEWAGATIPRSFWAAAYYRQQRDKGCSHQAAVRALAFKWIRILYRCWKTRTPYDESTYLNALKRRGSPLLNSIAATAKNT

SEQ ID NO: 147065 - protein, 348 aa, unidentified
MDNNITIGMDLGDLEHVVVVMDEKGKEIEMKTIRNTELSLRKFFSRYKDATVAIEAGTHSPWISRLLKEIGCTTYVGNPRKLRIIWDSNDKSDLRDARILAMVCRVEPRLLWPIKHRDRQAYADLGIIKARDTLVQNRVRMINHIRSVTKTCGGRIPKCSTPSFSKRAPSHIPKELKDSLEPLILAIDLLTQQVKEMDRQINRLCKKYSETEKLLQVLGVGPVTALAFVLTIEDPHRFTKSRQVGAFLGLTPKRDQSGRCDKQLRISKAGNTYLRSLLVSCGHYILGPFGPECDLRNYGLSIVVRGGKNAKKRAAVALARKLAVLLHRLWISDQKYNPFYKSAAQDAA

SEQ ID NO: 147066 - protein, 420 aa, unidentified
MRLRAEKIVDVVHERAAGMDISKTDAKVCVRVPSLRQGFFTKTVTTYGATTNEVLRLRADLEVAGVTVVVMEATGDYWKPFFFVLAETLNVELVNAKQARNIPGRKTDVSDATWLAELAAHGLLRASFVPPEPVRELRDLTRARTNLTEERTREFSRMEKGLEASGIKLSSVVSTLATVSSRRILDALVAGERDPRVLAGLAHVSMVKKSAQLVEALTGRFNDHHAFMVRLHLGRIDHIESTIAEIDARIEDIIGPFRIARELLATIPGISEATAIKILAEIGTDMSAFPTSGHLASWAGVCPGQNESAGRVKSTATRPGNRHLKAALGIAALSVSRSKTTYLAVKYRRIRSRTGALKAVVALEHTLLVIIWNMLKNGVAYEELGPDHYAQKNPARTRNKALNQLKSLGYDVQLTPRAAA

SEQ ID NO: 147067 - protein, 469 aa, unidentified
MCVALDYAKAQHSALICNGLGDLLKGTFAVDNNTAGATQLVRQVRQCAKERKIRPAQVFFGGEDCPAFAENFLRQLRREKFLVVRVNAWEAKQQRSNFAASSDSLDLLGIARCCLNRRGEPVRDLPAAYANLRIATRDRDQLVRDSTALTNRIHSYVDRLFPGFLTLNKSGIAPLSQASLDLMSERFSSAELSRRPVKALAQWLGRRGLEEPQVAAAQLKELAKATLGPAPEQTVLLQRTLSQLVELYRGTQTSVAMLDRELAYWLARTPGALLTSIAGIGVTLAAGWTAELGPPQQWRAVRRLCSYAGVASKTKQTGGPDKEPLAGHAQHRCNKRLKNVVLQAVEKVRLFGPEELRQTAQELEARGAHTPFAMAKRLLRLAKYLVTTGTIYRPKALMDPDTPKAALATYYQGLWEKLLPKWKGKADLKDVFAPGQPLGQWREMAQELYALELRLPQQRAAHNPGAVTP

SEQ ID NO: 147068 - protein, 351 aa, unidentified
MSCKLDSGIAVIGIDIGKNSFHVVGHDKRGAIMLRQKWSRGQVEARLANLPPCLIGMEACVGAHHLSRKLQMLGHDARLMPAKYVRPYSKGQKNDFRDAEAIAEAVQRPTMKFVATKTAEQLDLQALHRVRERLVSQRTGIINQIRAFLLERGVAVRQGLRFLRAELPRILAAPCDALSPRMLRVIEDLAGDWRRLDERIEILSSEIEALARQDKNCERLMTVPGIGPIVSSAMVAAIGTGDAFSKGRDFGAWLGLVPKQTSTGDRTILGSISKRGNRYLRTLFVQAAWVVLVRIGPKHWHRYGLKSWIEAAKKRLHHNVLAIALANKLARIAWSVLACGRAFEASKIQAA

SEQ ID NO: 147069 - protein, 366 aa, unidentified
MREQQNNKRDRATIGVDLGDRWHRFCVLGGSGRVVEEGSVANNRVALSELSSRYPGALVVMEAGCHSPWVSRYLEQAGCEVIVSNPRKTRAIYQHERKSDRRDALMLARIARMEPALLYPVRHGSEEAQQDLLRIKLRDSLVRARVGLINSLRFMLKSLGYTIANPSTERFHKVVQSALPESVAQMIAPSVQAIEELSLRIKLLDREIRILARTKYPETIWLEQIPGVGPITALYFVLKIGDPVRFERVRDVGAFIGLCPRRDQSGENDPQLRISKRGDAYLRRLLVSSAQYILGPFAPPSALRQYGLALAAGATARAKKRAVVAVARKLAVLLLTLWKNKSPYQAFLQQRKKMRTHDLERLRCIA

SEQ ID NO: 147070 - protein, 318 aa, unidentified
MANQIAVGIDISKKTMDVAIGHEQPTAIFSNDGAGHQALIEELKKHQVSLIVMEATGQYQLACACALQAAGFAVVVINPRQARDFAKAMGRLVKTDSVDARMLAELAQVLNLRPDRDRFIKPMPDQAQQYLHALVLRRRQLVRLLVSERQRKHIAHAEVAQDIAQLMDVLSKQLEILDRRIAEHLSQHQPNLAALLKSVKGVGPAMAATLMSELPELGQLKARQICALVGVAPMNRDSGQARGKRFICGGRATVRSALYMAAIVAMRHNAVIRSCYERLLTAGKPKKVAIVACMRKLLIIMNAMVKSGRPWNDQLAQT

SEQ ID NO: 147071 - protein, 342 aa, unidentified
MKITTVGIDLAKNVFQVHGVDQRGKVVVQKRLRRQQVLTFFTQQPPCLVGMEACGGAHYWARRLQAQGHTVKLMAPQFVKPYVKANKTDAADAEAICEAVTRPNMRFVPIKNADQQAILSLHRARQGFVRARTAQANQIRGLLAEYGITLPQGICHVANRLPEIVEDAANELPGLFRELLQRLMIHLKELDHQVQELEEQIETWHRGNRASQKLAKIPGIGPLTASALSASIGDAKAFRNGRELAAWLGLVPRQHSSGGKPLLLGISKRGDAYLRTLMIHGARSVIRVARRKSTATDRWSTDLLERRHTNVAAVARANKNARIVWALLAHDRDYRADYELAA

SEQ ID NO: 147072 - protein, 346 aa, unidentified
MNSNDPRYKLYLGVDTHLELHVATLINELGQVVKSKSFNVDLAGYRELLAWCKYYGFLQKAGIEGTGSYGAELTKFLNMNGIDVYEVMRPNRMERRLKGKTDVIDSENAARSVLSGEAAVIPKSHAGPVESLRSLLITRNSAVKARTQAMNQIRALLVSGPDELKQSLYQPKPSACATACLARCSNSSEPLMISLVLLAQRWNFLNDQVKSLDNALKKLTLNTAQSLVSRFGVGTNVAATLLVAAGDNANRLKKESSFAALCGVNPIPASSGKTTRHRLNRGGSRSANNALWTVAMVRMRSDPRTKDYVARRTAEGLSTKEITRILKRYIARELFPLILKDLASLS

SEQ ID NO: 147073 - protein, 317 aa, unidentified
MTTPCGAYVGIDVGKTWLDVALWGSDTVWRVSNDDDGVAKIMARIAGMEPQLIAVEATGGYEQLLVQSMLLNGLPVAVANPTRVRALSKATGKLAKTDVIDARLIAEYAFKIQPESLAPKEANEIRLNALVTRREQLVEMRTAEQNRLGTAQNSLQADIRQHIEWLSSRIEELEAQINELVDSLPEWREQAQRLDSIPGVGMITAVTVLAEMPELGQLDRQKIAALAGLAPFNRDSGQKRGKRRIFGGRKGIRRVLYMACLSAKKYNPVIRSLFERLMKKGKLFKVAITACMRKMLTIMNAMTRNQVNWRAPAPIPI

SEQ ID NO: 147074 - protein, 393 aa, unidentified
MKGPIVSIDVSNGNSHFQCFTQRGTKMGKVHRISHTVEGFNFLKSKIEELEKKTNEEVVAVYEATGVYTKPLERFLEKNEIKQYSISPLQSAKQRKTDKKDPESIAEVYYIKELREDEKEADLYHELRTANRVYEDCLVHLRKYKVTFQSHLSIVFPGYMKLFQDGYSQISLQLLEMYPHPDRLKNKQPEKVAKKLNKHTDHSFEVCLKTAEKAIAFANKTYPGCDKEDAWVAVLVDDIHHLQDTMEEAEAKLDKIIELAKTTPYYSIILSIDGIGPNLASRIIAEFGDISKFKTRGAMVAYVGNDPNRAESGDIEGYHLSISKKGNKRLRCILYLAVTCSIRSRKENPINAFYQKKRQQSTPLKSKAAKVACITKLIRTIHGMCKTGTVFTS

SEQ ID NO: 147075 - protein, 326 aa, unidentified
MSGHGKELLNRSLTRKKFAELLGKQNSALVAFEGCASAHYWARTAVRLGHEVKIIPAKAVTPFRQGHKTDSNDALAVAEAARRPNIKDAPMKSAEQQGLQAIQRARELLIHECVALSNHMRGILLEFGITIPQGFASLLRMLPEILEDAENELPDLYRPTLNRLHQRMLNLRVDIEAMTKEIEQLVKAHPVCQKLTALEGIGPICALSLYAVLGSGKAFAKSREFSAYLGLTPRQFSSGGKTNIIGLSKKVGNRRMRALLIQGALTYVYRMKEPKCAKDRWLRDLIDRAGPRRAAVALANKNARTAWALITQGTEYQRLQPLEVAA

SEQ ID NO: 147076 - protein, 335 aa, unidentified
MRFYQQQHRFYCGVDLHARTMYLCVLDQAGQPLLHREFPAQAGAFVEAIAPYRDGLVVAVECMFAWYWLADLCAEHGIPFVLGHALYMKAIHQGKSKNDRLDAAKIAGLLRGGLLPQGYVYPKAMRATRDLLAHLVNTNSQYNLPPLSKKLVYPANRGELNLADRFTDLSAKKLVECDLALIDALDAQIHDLELHLVRTAKVDDPQAYARLQSISGVGKILGLTLLYEIHDIARFPEVGNFLSYARLVRPGHESAGKPQGFGNKKIGNAHLRWALGEAACLYLRCSAQAKRWQARMHKKHAPGKTLGILAAKLGRTVYHLLRTKTVFDERRFFAS

SEQ ID NO: 147077 - protein, 417 aa, unidentified
MINAVLERCAGIDIGKRFLMACVMLGPADGEPRTEIRKFGTTVSELERLKAWLQSAGCTHAVMESTGAYWKPVFNVLEGTVIVILANAQEVKARKGHKTDPSDSAWLAHLLRHAMIRPSFIPPREIRELRELTRRRKQLLNAGTAERNRLQKVLEEANVKIGSVLSDVFGVTGQAILEALLEGKASAEEMAHLARGLAKRKIPQLIEALRGHRLSDAHRFLIEHCLQHMGFLEQAIEQLEARILQQINRANLTRPFELLQTIPAIKQAAAAAIVAEIGSSVDPFPSPKKLASWAGLCPGNNKSANKTLGTNCTKGNQWLRTTLAECAWAASMQKESSFQVRFKRLSPRIGRRAAIVAVAHAMLIAIYDVLQTGQPYSKDAARANPNQKHRLVRHHFRCLQRLGVKVTIESTMSEAPG

SEQ ID NO: 147078 - protein, 454 aa, unidentified
MRHGKKKQKPGQVQEDMPVINSNAAGIDVGSAEIWVSIPPDRDEEPIRRYATFTADLYALADWLKQRGIESVAMESTGVYWIPVFEILERKGLHVVLVNAKYAKNVAGRKSDWLDCQWLRLLHTFGLLPSSFRPAAAIATLRCYLRHRQMLIEYASAHIQHMQKALTQMNLQLANVVADITGDTGMRIIRAILGGERDPQRLAQMRDYRTKNDEATIAKALQGNYEPQHVFALKQAVELWDFYQQQRTTCDQEIAQYLHSLDSAVDVDSHPIPPPRAPKKRRNSPGFNCRLETYRILGVDLTQIDGISESSALTILSEIGTDWSRWKTEKHFASWLTLCPNNKISGGRILQRRTRKSSNRVHDLLCVCAQTLFNSRSALGAFARRMRSRLGPQKAIVATAHRLALWIYRLLRFGKTFVDTGQDAYEQHYQQRKLKTLTRQAKHFGFQLVALAES

SEQ ID NO: 147079 - protein, 416 aa, unidentified
MKIVRPICCGMDVHKNIIVATIGITNKKTRITEYIQETFSTLNPDLLNLKQWLINHKCFDACMESTGKYWIPIFNILEDEINIYLTHPKYVKAIKGKKTDKKDSKWICDLFKHDLIKFSFIPPKEIRALREISRYRYKLVGMRSSERNRYQNCMTVSNIGIGSVFSDPFGKSAQSIMKEVLESDIIEDEKILKCIHGSCKNKDKILDSIKHCNIETDQRFKMNESMIHMEELQLHIDNCEIELMKRAAPMFDQFMHITQLPGISTLSAILIISEIGVDMKQFESDKQLACWAGLAPANNESANKKKSVRISKAGQYLKPLLVQCALGAIKDKEGYFGIKYSRIKKRRGHKKAIIAIARMMLVSIYHMILTGETFNPSDYESFRNPNPPIKQQVLTEESAIEFLKKSGFDVSKLTKP

SEQ ID NO: 147080 - protein, 348 aa, unidentified
MTLYIGVDYHPYQQTVAYWETGDDEIRYRQFLHSDKAALKRFYGGCGKGSVVGVEATGSLQWFERMLFDNGMELLIGDPRLIRRKALSRHKNDFRDAETILDLLMNDQFPRIEPRSEHSQLMLQMLNYRHSLIGHRTSIANQLQAFARRKGLAKFAIKSKLARQRLVAAVEGETEALLIESRFSLFEELSTEIKKLEDKLDEEANKNEKAKLLLTHSGIGKLTAMAIVHTLGDVRRFRKSEQVVAFVGLDPLEKSSGEKKRIGQISKHGSRLLRFLLGQAAQVSRDTRIKFHYSQVSRRRGKPKAKVAAARKLLVNCYLMLRDNINYQEFTRRGEVGLCGRTLERKID

SEQ ID NO: 147081 - protein, 329 aa, unidentified
MDSAGVDVGASQLQVTLCREGRLSRRVFSNTPCGRKALGAWLSRAGTTTRVCLEATGSYGLDLALLLSGLGSIQVLVANPRAVRQFAAALMQRNKTDVIDADIVQQFAARMPFQPWSRPSQSALQLRTIGRRIAALRRICACEKNRRHAAGLTQYTPPSVTRSINRIIRTLEREICSLLEQALSLIRSESSLQARYQLALTAKGIGPLSAVRLLAELAYLPSDMDPRQWVAHAGLAPTFHRSGSSVEKKPRVSRQSNRFLRSALFMPALAARRHDPALRAFADHLIRAGKTPLQALVAVMRKLLIGLHAAFRRQEPFRSEKLFPAFQLS

SEQ ID NO: 147082 - protein, 340 aa, unidentified
MNNGLKLLGIDIGKNSFHLIGHDAGGHQVLRKCFNRNRLLQFAAQIEPCTIAMESCGGSHWLARKLASLGHRVKLIAPQHVKPYVTGNKNDFIDAEAICEAASRPRTHYVAAKTVEQQVLSVQHRLRESLVCHRTEAINRVHGFLLEFGIALPATKAAIAKVPELIDNSRSDLPLQLKRIMEHLLEDIRRLDAEIRACDVQIKQQLAQDDAGTRLMTIPGIGPITASALVADLGDASNFKTSRDLSAFLGLVPRQFSTGGRPVLLGISKRGDRRMRTLLVQGSRALMIRIDRREDALGQWVRNLLARKHPNKVACALANKLARIVWAVLRRGGTYNASMI

SEQ ID NO: 147083 - protein, 354 aa, unidentified
MTSTKYIGMDVHKESISIAVMNAAGKIVMECVIETKANMILQCIDGLRGDLHVTFEEGTSAAWLYDLLKPHVTELIVCDPRKNASMREDNQNDKIDACRLAELLRIDHLTPVYHGEHGLRTLKELVRSYLTVTKDLARVKTRVKAIYRSWAIPCDGKEVYAACHRAEWLEKINELGVRRRAEFYYQELDGLRVLRQGVRRELLAESKKQKAWKRLCQIPAIGPIRAAVLLGILQTPHRFRTKRPLWKYSGLAIETCSSADHRSINGQLQRSKKNSVRGLNRNCNHDLKNLFKGAAVIASSKAGPFQEFYAALLAKGLRPEMARLTLARKLATIVLIVWKKGVCFDAQHLKPQTA

SEQ ID NO: 147084 - protein, 371 aa, unidentified
MSPRNAPRPAAVYGVDIGKNIFHVVGLDSGGEPVQRVRFRRDTLMKFFERAAPAIVGMESCAGSQWIARRLQALGHKVRLIPAQFVKPYVKSNKSDIIDAEAIAEAATRPTMRFAAIKSEEQADLQAVHRVRDQMIGTRTRLINQMRAFCLEYGIALRQGAGLFKLDLPLVLDDLSNDLSPAMRKLLVDLFADLRQLEQRINDVTREIAAIADREDVARRLMTIPGIGALGATALLAAVGTGCQFQKARDLAAWLGLVPREYSTGGKQKLLGISKRGNRYVRKLLVHGARSCFRHLDRNRDRLGSWLDGLQSRMHPNKAVVALAAKMARIVWVVLTKPGALYERRTLLSPDAPARLQGSGIVMTKQWISMP

SEQ ID NO: 147085 - protein, 320 aa, unidentified
MSAAKRSPWLSIARDSQENPVNSRTPPRDVALINRLRKASVSHVCLEATGLYHLDLALALDGARLDLMVINPKAAKRFAQAMQTRIKTDAVDAAVLAEFARRMPFTPWQRPEAPALAIRACARRIAALNKLRTQTKSQLHAAQQTDTTPDFLIADLQHSIAQLGHLRQQVLALIAADQELQHIFDLLVSVTGIANASAIQLLGELLVLPDDMSAKQWVAMAGLDPCQHQSGSSDNKKPRLSKSGNRYLRIALYMPALSAARHDPNVRAYYQHLIENRGLKKLQALCAVMRKLLHAIHAMLKNRTPFDNRRFYSPTETGAD

SEQ ID NO: 147086 - protein, 482 aa, unidentified
MKKKNIFQNQSQEILTLFEMAKDRSKVMCISMDYAKKDHMVLFCNGNGKIIRKPFSIKNSLDGKHYLVDQVTKSCRHHGINLQHVLFGGEDCGSYADNFITALRSDNWLVAGVNAHDAKTYRENIQASTDCLDLLGISKMLLNCRGNCSPAQSGIYLDLRMLVRQRRKLVKMATGIKNRIHTTVDRIFPDFLNENKSGIAPFSKCSLLLMEDRFSAPQIHRRQGPTLIKLLSRQGVQRSDHCVKKLQKLAAQALKPPEQHIATLQISLKQQIKLFTCLQESIQQLYTEIAHNLAQTQGAFLTSIQGIGIVLAAGVCAEIGNPSKQKSLGNIVSYSGIIPKVKQTGGIQGKPKIKKVGKRCNRILKDYVVQSASHMGLHGPEDLMSDYKRRDAQGQHADFGMARRYLRMAMGLMRTYQTYLPKKLRCTKVNMKERAAYYLMAWPKLREKWHKASSLDIAFDKDMPLGQWHNIIQELYGIELKL

SEQ ID NO: 147087 - protein, 398 aa, unidentified
MTESSDYESVQVFIGVDVGKDTHHAVAINRSGKRLFDKALPNDENKLRSLISDLKQHGQILLVVDQPATIGALPVAVARSEGVLVGYLPGLAMRRIADLHAGEAKTDARDAAIIAEAARTLPHALRTLKLADEQIAELSMLCGFDDDLAAQTTQASNRIRGLLTQIHPALERVLGPRLDHPAVLDLLQRYPSPEKLASLGEKKLAAQLCKLAPRLGKRLAADIAQALAEQTVVVPGTNAAAVVLPRLALQLITLRKQRDEVALAVEQRVLAHPLCPVLTSMPGVGVRTAARLLTEVACRAFASAAHLAAYAGLAPVTRRSGSSIRGEHPSRRGNKALKRALFLSAFAALRDPLSRAYYTRKMSQGKRHNQALIALARRRCDVLFAMMRDGTFYTPQAS

SEQ ID NO: 147088 - protein, 353 aa, unidentified
MKKYIKKCYEGKNIYVGVDVHKKSYSVNCICDGAVVKKDTITASPAGLVKYLQKYFAGASIYTAYEAGFSGFYLHRCLIENGIKNIVVHAASIEVSARDRVKTDKRDALKIAQQLSDGRLKGIHVPDEQREHYRSITRLRDKFMEQRKRLGNQLKSLLAYYGLMTTDDRKISKKWIKEVLELDVAEEIKYCLKMYAEEWLHITDKLKEILNKLSEQAAEDKVVDGMYRTVPGIAALSARILANELGDMQQFSSAKGLYSFTGLTPREHSSGEHRWLGHISHQGRSILRRILVQASWRLIKKDKRMGLFFEELSKRAGKKRAIVAVARKLIGCIRASFLTGEVYVVNKRVAQAS

SEQ ID NO: 147089 - protein, 359 aa, unidentified
MSKITTIGLDLAKKVFHVHGVDVAGNVVVARRLKRKEVLAFFAKLPPCLVGVEACGSAHHWGREIAKLGHTVRLMPPRYVKPYVKRGKTDPIDAAAICEAVTRPTMSFVPIKGVEQQGLSMLHSARSLLIGQRTQLINAVRGHLSEFGIVAERGLLGLAELAAIVRDERDQRLPATARAALMVLVRQIEAISAEIASLDSILMKENKASELGSRLDTIPSVGPVIASAFRARVTDAKLFENGRHLSAWIGLVPENDSTGGKLKQKGLSKKGDRYLRSLLVNGAMAVVRQAQKRPDKHPWVTKLLGRMSAKQAAIAIANKTARIAWALMVHGGVYETGHRAPPYRAQACAAARIRGWAMG

SEQ ID NO: 147090 - protein, 385 aa, unidentified
MTQTVDIAAAVDYERTLVLAIEVSNESWVLAAQVPGLPHTKAKRTINPDAESLMAAIAGYRARATASGHSVERVITVYEAGWSGFWLARWIMRHGMEAYVIQPSSVPVDRRMRRAKSDGIDAELLLRTLLAWLRGEPRVCSMVPIPDEADEDARRCVRERTELISERVGLTNRIGAVLATLGVSDYNPLLRSRHRRLTELRTGLGEPLPRNAQAKIERLLARLELVLAQIAELERERDAVVEAEACDKASEMIQQLTNLRGIGVQSATVLVREAFVRRFANGKALGSYAGLASSPYSSGGIDREQGIGKAGNRRVRTVMVELAWLWTRYQPGAAQVRWFRERVGSTGRRARKIMVVALARKLLIALWRFVIDGVVPEGAILKPAA

SEQ ID NO: 147091 - protein, 388 aa, unidentified
MQVSTIGLDIAKNVFQVHGVDNHGRTVLRRKVSRGQLVKLFAGLEPCLVGMEACATAHHWARQLGALGHEVRLMPPAYVKAYVKRNKNDAADAEAICEAVTRPSMRFVPIKSAEAQSLLMLHRARHLLVRQRTAQASAMRAHLAEYGIVAARGLSRLRDLLPVLDADAGIIPELARQTLLLIAQLIEALTLQIRKIDTELLRWHRNSPESQRLETIPGIGFITATAMAATVRDARAFRSGRQFAAWLGLVPRQNSSGGKDRLGGISKMGDRYLRHLLVVGATAVVRYTRRKTTAISLWANRLLERKPARLVTVAVANKMARTPRSQTHNRFGQERTTSVMPIGQAGEQDNLRDSTRIERDSLMRTRSTDPIMASGLVPRATGRTHECT

SEQ ID NO: 147092 - protein, 365 aa, unidentified
MIYAGIDVAKYEHHLSIINSEGKVLLVDKQFLNNREGFKTMQRILKNALVTDNGIEIGLENTGHYGYNLIAFLRKHHYPVFAYNPLLIKKYIQGSTLRKTKTDSQDALKIAQKLRADIDKTSFETDDSMIELKSDTRYLEALKYKRAKTKLAYINVLDQTFPELTPELGASSTKYRTWVLTLLKKYPSTEKLAHGQIATITAIISKYSGKKYGEAKAIKLRELARNTIGQCSESLSFQLLQLIDALRFESQQISEAEQKVDTIMDNIKTPLLTVPGIGNTLAAIILSEIRNIDYFTSPNQILAFAGAEPSISRSGEQQGDYGHMVKHGSPELRWASSQPLAMCSVLTNHAPVLSQKKFPRVNRIW

SEQ ID NO: 147093 - protein, 478 aa, unidentified
MKKHKKTKPKSEASKPLHEPEPDAAGIDLGATEIWVAVAPDRCEMPIRRFGAFTEDLMAIVQWLLACGIRTVAMEATSVYWIPLYQLLADAGIAICLVNARHAKNVPGRKSDVRDCQWLQYLHSVGLLRASFRPEQDICQVRSIYRFRQNLLTQGTQHLKHMQDALDQMNIKIHHVIDDLSGVTGMAIIEAILNGERDPLRLAQYRDRRIKATEETIVKSLEGDWRSEHLFVLKLAWENGRQVQEQIKKCDYQLMEYTRQLEASTIVAKPIVPVKIVSLNVKPGVTELQLAPAAAVRPAKPRKKTSKNEPDGPWHQELHRFFGVDLTLIPSISVLTGITLMTELGNDLSAFKTAQHFSSWLCLCPDNETSAGKVLHRRTRRSQNRVRQALRMAASSLHHDKSYLGDKYRRLRTKLGAPKAITAMAHQLARIIWYLITHQVAFDMSIFATLEQAHQKRRLNGLNSAARQLGYQLTPIAA

SEQ ID NO: 147094 - protein, 364 aa, unidentified
MERVQYVGLDVHKKSIEVSVLNGRNAAPEIEKALPNEGAKIKSFFDRLKMQGSVIACYEAGCIGFELQRILESIEIPCIIAAPGLLPRRPGERVKTDRRDARKLARNLRNGEVTPIHIPTREDEAVRDYLRMQGDFKVERKKTKQRLLHFLLRHNLIYTDGNHWTGKHEKWLRALEFDNPGLKETFDEYFFHLKELEEKIGRMKEKIEEIALRDSYLEPVAKLKCLKGIETLTALSMVVEVGDFRRFMKAEEFMAFLGLVPSEDSSGDKRKQGGITKAGNSHLRRLLVEASWHYRFDRGVGKCLVARRKGQPVCVVSYANKAGKRLSRKFNRLIFRNKKSQVAVTAVARELAGFVWGMMVGQTA

SEQ ID NO: 147095 - protein, 343 aa, unidentified
MDHFAGLDVSVKDTSVCIVDDTGRIVREVKVASEPEALLVVLRNPAYHFKRIGLEAGPLSQWLFSAMAEADLPVICVETRHMRAVLKAQINKTDRNDARGIAQMMRVGLYRLVHVKTLRSQKLRMLLTHRKLLQSKAIAIDNDLRGTLRNFGLKVGMVGAARFEARIKELIENFSDLAVLIEPLLVVRRALREQLDILHRRLLAVVRDDDVCRRLMTVPGVGPVVALTYRATVDVPARFRKSKSVGAVFGLTCAKYQSGEIDRSGAISRCGDEMMRTMLYEAAQSMLFHSTRWSWLKAWAMQVARHRGMKKAVVALARRLAVIMHRIWVDGTEFRWTREAVAT

SEQ ID NO: 147096 - protein, 313 aa, unidentified
MPVSLSKSIVGVDVAKNELVIYQFDGDLLEEIPNTKTSIKQWLKALSGTVAIAIEATNIYHLDFADLAYEAGCTIYMVGGYELKHYREGVKIRAKTDALDAKLLARYLKNEAEELRPWTPPSPLYRQLLSLFRRRAALVQARVGLVQSWSNEPLLKAAFAEQVKSMQQLETLIEKTINDQLKEAGLLGQLKRCLKVEGIGFLTGARLITAFQRGDFRNADAFIAFLGMDLRVAKSGQKDARRSLTKRGDPEARRLLHNAAMSASRTKAWKGYYEEQRARGFSTTQALVMLARKLARVVFALLKGQSEYQPKAS

SEQ ID NO: 147097 - protein, 346 aa, unidentified
MSYYVGLDVSVKSVSICVVEADGAVIARGEVSSDPDQIAAFLFRHAPDAERIVQESGILSIWLTRELEKRGLPIICIDARLAHKALSGRLNKSDRGDAEGLAHLARTGWFTQVHIRSEASERIRVLIGTRDRLIKMRKDLEGHVRGVLKVFGICMSGVRRARMRQGFRDQLTEAGAADPAIGVMVDMFNPIHLALCSAADAMDVELRAIARGSDLAVRLMTVPGVGPIVALAYIATLDDAARFKKSKDVGAFLGLTPRRYQSGEMDWSGRISKCGDRDLRRLLYSAATTLITQVKKPSPLLTWATRLNERKGFKKAAVAAARKIAVIMHCIWRNDAVFDPNMEGVA

SEQ ID NO: 147098 - protein, 391 aa, unidentified
MIYVGIDVAKDKHDCIIKNSVGEVVCKTFTIKNNLDGFNDLYQKIESVMEDVSKVKVGLEATGHYNYNLLGYLVDKGLPTFVINPLHTNLYRKSLSLRQTKTDKVDANTIASMLMSDVNLKSYSDTSYHNEELKSLTRYRFDKVKERAKLKTSISRLVCILFPELEKLVPNLHMNSVYSLLYEFPGAKQVASAHLTRLSNLLAEASNGHYDKNVAITFREVARASIGSNMPAKSLELKHTIKLIRELDSEIDEIEGEIKAIMDTINSPILSIPGISYRMGAMIIAEIGDFDRFDSADKILAYAGLSPSTYQSGQLDNCHPRMEKRGSRYLRYALFNATIYVCHWDPTFNAYLAKKRAEGKHYYVAVSHAAKKLVRLIYQLEKSHQSYNKVA

SEQ ID NO: 147099 - protein, 377 aa, unidentified
MSKVRFIGLDVHADTIAVAIAEPGGEVRSLGVIPNRPESIRKLVKKLGPAAPLRVCYEAGPTGYVIYWQLTALGVRCEVVAPTLVPKKAGDRVKTDRRDAEKLARCYRAGDLTAVWVPDAAHEALRDLVRAREAAKKDQLRARHRLGKFLLRHGRRSPTGMRAWTQRYLAWIKTAVHFDQPAQEATLLDYLHEVEHVAARIERLERAIDTAVQTAPVPMRAVIDALQALRGIALVSAVTIVAEVGALSRFARAPQVMGYSGMGAREDSSGGRTRRGGITKTGNAHLRRIVIEAAWAYRHRPAVGGALRKRQAALSDEVKAIAWKAQHRLHGRYRTLLGRGKCQQQVVTAVGRELLGFIWAIGVTVETKQQHTPSVAA

SEQ ID NO: 147100 - protein, 301 aa, unidentified
MEHFAGIDVSLKDSSICVVDAAGRIVREAKVASEPEALVAWFRRLGLAVTRIGLEAGPLSQWLHAGLTGAKFEAVLLETRHVKAALSAMVVKTDRKDARGIAQLLRMGWFRPVHRKSADAQEVRALLVGRKLLQNKLRDVELSIRGILRGFGLKVGEVSKGRFAARIRELVAGHAMLETVAGAMLAAREALLSEFMRLHRRMLAIVRADAVCRRLMTMPGVGALVSITFRTAVDEPGRFRSSRAVGAHFGLTPKRYQSGETDVIGGISKVGDAMVRTALYEAANAVLSRPTRFSTLKRWAT

SEQ ID NO: 147101 - protein, 376 aa, unidentified
MNRIVYVGIDVHSTNFTFCSIEPVFGGEDKVFGIAQMAPGYQSVLKYIEQIKKNLAYDAEVICGYEAGCFGYTLERQLSSRGVRCLILAPTTMRSEKGQRQKTDRRDAKMIAENLANGTFSPVYVPTRDDEQIKDYIRMRDDHRKALKKIKQQINAFCLRHDHHYSGKSRWTISHVKWLKGLELDTLDREILNEYYQTYEYHVDRIELFDRRIEELASEEAYAEKVKKLRCFLGIETVTAVALIVETGDFNRFRKGNVYAAYLGLVPGEKSSGDNYRQGGVTKAGNKHLRSLLTEAAQSICRGTIGHKSKALKSRQQGNSSETIAYADRANERLRRKYYRMIHHGKKRNTSVAAVSRELACFVWGMMTDNTDAALG

SEQ ID NO: 147102 - protein, 342 aa, unidentified
MHKPSEVFACCGIDVSAAQLVVALESIGGGWRQRSFPNRTRGHQALILWLQKDGTRVRVCLEATGLYSLDLALALHAASGIEVAVLNPKVVNRFAATLCRSKTDPADAQVLAEYARRMPFQPWHPPQAAALELRTITRHIAALTQQHTRQSNRLHAASASTTGSRWVRQDLKRSLRDLQRRVEKMRRAALALLEQDVELRPRFALLLSMPGIGEISALHLLGELALLAPGLTVRQWVAHSGLDPAHHESGTSVHKRSRISRAGNRYLRRALYMPALVAVRHDPHLRAFYQSLVARHKAKLQALIAVARKLLHAIFGMFRWQSTYDGSRLLPNIELPGLAVVA

SEQ ID NO: 147103 - protein, 312 aa, unidentified
MTDIICGVDVSKRWLDAHVAPSAAAGRFSNDAAGIDELGGFCRRHGVQLVAMEASGGYERTAFLLLWEAGIPCGMTNPRSVRRYAEAMGTLEKTDRLDAAVIARFAIAKGLKPTSPPTPIQQRLKALVVRLRQVTDDLTVNKQRRSSTIDAEMVVSLDEVIGVLKRQARALEGEIASLIDDDPLWSHLDAALRTTKGVANRTVARLFAELPEIGIYSNKAVVKLAGLAPLANDSGARTGQRHIRGGRAGIRSILFLIADIVRRFDPSLADFHRRLTAAGKKKMVIRIALARKLLVRLNAKAREARACYVPAT

SEQ ID NO: 147104 - protein, 495 aa, unidentified
MAVDLEREKVAKARTPLERLQEFLQTGPDLAINSSKESYMPKPRDKANRVRTVSKQELENLPLLNPDAAAIDIGSAQHLVAGPPGRDTESVRSFGAFTADLHALARWLKQCRIRSVVMESTGVYWIPAFQILEQYGLEVLLVDARAAKNLPGRKSDVLDCQWLQRLHSFGLLSGCFHPAAEIVPLRAYLRLREELVRAGSQSVQHMQKALFEMNIQLANVISDITGETGLAIIEAILAGERDGKKLAQLKHRRIQASKETIAKSLEGNWRVELLFALQMALDTYQFYQQQIAACDQRIAQALAKLPTRQPAAQSEPASQTDQSLKAQKLTPLQAELIRIAGVDLMRIDGIGEQIAQVILSELGTDLQSNFKSEKHFSSYLGLCPGTKISGGKVLKRKSRKVAHRVATALRLAARSLHSSDSALGANFRRLKARLGAPKAITAMANKLAKLVYRLMVYGKDYFDTGAQRYEQKFRLQQIRRLQKQAKMLNLKLVPV

SEQ ID NO: 147105 - protein, 347 aa, unidentified
MTQAQIYIYGIDLGKNWFHLVAMDRMGHVLTKQKLTRSQLKQFISTTPPCRVAFEACPGSQYWGRLFQQAGFEPKIIPAQFVKPYLKSNKNDFNDATAIAEAGSRGTMRCVPLKSHEQLALQATHRVRQRFIVERTATVNQMRALLLEYGLTVPVGRKVFERSLPTILEDAENGLPDFIRALVLRLRERWQQLDIQIDDMSLMLGQASSASSLCQKISTVPGIGPIVSTALIAAIGNGSQFKKARDLSAWLGLVPRQYSTGGKSSLGGISKRGNSYLRQMVIQGTKALKIHMKRDKSSLGEWVARLEAGHHHHVVLIALANKIMRICWKVLTSGRDYQPYPNTSSAV

SEQ ID NO: 147106 - protein, 340 aa, unidentified
MRQLYVASDLHGNNNLMGIIDSEGKRVFKKKLPNDPLLINDTLKPFKEEIVGIVVESTYNWYWLVDALMDEGYKVHLANPAAIQQYSGLKHTDDKHDAFWLAEMLRLNILPEGYIYPKEERPVRDLLRKRGHLVKLRTSLILSLENIISRNFGRKLPVNDVKGLRKDSVTPLFEGKEDLALAGRVSKETIDFLTHQIRQIEGVVEKRIQLKEAYRYLLTIHGVGKILGLTIMLETGPIGRFETVGDYTSYCRKVPSDRISNGKRKGSGNRKNGNKYLSWAYAEASDFARRGHPESRAYYNRKMQQSNPAVAHSALSHKLARAAYYIMRDQVAFRPDKLFG

SEQ ID NO: 147107 - protein, 408 aa, unidentified
MLFVGDDWAEDHHDVEIVDDTGGRLATRRLAEGLAGLTGLHALIAEHLPDPGPDAEAAQVKVGIETDRGPWVAALVAAGYEVFAINPMQVARYRQRHSTSGAKSDAADAHLLAEIVRLDREHHRPIAGDTPLAEAVKLMARAHQTMIWDRSRAVLRLRAALRDFFPAALEVFDDLDAPEALELLSRAPDPDRAARLSKAKITAAFTRARRKDVEARALHTQQIFRAPQLRQPPAVQAAYAVIIANTVRLIDEFNRQITELGEVVSEHFGRHRDAELYLSQPGLGSILAARVLAEFGDDPQRFTDAKARKNYAGTSPITRASGTRRIVLARYARNRRLGDAVHQWAFCAMRGSPGAKAYYKTMRGRGIGHQAALRQLSNRLVGILHGCLKTGTLYDENTAWAHHISAAA

SEQ ID NO: 147108 - protein, 352 aa, unidentified
MSIIAFDCHKHYTFARIEDENGKNTQEFRIEHRRGNIAGFLSGQQPGSPVAIETIGNWYWIVDEVEQAGMVPQLVHARKAKMMFGCINKTDKLDAKGLNVLQRSGTLPTVWIPPVDVRDKRELPRTRMVFAVQRTRLKNRIHSALDKYGLQDAFEDISDIFGTTGRRVIGCVMEQLPPYTRYTTGLLLEQLDQTEQKIQAIEVQMKELFKETEQHALLKTMPGVGFILAVVILQEVGDIGRFGSAERFASYSGVTPRVHASGGKVRYGSLRPDTNHYLKWAFSEAGNSVAVNRNRFPARHVSGLYNRIRSRKGHAKAIGAVARHLAESTYWILTKNEVYRDRGVLKVSPTGT

SEQ ID NO: 147109 - protein, 390 aa, unidentified
MPRQKNHRRRALSLSSGRAMETETFVGLDVHRKSVVATAIDGDGRPIAQKKIGPIDSELTEFLDSLPGSKHVALEACSMWEHYFDAARVSGADVVLSNPLKTRLIAEATIKTDKVDSEALATLLRLHSLPTVYTPTSELRALRLLVRDRVFFSRKVHDLQNHIYYFLLRRGIQYEDGVLRHRRRREVLRELRLPEVDRSLDALDHLQETVKSLERELHQAFLATPEAQLLASVPGIGELTAVGLVAFLCPIERFSNIDQLSSYAGLAPTTYQSADRRYQGHLKRDSNGLVRWLLIEASWTHRQRARSSDVARVGRRIGRRCGASRGAVAAAHKLLKIIFAILKERRPYLPHAPERTTAMQQLQGPSRVAAVKRVRRAALGSSAADCLSAH

SEQ ID NO: 147110 - protein, 339 aa, unidentified
MRLYAAFDLHSSNSYLGISDEKGERIFKKKLPNDPAKIKEALRPFKTNIEGIVVESTYNWYFLVDLLREEGYRVHLANVMKTQQYSGLKYSDDKHDAFWLTEMLRLGILPEGYIYPKEERPIRDLLRKRGHLVRLRTSLIVSLQNIIARNLGSRLKANDVKVLTTDRVTPLFQGNEDLALAGKVSKEAVDFMTRQIKAIETSITERIKLSNPYDRLLSIPGVGKILAFTIQLETGPIDRFQKVGNYVSYCRKVPSGRFSNDKKKGTGNRKNGNKYLAWAYSEASDHARLVHSESRRYYQRKLQKTNAAIAHNALAHKLARAAYYIMRDGVIFMPEKAFA

SEQ ID NO: 147111 - protein, 350 aa, unidentified
MIIIGADYHPAFQQIAFVDTETGELQERRLQHREEAEKFYRDLAAQGIKMRVGMEASGQARWFERLLAELNVELWIGDAAEIRRKRERKQKTDRLDAQHILRLLLKDDFPRIWVPSWENRDLRQLLWHRHRMVQARTRIMNQLQAVALNEGLRCKKRLWGEAGREQLEAFRLAPWASRRRRDLLELLDRLNPTITELTQTIEQEVEKCPEAQRLMTHPGVGPLTALAFVLIIGTAERFQCGKQIASYLGLVPLEESSGNRRRLGHITKQGNALLRFLLVEAAQVSARSIPEWRNKYFHLAMRRGRKIAKVAMARRLAVQMFWMMRKGWDYEQVRKFGSHAGQPGNRHGVQ

SEQ ID NO: 147112 - protein, 334 aa, unidentified
MKYQHVVGMDIAKDSVQASCFDGTTFFDFSFPNQEKSFLKKVQKSIPKSDPSHILFVMEATGVYHLKLATALYKEGYSVAVVNPFIIKKYAEMLLKRAKTDRNDARLIAQFGFYQEVTLFAPKENLAEEITQVLKGLDQLKKERTNLKNYQEALTHHNEINSVVRDIYQKQLKEVEKAIKTLEAEAKRLVCQYAPKEYQLLLSIKGIGKCSATALLGFLQKMDRFSRGKEVASFLGLAPQISQSGKDKGKAWLSKKGNGYLRRLLYLAALSASRSNAQCRELYQRLLAKGKPKKVALIAVANKLLRQAFAVLKSGCPYDPHYLKLKSNLEVVLT

SEQ ID NO: 147113 - protein, 412 aa, unidentified
MKVVHEICCGIDVHARMLVACLILANGEKEIRTFSTMTDDLLRLRDWLVAAQCTHVAIESTGVYWKPVFNILEDALTVILINPEHAHALRGRKTDVKDAEWLADLLRHGLLKPSFIPPPEIRELRELTRYRESLVREQTAVANRIQKVIESANLKLAQVATDALGASGRAILWALARGETDPVKLASLAHGKLKAKRPQLERALHGRLTPNQRFVLRELLQRWEELEAADRRVTKEIDRYLQDHPKLARARDHLDTIPGLGPRAAEIIVAEIGVEMKVNFGSDAHLASWAGICPGNKSTGGKRLSGRTRKGNTYLRSGLVQAAWGATMKKNCYLSSQYFRLVKRLGRKKALVAVAHSLLVIIYHVLQSDQSYTELGGDYFDRHHAGQQREYFIRRLQMLGLKVSVEELPKAA

SEQ ID NO: 147114 - protein, 353 aa, unidentified
MRTYYVGMDVHGASIVIVTLNGAGKVVEQMIVKTSAERVRGYLKQLRGKVYVTFEEGTQANWLHDVVRPLVTEVVVCDPRHNRLLQSGNKSDRVDAQKLAELLRLGSLKAVYHGNNGVQVLKELVRSYDCLVSDTTRVMNRLKAIYRGRAIACQGHDIYRQDRRQQWLEKLREPGARQRAEFLYKQLGALKPLRHEAKRLMVKEARRQTAYPWLLSVPKLGAVSVAQLLAIVGTPHRFRSKHQFWSYVGLAVVTRSTADHEVVEGVLRRSKRPVATRGLNRNHNHVLKRVFKNAASSACHDGPFKAGYDRRVEQGMDPSLARLTIARQLTATTLAIWKRGERFDPERRKQQVA

SEQ ID NO: 147115 - protein, 460 aa, unidentified
MRNQKVKGKRKSVRPKVDWKALEVIEADAAGIDVGGQEHWVAISPERDAEPVRSFGCFTADIHQMADWLVEKGVRSVAMQSTGVYWMPVLEILEQRGLKMYLVNARDTKNLPGRKSDVQECQWLLKLHTFGLLNNSFQPSDEIRTARSLWRQRGLLTADAASAIQRIQKVLTEMNVQLSTVLSDLSGVSGMQIIQAILDGDRDRWKLAALARPEVKAKREDIAKSLEGNWRPELLFILRQQLELYQVYQRKITHCDEQLRCHLESFASKVDLSTHPLGAKPKGKKGSKNAPAFDLRTELYRITGVDWAQVNGLDVLTAQTVITEAGADLQAFPSEGHFASWLGLCPTNETSSGKVLKRRTRKVVNRAATALRNAASTLLRSQSYLGAQYRRLRTRLGAPKAVTAMARKLACLFYRLIKHGQQYVDKGVEYYEARYREQQIRALTKRAQKLGLQVVIPKVA

SEQ ID NO: 147116 - protein, 362 aa, unidentified
MHNHRTLVGLDVHAKATIAAGLELDTGELRFRRINGPPRSAVNYLEELPGPVMATYEAGPVGYGLAREAAARRIEVRVCAPGSIPRKPGERIKTDRRDAERLVRSLLAGELSFVRVPTVEEEQFRDLARCREAARADLMRARHRLSKFLLRREIEFPGPGASWGVAHWQWLRSIDLADHPSRSVLNDYLAAVLALEQRRDGLDAQIEIAAPRSPWALTIANLRCLRGINTVTAYGLCCEVGAFHRFEHPATLTAYLGIVPSEHSSGEQVKRGPITKAGSPHARRLLVEAAHHYRHKPAIYKDLARRQRGQDPRACEIGWRCQQRLHRQWQRLRLERGKPGNVVVIALARELANFVWEVGQLN

SEQ ID NO: 147117 - protein, 353 aa, unidentified
MNTIYIGVDFHARQQTICYLKTETGELVFCELEHEDKEQVQAFYAAFRGQVIVGLEASGYSPWFERLLEELGCEVWLGHATEIRRRARWRQKNDRRDAELILDLMLHDEFPRLHRPAVQSREVMRMLRYRQKLIKMRTMSKNSLQALALQSGLARRSRLFTREGKHELTIALMTPAMQWQRDHWWQLLQPLNQQLQETTMWLKAQSQGDVNVARLRTHPGIGLLTSLCLVHTLQPIDRFRNTRKVAAYGGFDPVERSSAERKCFLGISKAGSRILRHLVVEAANVAVRKDEDLKRFYKRLAERRGRPKAKVAVARKLLIRAYIMLRDEIDYAEFRRRAVAARLARESTKASSA

SEQ ID NO: 147118 - protein, 352 aa, unidentified
MDKYVGLDAHSQTCTFGVMSLAGKRLTSKVVETNGRALVDAVRSIPGDVHLCLEEGTQSAWLHEILSPEVAELVVSVPEKNQGPKDDLRDAWSRADDLRTGRVQTRVYKAPKHLAGLRCAACAYRLATQDMVRTKNRLKAVLRSRGILVEAGVYDAAARARWVKQLPFGHRQLAEWLGRELDEIVPLRDEAEEWLLKESKSHPIIRKLRTGPGMGPIRTAQLVAIVGTPDRFRTSRQFWSYCGLAIVTRSSSDWVRNKDGAWVRGQVYQTRGLTRKRQPVLKSILKGAATTVIAQLPDDPLHAHYQRMLDSGIKPNLAKLTVARRIAAIVLAMWKRKEAYDPKTHLVVTDKA

SEQ ID NO: 147119 - protein, 369 aa, unidentified
MNDITYVGLDVHKATVCVAIAESGRGGEVREVGVFENRPDVLRKMVARLGKHRRRLNFCYEAGPCGYGLHRLLTGLGHDCVVVAPSLIPMKAGDRVKTDRRDALMLAKLHRAGELTPIWIPDAAHEAMRDLVRARATAVRALSKARQHLQGFLLRHDRIYHGARAWTLAYRSWLTTVRFDHPAQQIVLQDYIHAVEDAESRRDRLTRQIEELMPSWSMAPVATSLQAMRGVALVAAVTVVAEVGDFRRFTNARQLMAYLGLVPSEHSSGSTVRRGGITKAGNALARRVLIEGAWTYRMSARVSRKLHDRLEPLSAAIRDIAWKAQVRLCARYRRLVAIGKPKVVVTTAIAREMVGFIWAIARVAQPELI

SEQ ID NO: 147120 - protein, 447 aa, unidentified
MIQSLQLLLVQKGAFSMQVIYPIVCGVDVHKTFIVAVICDSTSIEPKYIRKRFSTFKNSLIDFRDWLLQHDCQNVCMESTGKYYIPVYNALEGHISNVVVANPKWVRAVKGEKDDNKDAKWIADLFKLGMARSSFIPGKDIRILRELTRYLYKVVGIASSEKNRFQNALVVGNLRADMVFSDVFGKSASSVIDLILSNDDVTDKEILSKVHPICKASNEEILEATTHVELTSIQKSRIKLIRDHYDYLQTLKENLSELIQVMIEPYESFVTLLCTIPGVSRKSAITILSEIGPDMSQFSNHYRLSKWAGLAPGQNASAGKKKSTRISRAGVYLKPCLVEVAHAAVKDKKEPYFSIKFNKISKRRGKKRAYIAIARKILVCAYHMLMSGEAFKPSDLADVETPKEQRAKYIANNLRQSIKELNAIGVSLEEIITMMKQTKGLKEQIAS

SEQ ID NO: 147121 - protein, 318 aa, unidentified
MAYTTRFVGLDISKSSLDVCLLPDEERASFPNTAQGCADLITFLASFAAVERVILEPTGGYERLAVAALQAAGLPVAKVNARQVRQFARACGQLSKTDSIDAFVLADYGRRLQTRILPERSAQSVLLAQLVLRYRQLSHMIVQEKNRREKLTGAEADSRSKDWIEQTLRFLCGQRQTVVDEMTACIEADADLAAKAEVLMSLKGIGLRTACFLLADLPELGLIEKAQIAKLVGVAPLNRDSGQMRGKRMIAGGRGPIRDALYVAALSAIRFEPAIRAFNANLRNRGKPGKLAIVAVIRKIIVILNARMRDHLTKTLAA

SEQ ID NO: 147122 - protein, 425 aa, unidentified
MNDKINPQEQYAAYLAIDWADQKHAFTLQVAGQSARENGTLEQKPEIIGPWVAKLRERFGGHPIAVAVEQSRGALIHALLSYDFIVVFPIHPTTVARFREAFKFSGVKSDPLDTKQILEILTKHLELLKPLRPDSEETRLLCRLVEDRRKTVDLRTSHIQALQSCLKEYFPQAIDILNGNLTSRLAGDFLKKWSTFEAFQQARPATLKRFFYGHNIRSPEAIQNVLTIAEKSQSLTTDLAIVESGTRLCQMHAKVIQTLNPLIKEYDTRIENVFHNHPDYLLFAKLPGAGPALAPRLLAFFGTDRTRFETANNAQSFCGIAPVTKSSGKMRIVYFRQACPKFLRQSFHEFANHSVAQCQWARNYVDYYTAQGKKHHAVIRALAFKWIRVLFRCWKDKTPYNDEKHMKTLQKRGSIFATMHLQKKT

SEQ ID NO: 147123 - protein, 408 aa, unidentified
MTDYTTRYIGLDVHKHYLIALGVDENLEVVLPARRVELSHLEAWMKKTLTRQDAVVLEMTTNTWQLYDELSAHAGSVTVVHPPHVALITRAQVMNDKIAASILARLLAKGLLVGIWVPPQEIREMRGLVAQRQKMTQLATQAKNRLHAVIQRHHLQPPAGNPFSKSQNEWWQALQLGPLEKLNLQTDLETMQFAEKQEARATEEMDKLAAENEPISRLLHVSGFGVVTAVTVWAAIGDIRRFADAKHLVGYAGLGARVHDSGLTTRTGRITKAGRRDLRVALVEAAQITANTHPHWKAELARLEPRLGRNKAIVAIARKLLVAAWHILTDKTADRFAQPEAVAQKMLRFAYAVGKEYRAGKTAAQFARERLDVLNIGQELTSIPWGAKKPIPLPPSARLKKESAVPNK

SEQ ID NO: 147124 - protein, 324 aa, unidentified
MAVTVLGIDLAKNVFALHGVDHKGNTILCKPKVSRAKLLETVANMPPCLIGMEACSSAHFWARLFKNVGHEVRLIAPKFVSPYRLSGKAGKNDAADAQAICEAVQRPHMRFVSIKSEEQQSIQCLHRARQGLNEERTAVCNRIRGLLAEFGVIAPLSPERLRNEFESMKVHLPTLAATCMDELFLHIDNIERRLLKFDRLIKETAEQDERCRLLMQLKGVGPMTASALVSAISDGKEFRNGRQLAAWLGLTPSQYSSGGKPKLGRITKAGDNYIRSLLVQGARSMMASAGRKDDPLSKWVCDVKDRRGYWRAAIALAAKNARHC

SEQ ID NO: 147125 - protein, 416 aa, unidentified
MRDDARWFVGIDWASETHQVCLVDADGKIVGERGFPHGGSGLAEMCIWLLVTTRAEPTVIAVAIEVPHGPIVETLLERGFLVYAINPKQLDRFRDRFTVAGAKDDRRDAHVLGDSLRTDRHCFRHLAAEDAVIVALREWSRMAEDLQQERNRLANRVREQLWRYYPQALKISDDLGADWFLELWAAVPTPAKAGRVRESSIDRVLKTHRIRRIAAAEAAQILRQQPLTGAAGTVEAASAHIRAVAARLKLVNRQIKQAHRCLDTLCGKLAVDEEKTASGQEPEQRDVTILRSLPGVGRIVLATLLAEAAEPLRRRDYHALRTLCGVAPVTKRSGKRCIVIMRQACHMRLRSAVYHWARVAIQHDPLSRCRYAELRKRGHSHGRVLRSVADRLLAVACAMLDRQTMFDPSRAEKQAT

SEQ ID NO: 147126 - protein, 425 aa, unidentified
MKSRLIKAQNQRVERISTSTLVIGIDIAKEKHAAQAINFRGIVLTNRPITFTNDHAGFEHLIGSIRKLQNMHQLNDVVVGMESTGHYWFNIANWLVKQGVSVVLVNPMTTKRNKENRDNSPSKNDPKDALVIADAVSRGFYTPFSPKDEAFRRMRVLVTNREHWVVKSGRIKNRIHRWLDIRFPEYRQAFEDIFTPRSLATLRRFPAPSDIVQLAPEQMVQIWGEYMDRPGGMRGRNKALELQALARHSVGDATALVEDKWELRHLIEEFERICHIIDEADEMIEKLLPEIPCSDLVRSVGVSVPATAALFAFGGDLRKLSHGNQLLRKAGLNLAERSSGKYKGHIKLTKRGNSLLRKHLYFSVFHLLSHNRAFQALHAHNIEVKRMTKMQSMMKLIGKLARMLVAMAREGQTFSANKAQLLLAA

SEQ ID NO: 147127 - protein, 352 aa, unidentified
MGEHSTICVGIDIGDQYCQIAVLDEDGEVSETSRVRTTPAAFKRYLRGRSPMRVAMEVGTHSPWLGQLVNELGHEALVANACKLRLIHRNDQKSDEVDAELLARLCRFDPQLLYPICHKGKAAQSAFAVLRTRDALVRSRTALINHARGLVKPTGYRLPKCSSRYFGKLQDELPETLKPVLAPILHTVSQLTDQIQAYGQQIEQIGRDQYPQTLLLRQVPGVGPITALAFVLTIGDPWRFAHNRDIGAYLGMVPRRSQTGQSDPELPITKAGNRYLRRMLVQCSHYILGPFGPDSDLRRSGERIASRGGKNAKKRARVAVARRLAVMLLSMLKTGEAYDPLYGSHGNEISAA

SEQ ID NO: 147128 - protein, 412 aa, unidentified
MRRVIGMDLHRTFAEVVIWEEGRLRHHGRIDMTRTALEGFAKSLKPTDEVVIEATGNCMAVLRVLSPFVAQVIIANPLQVKAIAHAHVKTDKIDAGVLASLQAAGFLPSIWTPPPEVERMRRLVARRDQVVRHRTRIKNEVHSILHAHLIPRCPHADLFSRVGRAWLQRQPLPSDEILAIERHVRELDRLGEDLEVLDREIAQDALGDPAVKRLMTITGVNLTVAVGLIAAIGDIHRFSSPQKLVSYVGLNPRVRQSGLGLAQHGRISKAGRSHARAMLVEAAWAAAKSPGPLHAFFVRIRARRGHQVAAVAVARKLVTLCWHLLTKEADYLWARPALVATKVRAMELQAGRPARKGNKRGPAYSYNVKELRDREMKAAEQAERAYERFVAQWQPRPPKGKVRERLNPTRLE

SEQ ID NO: 147129 - protein, 337 aa, unidentified
MNKYIGIDVAKATLQIYIPKSDSDIEIKNSPEGLKKLYSKLKKQYKKELNNIIFVYESTGAYSTILEQFCQEKEILCFKVGAYQSASFSKVIKNRSKTDKIDARMLSQMYILAKEKDIKVPKRDEKAHQIRSYIKYYQSLVKEHRRQSNYLEASTYNLEDKFILRQVKKKITSIEKEQTIIIEKVLEIIKSNPTYAQAYKNITSIKGIAEKSGIILLYLFLRYPNASRQQITALCGLDPVQRSSGTSVQHKERISKQGLSLVRAILYMPTLNTIVYNEEMKLIYTRLVERGKPKMLAQMAVMRKVILLAHSLYKNNQEYDGKKYLKFTQIKEVDMVE

SEQ ID NO: 147130 - protein, 333 aa, unidentified
MGFEPEPSKEGSWMMAQNGLLVAGIDVAKDKADACIRALSQRRTFESTAEGRRQLISWLRKHKATKVVMEASGGYEREWAKALRNARIEVRIVDPKRVRHFAQSAGRLAKNDTIDADTIAWFAETFGEAPGQAYDAEREKLLQIVNARRGLLETETMLANQGEHSVPDVVRKMQARLLKKIALEVAKLDAAIAAMIKATPHFARLAEIIESVPGLGEGASAGLIAGMPELGQVSNKIAAALLGVAPYDDDSGKRRGERQIKGGRRRIRNLFYMPCMGAATRHNPVLKAFYDRLIAKGKLKKVAIVACMRKLIVILNIMIARGEKWDAKRYAVG

SEQ ID NO: 147131 - protein, 357 aa, unidentified
MKVTTIGIDLAKDVFGLHGVDGQGRVAFKKRLVRSRLLEFMSQLPPCLVGLEACSSAHYWARKIERLGHRVKLMSPRFVKPYRKSDKNDANDAEAICEAVTRASMRFVPIKSEAQHEVQALHRVREQLLKSRTALVNQVRGLLAEHGIVAPLGIARARRLLLEILADPERHGLSGLFRETLQEMAERLRFFDERVGAYDDRIERRFKEDERCRRLAKIEGVGPLVATAVVAAVGNASEFKSGRELSAWLGLVPRQHSSGNRSQLLGISKRGDRYLRTILIHGARAALRRADHKRDQRSRWAMRIKLARGYNKAAVALANKNARIIWALLTRGENYRPPAISVASPTADRISLTQVQA

SEQ ID NO: 147132 - protein, 424 aa, unidentified
MKRTQNEKILQIKNETLVVGIDIGKDTHYARAFDFRGIELSKLLRFSNTNQGYETLENWMQGIMKEKGKTESTVGFEPTGHYWFTLGDHLQRKGHHLGIVNPFHVKCTRELDDNSQTKNDRKDPKTIAMLVKDGRFREVYIPEEVYQELREAVSERERLVEQMISLSNQVIRWLDIRFPEFNEVFKKWSGLAAILTLKHFPTPAKVFQTGVSGIVSTWGREMKKPSHKKAERLFKLASESIGRTAGSEAAEASLQNLLKQYEMVLQQIQETEKLMQELLLKVPNASKLVDIKGIGMVTAAVIVSEIGDIDRFKDPRQIQKMAGLSLRENSSGKHKGKTTISKRGRKRLREGLFKAIITMLATNQEFRMLHQRNLGREKNPLNKMESIIALCGKLIRVIFAILTKGNDYDANKMVEDMNRSMKAA

SEQ ID NO: 147133 - protein, 375 aa, unidentified
MHGGRTLGKHNEVFVAFDVAKKKHAVAIAEGGRSGEVRFLGDVENSPLSIERTIKRLAERYEKLHVCFEAGPTGYGLYRQVKALGHDCMVVAPALIPKRAGERIKTNRRDAVTLARLHRAGELTGVWAPDAAHEAVRDLVRARAAASDDLRRKRQQLLSFLLRHSRIYSGGGHWTLAHRRWLAGQKFEHPAQQIVFQEAIDAIEDALQRLRRLEKQLGLIVPEWSMAPVVAAYQAMRGASFLVAVTFAAEIGDVRRFDTPRQLMSFLGLVPAERSTGDTIRRKGLALAGNRRARRALVEAAWTYRHPARVSETLRVRLEGLPKPVRDIAWKAQIRLCARYRRLSATGKKLPVVVAAIAREMAAFLWAIGHQVAPA

SEQ ID NO: 147134 - protein, 394 aa, unidentified
MRKNTTAKRNQKVLTKTDKDTIHREAASQRLTIGIDLGDRSSRYCILSEAGEILSEGSLPTTKGGFESLFGKMPSSRVALEVGTHSPWVSRLIARLGHEVIVANTHKVKLITQAVRKNDRLDAQKLARLARVDPELLSPIRHRGEQAQEDLAIIRARAEVVETRTKLINSARGFAKPMGERLKGCDSEQVRESLAEGLSAATQQIIRPLLKIVEAITEQIAEYDQQLEAMAKRYPEIELLTQVYGVGTLIALTFVLTIEDEGRFAHSRDVGCYVGLQPKQRESGDRAPELAISKAGDRLLRSYLVQAAHCILRKGAPESDLRIWGLEKMQSGGKRQDEGKPSGSKRAKRRAVVGVARKLAVLLHRLWSTGEVYDPLHNQKAAAMGGKRKSGVAA

SEQ ID NO: 147135 - protein, 357 aa, unidentified
MEGSVTITNAHGKEPKMNETLYCGIDLHSNNAMYVITDEQDRPLFQKRLPNDLPQVLAKLAPYRDRLKVVAIESTYNWYWLVDSLRENGFEVALANPAKIEQYNGIKEANDLTDAAFLAHLARLNILPTGYIYPKEDRPVRDLLRRRMLLVRYRTGLKLSLQNMVMRQTGRSLGWRGVRELDAEGRAELLGENDCLPFVATHQVELIESLNEKVELFEAKVLERVQLRPAYTCLLTLPGVGVILALTIMLETGAIGRFETVGDYTSYCRCVRAKHTSNGKKKGDNNKRNGNAYLSWAFVEAVHHAIRCCPAAKRFYDKKAAQRNGALATKALAAKWSKAAYYMLKRQEPFDLKRVFG

SEQ ID NO: 147136 - protein, 355 aa, unidentified
MQYIAFDAHKHYTLASVARPDGQVLREERIEHERGALREFLARCEPGSPVAVETIGNWYWIVDEIEAARCIPRLVHARKAKLMMGEINKTDRLDVRGLNRLQRNGTLPTVWIPSGELRDQRDLPRTRMVLVRQRTQLKNRLHATLAKYALHDFEVSDVFGVRGRVVLRQRLELLPPHTAYASGHLLKQVENLSSQIREFEQRIHTTFKPTAAIQHLMTVPGVGLTLAVVIALEVGDVARFATAEKLAGYAGTTPRVHASGGRTRFGRSRPDVNRYLKWAFVEAANAICLHRSRAPRRHVSRLYERVARRKGHQKAIGAVADISPKRPTGSSLNRRPIANRTQPPFRRRGISADNP

SEQ ID NO: 147137 - protein, 368 aa, unidentified
MKKDSIFVAIDDSKRTLVIGILRPGSQEPEVHSIPNEPRHLRRHVQRLQREGDVHVCYEAGPSGYDLYRQCTALGVPCQVMAPSLTPRKPGDRIKTDRRDVRKLVRLFRSGDLTPIAIPDEASEAARDLLRCREDVQEDLLRWRHRLGKFLARHGRLYRDGRNWTQRHWAWIRAQRFALPVLARTLAEYIFTVEQLLARVAALDREIAALAETAAYRTPVGWLRCFRGIDTLAAMVLLTELGDLSRFPHPRQLMAFLGLVPSEASSGERERRGSITKAGNVHVRRILVEACWHYRHPPRLGGRLVQRSAGQPPAILRQAWAAQQRLYRRYRHLVGHGKRPPVAVVALARELSAFLWAALTQGPTIRAA

SEQ ID NO: 147138 - protein, 368 aa, unidentified
MDKQDTTRKSASCGRKRTTGKRTIGLDLGDRSSHYCLLDEQGEVLQEGSVATTRKGLDRVLGAARRCRLAMEVGTHSPWVSRHLTRLGYEVIVANARRVRLISESSRKDDKLDAKTLARLARIDPELLSPIRHRGEQAQADLMMIRARAVLVETRTALINAARGLTKSYGERLPSCATYQMGRDQAESLSPAIGAALDPLLAEVETVSERIREYDKQLEQLCQTRYPETKLLQQVHGVGTLIALAFVLTIEDPHRFRKSRAVGCYVGLRPRRRQSGQSRPELGISKEGDVYLRTLLVQGAHHVLGPFGKDSDLRRWGLKLAAQGGKNAKKRAVIAVARKLAVLLHKLWVSGETYEPLRLANRAQIVAA

SEQ ID NO: 147139 - protein, 354 aa, unidentified
MPKTILLHNPERRKEMSRFVGVDLHKNMFMVSYFDPRTGKHHLKSYHIKDIVSFKRELNSDDTVGVESTNNTRYFVNQISESAKEVKVINPSQFRVISKSVKKTDKNDARVIAEFLSKDMVPEVRMKDKKTAQINSLANTRDKLVKLRTALKNKIHNILSSHGILLKKESLSSNKALNRILEQPVDSTAHVELEVIVTQIRSLNEGIKRLDSELEDKGKELPGHENITSIKGIGNKSGSILLSVIGNINDFESEKKLAAYFGIVPRVSNSNETKWQGRITKRGSKLGRTTLVQCTLIAIKYSPYLRSFYERIKAKKGSGKAIIATSKKLLGIIFNTLKNDWVFEDFTNGVLKTT

SEQ ID NO: 147140 - protein, 343 aa, unidentified
MTRFVGLDVSQKITAICIVDNAGRRLWRGQCPTVPEQISVLVRRHGGDDARIGIETGAMTPWLVHELRNLGLEVVCLDARHARAALEMQINKTDQNDAEGLAQIVRTGWYRSVHVKSFDSHRARALLGARTQLIGMTTRLSNHIRGVLKTFGLLPGAMRGLPFDRKVEALLLDRSDVALIVRPMLVAWRQLREQIAVFDKAIRVLVRLNSSCRLLMSVPGIGVLSALAYVSTVEDPGRFSRSRSVGAHLGLTPRQYQSGEVDRSGGISRCGDTLARTLLYEAAVVILTRLKKASSLKDWGHAIARRSGNGKARVAVARKLSVILHSVWRSGQPFRWSEHAGAA

SEQ ID NO: 147141 - protein, 328 aa, unidentified
MTASLSNYKPTRGVNVGIDVAKDSLEIAVRPDNQEWSTNNRIEDFPALIEKLQQIAPERIILEATGGWEAPLANHLAAAGLPVVVINPRQARDFAKATGKLTKTDKVDARGLAHFGEAVKPQVRPLPDEQTQALAALLTRRRQLVEMLAAEKNRLVTVQHRPALKRDVEAHIKWLEKRIGQLDDDLREQLEKSAVWRANDQLLQSVPGIGDVTARTLLSQLPELGALSDKEIAALVGVAPHACDSGKRKGQAHIRGGRASVRSILYMAALTAARCNPVIKAFYQRLLAKGKLKKVALTACMRKLLVILNSMIKKQKSWSPEQIPAAQG

SEQ ID NO: 147142 - protein, 348 aa, unidentified
MVADELDYVVGVDTHRDEHVLAVVVAPVGAVVARRAVAANAGGYAQALRFADSYASGRRVWAVEGAGHYGAALARFLSGHGETVLEAGRSPRGERRLQGKDDGLDAVRAARAALGHELASPRAGQRREALRLLLVARRSAVDVRRETLVQLRSVIVTSPDRLRDELRRLPVQRLLDRCSRLRRPKTATPDELAARLVLRTLARRIEAATVEASELEREILTHVRALAPQLLDEPGVGPIVAAQLLVAWSHRGRVRSEAAFARLAGVAPVPASSGQTTRQRLSRGGDRQLNRALHTVILHRRQHDPATKEYIARRVAEGKTRRDATRLLKRYLARHLYRVLDNQAPNMA

SEQ ID NO: 147143 - protein, 364 aa, unidentified
MNKKRKRMTTAPDPKPFAPDQVDPCGTEVSAEELIVALCRKGVQQPLKSFPNTPEGHREIGHYLARSGRLVRVCMESTGVYGLDLALALAAQAGIQVRVANPRAVRNFAKALMERNKNDRVDAGVLQEFAARMPFEPWQPPARPALHLCALARRLEAITDLCAAEENRLHASQATEALPAIIRRDLERSIRFHQRAAQRLTREALKIISEDSNLQQRYTLMVTVPGIAQTSALRILAELVMISAHLDARQWVAYAGLDPREYSSGTSVHKKVRISKAGNRHLRRGLYMPALVAVRHDPHLRGFYQHLLANGKLKMQALVAVERKLLHAIYGMFKHQQAYDGTKVYRLPDGLTPASSAPVRTEAA

SEQ ID NO: 147144 - protein, 444 aa, unidentified
MSDALPSETTEREWAAFAAIDWADQKHFWRLVPADSPHAEQGELENTPEAVEVWAAALERRFGGRPIAICLELSRGPLVYMLAKYAHLILLPVHPTTAARYRETFCPSGAKDDPSDTASLLDLLLRHRERLSPLQPDTTETRLLQFLVERRRQVVDEKTRQSNRLTDCLKSYFPQILRWFDDVAGPLVGAFLKRWPSMQDLHRALPGTLREFFHEHNCRGEERIDERIAAIYQAIPATRDEAVLEAGAITARGLVAVLATLRDNIAELDRRIAQLVACHPEAALFDSLPGAGAALVPRLIVAFGTRRERYDNACQVQCYSGIAPVKVASGKTQTIRFRRACPKFLRQTFHEFALHSLQKSEWARAYYQLQRDRHKSHHAAVRSLAYKWIRIVFRCWKDRKPYDEEIYLKSQRRRSATLGATVALATAAGWKKVAGFNKFSAIPS

SEQ ID NO: 147145 - protein, 441 aa, unidentified
MSDTAIPTPEPAWAAFVALDWGSQKHAWTLQSAGGGRRNKGFVDNTPEAIAVWAADLHRRFAGQPVAVALEQKRGSVVNLLLPYAHLVLFPVPASMSASYRKTFVPSGAKDDPSDASWILDLLLRHRDRLRRLEPDESNTRLLLMLVEDRRQLVDDKTRLSLRLQDCLKQYFPQLVRWFDPDSALVADLLKQWPDLQHLQRCHDGTLRSFFRQHHYGEERILQRIEAIRAAVPATNDPAVLEAGSMKARHLTESMATLREQIARLERRRDELVAAHPDTPIFASFPGAGPSTVPRLIAAFGTCRERYQSAFEVECDSGIAPVHIRSGKIDRVSFRHACQDFTRQTFHEFAGQTIPRCEWANAYYQAHCHTPQQHHAAVRALAFKWIRILFRCWKDRIPYDDQLYLTSLRRRSGLLGQALASATSVGWITVAGFSKLAEKSA

SEQ ID NO: 147146 - protein, 420 aa, unidentified
MDVMVERCAGLDVHRDNVVATTRVPGQGRRRFEQQTQTFKTTLPGLAELAAWLAAAGVTLVGMEATGVYWKTVFQALEDQVECWLLNAHHLRNVPGRKTDVKDSEWICQLVQHGLVRPSFVPPPEIRRLRDLTRLRAAQNNERTRTIQRLEKVLQDAGIKISSVASTSYSKSARAMLEALLSGVSDPEQLAELSKGKMRAKIPQLREALQSRFTIEHHGVMVAQLLAHIDTLDTELRHLTERIELVLAPHAHIIELLSTIPGVQARAAEVLVAECGLDMSVFPTVGHFASWAGACPGHHQSAGRRKSGRTRPGPAWLTSQLTECARAAARTKETYLASHFAQLRGRRGEPKAIGAIRHDLLVAYYHIVRDQVPYRDLGPNWQRKRYSVEHRASRLQRQLEALGYTVTLDKTDQPEAQPTA

SEQ ID NO: 147147 - protein, 341 aa, unidentified
MATIALFGLDIGKHSFHLVGQDANGKPVFKRQFTRSSLIHYLAQHPACRIVMEACCGAHWLARQLAGFGHQVQLIAPQYVRPFVTGNKNDFLDAHAICEAASRPSMRYVGVKTPEQQASSALHRLREARIADRVPTANQIHALLLEFGIVLPLGARGIKQVPDIVMNASADLPHAARRILSAQYEHYRYLAELIAGLDSQIGAQAKADALTSRLMTIPGIGPITASQLAADAGNAQSYGSARHFAASLGLVPRQHSTGGKSKLLGISKRGDKSLRRLLVQCARVVMQNAAKWQSAVAQWTQQLMTRRHSNVVACALANKLARIVWAVLVKGKEYRPNPNAA

SEQ ID NO: 147148 - protein, 314 aa, unidentified
METYIGIDVSKNDLDIYSDETEKAIKIKNDLREIKAWLRMIKSQKENIKLVICEATGGYETLIVDALKQAQFPVHVVHANKVRHFAKTTGSWVKTDKIDSRLLAWYARLFQPQADGQKISPEAQTLKLLIKRRQQLIKQKVEENNRLDKSIPLWMKESIQTHIKWLRDQIKEFEKTIQSHIDTHSPLQQQITLLVSIPGIGLLTACALLAGIPELGALSSKALSALIGVAPFNKDSGKISKKRFIQGGRSNVRSALYMATVASLIHNPYVKNFYNQLKAKGKPSKVAIVACMRKLLTILNAVAKRQTPWVQKFE

SEQ ID NO: 147149 - protein, 315 aa, unidentified
MTTRNRKFVGIDVAKEKLDIAVFGEAKASQVTNDEKGIGKLIQEMKRLKPDLIVVEATGGYHRAVVLRMYEAGLPMAVVNPARVRQYARASGLLAKTDKLDALNLAEFGKQMKPRKFEAKSESERQISALLVRRRQLEEMLKAEKSRLQTVSAGMRSSVERMIEMLKGEIKRLETELDNFMKENESWREQEEILTSAKGVGRMTAATLLAELPELGKLDRKKIAALVGLAPMNSDSGKKRGYRKTKGGRMEVRNVLYMSTLVATRYNPLIKVQYQELQRRGKVKKVALTACMRKFLTILNAMMRDQQPFRYTTVS

SEQ ID NO: 147150 - protein, 341 aa, unidentified
MKIIGCDFHPSYQQIAMVDTETGELWEGRLEHEQGEARRFYQALQGQVVRVGIEAVGNSQWFEQMLAEMGHELWIGDAAQMRRLVVRQQKTDRRDAKHILDLMVDGRFPKLWVPSQAIRDVRQLLRHRQKLVEIRTQVKNQLQHLALNQGVRRKRRLWSVQGRAVLEQLPLTGWTARRRSDLLAMLDRLQEQVGELDGAVRAEAEQRPEVRLLMTHPGVGPVVGLAYVLTIGPHTRFARGKKVASYLGLIPGEHSSGGRQSFGPISKQGNTMMRTLLVEAAQTAARFDEELRRAYGRLKAKKHSAPAKVMVARKLAVRMYWMLRENKSYTELYTRRPVARM

SEQ ID NO: 147151 - protein, 388 aa, unidentified
MPVAANQSELPTAIRTDLGAIFVSLELSHSKWLITSLSPGGGARMSKHSVAGGDVAGMLARFAELSRKVVARTGQCFPIIVIQEAGLDGFWIHRVLEASGIESHVVDPASIATSRRRRRAKTDKIDGEALVRALLAYKRGEPRVCAMLRVPTPEEEDRRRLSRERKALTNERVRHVNRIKGLLFGQGVSSYEPLHRDRRKRLEALKTGDGRPLPAHLKMQVGRELDRLELLLEQIKAVEAARDAMLAAAQEVVSPAPAMLLNLKGIGPEFAAVLWSEGLSRHFDNRRQVASYAGLAPSPWQSGAVDHDQGVSKAGNPRLRTTLIQLAWLWRRHQPRSALTLWFEDRVKHNGGRLKKTTIVALARKLLVALWKYVNAGVVIEGAIMKTA

SEQ ID NO: 147152 - protein, 337 aa, unidentified
MNTTQVAVDLAKSVFQVSVSHAPGRVDEQHRLSRRRFRTFFLHHPPTHVLMEACGSAHHWGRELQGLGHHVSLLPPAHVARYRQGNKTDRADAKALLEAARNEDIVPVPVKSLDQQAISALHRLRSGYLATRTARINTVRVLLREFGLTMPQGPRAFLAKAPIALDDDKLPTYLKTALTQALLEIKELQAKADDLKSQLERLAPLIPSVSFLMTVPGIGILSATALVATVGDVQRFPSGRSFANYLGLTARESSSGASRRLGPISKRGNRYLRMLLIHGARSALLAAHRTHEPDSLQTWALRTAQARGHNIATVALANKMARICWAIRSSHWRICSW

SEQ ID NO: 147153 - protein, 413 aa, unidentified
MDWVACVGIDWGDKQHACTIQTRQGSKQPMTLGSSPEEVHRWVRELRERFPDGTIVVGVEQGQWSLIYELMAYDFLALVPINPRASKAYRTSLRLSGASDDPADAALICDFVLKHLGELRVWRPDDVRTRKMRLLCEQRRSLVDQRTALTHALAATLKEYFPQVLQWFGETSTYLRAFLTHWPTLDQARQANVDDVTKMLKARGRRKASAAAEELIEKIRLAVPLTQDAAILEARSLYALSLVALIDPLDQQIADHDQAIAAVWAHHPDRKTFGSLPGAGAVLGPRLAVAFGLDRSRYDDAREVQQYSGIAPVIERSGRQFWVHSRWGFPTFLHQTFHEFAAASLPHSQWARAFYHQQRERGAGHHQAIRALAFRWIRILFRLWKTGEEYDENRYLEALKKKGSPVVSRLAAA

SEQ ID NO: 147154 - protein, 396 aa, unidentified
MYAVGIDVSKGKSTISIITTEGEIIEEPFEINHNQEGFDILLSKIKNIKKEEIKFLMEATGHYHLPILNSLIEKDYFVCVENALVIKKYCDMDLRKAKNDRKDSLKLASYCSDKWFKLRKFELSDKTREQLQFLSRQYCQYIKIKTSLKIQLTNMIDKTFPGIKKIIDEENRYELLLDIYEKYSYPSLVLEKSKEEFVDEINNMAKKYRHKVGKAIGENIYTKAPTVITSCPYNESLQLSINSCILLLRDTIKVTNDIIAKMDELAMQLKEFNTVNNMKGVGPKTRSRLIAEVGDIRRFKNANCLIAFCGIDAPPYQSGNFNSTNRHISKRGNKYLRKVGYEITKSIKSCRPKTDNAVYLFMLRKEAEGKNKTSAKIAGLNKFLRIYYARVKELYN

SEQ ID NO: 147155 - protein, 357 aa, unidentified
MKKTYRLQDYVVRGKEIFVGLEDSKRTWKVAVRSEKMVIHQVAMEAKYPVLIGYLRNKFPDCTIHLMYEASFKGFNLYDQLTADGIGCVVIPPHLVTEPKVNRIKTDKRDARRLALVLENHDFKESCYVPDKERREDRQVSRTLIALQKDIIRTRNRIHRFLEFHGIEVSFPDKWGREEFRALKKLELSEPLRVSLDIFLTQLEELWVHQVALRAALKKLCKKERYRKAFTIARSLPGIGWFTAIRFVLELGEDLTRFTSGKKIASFVGLTSSEYSTGERMQKGHITGMGPGFIRATLIENSWGAIRKDPVLLGKFTRVWHASGSRKKAIVAVARILIVRFRACVLSGIPYRIGVAA

SEQ ID NO: 147156 - protein, 377 aa, unidentified
MALKIVYKICCGIDVHKTFVVACIASTNDKGVTSYESHRFSTYTSGLKTLLQWLLDRNCKDVCMESTGKYWIPVYNILEKDCSIVLAHPKYVKAIRGKKTDKKDAKWIADLFKHDLVAGSFMPPAGIRQLRDLMRYRFKLTCFKSSEKNRLQNCLTVSNIQLGNVVSDTFGKSAQAILDKILENPADTSFDLEPLVFKSLKKKLPELRDAIDGYITPEQAGKLKVIKSHYENLEARKAELEELILALATPYQQELAILQTAPGISSDFTAIGIISEIGTNMEAFPSAKHLCSWAGLTPTNNESAGKKKSVRVSKAGCYIKPLLVQCANAVVKSNKHPEIRNRYLRIKKASRSQESNHCNSKNASYRIILHVKERRKL

SEQ ID NO: 147157 - protein, 449 aa, unidentified
MNNPQEIEDEEHEQVIERVAAIDVAKASGMVCVRVPHETRPGRRVSRVWEVPATTRAVTELGDHLVSEGIEKVTVESTSDYWRIWYYLLETAGLDIQLVNARQARNLPGRPKTDKLDTVWQAKCTERGMLRPSFVPPAEIRQLRDYTRLRSDLTQERTRHWSRLEKLLEDALIKVTAVASTIDTQSVRAMIEALIAGERSPRVLADLAIGKMKAKRAALIEALTGRFDAHHGELARMLLDQIDALTTHIDALDGRIEALIAAIPAARGVDAAGTTGPGAGLGPDAAVRPAIDRLDEIPGIARHTAQVVLAEIGFDMTRFPTAGHLVSWAKLSPRTIQSGPKSRSGKTGKGNPYLKGVLGQAAAAAAKTDTFLGARYRRLVKRIGKLKALVAVARSIRVIIWHLLSDPAARFCDLGSGYHDSRIDTGRKARNHIRQLEALGYTVTIAQAA

SEQ ID NO: 147158 - protein, 348 aa, unidentified
MPVYIGVDFHPHQQTVCWCDPDTGEIKTRNLFHQSADLKQFYQQMPPAIVGIEASTNAPWFEALLADTGHELRVGNPALIRAKATARHKSDKRDAELIFDLLRTAEFPTLWRRDRASSQVLDILKLRLSFVSQRTQLYNRLQALGHSFGLPKSPMKTQAMQTALKECPASEAQALQRTQLFTALDDLNARIEELETWLQQQATTNAQVQRLQTQVGVGYLTALAVVHGVGDVRRFTKVSKQVAAFVGLEPLEKSSSTKVKFGGISKKGSWIVRYLLGQAGNIAARYDPTLKSFSKRLGKKKPKAVVKTAVARKLVVKLAIMMRDNINAAEFDRRGRTGGNARRVPGLQ

SEQ ID NO: 147159 - protein, 346 aa, unidentified
MNQIIRIGMDTSKNFFQLHGVDAAERPVLRRKLRRSEVLGFFAKLPATVVGMEACAASHHWARELRKLGHEVKLIAPQHVKAYIKRNKNDGRDAEGLCEAMSRPTMQFVPVKTEEQQAALMLMAVRQQLITRRTQLTNAIRGHAAEFGLIAAKGLDKVAPLLVRIAQDENLPELAGEMFVMLGRDYARLQVELKAVNARLMTWHRANPNSRRLAKIPGVGPIGATALVMKAPDPRLFPSGRHFAAWIGLTPKDHSTAGKTRIGKITRAGDEMLRSVLVAGATAVVQQAKHSRGRPSPWLVALLARKSPKLAAVALANKTARIAWKLLTTGESYDGARMPVASALAA

SEQ ID NO: 147160 - protein, 412 aa, unidentified
MEVVHPRCAGLDVHKESVVACVRLVIAGKIGHEVRTFATTTAGLLALAAWLASHEVTHVAMEATGVYWKPVWHILSDGEVELILANAAHIKNVPGRKTDVNDATWIADLLAHGLIRGSFVPQPPIQELRGFLRTRKQLVREQGSHVQRIQKTLEDANIKLESVISDILGVSGRAMIEALIAGESDPAKLAQLAHRRLKATPEGLRAALHGRVRDHHRFLLRLHLRQIDALSSLIGDIDQEVATRVAPFRSAIAQLMTIPGIKDLAAPGIVSEIGIDMSCFPSAGHLLSWARMCPRNDESAGKRRSSRLKKGANWLKATIFQCAWAAARTKGCYFQAQYHRLKRRHGAKKAICAVAASLLTTIYHMLKDGTVYQDLGADHFDRRSKQTKTNRLINQLASLGYDVQITPLPNAA

SEQ ID NO: 147161 - protein, 338 aa, unidentified
MNKLSIIGIDLAKNVIQLHGNDAYGHTRFTRKLKRKEVLDFMVKQPPSIVAMEACGGAHYWARMFQAQGHSVKMIHPQYVKPFVQVNKNDARDALAIAEAAARPSMPTVAIKSIEQQDIQAIHRVRERLVKEKTAISNELRGLLGEYGLVMAQGHKSIRDTVLSILEDAQNGMSMQGREIINDLRDQWLDREQRIGEYDKALKIIAKDNIVCDRLQSIPGIGPVNATLLYSHAGDHNHFSSGRHLSASLGLVPRQHASGGKENLLGISKRGNKHVRKQLVHGARAAYKVLKKEENSSRLGLWVKRMEGKHPNVIIVALANKMARMVWALMKNETVYQA

SEQ ID NO: 147162 - protein, 315 aa, unidentified
MSDSLDIGVDVDSKELVPAVADRKAGDRIANTRAGIAQWLNTLPQRCRIGMEATGRYYELLARMAGQAGHVVYVINPRLIKHYGRATGSRGKTDAMDAEAIARYVKKENDRLREYVPRTDEQQQMHDLLRKRQTLVKTRARLEQSFGVSKSAPGELSDLFCALAGTLSELESELQRLGRDGEHGTLYKRLLTIPGIGPAVAAHLIYYMTRWPLANANAWIACTGLDPRPNESGGRTGRRRLSKQGAPVLRQMLYMAAMGLKRCRRGQPLYDELSKRGHPSTAVFNILARKLARIAWGVFKSGRDFDPAMLKVGQA

SEQ ID NO: 147163 - protein, 494 aa, unidentified
MEVATRRCCGIDVHKKSVMVHVLPPEGERNGKPQEREFRTFSRDLRSLRNWLTRLHVTEVVMESTGQYWRPLWNILEGEIPRLVLVNPAHVKALAGRKTDRIDSQRLARYLESQDLDGSLVPPREVREWRDLTRSRVHLLQEVNRVKNRITQLCEAGNIKVSSVASDLFGVSGRKMLAAVAEGRRDPGWMADYACGTLRNKKKELEFALEGSFTNHQRWLLREELGHLSTLEAQIGRVEQEIERQMKPYAEHLRRPDTIPGIDVITAWTLVAELGPDMSVFPDANQCASWAGLCPGNKKSAGKRLSGRTRKANPYLRRDLCQAAWAASHTKGTYLSALYRRYRMQLGHHKAIVAVAHQMLITAHTMLSRGEDYRELGEDYFDQKNKPQVTKRLVKRLANLGYTVTLTESAPPPAAVPAPEQTIAADTLASSPDPAQSAPQAPAASAPQAPVASPEPAPPPAPRRRGRPCKCAERGIVCLHKKSPDEAHPNNLSA

SEQ ID NO: 147164 - protein, 400 aa, unidentified
MMTPDDIDVWVGLDVGKSAHHAHALDHDGNTLYDKPLKQDEKAIRTMLGKLSKHGRVLLVVDQPNTIGSLPLTVARNMGIAVAYLPGTAMRRTAQLLPGDAKTDRRDAHVIAWAALKLPETLRDAGPDDETLAALKLLAGHDEDLAHESTRHVNRLRSLLLQTHPAFERALKGERITRDATLALLERYGGPMGVKRAGIEDVKDWAKSNGLRAGRIIDDMFKAIGEQTVTVPGTLMAETIIPSIAHDIKTIRDRRREVDRQVEKLLEDHPLLTVLTSMPGIGVRTASNILLGIGGDIANFKSSAHLAAYAGISPVTGQSGTSIKGERPSRRGNKRLKNALWQTAFVASTKHPPSVAYYKRKREQGKHHNAAIICLARRRCNVIYSMLKNGTLYQEPALVA

SEQ ID NO: 147165 - protein, 319 aa, unidentified
MKTTKCTEIKITETNTGIDVGKDTLDICVYESSLDWQESNTEIGIRRLMRRLSRYDVTRLLVEATGGYERALVEAAIEHNIPIVIVQPIQVRQFAKAQGVFAKTDKIDARLIAEYGVKLQPEVKTLPGPKVRRVKDLLSRKRQLNEMRTQELNRAHRAQKITAASHRRLLKLLDKEIAEINDKLAKEVTGIDEWQRTYDIISSVPGLGDGVAFTVLGELPELGQLTNRQIAALCGLAPFNRDSGRLKGKRRIRGGRAPIRTMLYMAMLSAIRYNPVIQAFYQKLVAQGKHKKVAIIACMRKMMTILNTMVRNDQEWQMN

SEQ ID NO: 147166 - protein, 327 aa, unidentified
MKRKNTNTKPTTFVGVDIGKKWLDVSASRTSFRTSNTVSGHRKLVELSAKRGRRPHFICEPGSYGRKLVRFLRAQKFAYSIVSAYQVRQFAKARGREAKTDKIDAAMLSLFGKTFRPEPTVQIDPKLESLRRLIRRRQQIIEATKVQKHHLETMEGPALIRRANRLVRTLEIEGRELEAVAVKHVKRTPKLRKRFLALTQVDGVGTISALQLMSEVPELGHVSRREIAALVGLAPINHDSGIKTGRRSIRGGRILARAALYMAAFHASRINPVLAPFFQRLRARGKPYRVVLVAVMRKLLVHLNAVVAAQDRAGPLPLEKTGQNQLA

SEQ ID NO: 147167 - protein, 355 aa, unidentified
MNSSKYIAMDVHTATISVAVRDAAGKLIMESVIETKTSTILQFIQGLRGDLHVTFEEGTWAAWLYDLLNPYVTNVVVCNPRRNALLKEGSRNDRIDARKLAELLRTNLLRPVYHGEKGLRTLKELARAYLTISKDLTRVMNRVKAIYRSWGIPCGGQSVYNPRHRKEWLSKITQASVRRRAELYYEQLDALVLLRKQARQELLAEGKKHQAWKLLRSIPALGPIRAAVLMAIVQTPHRFRTKRLLWKYSGFGVVTHSSADHRYVKGQLERSKKPVSVRGLDRDHNHQLKDLFKGAAIQASTRKGPFREFYEALVAKGMRPEMARLTLARKIAVIALTVWKKGGAFDAKYLKPQTA

SEQ ID NO: 147168 - protein, 401 aa, unidentified
MRFAGIDVGAERHMVAMVDEESRVLCRSSPFGEDSSGYAHLFELLGPAEDCRVALEATGHYWRNLFVALLAKGYAVAVLNPLRTRRFAEEELQRTKTDAIDALGIARFAAQKRPAAAQLPDFAAEELRELARLRERLSEDFASRLRQLHRAVDLGFPEFTRYVRTLESQLATTILSRYPTAASFQGVSVKKLARIIYDGSHKVGEELARTLIEAAETSVGSHHSEPYRLRIKYLCEDLDVLRRRVKDLARDIERKLDDHEVGKLLTTIDGVGPLTAACLIAELGDPARFRSAGAIASYVGVAPRLRQSGKKRFSGSPTIPFGNARLRKALWMVVLNAVRCNPWLRQYYERLRAAGKPGKVAVIAAMRKLLTAVWSVATHRKPFVPHLPGVSAPLGAVTYKA

SEQ ID NO: 147169 - protein, 332 aa, unidentified
MGVGARIPQAREGEQFLSKRKNYIGIDVSKQLLEVAVHESDFRYRCPNQAGAFLELLAELIALRPARIVLEATAGLEKPVVAALHGAGLPVVVINPRQVRAFAKAVGQLAKTDRLDAAVLAHFGAAIKPPLRPLKSKEEQELEALMGRRGQLVDRLVAEKNRRNSATNEAVRETIKEHIDWLEDRIAELDEQLQARLVSSAVWQNKAAILQSVPGIGPVVSFSLLAELPELGTLNRQRISKLVGVAPLNCDSGQQRGVRHIFGGRARVRSMLYMAALTALRFNPVIKEFYQRLAGKGKPHKVALTACMRKLLSIVNLMIRNQTSWKTDLVSA

SEQ ID NO: 147170 - protein, 314 aa, unidentified
MTIYHNFIGIDIGKFTFVVASHGNKNTQEYSNDSEGISAFISDYATVDSLYILETTGGHERHLLHTLCLKNLPTHRANTRKVKNFIRSLGNDVKTDALDAKALARYGFERSDRLELFDAPSQKAIELFQLTQRRHDLRLMLVAEKNRAKSPQIEFIKDSFDTMIKVISQEIQEITLSISTMIANDPTYAEKKKVLKTIPGIGELIANDLISLFPELGSLNRRQVASLAGVAPRANESGKFVGYRSTGHGRALVKPMLFLAAMAARNSNSQLKEFYENLIARGKKKMVALVALMRKIIVIANAKLRDLAAHKTAV

SEQ ID NO: 147171 - protein, 257 aa, unidentified
MTKPLVPVNVGVDVGKSQLDLYLLERDRALIVPNEEQAIASVIRRLARYRIERIVIEATGRLEQPFVRAALAAGLPVVVVSPLKIRRFADAIGQLAKTDAIDARLIARFAATVKPVARPASDANAQAIKDLVVRRRQLVSLRTMEKNRRQVMPQELKSGIDRIIKTLDRELKTLEQLIDHAVDQHAASRHKRELLTTMPGIGNSVAATLLGDLPELGSLNRREIASLTGVAPFNRDSGTLRGKRRMRGGRAHCRTAL

SEQ ID NO: 147172 - protein, 425 aa, unidentified
MYRIAGIDVHKKVLAVVVTDIDAPGEAAYERRKVVYTPESLRQLAGWFIEQQVEEGVMESTAQYWQPLWSMLEQHWQPQRREREGAGKQAGSLHLAQAQSNRGRRGRKNDFGDAERLVKRLVSQELILSFVPSAEQRLWRTFTRRRTQLMQSRSRLQCHMESLLEQAHVKLASLASDLFGVSMVRILKALAKGESDPAVLASLADSNLKATKSQLMDALSPCRNWDPRYRVIIRHMMDELDLIEKQVQELEKNAAELMKPYEDAVQRLAEMPGMGAVSALQVIAEIGPSAEAFPTPGELCSWVGVIPGENITADHNSSTHSPKGNRPLRRLLNQVAHAAIKTKGSIFELKFERFNKRMKPTAACWAVAHFICELFWIILHKGLKYEERGPGLNTKNRCRRISRMIRELRALGFHVSPPATPLLAV

SEQ ID NO: 147173 - protein, 404 aa, unidentified
MHYVGIDWADEKHHVAVLNAEGKCVSEFGVQENGKGFSLFQEHLARLAPVEINIERPDGLLVDWLVMQGYAVYVTPPRVVASQRPRSSKDDRNDARLLANLRRTQNEDCRPLVRHSPAVQELLQLLRAFEQFQRQQLRVTNQLRQVLKHYYPVMLHLFSDINIDIALTFLQTYPTPQVAQGLTRAELEAFLRSQGYNHMRRLDELYQRLQAPMPTAAVWQGYQQHVQWLVPVIQLLNQQLTALRREINHCFTQHPEAAWWRTLPGAGELTAPRLLALMGDNRAAFPSCAALQALAGTVPVTRQSGKHKTVQFRWACVKALRKAMMDFARNSLSNSGWARSYYYDQLERGHDQQQATRALANRWIRIIWTLWQRHDSYDETRHVANRARNGKAAVVIPAIAAASR

SEQ ID NO: 147174 - protein, 488 aa, unidentified
MSSAGQQEGKKDPTLNARAPKRKARGSRCPQGKGNQRRSKLTITNPDAAGIDIGAQVHYAAVPEDRAPVSVRSFGAYTAQLDELVQWFKDCGIKTVAMESTGVYWIPLYQKLEEAGFEVLLVDARQAKHVPGRKSDVQDCQWLQQLHTYGLLRAAFRPEDSVCRLRTLQRHRKDLVEYASMWIQHMQKALNEMNLHLHHVLSDISGQSGLAILDAILAGERDPRKLASLAHYRVQKSQAQIEAALTGDYRPELLFVLGQSLQNYRQIQQQITQCDLSIEKQLAKMTDCATPRQAAEPMPSSAELGGGKSGKRKPPVALETSLAGHLKRILGVDLTTIPGLNVLAILTLISEIGTNMTKWRNEKAFVSWLGLSPNNKISGQRVLSSRTRKVVNRAATILRLAAMIVGKTDTPLGSFYRRKRAQLGGPKAVTATARKLGCLVYRLIKNGQGYNAPDLHTYELKYKDQILNSLRKRANTFGFDLVELPKAA

SEQ ID NO: 147175 - protein, 346 aa, unidentified
MEQFIRCGIDIAKLVFQIHGVNANSGETVMVKKLARGEMLRYFANKPRMLIGIEACGGAHYWARELTMLGHTVKLMTPQYVAPYRRGGKNDANDAEAICEALARPNMRFVAVKSESQQVVLVMHRMRDQWVRERTSLMNQIRSYLHEFGIVINQGRAALAKTLPWVAEDETLPVLFRQSMADLADRLTELERRIEALNKRIESWGKQDSAAQALLTLCGVGSITASAAVATAGDVSVFKNGRQFAAWLGLVPKQNSSGGKNQLGAITKRGDRYLRTLLVQGARTIMLAASRAKKSTQTNPMFEWIYKLQERRPNNVVAVAIAAKQARMLWAIMAKQQRQDALGLAI

SEQ ID NO: 147176 - protein, 315 aa, unidentified
MTTSSRKFIGIDVAKDKLDIAVLGEKKASQVGNDEKGITSLVKKMQALKPALIVVEATGGYQRAVVLRMYEAGLPVAMVNPARVRQYAQASGLLAKTDKLDAFNLAEFGKQMKPRKFEAKSESERHVSALLVRRRQLEEMLKAEKSRLRTVHADMRSSLERMIEVLQEEIKRLEKELDRFMKENADWREQEEILTSAKGVGRITATTLLAELPELGKLDRKKIAALVGLAPMNFDSGKKRGYRKTKGGRMEVRNILYMSTLVATRYNPLIKAQYQELQRRGKVKKVALTACMRKFLTILNAMMRDQQPFRYATAS

SEQ ID NO: 147177 - protein, 315 aa, unidentified
MNIIGLDISKDTIDATLHKTNGSIHYIKFKNNDDGLKQFRLWIKGNRIRKAYIGMEATGIYYEKAADMLSSYYTVYVINPLKIKDYGKSRFNRTKTDKADSNLIADYIKRHQDTLIPYQIPKNKALQKLINLKNQLQQHQKQIKNRLHSTEEDFIRNIHQDLIDTIQDKMEQVKIAISEQIKKQTDNNHYRNLQTIPSIGKDTASVLYAQLTEKHFKTANQFVSYAGLSPAIIQSGTSVRGRGRLSRYGNRRLKSTLYMPALCAYRFNAFPKLINNLKKAGKPKMVIIVAIMRKLAKLAYYIVKTGQPYDAENTD

SEQ ID NO: 147178 - protein, 394 aa, unidentified
MKLIGIDIGKNKHFFCVMDQQTGEIISQPVSFSNDKEGFDFLVQKIKSYPKDSILIGMEDTGHYHFALLKYLLDLQYTVALINPKTTDFNRKMQGGITKNDKLDTINICDVLDTPERKKQYRITKVNSFDLYEQKQLTRHHHNLKEEENVYKNRLQKCIDIVFPEFNKLFNSKYGIVYMNILKMFGSAENIANTDIRTIRKCFEIEGRGNRISLTPERLKECAGSSIGISSSAEVIQIKHLTAQIELIEEQLTEIDKKIEEFSIQNNSPILSIPGISHFSGTSILAELGDISNYSKPSQIIKFAGVAPLHYESSQFNAQHTSITKKGSKYLRKTLYQIILPVIRHNPVFNKYYQLKISQGKGHRCAQGHCVRKLLRIIYHLLKTNQQFDPQLLR

SEQ ID NO: 147179 - protein, 318 aa, unidentified
MYCIGVDVSKQHLATYDGERQRTFPNTRDLKELAAFLKGKGNKVTVVFEPTSTYSRSLERLCRSRKLRCLRLNPRVSPHLREVVQGRSKTDRTDAELLWQYGQDHGPGDLLEEDRLGHILKVYLSCYAQAQKARIACQQLREALSHDPDTPAEILEELGREIGRLKAREEKMLVQAQTCIEKDKEAERAYALLLTIPRVGRVTATVLATLFRRYAGTNRGEIVALVGMDPLEYRSGSSVHKKSRISKRGDGFVRKVLYEATLAAARFNPAVREIYRRLKENGKPEKVARIAAARKLLLIAHAMYRTGQPYRAPKASGG

SEQ ID NO: 147180 - protein, 316 aa, unidentified
MAEGAVYVGIDVSKPQLQVAIRPSGEHFAEANDARAVRRLIKRLQALPCRRIVLEASGGYEALLAAELYAAGLPVVVVNPRWARDFARSIGQLAKTDTIDAQLLAQYAELPQLKVRELPDAQTRELKAWCARREELIEMLVAEQHRLEHVPPRLRREINGHIDYLRKRLKHLDHDHDLDQAVRNSELFRQQSALLTSVPGVGRVLCVTLLARLPELGRLNRAEAAKLVGVAPLNHDSGRLRGVRMIAGGRAALRRVLYMAALSAIRANPVLRAYYRHLRELGKPGKVALVAVMRKLLLMLNAMLKTQTPWRPPCPA

SEQ ID NO: 147181 - protein, 455 aa, unidentified
MAKKGKQNTPTPENMPILHPHAAGIDVGAEEHWVCVPADRDAQPVQKFSAFTCDLHRLADWLTTCRITTVVMESTGVYWIPLFQILEARGFEVALVNARHVKNVPGRPKTDRFDCRWLQKLHTYGLLAPSFRPPEDICQLRSLLRHRDNLIRMTVKHIQHMQKSLDQMNLHLHHVISDVTGVTGMRILRAIVAGERDPRTLAQYRDYRIKSSPDTIAKALEGDYRPEHVFTLTQSLALYDFTHQHIAACDQEIERVLSTLDSLVDLEAHPLPPPTTTHRQPQRNEPAFDLRAHLYRITGVDLTQVPGLQAMTIHIILAEVGLNMHKWPTDKHFASWLGLCPDNQISGGKVLSTGSRRVQNRASRALRMAAQSLRTSPTYLGAFFRRMRSKLGPAKATTATAHKLAKIIYHMLKEKTPYRARGAEEYLHKDHERQLRQVRKQAKHLGFDLVPQPNN

SEQ ID NO: 147182 - protein, 403 aa, unidentified
MNSVGIDISKGRSTIAVMRPFGEVVISPFEVRHTGSELSKLAKQLKSLDGETRVVMEATGNYHASVAKLLHNAGLYVSVINAKLVHGYGNNELRRVKTDRKDAVKLANYGLDRWLTLPRYIPEEDTRLLLKNCYRQYRQYSKVQTVLKNNLISLLDKVFPNANRLFSSPIRGDGSEKWVDFVAEFWHCRCASEKSERAFTSKYLRWCRKHGYNFREAKAHTIYAEASGHIGVMPKSETTKLLVKQAVSQLRATSTALAALKQEMQSLASVLPEYPVVMDLFGVGPTLGPQLIAEIGDVRRFYSKKALVAYAGLDAPPNDSGDVTGRHKSMSKIGASSLRRTLFLVMSVYLQTAPLDEPVCQFMDRKRAEGKLYRVYMMASANKFLRIYYATVKAYLESLEHTV

SEQ ID NO: 147183 - protein, 363 aa, unidentified
MTTMTDTGDERRVVGGVDTHKAVHVGAVLDEVGRLLATASFPATPSGYRRLLGWLNDHGEILAVGVEGCGSWGAGLSRHLRARGVNVIEVNRPDRQRRRRQGKSDTLDAERAARAVLAGDATVTPKAGDGPIEALRQLRVARSGAIKARTAAANQLHSLTDTAPDTVRGRLRPLTTRARATTASRFRARDVATPTGGAKRALGTVGRRWLTLSEEIVELDRAIKSILDAIAQPLLKRHGVGYETAGALLVTAGDNPERIGSEKSFAALCGASPVEISSGNTNRHHLNRAGDRHANSALWFIAMVRIRSRHAPTIAYLERRTTEGLSKRDIIRCLKRYIAREVFDDITTIIHTHTASDTQRIAA

SEQ ID NO: 147184 - protein, 366 aa, unidentified
MKQQHQDSEVTIGLDLGERRHRFCALDGRGEVVEEGSLLNDRASLARLTARYPGALAVMEAGTHSPWVSRYLEGLGWEVIVSNPRKVRAIYQHERKSDQRDALMLARIGRMDRALLYPVRHGSEQAQQDLLRIKLRDSLVRARVALINSVRFSLKSLGYAVSNPSSERFHKVAMERLPEGVQQMIAPSVQALAELSMRIAVLEREINVLARTKYPQTLWLQQVPGVGALTALYFVLKIEDPQRFENVRDVGAYAGLCPRRDQSGQSDPQLRISKRGDPYLRRLLVSAAQYILGPFGPQSALRAYGLMLATDGSARARKRAVVAVARKLAVLLLSLWKNRSHYEAFPHWQIIEDKQSGTIAMHRVEA

SEQ ID NO: 147185 - protein, 354 aa, unidentified
MSQNLNSAVAVIGIDIGKNSFHIIGLDERGAITLRQKWSRGQVEARFANMPPCLIGMEACVGAHHLSRRLKVLGHDARLMPAKYVRPYSKGQKNDFRDAEAIAEAVQRPTMKFVATKTADQLDLQALHRVRERLVSQRTGIINQIRAFLLERGVAVRQGQRFLRAELPRILATPPDVLSPRMVRVIEDLAGDWRRLDERVEGLSSEIEAVARQDAGCERLMSVPGIGPIISSAMVAAIGSGEVFSKGRDFGAWLGLVPKQTSTGDRTILGKISKRGNRYLRVLFVQAAWVVLIKPKSWERHGLKPWIEAAKKRLHRNVLAIALANKLARIAWSVLARGRNFEARTNTNATAQAA

SEQ ID NO: 147186 - protein, 398 aa, unidentified
MEIVHCHCAGLDGPKKTVVAAIIVPGPKRSGSQETRTFGTMTVDLLTLSDWLLAHGVTHVAMERTGEYWKPVFNMLANDFQVLLVNAAHSKAVPGRQPEVNDAEWSADLLKHGLLKASFVPPLGQRERRDLTRHRSNFVRERVNLANRRQKVLESANIKLASVATDVLGVSGWAMLEALMMGQASPAEIAELAKGRLGQKRESLTKALEERVQAPQRFSLTALLCQIDHLDETITRFDAQIAAYCAPFAEAVGLLDTIPRVARQTADIMVAELGTDMGRFPTADHLAAWAGVAPGNHASAGKRRSGQPRKGRKPRGVAWNQAAHAASPTKHTYLHAQSRRLAGRRGTKKAIVAVAHSMVGIAYHLLPWHEPYRELGGDYSDTQRPDVTAKRLVKRSER

SEQ ID NO: 147187 - protein, 354 aa, unidentified
MSQTPNTAIAVIGIDIGKNSFHVVGHDARGAIVLRQKWSRGQVEARLANIPPCLIGMEACVGAHHLSRKLASLGHDARLMPAKYVRPYSKGQKNDFNDAEAIAEAVQRPTMKFVATKTAEQLDLQALHRVRERLVSQRTGIINQIRAFMLERGIAVRQGIGFLRTELPTILATRTDALSPRMLRIIEELAGDWRRLDQRIDGLSGEIEALARQDQACSRLMTVPGIGPIISSAMVAAIGTGDVFSKGRDFGAWLGLVPKQISTGDRTILGKISRRGNRYLRVLFVQAAWVVLVRIKNWERYGLKSWIEAAKRRLHHNVLAIALANKLARIAWAVLAKGRAFELTRTDDAGVRPA

SEQ ID NO: 147188 - protein, 421 aa, unidentified
MIDHETFAWFAAIDWGTEKHQACVVDVRGGIVGERAFSHDGAGLALLCDWILSIAGNATIVAVAVEVPHGPVVDALLDRGLAVYAINPKQLDRLRDRFSVSGAKDDRRDAHVAADGLRTDRHLFRRLQIADPRLIQLREWSRLAEELQQERVRLSNRLYSQLWRYYPQMLGLSDDLAAGWVLDLWTMAPTPAKAMHLRKTSVAQLLKRNRIRRINAETVLRALREPAINVADGVAEAATIHIGSLITRLRVVGRELHDAVRKLDELCACLDEPSPTAAEHGGSGRHDVKILKSMPGIGKIILAILLAEASGPLSRRDYQALRTLSGVAPVTKQSGKSRIVVRRYAAHVRLRDAVYHWARVAIQHDPTSRSRYVALRQRGHSHGRAIRGVADRLLALACTLLQRQTVFDRDFSRAEELTAVP

SEQ ID NO: 147189 - protein, 405 aa, unidentified
MTQPATLHYAGVDWATRTHAVCVVDQTGAIRARFEVPNTGKSFTGLCRRLAKLKVAGVAIERPDGPLVEAMLEGGLKVVVVAPRQVKALRSRYRASGAKSDPADAYLLADVLRTDGHRLTPLTPDSDPTKILRALTRTRKDLQEARVALVNQLTSQLERCFPGAIGLFAELHSPIAVAFLRRYPTSHAAATLTQAKLAAFLRRLHYPGRTPVATLLSRIQTAPLSGISPAEAAGRAVCVAALLDAIQITARQERELEAEIIERLEVHADAKVFTSLPKAGHGVRAAALLAELGDVRARFPDNDCLAALAGAAPVTITSGKRRVVKFRWACDKKLRNALIDFADDSRHASPWAAKIYADALARTGRHPHAVRILARAWIRVIWRLWQDGVAYDPAKHRGAVRLLAA

SEQ ID NO: 147190 - protein, 428 aa, unidentified
MTAFVSNTSPILWVAVDIAKTHHVVLLEFPDGRRRHFRITNNLEDFAQLSVLLSRDGYSCRIAFEPTGDYHRPLAYFLQVQGFSVCLVSSVAVARTREALYNSWDKNDPKDAQVILHLLKTGATQIYYDPLVHGGHDLQELANTYQQGSLAKVRVHHSLRTHYLPLYFPEAERYLHSTRAEWFTQLLLLAPCPAAVLKHSLENFLQAARSLEGHKNDKARWLSDFYETARTSVGLPVTEDSQAIAMFRLILHQYLQLCRVRRHLEQQAVAYLAQHPDFRRLQSIPGIGPILALIILAEAGDLRRFSHHRKFLKYCGLNLCTDQSGQFRGTSRLSKRGNARLRYAFWMAGTVAVRAKQNSFTKKFCDYTRHDPSNPDLRRKAYTAVAAKMARVVYAILKAGTDYRRFPEATMPGGRIPSLRAVEAITTS

SEQ ID NO: 147191 - protein, 418 aa, unidentified
MIDDVQWFVGIDWATQSHRVCLLDVDGRQVSERDFAHGGAGLSELRDWLLEKTKATPGQIAVAIETPHGPVVEMLLDHAFLVFAINPKQLDRFRDRFTVAGAKDDSRDARVLGSALRTDRHAFRRLVVDNPAIIELREWSRMAEELQQERTRLANRIRQQLWRYYPQAIELTDDVADDWFLALWQHVPTPASAAKASEKTVARLLKEHRIRRLDAATVLQTLRKRPLFVAPGTTEAACVHIRSLAARLHLVNQQIKEAHRALDDLCAKLEAPTESPSGQNREQHDVTILRSWVGIGRTVSATLLTEATEPLRRRDYHALRALAGTAPVTRRSGKQCFVIRRLACNKRLQNAVYHWSRVAIQRDAASRRRYDALRRRGHGHARALRTVGDRLLYALCTTLERQTPYDSNYQTAQVTAGL

SEQ ID NO: 147192 - protein, 410 aa, unidentified
MPEPTYALYVGVDWGNQTHQVAVLDTARGLRGERGGAHDGPGLHALASWLAELAAPGTVAVAIEVPHGAVVDTLLERGFAVYALNPRPMDRFRDRDTVAGAKDDRRDAQVLAAALLTDRPAFRRLHVDDPQVVQLRELTRIEAELSEELRRLANRLREQLLRFYPQALELCPAADEPWFWALLTQLPTPPAAARRRRGPVAALLREYRIRRLTADEVLTVLRRTPLTVAPGTLEAATEHIALGLPRLELIATPRRACAQRVETLLAVLAAAGQQQGHRDVTILRSFPGVGRVVAATMLAEASQLLAARAYHRLRASGGAAPVTRQSGKQRGVPMRYAWNPRLRNALDYWAFIAARHDPATRQHYEGLRARGHSQGRALRGVADRLLAVLIVMLKTQTLYDPSRREAKFAA

SEQ ID NO: 147193 - protein, 351 aa, unidentified
MESITIGMDLGDKKNVVCVLDNLGRNIESSSLDNNSEALSFFFQRYKGAKIAIEAGTHSPWISRLLSSIGCTVLVGNPRKLRAIWESDNKTDIRDAEMLARIARFDPHLLYPIRHKGEHVQKDMTLLHSREVLVKNRSSLINHVRGSVKSFGARLPSCSTESFHKRVVTHIPEGLQSTIHQLLGIIELLSSQIKEFDKQIEQISAEHYPETELLRAVKGVGPLTSLAFVLTLEDPTRFTKSRQVGSFIGLTPRRDQSGEIDKQLRITKAGSPFLRKLLVNASQYILGPFGEDCNLRKFGLRLAARGGKNAKRRAVVAVARKLSVLLHRLWLHGEIYDPLYSRNAQRLAKAA

SEQ ID NO: 147194 - protein, 375 aa, unidentified
MKEKLRFLGLDVHAETIAAAVAEPDGEVRSLGTIPNGVESVRKLVKKLGPVEKLRACYEAGPTGYVLYWQLAELGVKCEVIAPSLVPVKAGDRVKTDRRDAEKLARSYRSGDLTAVWVPDEGSEALRDLVRAREAAKQDQLRARHRLSKFLLRSGQRPPSGIRPWTRPYLIWVAQLRFTQMAQEATRIDYLHEVEHMRERVARLEQAIAEAVKLASPALQQVIHDLQALRGIADISAVTIAAELGQVSRFDSARQLMGYCGAVPSEDSSGKRTRRGSITKTGNAHLRRIVVEAAWSYHRPPCIWYGLRKRQQSISEEVKEIAWKAQHRLHKRYMRLAARGKDKRKIVTAVGRELLGFIWAIGTRAETTVKQRITA

SEQ ID NO: 147195 - protein, 340 aa, unidentified
MDITTLGIDLAKSVFQLHGVDAQGVIVLQKKLRRGAVVKFLSKLEPCLIGIEACATSHYWAREIAALGHDVKMIPPAYVKPYVKRQKNDAADAEAICEAVTRPNMRFVPVKTEEQQAVLVLHRSRDLLMRQRTMILNAIRSYCAEFGIIAAQGARKVSELVTKLRNDDTLGVPEVGVSAILSLASQLDCLEQEVRKIEHQLLAWHRQNAASQRLETIPGIGLITATALAASVPDPVAFKSGRQFAAYLGLVPRQNSSGGKDRLGRISKMGNGYLRRLLVVGATSVTRRAPTTDTRTGTWVRSLLERKPTRVVTVAIANKTARTAWALLSKGESYKAVPAI

SEQ ID NO: 147196 - protein, 435 aa, unidentified
MEEVTDEPLYRDRVCGIDIGKAGLVATIRVPSDKDPARRAAETRSFGTTKKEVLALADWLRCWQVPAVVMEATGDYWKGPFYRLEAEGFECVLADARQVKNLPGRPKRDPADSRWLAACFERGAVTACFVATPEFRIIRLHTRYRRDLIEERTREKNRTEKLLESAALKLSSVVSDLHGVTGRDIMEHLIAGERNPKVLAQLARARARRKISQLEEALEGAEFFTGEHAALLKTMLGRIDQINAEIDRLTEVIEQLLAPYEEQLAQAESMPGWARRAAQDAVAETGVDMTRFRTGGHLSSWAGRSPLDHQSGKRNGQSKSKKGNRYLGGLLGETAVAAGRTQTREGARYRRLARKRGKAKACVAVGNTQLKVYHKLLSNPGMRYEDLGPDYYERRRDVRRQVAHHVGKLGDLGFEVTLCRIPEPDPDGPAPIQTA

SEQ ID NO: 147197 - protein, 351 aa, unidentified
MSYKLNSGIAVIGIDIGKNSFHVVGHDKRGAIILRQKWSRGQVEARLANLRPCLIGMEACVGAHHLSRKLQTLGHDARLMPAKYVRPYSKGQKNDFRDAEAIAEAVQRPTMKFVATKTAEQLDSQALHRVRERLVSQRTGIINQIRAFLLERGVAVRQGLRFLRAELPRILAAPCDALSPRMLRVIADLAGDWRRLDERIEGLSSEIEALARQDKGCERLMTVPGIGPIIASAMVAAIGSGDAFSKGRDFGAWLGLVPKQISTGDRTILGSISKRGNRYLRALFVQAAWVVLVRVGPKHWERYGLKSWIEAAKKRLHHNVLAIALANKLARIAWSVLAHGRTFEASRIQAA

SEQ ID NO: 147198 - protein, 402 aa, unidentified
MLNAVGIDVSKGRSTVAVLQPGGTVVRKPFVVKHSSCELKSLAEYILSLDGETRTVMECTGRYHEPILKALNDAGLFVSAVNPHLIKNYGNNSLRKVKSDPADAKKIASYTLDSWSSLRQYSSMDTVRTQLKTLNAQMDFFSKQKTAARNNLISLLDMTYPGVNKLFDSPARDDGTEKWVEYASSFWHVDCVRKIGLKAFTQRYKAFCQKHGYYCCSGKPEELYNAAKELVAAFPKEKTYKDLIQTGIKQLNTASENVEHIRKQMNDLASTLPEYDIVLSMCGVGTTFGPQLMAEIGDITRFTHREALTAYAGVDPGVNESGDFRSKSNKASKVGSARLRKTLFLIMSTLLQRKPANDPVFRFLDKKRSEGKPYQVYMTAGANKFLRIYYGKVKECMAKAQF

SEQ ID NO: 147199 - protein, 419 aa, unidentified
MSFKILKNNCCGLDVHKTWIYACIGITDSFKRTEYKQARFSSFTKGLQELCLWLAKYNCIDVCMESTGKYWIPVFNVLEKNNIFVTLSHPKYTKPQKGNKTDRKDAKWICDLYMCGMVKPSFIPPADIRQLRDLVRYRFKLTCMITGEKNRAHNCLTVSNLKLDDVFSDIFGKSSRSITEQILQHPGGVFDVAPFVDSRCKTPIEEIQAAVDGAISHEQAVKLRQCLKHIDELEMHKAEIEREIFRLSQKYESVLGLIRTIPGFDKNPLTAIQVLSEIGADMSVFPTAKNLVSWAGCCPRNDQSSRKIKSTRISRAGSYFKPVLVQIANALIKSKKHPEFTTRYRRIKARRGHKKAIIAICRMILTAIWHILTDLKPYTPEGFLESRPVNKEKVLTISQALNLIKQRGYIIKDDVGPVT

SEQ ID NO: 147200 - protein, 369 aa, unidentified
MAETTEAFVGIDVAKLRNAVAVADAGRDGEVRFYGEVDASPESMRRLAAKLAGKHERLHFCYEAGPTGYGLHRLLTGLGHSCVVVAPSLVPRKPGDRVKTNRRDALSLARLLRAGELTPIRVPDTAHEAVRNLVRARAAAVKDVGLKKRQVGAFLLRHSRLFPRKKNWGARYRSWLETQSFEHPADQIVLQEGIESVRLAEERLARLDRALGEFLPTWSLAPLVEALQALRGVDLVTAVTFVVEVGDIRRFESPRQLMGYLGLVPGERSTGETVRRGSITEMGNARVRHLLVESAWTYRHPPRVGKAKLPKLERVSPKVREIAWKAQSRLTARYRALTARGKKTTVTCTAIARELAAFMWAVAREARPA

SEQ ID NO: 147201 - protein, 420 aa, unidentified
MDEIMEEPAALVERIAALDVGKATLTVCVRVPHEDKPGARRQEVRTYATLTPALLELRDWLVCQGVTLVVMEATSAYWKPPFYLLEDDIECWVVNARDVKNVPGRAKTDKLDSVWLAKLAERGMLRASFIPPRPQRQLRDLTRYRRTLTQERTREKQRAEKLLEDAQIKLSSVISDIFGASGRAMLAALIGGQRNPHELAGLARKNVRAKTSVLQEALTGHFTEHHAFMLGMMLARIDALTTQIDTLTTRIGQATAPLSAQVAQLDEIPGIGVTAAQDLLAEIGTDMSRFPTPGHLVSWAKFAPKARQSAGRSKAASTGKGNPWLGGTLGEAATSAARTKTFLASRYKRIVRRRGKQRALVAVGNSLLTIAWHLLSDPAAHFTELGPDWHDRLAPLRRKRQLIAELERLSGKKVTLHDAA

SEQ ID NO: 147202 - protein, 400 aa, unidentified
MNNNISLYIGIDVSKEKHDICIKNHDGNLLKHFQITNTKCDLERLYAVVGKLRNDISDNIEVLFGMEATGIYYFPLYSALNRDGYSVKIYNPIQTYGYRKMEIRKTKTDLIDAAIIADMLRIHEPPAATAIDNLKLYQLRELCRVRLRNVEKRTKCKTQLIRNIDMVWPGYKSVVPTIFGKTSMVILKKYSIPSKVTSNSFQEFYETIKKTPRTRITRKKLEDIYHNAENVLSMPEIDSITRVEIKTLISEIELYDTHIQAIEKKIDQVMEQVNSKIKTVPGIGGVLGAMILGEIGDVNRFSSSKKLVAFAGLDPITNQSGRFENTTGPISKRGSPMLRYALFIAANVARRYDENLKRYYDKKIDNGKHHYSAVNATAAKLLRIIFWVLKNDKEYTVQLT

SEQ ID NO: 147203 - protein, 350 aa, unidentified
MEHYAGLDVSLNETSVCIVDGAGKIIRETKVDSEPEALVGYFSSLEIKVVRIGLEAGPLSQWLHAALTQAGFEVVLLETRHVKAALSAMTVKTDRRDARGIAQLLRMGWYRPVHCKTLPSQEVRAIITARKTLLGKLIDIELSMRGILRGFGLKVGAVTRKSFEIRVRELMAGQATLTTIMEGLLNARATLIAEVAKLHKRLLEIARADEVCRRLMTVPGVGALTALTFKTAIDDPTRIAKSRDVGPLFGLTPGRYQSGETDIIGKITKVGDVMVRTALFEAATVMLTRSTKSSRLKAWALDLVKRRGTKRAIVALARKLGVVLHRIWVDGSTFRCAKEGAAMPALITAK

SEQ ID NO: 147204 - protein, 324 aa, unidentified
MTDGKLGIDVSKDKLDVSLSYCNKVCARSFPNSSEGWRRLLDWLTSQKLRRVHACLESTGRCSLGIACALCEAGHVVSIVNPAQIRDFARTKLGRNKTDGVDASRIREYCELFKPQPWTPPSEAHRRLGELQTIRAGVIAGVTEWKNRKNSGLVDGSALSLADATISHFTSQLGVVDEAIANTIDNDPELRSKRDLLLSISGVGEILAGVVLAELPGPNLLRSSAEAVAYVGLNPRRHQSGTSVDRVTRISKIGNAVLRAALFMPAMSAMQHNTAVVALVSRLKSQGRLKPKQILVAAMRKLLVLCFGVLKTGKPFDPAIALGR

SEQ ID NO: 147205 - protein, 339 aa, unidentified
MKYTTVGVDIAKSVFQLHWVDADTGEIVSRQLKRALFLEHFANRAPCLIGMEACGGAQHWARRLIEMGHQVKLMPAKFVKAFVIGNKNDPADARAIWMAAQMPSKAVAVKTEAQQAVLALHRMRQQKVKFRTAQMNGLRGLLTEYGEVMSKSRAALDKAIPAVLARLAERLPAMLIESLREMWNDLERLDKQIADIERRLQTWMKEDKACHAIAAIPGVGLLTATAVVSTMGDPKAFKSGREFAAWLGLVPGQTGTGGKIQLLGISKRGDTYVRTLLIHGARSVLFHAKEPGPWVEQMKKRRPPNVITVALANKMARTIWAILAHGRPYQKEHVSTRLA

SEQ ID NO: 147206 - protein, 338 aa, unidentified
MNVLRQNVGIDIAKDSFVATVTVLFEGQIINHLNTKLFKNKTEGFEDFCQWVYNLTDKSIDVNYTMEATGVYYEGLAYYLWNKKEIVHVLLPNKAKNFAQSLNIKSKTDKIDSQILGQMGAERVLERWNLSSPIYRKLRTLTRERQQIVKERTRCKNQLHAETHKAESLKTTINRYKRHIKYLIKLIITIEKEIKRIISKDAYLVAKIIKMKTIPGISNVSAATIVAETAGFVNIKNTRQLVSYAGYDIVLKESGMSKGKTRISKKGNSRIRHALFMVALTAKTHSKTMNEFYERLNTKKNNGMISLTAVQRKILALMYTLWKTDSVYIEHYEKLKAC

SEQ ID NO: 147207 - protein, 308 aa, unidentified
MKTVPFEQVILRGCGIDVHKDMVVATISGEGLKTETRSYKTFSSSLTELKEWLLSSGITHVAMESTGVYWKPVYKILECPDMKVWIVNARHIKYVPGHKTDKKDSGWICKLLLAGLLKPSYIPEREQRELRDLTRYRNKLIQHVSSEKNRIVRILEDCNIKLSSVVCSLDGVVANKLIDMLIDKGHVTMDDITCIYHKKLEASPELLYQACEGFIEPHHIYMLQTIRKDMEQTKAIIADLTCRIKEVLSPYENVMELLQKIPGLSRKTVEDLIAEIGVDMEAFPTEKHLASWAGVCPGNNESAGKKKW

SEQ ID NO: 147208 - protein, 425 aa, unidentified
MNYKQNEKINQVKESTLVVGIDIGSTTQYARAFDWRGIELGKVFPFSNSREGFESFKAWMQRLQDKYKKSDVIVGIEPTGHYWFDLGAYLEDEGILLVMVNPYAVKQTKELDDNSQSKNDRKDPKVIAKLVTEGRYSAPYTPDGVYADLRIMVANRKRLIREMTQIKNRFARWFAIYFPEYTDVFGDYEAQSSMLLLKKVCTPEAIVELGAEKINQIWRDAKLRAVGMKRATTLCETAKRSIGLRKGSSAAKYEMKLLLEDYEYKKAQLDSVMEEIESLCKKIPESEQMLAIKGIGVITVAGFLAEVGDVRRFESPRQIQKLAGLSLRENSSGKHKGQTTISKRGRSKLRAVLFNAAIPLIAKNPEFRSLHEYYTTRANNPLKKKQSVIAISCKLIRVFYAILSNGVTYDPQKMLSDIHRPSQAA

SEQ ID NO: 147209 - protein, 338 aa, unidentified
MAIVMGLDQHRAQITAEWIDTDTGEVSRSRISPAHRAGVRKFAERFRGQELEVALEATTGWRFVAEELRRVGAVVHLAEPAETAARRGNKKRAKSDRADARHVRELLMIGRLPESWIAPDHLLDLRSRVRLRHTLSHQRGEWQQRIQAVLYHHGCPQRRNLMTAEGLQWLKVQPLPAGAREQVTVALGMIDALDAQLAPLDKELRAYARRQLGCKALMKHFGVGELTAVTILAELGDVDRFSSSREAVRYAGLDITVHQSDQRRSPGHLSRQGPPALRWALFEAAQSAARQGSPDRDYFAQAAQRLGANRACLSVARKLLKRSYHTLRELGEEALQPA

SEQ ID NO: 147210 - protein, 342 aa, unidentified
MDHFAGLDVSVKETSICIVDDTGRIVREVKVASEPEALLKVLGNPTYHFKRIGLEAGPLSQWLFSALAGAELPVICVETRHMQAVLKAQINKTDRNDARGIAQMIRVGLYRPVHVKTLRSQKLRMLLTHRKLLQSKAIAIENDLRGTLRNFGLKVGMVGKVRFETRIKELVETFPDLAVLVEPLLIVRRVLREQIVILHRRLLAIVRDDEVCRRLMTTPGVGPVVALTYRATVDVPARFRKSKSVGAVFGLTCSKYQSGEIDWSGRISRCGDEMMRVMLYEAAQSMLRSKKWSWLKAWAMQIARRRGMKKAIVALARRLAVIMHRIWVDGTEFRWTRETAAA

SEQ ID NO: 147211 - protein, 390 aa, unidentified
MLSIGIDVSKGKSTVCGMKPRGEIVYTPFEVQHTREGMSELVSLLRGSGEEVRVVLESTGSYHCPVVAALLENGIFVSVVNSLRMKRFCSQSIRRVKTDQIDAMQIALYGLVYWQELHPTRLPENTYRELQLLARQYYQMTSMLIKAKVDFNAICDQVLPGMQELMSDHAGRHKLSDFVLRYRHTTHILEMGETRFRKDYCKWAEKKGYRNHERMAALIFATAQNGIPVLPNAPSTQIVITEAIRVLHTVEASRDAILTQMQALAKTLPEYSLVREMPCIGDTLAPRLIAEIGDVRRFHSKRALIAYAGIDAPPYQSGKFCANNRHISKRGNRYLRKTGYEVMQSYVMHKPANDPIFTFIEKKRSEGKSGKLAMVAGLNKFLRVYYGKVT

SEQ ID NO: 147212 - protein, 404 aa, unidentified
MYNAVGIDVSKGKSTIAVLQPGGVIVRKPFDVFHTSQSLKELSNYLASLEGDTRIVMECTGRYHESMANSLSNAGFFVTVVNPHLIKNLGNNTLRKVKSDPADAKKIARYTLDNWAELRQYSCMDNTRNQLKTLNSQFSFFMKQKVAAKAHLIALLDNTYPGVNKLFNSPAREDGSEKWVDYAYSFWHVDCVRKTGLKAFTVRYEAFCRKHHYIYQPSKPEELFNASKELVAVFPKETSYKLLIQQSIQQLNLASAHIEQLRREMNALASTLPEYEVVMGMYGVGKTYGPQLIAEIGDVSRFTHREAITAFAGVDPGVEQSGQHNSKSNKASKCGTGRLRKTLFQVMTTLLQNAPENEPVYQFLNRKRSEGKPYYVYMTAGANKFLRIYYGKVKAHLRSLEQNE

SEQ ID NO: 147213 - protein, 317 aa, unidentified
MAQNGTIVGIDVAKGKIDAAIRFGAEASFANDAEGRSELLAWLQEHGVCKAVMEASGGYEKGWARLLRGAGVEVVIADPKRVRHFAKSAGQLAKNDPIDARMIAWFGEVFGHASGQPHDEARQELDQIVTARLGIARLKEQIDNWGEHEQPKAVQKVHQALLKAVATQLAKLETIIAAKIGKTERFAQRAEIIQSVPGLAGTAAAGIIAFLPELGLVDRQAAAALLGVAPFDADSGQRRGERHIQAGRHKLRKLLFMPILSAATQHNPVLKACYQRLIARGKKAKVALIACMRKLIGILNTMLARGEKWDPAKHAIT

SEQ ID NO: 147214 - protein, 384 aa, unidentified
MKKTQETLRIKDNTKTAVLYIAFELSHSKWKLGFSNGEKMRTVTIEARDLDQLQEQIDKAKKKFGLEGQIRIVSCYEAGRDGFWLHRYLLSCGIENVVVDSASIEVNRRKRRAKTDRIDVRKLLHKLLRYHGGEQLVWSVVNVPSEEAEDGRQLHRELDVLKKERIMHRSRLKSLLIQQGIVVTNPSSRKFLIQLESFRRWDGTELQADLKSRIIREHGRLRMVEEQIYALDKEREKRVTAADDASMQQIAHLMTLVGIGMNSSWKFVMEFFAWREFKNGKQIGALSGLTPTPYDSGASQHEQGISKAGNERVRTLAVEMAWVWLRFQPQSKLSKWYTQRFAEGGKRMRRIGIVAMARRLLIDLWRYLEHGVVPEGARLVGSAK

SEQ ID NO: 147215 - protein, 338 aa, unidentified
MAIIAIGIDLAKNVFAVHGVDEAGKAALVKPSVRRDALLELVAKLPPCLIGMEACSGAHHWARQFQALGHTVRIIAAKFVAPYRLSGRKGKNDAADAQAICEAVQRPHMRFVPIKTEDAQGRLSIHRVRQGFIETRTATINRIRGLLSEFGIVLPQKAEVVRREAGHHLEDLPGWANTAIGDSLSELHHLDERIAEYDRHIEVMARADDRGRKLMEMPGIGAKTASALLASIGNGHDFKCGRQLAAWLGLVPGQYSSGGKQRLGRITKAGDSYLRTLLILGARAVVAAGKNKTDRLSRWAQSVAERRGYWKAVVAVAAKNARMAWAMLSKGEAFKPLA

SEQ ID NO: 147216 - protein, 372 aa, unidentified
MDGSLVYVGLDVHKETIAVAVAHRDPPAELEELGTIPNRPEAIQRLMLKLRSRAPLAVCYEAGPCGYAIHRQLRALGIDCMVVAPSLIPVRPGDRVKTDRRDALKLARLFRSGELSAVWVPDPAHEALRNLTRLRAVAHHDLTRARHRLSKFLLRSGCVAPVDARPWTQRFLDWTRAVRLEQPLDVRVRDDYFNLVVHLQDRITALDQALEEAARTSPMARRIAALCSMRGVSLITATTLVAEWGEIARFTRPRQLMAYTGLVPSESSSGARTRRGGITKTGSSYLRRVLVESAFAYRHRPLLGGVLRRRQQGQSEEVKRIAWKAQQRLHRLYTRLMARDKRHQKIVVAVAREMVGFLWAIDREVTNATPTA

SEQ ID NO: 147217 - protein, 416 aa, unidentified
MNKGQNTRGYQRYMALDIHREYILVGAQNEEQDWVLTPRRVSIEKFPEWAKKNIRSGDIVVLETTTNVWATYDIVAPLASRVLVANAADVEEIAKARVKTDKEDIKRLLKLLIGGIVPEVWVPPLQVRELRAFISYRGRLVKTSTMIRNRLQSLLHKHNLKLSAEGLLDQVWWEGQKTISTLEKMQIRQELVLLQEVEKLKVAVDEELERQSTGAIWGKQALQLMQLPGVGFVVAMTVLSAIGDISRFESAKQLVGYAGIGAGVHDSGKTHKEKKITKKGRKELRWALVEAAWRAVRMSPFWKAEFEKHLSRLRKPNQAIVVIARKLLITIWHVLSKEETDIHASEEDLAYKMLLLSWSLSEDVRLGLNYKQFAKYALIKLGVENDITRFVRKNVPRRLAPREEVLARMAELGLTV

SEQ ID NO: 147218 - protein, 343 aa, unidentified
MEQISTIGLDIAKSVFQVHGINGAGEVIIRRQLKRRQVLAFFSRLPACLVGMEACATSHYWARELVELGHDVRLMPPRYVKPYVKRNKNDAADAEAICEAVQRPTMRFVPIKRPEQQSVLMLHRTRQLFVRQRTTLINAIRAHMAEFGIVAGVGRNGVETLLGVIAEGQDERVPPAARECLMALAAQLHMVKRQILEADRRVLAWHRSSKTSKRLEAIPGVGPLIATALVASVPDPHIFRSGRDLSAWIGLVPKQNSTGGKERLGSISKAGNRYLRKLLVIGALSVIRRAKKLGYTRHPWLVRLMERRSTMIAAIALANKIARMAWAMMARNECYRTPLPAAA

SEQ ID NO: 147219 - protein, 338 aa, unidentified
MAILTVGIDLAKNVFAVHGVNEAGKPDLVRPSVPRAKLHALVAALLPCTIGMEACSGAHHWARLFAAHGHTVKLMAPKLVAPYRMSGKRGKNDGADAAATCEAVQRPNMRFVPVKTEEQQSRLMVHRARQGYVAARTATINRIRGLLAEFGVVLPHKAEVVRREAAAQLEDLPGYANTVIGDLLSEVHHLDERVKQYDVHIRAMAHECTAAKRLMQLMGVGEVTATAIVAMVGNASEFDSGRQFAAWLGLVPGQYSSGGKARLGHITKAGDAYLRGLLVIGARAVLNAAADKKDSLSRWAVKVAERRGYWKAVVAIAAKNARMAWAVLTKGEAFKLPA

SEQ ID NO: 147220 - protein, 366 aa, unidentified
MLIHVPPHACVLAMDVHANTISAGVLEPGWESPVVDKISADDESVRRLLGRFEERGRVWACYEAGPTGYELARLLRSSGMRCEVIAPSLIPTAPGQRVKTDQRDARRLALLFRAGQLSAVRVPAPAEEAVRDLCRARADMVIDRTRARHRLGKFLLRHGRVWRGGDNWTLRHEAWIRAQRFDERALTETFAHYLATLEAREAAVEAIEADLMPWCGRAPFAAGVRRLAAYRGITDLGALTLCSEVCDWRRFPLASMFMGFTGLVPSEHSSGERVSRGGITHAGNIHLRTQLVESAWAYKSRPQLGATIKKRQEGLDPAVVARAWAAQLRLCGKFRRLDARKTNRKVVVTAIARELAGFVWAEMARN

SEQ ID NO: 147221 - protein, 428 aa, unidentified
MKYNTQNAKIKSITEETLIVGIDVGSETHFARAFDWRNYEYSKKPLEFSNTEAGFMTFKAWMEDIAEKHGKDVVIPGMEPTGHYWFNLGAFLQDNGMKPVHVNPHHVKKSKELDDNNPNKNDRKDPKTIAALVNEGRFSYPYIPTGIYAEIRNLSNLRLQTQEEITRIKNRIARWFRIYFPEIKDVYKNPDSVSGLMVLKVAPLPQDIVKLGVDGINKIWRDAKLRAAGPKRAKTLLTAAEHSIGSQEAPESARIELKNLLNDYEIYRKREEDLMGMIEQKLLEIPYIDKLLEIKGIGMKTVSGFVAEVGDITRFDDPKQLQKLAGYAIVECSSGKHKGESHISYRGRKRLRYVLYEAAISLIARNEEFKEVHRYYRTRKENPLKKMQSVIAVACKALRIFYMILTKGVSYDGAKMLQDIKRPQMLAA

SEQ ID NO: 147222 - protein, 411 aa, unidentified
METVIRRCAGLDVHKTTVVACVRVIDENGELQMQTQTFGTTVSDLLKLNDWLMSYAVTVVGMESTGVFWKPVYALLESEFECWLLNAQHLRNVPGRKSDVADAAWIAQLVAHGLVRPSFVPPKAIRDLREITRYRKRLIQERSREAQRLHKTLEGSGIKLSSVATDILGVSGRAMLEALLGGTHDPVVLADLARGRLRKKIPALRKAMVGWFSPTHRILVTELLAHLEYLDESIERLSDDITTMVAPFAPAIDLLDTIPGVNRRGAEVVLAEIGPDMSRFGSSGRLASWAAMCPGNNESAGKHFSGKTRKGSKWLRTALVEAAQGAARTKGTYLAAQYARIKGRHGHKKAIVAVAHSILVIAYHLLESGKPYNELGGDYFIERQNKEAYQRRLVKQLERMGFEVALTAAAA

SEQ ID NO: 147223 - protein, 411 aa, unidentified
MIKENYIYVGIDLHKETHTAVMIDCYNQKLGEITFPNRPAAFPKLVTKVKKCNTDGKEVVYGLENAYGYGRALAVWLIDKGYLVKDVNTAISHRQAKHRGAMYRKSDSDDAEAIALATLNMLDKLPDAYPNDAYWSLGQLVHRRDNIMKQRTRLVNQLHEQLCIAYPSYKQFFNDISRPTALYFWEHYPSRKYLKGKSVEDLRAELAPVSHNKCSTKTCEKILDAVASDKVKNNAYQDARDMVTLSIVSDLQHYDSQLAEVDKMLEQMYKMLGCTLTTIPGVNVITAVKILAEIGDIKRFSNANKLAQFAGIAPLHLSSSGKGKDVATKQGNRRLQATIYFLAIQMVQVSSKGTPRNPVVRAYYEKRKAEGKTSQQALICISRRLISIIYGMLKNGTEYRMPVVENAGENR

SEQ ID NO: 147224 - protein, 480 aa, unidentified
MNVKARRTKKQVNVENQAINLLSKEELNKKIEVIKKELRAYTWRDLETNGKFAKDDKLSFITDDMLIVGCDIGSETHYIRAIDVRGRELSRGAFEFSNTSEGFANAKEWVLALAAKNDKKQIVLGLEPTGHYWFALATWMISNGISVVQVNPYAVKQSKEIEDNSQLKDDRKDPKLIANLVKDGNYGMPYLPEKVYADMRRLSMFRDQLTEDRIRNINRLHRELKIYFPEYMDAFGKIDGAFTLEVLKVSAIPTDITALGAEGMKNIWHNAKLRGRGYNRANEIVSYAEKSVGLTDGTDAGREAVKWYAEQILRLDEQLAEIESALHEKCREIPYAENILAINGVGENILAGILAEMGDISRFDDVKEIQKLSGMGLVACSSGKHKGQTKISHRGRKRLRYWLFQAAKSAVSHADEFKQLHEYYTTRSNNPLKKMQSLVVIACKILRVIYTILKTGTTYDPQKLLKDIKHPAASQAPMAA

SEQ ID NO: 147225 - protein, 355 aa, unidentified
MTSNTLKKLYIGMDIHKKTFRVHIDTDLCHHKNFSMESDETILQQYVQKHFPDHEVHLIYEIGCCGYGVARYFLNLGWTVMVVNPADIPRSDKHQYQKSDKIDARMLCKLYKENQLKNIYIPSEKEDFLKMLLRQRNMVVRNLRRQKNQIKSQLLYLNITIPEKFDNANWSKEFIEWIKNLSWGDAIGAYSMESKLRILDCLQSEYLSTTNELAKYFRTYHKDDYYLLKSIPGFGRLVVSAIFCELGDIRRFSNESELSNYIGVVPGIHSSGGSEKQMGITPRCRSLLRSYIIEAAWVALRADPELQAYYRKHQGKNTKSIIVKIAHKLIRRMWSVIKNKQPYQINYQTTLNSST

SEQ ID NO: 147226 - protein, 325 aa, unidentified
MQTETNYTGIDISKLFFDVAIPLADKYGHYKFSNDEAGFKALLKVLPQEVHIVMEASGPYYLRLACFLTGHQIAVSVVNPLVVRRFSQMRMSRTKTDKKDALMIAEYGKTEKPAVWKAPEQHVIQLQQREAVLSNLMKERTALLNQLESFSCSGMLDKGLKKTLIKALGYKEDLIAQLNKEMEELASRHYAEMLQHLESIPGMGKKTAMALIVLSGGFERFDDYRKLSSYIGICPRLFESGTSVKSKARICKMGMSRIRTLLYICAWSAKRCNKACKELYERLVAKGKAKKLALIAVANKLLKQAFAIATQKTKYNENYSNTTCF

SEQ ID NO: 147227 - protein, 414 aa, unidentified
MEVLYPRCAGLDVHKDTVVACVRLAGDGTTRTDVRTFDTTTPGLLALSAWLAERGCTHVAMEATGIYWKPIWHVLSDGDFALTLANAAHIKNVPGRKTDVADAAWLADLLAHGLIRASFVPEAPTQDMRALLRTRKQLVREQASHAQRIQKTLEDANLKLGSVLTQIMGVSGRAILQALIDGEDDPDRLLALVQRGVKAPPDKLRAALRGRVTERHRFLLRLHLRQVDALDAAIAEIDAEVDRDLGPFRQAVHQLRTIPGVSDLTAQVIVSEIGIDMGRFPTAGHLISWAGLCPRNDESAGERRSTRLRKGAPWLKTTLVQCAWAASRKKASYLQAQFQRLRQRRGPKKAICAVAASILTAVYHMLRDGTFYQDLGDSHFRRASPEDQANRLARQIEKLGFSCALTPHAGPVSV

SEQ ID NO: 147228 - protein, 417 aa, unidentified
MSWTGELVRLFAGDDWAEDHHDVELMDAVGRVLAKRRLPEGVAGMARLHEMIGQQLGEDTDVEVVIGIETDRGPWVAALVAAGYTVYGVNPLQASRYRERHGVSGAKSDSGDAHMLADMVRTDSHQLRAVAGDSADAEGIKVLARTHKTLIWERTRQVQRLRHQLLGYFPAALDAFDDLDAPDALELLGKAPDPARARKLTRAQVSAALKRARRRNITDKATAILAALRGEQLGQPPAVTAAYAATVRSLIAVITTLNEQVKALQGQVEEHFGQHPDAEIYRSQPGMGAILGARVLAEFGDEPHRYADGKARRNYAATSPITRASGKKKVVAARFIHNDRLVDALNAQAFASLNASPGARALYDELRARGIEHNDALRRLANRLVGILHGCLKTRTLYDEATAWSHRQNLPQSSVAA

SEQ ID NO: 147229 - protein, 347 aa, unidentified
MNLYNNMHPYYCGIDLHARLLYVCIIDSEGNVCVHKEISADPNKLATLLEPYIGNIVVGVECMHCWYWVADFCEDMGVDFILGHALYMKAIHGGKAKNDRIDSFKIANLIRGGNFPLAYVYPKEMRATRDLLRRRMKIVRHGADLKAHIVNTTSQYNLPPNKVNLKNVGAREQIRTNFTDVSVQKNIDLDLNLLDCYAEQLSKVEWYIQTQAKQHNPVHLHLLKSIHGVGKILSLTILYEIGAVTRFETVQNFASYARLVKCKAESAGKSYGTQGNKIGNAHLKWAFSEAAVHYLRGNDKAKKYLVKLQKRMSKGKALSVLAHKLGRCVYFMLKNETVFNEKQFLKS

SEQ ID NO: 147230 - protein, 348 aa, unidentified
MNLKRIGLDTSKAVFTLHGVGQDEKAVLRRDMRRAEMEAFFAKLPPTLVALEACGGSHHWGRRLAAMGHTVQLIPPQYVKPFVRRGKNDRNDAEAISEAAARPDMPSVPVRSAEQQAEAMVLSARELLVRQRTQLVNAVRGHAAEFGIVAAKTISQLPGLLEAVAAAEAVPATAKEMLAFLGAQVAQLDGQIAELERRMKQQHKANALSQLLAEVPGIGPVGALSLALTIDPGRFASGRHFAAWLGLVPKEHSTGGRQRLGGISRAGNERLRQLLVLGAMAVIRFAKPGSKSASAWLLALLERKPRKLAAVALANKMARVVWAMMATGEAYRGSKEVATPAAGAAAAA

SEQ ID NO: 147231 - protein, 430 aa, unidentified
MKSNTQNAKIKAITETTLVLGIDVGSETHYARAFDYRGIEYSKKPFKFSNDEAGFVTFKAWILDIKEKHGKDKVVPGMEPTGHYWFNLGKFLQDNEMKPVLVNPHHVKKSKELDDNNPTKNDRKDPKVIAGLVREGRYMIPYLPEGVYADLRTASNMRFQLQAELTRIQNRISRWFNIYFPEYKTVYGQPDAKSGMLILKVAPLPEDIMTLGIDGVNQIWRDAKVRAVGKARAKTLIEAAEHSVGSKEGEISARMEIRMLLEDYESRNTRLQEVVALIEELVKKIPMAEKLLEIKGVGIKTVSGFLAEVGDISRFNNPKELQKLAGLALVENSSGKHKGEITISRRGRKRLRYLLFEVAMSLVSKNPEFRELHSYYTTRKLNPLKKMQSLMAVAAKLLRVFFAMLTKGVDYDPKKLVGDIKRPAVYLQIA

SEQ ID NO: 147232 - protein, 359 aa, unidentified
MAYIAFDAHKRYTLASVAQADGQLLREEQIEHERGALQAFLARCERGSPVAVETVGNWYWIVDEIEAAGCRPKLVHARKAKLMMGQINKTDKLDARGLNLLQRNGTLPTVWIPPGELRDQRELPRTRMVLVRQRTRLKNRIHATLAKYALRCDEVTDLFGVQGRALLRRHLEALPPHTAFTTRGLLEQVERLDRQVRALEDRMRSVFEPTPMVQWLMTLPGVGFILAVVITLELGDIRRFPDAERFASYAGTTPRVHASAGKTRYGALRPDVNRYLKGAFMEAANVINLHRRYYPRRHVTRLYVRLARRKGHPKAIGAVARHLAEATYWMVTKQEGYHEPIASRPSRLGRSRGASAVSP

SEQ ID NO: 147233 - protein, 355 aa, unidentified
MDSKKYIGMDVHKESISIAVMNASGKIGMECVIETKASMILQFFDGLRGDLQVTFEEGTSAAWLYDLLKPHVTKLVVCDPRKNAAMREGNQSDKIDARRLAELLRLNHLHPVYHGEHGLRSLKELVRSYLTITKDLGRVMSRVKAIYRSWAIPCTGKQVYAPRHRVEWLGKIGEPGVRRRAEFYYQQLDALRAVRQEVRRELLAEGKKHPAWKRLCQIPSIGPIRSAVLLGILQTPHRFRTKRQLWAYSGFGIETQSSADHRRVNGRLQRAKKPNSIRGLNRNCNHDLKNLFKGASIVASSKPGPFQEFYTALLTKGIRPEMARLTLARKIATIVLMVWKRGACFDAQHLKPQTA

SEQ ID NO: 147234 - protein, 339 aa, unidentified
MKYTPVGVDIAKHVIQIHFINEHTGEVVDKQLRRQDFLTFFGNREPCLISMEACGGSQHWARELTKLGHKVRLLQARFVKAFVMGNKNDVMDARAIWMAVQQPGKEIAVKTEEQQSVLVLHRTRMQLVKFRTAQINALHGTLLEFGETIHKGRAAMEREFPEALERMKERLPPYLIMVLENQYNRLNELDSLIEDIEKQLTSVARQNETCKRLLDIPGVGPLIATAAVATMGEASAFKSGREFAAYVGLVPKQTGSGGKVRLLGISKRGDTYLRTLFIHGARAVALVAKEPGPWITELKKRRPASVAIVAMANKLARTVWAITAHDRKYDRNHVSIRPY

SEQ ID NO: 147235 - protein, 410 aa, unidentified
MLFIGDDWAEAHHDIEIEDESGRVLARRRLPEGLAGITTLHELVAEHLDPTAEPDQVQVGIETDRGPWVQALLAAGYVVFAINPLQVARYRERHSPSGAKSDAADAHLLAEIVRLDRAHHRRLAGDSEIAEHVKIAARAHQTMIWSRVRQVNTLRSLLREYYPAALAAFGTDLASRDALAVLTVAPSPDMGRRLSQSRIETLLRRAGRQRNVSSTAAKIRAALTSEQLAARPGVIGAYTASASALLAVLSTMAAQTEVLAGQVEQGFGQHPDAEIYRSQPGLGDILGARVLAEFGDDPDRYADAKARKNYSGMSPITKASGTKQVVLARYARNRRLGDALFLQAFAALNNSPGARAFYDRQRARGATHYQALRALANRLVGILHGCLRSHTHYDEHLAWHSEPDKLSPAA

SEQ ID NO: 147236 - protein, 436 aa, unidentified
MAQDGESVEVEETEELVARVAAIDVAKASGMVCTRVPHPAKPGQRATKVWQVPATTNAIIELAEQLACQGIQRVVVESTSDYWRAWLYLLEARGLVVWLVNARDVKHLPGRPKTDKLDAVWLARLNERGMLRPSFVPPAEIRRLRDYTRLRSDLTAERGRHVQRLEKLLEDALIKLGTVATDIMGVSGRAMLEALIAGQRDPKVLAELARGRMRGKRGALVQALTGRFDDHHAELARMLLDHYDALTGQIDRLTVRIQELIGAIPAAQAPSDGAGPTGGGDGGTTGVGAKAAQVIIAELGLDMGQFPTPGHLVSWARLAPRTIQSGAKHRAGATGKGNPYLKGVLGEVAAAAAKTDTFLGERYRRLVRRIGKLKALVAIARSILVIIWHLLADPTARFHDLGAGYYPSRIDRDHKTRNHVRQLQALGYSVTLTPAA

SEQ ID NO: 147237 - protein, 341 aa, unidentified
MATFTACLCQRSEDGGLTFSKVVSFSNEIKGYNQFLRWVKSVIASGPELVFLMEATGVYYENLAHHLHKINKTVYVVLPNTSKHYFSSLNIKTKTDIVDARVLSQFGAERVHKPWIPPPAALLQLRNLTRYYVQLQEQKTALGNIKHSKDCSHEVQIFIIKSNKGLIAEIDKQIAKCLAEIKRLVELDKEFKSRINKLATIKGIGLITMVTILAETMGFEQFHSAKQLVSYAGYDIVQRESGTSIKGKTKISKKGNRYIRNALYFPAMVACRYNPRLKETYLRIILKKPSKMIGQVAIQRKLLILIYTLWKNDTEFIEDYKVGSPDQKTEATQDSSVPELL

SEQ ID NO: 147238 - protein, 375 aa, unidentified
MKEKVRFLGLDVHAETIAVAVAEPDGEVRSLGTIPNRAESIRKMIRKLGPAEQLRACYEAGPTGYVVYWQLSELGVQCEVVAPTLVPVKAGDRVKTDRRDAEKLARCYRSGDLTAVWVPDEGSEALRDLVRAREAAKQDQLRARHRLSKFLLRSGQRPAPGVKAWTQIYMAWIRQIRFAQMAQESTRLDYLHEVEHMGERVVRLEQAIAEAANLASPEVQEVINGLQALRGIAHISAVTIAAELGQISRFESARQLMGYSGAVPSEDSSGQRTQRGSITRTGNAHLRRIAVEAAWSYRLPPGVGPALRKRQEGVPDEIKEIAWKAQHRLHRRYCRLAATRKDQRKIITALGRELLGFIWAIGVKAETAARERIAA

SEQ ID NO: 147239 - protein, 361 aa, unidentified
MKKIAYIGIDYHLKTLTCAVLIENEKDFYDTIRFKNNDKNMKKYMKKLSDKYDIKTCYEASCNGYSFQRKMQSWGFHCDVIAPSLIPKKPGDRRKNDFRDARNLTQHYAQGMLAIVHPPTEEEESVRHLIRCRIAMKKNEKSVKQQINSLLLTQDLRWPTTKWTGQHRVWLSKLRLRDKYSQQVLDELIGLLDYLGSRIHYLDKQIEEIAQSEIYAPSVKKLKAFKGIQTLTAMLLIAEITNFRRFPNPRALMAFLGLIPSEDSSDDVKKPGAITKAGNSRCRTQLIESVIHYIKRPIISTQMKNDLKEVDSHSANIAIKCMKRLHKRYWFLLMKGKNSNKARTAIAREFVGFIWAMMQPA

SEQ ID NO: 147240 - protein, 339 aa, unidentified
MQLYAGLDLHSRNTFIGIMDQEFKRVFAKRVSNNLPLIIKTLEPFQDQLQGLVVESTYNWYWLIDGLMDAGYDCLHLANPSAMKQYEGIKHTDDQHDSFFLAQMLILGILPEGYIYPKEDRPVRDLARKRLFLVRHRTSHILSLQSLITRCSSQRFSANEIKKFTVDDLQQLLKQEYIVLSAQANLDTIGFLSQHILRLEKAIKKKVKLNNAFQQLLTVPGIGFILAMTIMLEVGDIGRFPQVGNFASYTRSVSSNRFSNGKSKGHGNRKNGNRYLSWAFTEAAHLSRRYNEHFRSYYNRKVAQANTSLATKALSNKLARICYYIMQDQIPFREELQSH

SEQ ID NO: 147241 - protein, 360 aa, unidentified
MERNTENEGHLVVGGVDTHKDLHVAAVVNEHNGVLASRCFPTTRHGYKQMLAWMRSFGVLQRVGIEATGTYGAGLLRYLQRAGVEVLEVTAPDTQDRRRRGKNDDLDAQNAAHAAFAGRRTVTPKSRDGMIESLRVLKACRKTAVAGRRVALQMIHTTIVSAPDELRETLRRMTRMQLIRTLAAWRPDLTDYRNVVSAYRIALRSLARRYLELHDEIADLDTMIIAIVDELAPALLARNSVGHGSAAQLLLTAGDNPQRLRSEAGFAALCGVSPVPASSGKTTRHRLNRGGDRAANSALHIIAIGRLRTEPRTKAYVAKRIAQGHSKLEAIRCLKRNIACELFTLVRQRAREVNQAAVAA

SEQ ID NO: 147242 - protein, 352 aa, unidentified
MITIGVDAHKHVHVALALDEAGREMDRWRGPNSPAGWREVSSWASQLSGDTQWGIEGAWGYGRGLAQHLVHEGEAVFEVNPRWTALGRRRARRPGKSDNLDARAVALVVRQEAPALPKVLSEDDTAVLDLLSNERDQALSEATRIRNQIHALLVHLDPEYDRRLPALKSKAGLAALMKYSCHSHEPLQIERAAAVRRLAERLQLALAQAGDLATRIRELAQPRFERLTELCGVNLLTAGTLAGILGPGRRFRTDAQLAAYAGVAPLEASSAGLIRHRLNRGGNRRLNAILYRITLTQAHHSAQARAYLDRRVAEGKSRREGMRALKRFVVRAIWRLWLQCNSAPALPLATAA

SEQ ID NO: 147243 - protein, 398 aa, unidentified
MYKLTTTTTVVGIDVHKYSHTAVALNCLGKELGTLEFSNNNLPDFQTWLERLDTRDNLIIGLEDINRHGLHLTRHLLKSQFQAIYVPPALTERQRVHSTHREKTDHIDAKRVGKAILNKIEEALPATDIISSKFAVTRSIDLLVQEYDNSCKDQTRLKNQLHALLHQYYGDNYRQEYRSPFTNKAVAWYQEDLQRDLQRNLHGDTQDDVREGNQSEEDTHSRENNLPEGDNHSDQLTDILAGSLLRRLTKLTIVQGQLRSTLKELELITNDNQQVQTLKDQIPGCGLLTACRIISEIGDINRFQTANQLARYMGLAPVHRSSGQRQRLHTDRYGNRKLNKAIHWIAIAQIGGSGYPPAKSYYQRKQQEGKTKLWSIRCLKRQIVKVVFKQLSTSQGTS

SEQ ID NO: 147244 - protein, 349 aa, unidentified
MEQYAGIDVSLELSSVCVVDAKGKIVKEAKVASDPEALVLFFKGLGFVVERIGIEAGPLSQWLHAGLTKAGFETVLLETRHVKAALSAMTVKTDRKDARGIAQLIRMGWFRPVHCKSTGSQEVRALLVARKLLLGKLLDLEFSIRGILRGFGLKMGAVTRNGFETRVKELCAGQAMLELIADSMLAARYALQKHYTKLHKAMLSIVRSDAICRRLMTAPGVGPVVAITFKTAVDDPTRISKSKAVGALFGLTPKKYQSGETDVTGGITRVGDESVRTALYEAANVLLSRVTRFSALKRWGMDVAKRRGMKRAKVALARKLGVILHRMWIDGASFRWTKQAGGDKQLARA

SEQ ID NO: 147245 - protein, 374 aa, unidentified
MADCSEVFVGLDTSKLRNAVAIAEGGRNGEVRYLGEIENTEAATCKLVKKLAAQHRRLTFCYEAGPTGYDLHRLIKTLGHECVVVAPSLIPKKPGDRVKTNRRDALNLAKLLRAGELTAVWVPDARHEAMRDLVRAREAAVADLKSKRQQVLSLLLRLGRHYTGKRTWTRAHMNWLVSQKLAHREQRIAFEEMLLAVRQADERVIRLERAIAAAVTDWSLAEVVRALMAVRGLDLISATIFLAEIGDLSRFATPRQLMAYLGLVPGEESTGDRVWRGGITKAGNHRARRILVECSWSYRHPPRVGKKKLGKVEAAPPAVQEIAWKAQARLTARYRALARRGKRPTLVVTAIARELSGFIWAVSRAIGAPTTPAM

SEQ ID NO: 147246 - protein, 419 aa, unidentified
MANLKPTEQNTVLVAIDISKHRHEVLIAIPGKKRNRRFTLTNSLEDFDRLIAFLKNLDASVRVGFEATGNYHRALVFALGKAGFELKLVSSVAMARTREALHNSWDKNDPKDAQVILHMLQIGVVQVFCDPLVSGNNDIQELSKTHDIVSRSKTELWHRILTHYLPLYFPEADRFHRSSRSDWFFAFLEMFPSPYLISTLPKSMFLEQAWDVVGRKVNKKALLSDIYETAVHSVGLPVEPDSEALGMFRLVLAQGRDLIRQRNLIEARAIELLAHRSDYQLLTSIPGIGPINALTILAEAGNIQRFVHHRQFLKFCGMDLATIQSGTFKGQSKISKYGNARLRRTLWMAGQTAVLQRANSFRDKFERYISKDRHNPHLRRKAYTAVAAKMARTVHAVIHSGELYRPFYEGASPGGRTSL

SEQ ID NO: 147247 - protein, 353 aa, unidentified
MTNDKYVALDVHKASVVIGVRDAAGKLISRSVVQTKAQTLKDYLRGLSGTIHLTFEEGTQAAWLYDLLKPLVTECIVCDPRRNKLLEMGNKSDAVDVEKLSELLYLGRLRAVYHGGQGTRALKELAQSYEALVKDNTRVKNRLKAIFRGRGISYEGADLYDYEQRGKWLGQLAERGVRERASQLHEQLAQLEQWVNNARLQMLRESRKQKARQVLEQIPTLGEISVAQLIATVDTPFRFRSKRQFWTYCGLAVVRRSSADYEFTQGELRRRRQPGPTRGLNRNYNRRLKRIFKSAARTGSRKGPFKPFYERLLARGLKPELAQVTLARKIAAITLTLWQKGATFDPEKLKQSE

SEQ ID NO: 147248 - protein, 407 aa, unidentified
MSGKKPPPHRFVGLDVHKHYLIAAAVDPDRKEVMSPRRVPLARVDSWVRKTLTLQDAVVLEMTTNAYQLYDDLLPHVHSVTVVHPPHVALITRARVMTDKIAARTLANLHAVGLLPPIWIPPSEVRDHRALVAQRAKMVRLSTQAKNRLHAVLHRHHFLPPPGMLFDADMHEWWLGLEISALEKARVRCDLDTLTFAQDQIHLLEETMLTLAIQDERVVRLLHLPGVGLITAMTLLAAIGDISRFAQAKNLVGYAGLGARVHDSGQTHRTGGITKAGRRDLRAAMIEVAHTAARTHPHWQAELARLEPRLGKNKAIVAIARKLLVAVWHILSKGCPDRFADPERVARKLLKLVNRLGPARRPEGQTAVQYVRHLLDCLGLGAEVTSVPWGKTRRIHLPPSQLAAEVN

SEQ ID NO: 147249 - protein, 346 aa, unidentified
MNQITRIGMDTSKHFFQLHGVDAAEQPVLRRKLRRNQVLAFFAKLPPTVIGMEACGAAHYWARELRKLGHEVKLMAPQHVKAYVKRNKNDGRDAEGLCEAMSRPTMQFVPVKTEEQQAALMLAGVRQQLIARRTQLSNAIRGYAAEFGLTAAKGLDKIEPLLARIAQDESLPALAREMFAIEGREYAQLQVKLKAIEARLMAWHRANACSRRLAQIPGVGPIGATTLVMKTPDPGAFPSGRHFAAWLGLTPKDHSTAGKTRLGKITRAGDEVLRSLLVAGATAVIQQVRNGRGRPSPWLLALLKRKPPKLAAVALANKIARIAWKLMTTGESYDSARMPGASAFAA

SEQ ID NO: 147250 - protein, 368 aa, unidentified
MLIIGVDYHPSDQYIAFADTETGECGERRWNHSDGEAEKFYRDLQSRAASVRVGMEATGYSRWFERLLAELGIELWIGNAAEIKTRRVRKQKTDSNDARLLLKLLLEDNFPRIWVPSPENRDLRQLLWHRHRMVGMRTRIMNQLQALAMNEGQRRKKKLWNEQGRAQLEKLPLAPWASRRRKDLLELLDRMNPTIEELTRSIEREARKRTEVARLMTHPGVGPITALAFSLIIGTPERFGCGKQIGSYVGLIPAEDSSAGHQRLGRITKQGSTLLRFLLVEAAQAAARCDAGWRQRYMHLAMRRQRNIAKVAMARRLGVRLYWMWRNGWEYADLVKFGSNAGQLGTGHSVHSNAVHLNGHPAPLREGV

SEQ ID NO: 147251 - protein, 423 aa, unidentified
MPPEKPVPSTSSGQAPSAMLRAGPTRFIGLDVHKHYLIAIGVDAELNQVLGPQRVQLRHLEKWMRKTLTPQDAVVLEMTTNAFQLHDDLLPHVHSVTLVHPPHVKLITRAQVMTDKIAALILARLHAVGLLPPVWVPPLEVRDHRALVAHRAKMVRLATQAKNRLHAVLHRYHLLPPGGGLFTPDAREWWLTLDVTPIQHARIQSDFDTLAFAQSQISRLEETLTAVAAQDKRVLLLVQLPGIGLITAMTLLAAIGDISRFPDAKHLVGYSGLGSRVHDSGLTRRTGGMTKAGRRDIRAAMVEAAHAASRTHRHWKAELARLEPRLGHNKAIVAIARKLLVAVWHVLAKGCADRFAEPDLIARKFLSYAETLGKANRPDGQTAAQYVRYHLDRLGLGADLTAIRRGPNKTISLPPSRLILAGN

SEQ ID NO: 147252 - protein, 376 aa, unidentified
MESGSLMLNTTTFVGLDVHARSIKAVALDAMTGEVRSATFGYDAAEVAGWVSSVDPSAKCVYESGVTGFDLQKRLSSMGIDCVVGAVSKMIKPSADRRRKNDRNDAEFLARMLSVGNVVEVWVPDDECEAARDLVRALDDARDDLKRCKQRLSKFLLRHGHAFSETTPSGRRKGNWTAAHWAWIKSISFAEKADDDVLAYYIDATRQAMEDKARLERLVEAEASKPRWKRRVDSVRCLKGIDVMSAADLVFEAGEFSRFKNARSFAAWIGLTPSEHSSGESVRQGGITKAGNKHLRRVLVESAWHYPGCSPHSKDLAKGQAPDPGARRHAAKGVRRLVGRRAAMLERGVHKNKANVATARELACWCWAIGCMVENG

SEQ ID NO: 147253 - protein, 405 aa, unidentified
MLYLGIDLHLKQITVSLRNEGGDVVLRRQVSTRWPKLAEFRRQLAEAAAGDEKYVAVVEVCGFHDWFVKWLRGDPRCHMVLLVQPLGRSAVKTDPRDAHALSELLWINRERLLRGERVHGVRTVHQPDEDQQADRRLTQLRERLVWRRTQTINQVHKILRRNNLEWDRPTKTFQTCKVIRWLRSMQLNSMDRLAMNQLLVQWKLWEEQLLEVDTRMTSRFLANRDAQLLATIPGVNTYIALAIACRIAPIERFPHGRSLANFLGLTPGCRSSGETERPGSITKVGSRMVRSLIAQVILHLLRKDGAVRTWYQRIKRRRGSRIARVAVMRRTAAIMQRMLSKGEPWRAEKVDSATSETGNKRRRVQPRQRRKTVPSALAERRTESPSSSTGSSSLPAGEEVAQCPV

SEQ ID NO: 147254 - protein, 370 aa, unidentified
MGKSRTIYVGLDVHKDSIAVAYAAEDRDAEVNYLGPIGTRQCDIDQLVRKLQSKGGELIVAYEAGPCGYGLFRYLNKKGLRCLVVAPSLIPRKSGDRVKTDRRDAVQLARLLRSGDLTSVYVPEPGDEAIRDLCRAREDSMVDLKAAKFRLKSFLLRHDIRATGKADWRPAHLRWLAEVVCPIPAQQIVFQEAVRALAQAFERVERLELLLRDQASSWRLAPVVEALQALRGVQFTVAVTTVAELGDITRFSRPAQLMSYLGLHPSEHSSGVNRRQGGIAKTGNGHARRVIVEGAWAYRYPAKVSRQIQERQESLPEPIRDIAWRAQVRLCQRFRTLIARGKHPNVAVTAVARELSAFMWSIAKQVPIAN

SEQ ID NO: 147255 - protein, 334 aa, unidentified
MENIALIGIDLGKNSFHIHCQDRRGKAVYRKKFTRPKLIEFLATCPATTIAMEACGGSHFMARKLAELGHFPKLISPQFVRPFVKSNKNDFVDAEAICEAASRPSMRFVQPRTESQQAMRALHRVRESLVQDKVKTTNQMHAFLLEFGISVPRGAAVISRLSTILEDNSLPLYLSQLLLKLQQHYHYLVEQIKDLESQLKRKLDEDEVGQRLLSIPCVGTLTASTISTEIGDGKQYASSRDFAAATGLVPRQYSTGGRTTLLGISKRGNKKIRTLLVQCARVFIQKLEHQSGKLADWVRDLLCRKSNFVVTCALANKLARIAWALTARQQTYVA

SEQ ID NO: 147256 - protein, 457 aa, unidentified
MQGKQKQARGRSAGQLLTLNEHAAGLDVGSTFHVVAVRSDQDEEPVRTFRSFSGDLHRMADWLGSVGIKTVAMESTGVYWIPVFEILEARGFEVLLVNARDVKNVPGRKTDVNDAQWLQQLHQHGLLRGSFRPRDEVVRLRAYLRHRERIVEYAASHVQHMQKALMQMNVQLHHVVSDITGVTGMRIIRAIVAGTRAPEELAQHRDVRCAASAETIRQALTGNYRPEHVFALKQALELWDVHQAKIAECDIEIETVLKSLNEKRAAPEAPLPPVRHAKARNEPKFDVRPALYTLLGTDLSQIHGFGPYTVLKLVAECGDDMTKWPTAKHFTSWLSLAPGNKISGGRVLSSHTRRSSNRAAVLLRIAAVNIGKTQTALGAFYRRLAARTGKAKAVTATARKLAVLFYRALRFGMTYADPGAEYYEERYKRRVIDSLQRRAHGLGFTLVANVAATEGVS

SEQ ID NO: 147257 - protein, 351 aa, unidentified
MSNSVVAFAPCGIEVSQRTLVVALRGPDHDEPLREFPNTREGHQAVLRFLERAARPVRVALESTGLYGLDLALTLHQAGVAVMVANPRAVRHFAQALLQRSKNDQLDAAVLCEFAARMPFQPWRPPSAAAWKLVAVARRLEALTDLMAAEKNRAHAASLSEALPVIVRRDIQRSIQTQQRAIDRLTRAAQEFILADRELARRYELLLSIPGFGATSAVHTLAELALLPPDMDIRQWVAYAGLDPREYSSGTSVHKKVRISKAGNKHLRRALYMPALVAVQHQPQVRAYYEHLLARGKTKMQALVATLRKLLHAIYGMFKHDQLFDGQKVYTSTSPTLAPPPSIPEVICAQT

SEQ ID NO: 147258 - protein, 345 aa, unidentified
MKIIGCDFHPSFQQIAICDLETGEVQELKLSHADGQAERFYRELGEPALIGIEATGNSQWFLDLVQRLGHEIWVGDAAKIRASYVRKQSTDKRDAGHLLKLLLEKRFPQLWTPSAAMRDQRQLLRHRDKLVEIRTKVKNSLQHLALNQGMQKKSRLWTRHGMEQFHQLAMPGWAGTRREDLLQLLKELNGQIEPLDQAVKQAAEQHPQAQLLMTQPGVGPVTALAFVLTVGDVARFAGSKQLTSYLGLVPSEHSSGSKRHLGAITKQGNCFLRKLLVEAAQTAVRKDEGFRKEYQHRCRRRPKGVAKVAAARKLAVRLYWMLRNNVSYPEIARIESNPRVALGDV

SEQ ID NO: 147259 - protein, 386 aa, unidentified
MRGKTFIPADYHVFAGLDVDKRSISVTFTNHQGFIRSLQMPYSAEHLLNYVRKHFPDQKIAFAYEAGPTGYGLYDGLVAQAYPCLIAAPSMIPKAPGQRVKTNRLDSRGLSENLRGGQLRSIHVPSAIYRELRHLTQLRDTFVSEMVAMKQRIKSLLLFEGIEFPPAPAGNGQWSFMVKDKLRKLPCSSTVRFKLDQLLESLEFSEKQVFKTTKEIRRFCRTDPELSQCIKYVMTVSGIGWIVASQLLARIGDWRELKNVRQLGGFLGLVPTENSTGDRTDRGSITHTGDGRLRSKLIQASWSAIRQDGELREFFRSVCQTHPRHLASRVAIVAVARKLSVRISAVLMQQRPYVVREKVHSAPLTQEETVPQGTTRRQAEPGDKNS

SEQ ID NO: 147260 - protein, 348 aa, unidentified
MEAPLIFVGIDVSKAQLDVAIRPSAQSLSVTNDRAGIKSLIKHLKKLRPQLVVLEATGGLERQVLSALIAGEIPVVMANPRHIRDFAKSIGQLAKTDRIDASVIAHYAEAVRPKPRPLPDEASLELRALSARRRQVVDMIVAEKNRLATASKVVKKRITAHIAYLEQELNDADQDLDRFIEKNAAWKENQQILCSTPSIGPVSSRTLLVELPELGALDRKKISALVGVAPFPRDSATLKGRRTIWGGRASVRSALFMATVVATRFNPVIRDFYKRLKAKGKPSKVCLVACMHKLLTILNAMIKNKIRWSENLLTRPLDMKHSCYISGLRLRLARSCTGEFIPSADCGF

SEQ ID NO: 147261 - protein, 367 aa, unidentified
MTVTIVDAARPVTGGVDARRDLNVAPCLVTGGVDTHLDLNVAAALDRVGGLLGVAEFPATAAGHRELLGWLAGFGPAARAGVEGTGSYGAGLARFLRRAGVEIVEVDRPNRQARRRSGKPDPLDAIEAARAALSGRASGAAKSRDGTVEAIRALVAAKRSARSAKIQALNQIRHLSFTAPEQLRQRLAGVSRHHLAARAAGLRPATGAGADPVVAAAKTALRLLGRRVLALDEEKARIDALLTGLVTQTAPGLLAVFGAGVDTAAALLVTAGDNPGRLRSEAAWARLCGTAPIPASSGKVTRYRPGRGGDRQANRALWGIVITRLGNDPRTKAYMARRLAEGRSKPEVTRVLKRYVAREACHRLPRP

SEQ ID NO: 147262 - protein, 339 aa, unidentified
MKVTTIGLDIAKKFFQLHWVDMTTGEVHRKQLKREQIAEFFATCEPSLVAMEACGSAHYWARKLRAFGHEVRLVAAQFVRPFVKTNKTDAADARAIWEAAQRPEMKFVAIKTEAQQSVLALHRLREQMVKFRTMQGNQLRGLLYEFGVALPPGRAKGMPAALEALGVLEETLPAMVIDALHQQMIRIQKLDEDIADIEKKLTLWKKEERSAMNLMEIPGVGILSATAAVATIGDATAFKSGREFAAFLGLVPKQSGTGGRVRMLGISKRGNVYLRTLLIHGARARINFQKQRDPWIEQLLARRPFNTVVVALANKMARTIWAMMAHDRTYQKNYAANIA

SEQ ID NO: 147263 - protein, 420 aa, unidentified
MSSMNGEVVAGIDVHKAMLAVVVARPGQNETEYVSRKSGAGPWQLRELIDWLLELGVTRVAMESTAQYWKPVWYALEPFFQLILAQPRSTSAPRGRKMDFADAKRIVRRLLADDLTVSFVPEAEQRRWRLLTRARTTAMQQITRLRNQIEGLLEEGQVKISGLLSDLLGLSGWRMLQALAKGESDPEVLAKLAHEHVRASQEQLREALDGRMDSAHRLLLRQSLDQIEQLRKQAEELDEEITRLLAAQQAAIERLCAVPGISLTAAFQIVAEIGPQAKTFAAPGKLASWAGLCPGREESAGISVSNRCARGNRTLKRVLTQCAWAAVRNQKSQFYRLFQRWRVVLGARKAIIAVAHRMLIVIWKLLHEGEAYIDAGCQLTPETIRRRMLKCVKGLEALGFRVVVTPNTPTAGTRRRLSRV

SEQ ID NO: 147264 - protein, 348 aa, unidentified
MQSTANLPVIGLDLAKSVFQLHIVDPESGEIERRQIKRARLMEFFAKCQTSLVAMEACASSHYWARLLMAQGHRVKVLPAQHVKAFLLRDKTDAMDAQAIWVAAQQPHIKCVPVKTQRQQACMALHGMRRQLMKMRIMQTNALRGILAEFGVVLPVGHKQFLNVVQGELAKAQQDDLLSADLVVTVQEQLKRIDGLQDDIDHIGQRLRAMLREDRQMQAIQQIPGVGELTASALVAAVGDFGTFKSGRQFASWVGLTPRQVGTGGKTQQLGISKRGDSYLRTLLISGARAVIARAEKTNWMQQLLQRRHCNVVVVALANKIARTVWAVLAKGAAFDLLKWNPIETVTT

SEQ ID NO: 147265 - protein, 419 aa, unidentified
MSKSLFCGCDVASDNNTIWLMLDDGSQPVKLFGVDNNQLGAEVLVERVYSIAKEHCVSDILIGTEATSMYDWHLLEYLAESKLALEFNLKLYRFNAKWIKNFKKSLAPRGKTDPIDSFAIAERLRMGRLPKEYVPDVKYQPLRKLTRFRYHLMQQITREKDFFLANLFLKASAYSSVKPFGSTFSATSLAVINDFFSVDELAAMPIEELTEFILEKGKSHFSKPDEIVNNLKRVARESYRLKPELTPTVNLILASTFNNIHCYKEQVKLVDSAIAENLKAFKHTLESISGIGPVYAAGILAEIGDVHRFPNDSALAQFTGLTWPKHQSGKFQAEETRMSHTGNQYLRYYLVEAANSVKRCDATYKAFYEKKYKEATKHHHKRALVLTARKLVRLVWTLLTRQALYQPGYCSFEDLSKIG

SEQ ID NO: 147266 - protein, 347 aa, unidentified
MSHKTAATGAHTIGIDTGKNTLHLIGLDDKGAIVLREKIARGRIVARFANVPRCLIGIEAGMATHYVARELIALGHDVKQVPPAYAKPFRQGHKNDFRDAHAIAEAVQRPSTRCVPVKTDDQLDLQALHRVRSRLVGQRTAVINQIRGFLLEHGIAVRQGLRFLRQQLPDIMAKRSDVLSPRMVRIIEDLSADWRHLDGRIEHVTEEIEVLAQGSEGCRQLMTVPGIGPLIASAMVAAIGNGAAFAKGRDFAAWLGLVPKQMSTGDRTILGRISKRGNRYLRTLIMQGARVILLRPANWTKHSFGPWLTAAANRLHHNVLATALANKLARIAWTVLMQARSYEARVN

SEQ ID NO: 147267 - protein, 422 aa, unidentified
MLGIGIDWAEEFHDIALGTQEKGVVEQFRIDHGPVGVATLIEHVARLEPDPAEVRVVLETRHGLLVEALVDAGFTVVPVNPDVVARRRGPARKKDDAEDARICCLLALDRHVALKTLIPHGENGGELRAIGRDDERAARDQRRLLNRLRADLQTTYPAALVLAGKDLGSPTVLRLLERWPTQPELAEASREELVTFARAGRHGWPDRFADRVAAALTAPSLPTRDYLVRAKAAGIGLGAVQLLALHEARRGWQARMAELLLGGPRTGRDHTVKDPDPGKAFPGGEIYLSMPGLGDLLAARVAGEIGEHINQFDSPAGLQCYAGSAPVTRRSGKSDFVVARRLAHNHYLGAAVHQWAFCSLLRSAWAREFYDSKVAAGKSHHAALRALSNRWLEILWHCLTKGVLYDEAVHVANRNRALGHAA

SEQ ID NO: 147268 - protein, 336 aa, unidentified
METKFVHFAGVDVSKQKIDVCVIVNNQRSEIVHNQFEQSKKGFASLKKWLVQVTARQTGKLLICVENTGLYDDALMYYLSDHDLGVSLENAANIKRSVRDHRGKTDKLDARNIALYALNHHDELRLWERPRKQVALLQQMLSERSRLVNALKMLKQAHTEQQVFSWSGRVQSKSYQSGIKGLQKDIEQVEKDVWELVKSDKELLQMFMLIVSIPAVGKITAYHFICYTNEFKQVKSGKQLASYCGVVPFERSSGSSVKGKPRLPHQANKILKKLLHLCAVTAIKMKGAFAAYYRRKIEEGKNGLIAINGIRNKLVLTIAAVIRNNEPYNENYIYKP

SEQ ID NO: 147269 - protein, 343 aa, unidentified
MEISTIGLDLAKNVFQVHGVDLEGNVVVRRALRRAQVLPFFAKLPPCLIGMEACGTAHHWARELIKLGHEVRQMPPAYVKPYVKRGKADAADAEAICEAVTRPTMRFVPVKSPEQQAALSMHRARDLLVKQRTQLVNMVRALLAEFGINIPQGVRLALEMARKIVDGEAPAVPREAAKIAGRLSRQALDTHAQLREIDLDLLAWQRANDTARRLMSVPGIGPIGATALAASVTDPSQFRSRREFAAWLGLTPRQHSSGGKERLGRITKMGDKYLRTLLVVGMTSLIKRVKRKPETADPRLVALLARKPVRVATVAMANQTNRVVWAIMARGETYLAGHQPRLA

SEQ ID NO: 147270 - protein, 367 aa, unidentified
MKIIHWIGIDDHADKWTIAHFKGNEDKPAREFELRPVTDGYRKLIKYCKELGGEVRIVYEAGPCGYELYRRLTKAGLKCDVAAPSLTPRKPGERVKTNRRDAAKLGRYLRAGDMLTLIVVPDQGRESVRDLVRARHAVQKDLLSVRHRITKLVLRYGHRYDKGKTAWTKQFWTWLGKIKLEGEHSQFVLTELIAAHEHRLKQRGRYDDEIEAAAKTPQYAPYVAALSVLRGIDRLSAMTILSELGDLRRFATAPQLMAAIGLVARESSTGDTTNRFSITKTGNAHVRHIAVEAAWQYDRRISNGPVIKRRRKDQPKEVVDIAEKCDLRLNRKFHRMTSRGKRSTVAAVAVARELMGFIWAIGQIAHP

SEQ ID NO: 147271 - protein, 388 aa, unidentified
MRYFIGIDISKFKHTAAVIDQDGVVHIEPFDFDNDIIGFNSFFTSVSSFIQDDFIIGMEDTGHYADNLQKFLLSKNLKVAMFNPLATNHIRLAFNLAKNDRLDSLTIASALAMPRLYRIIEDEHFTYHEIRELSRYHQTLSKTMNRYKNRLQKFIDIAFPEFNKLFDTKYSKTYLKILKDFQSAQNIANTDIRTLRKALLSKGRCVSITAEELKSAARDSIGHSHIALDLEIQQTVEMIEKIDSDLNIVDKKIEEFSLQLNSPILAIPGISHISAMSILSELGDFTQYESAKKIIKLSGTNPYIYESGTYSMPRTRLEKKGSKYLRCTLYNIIQAVINNNPVFKDYYDRKISQGKSHRCAQGHCVRKLLRVIYHILTTGCKFDPSLLR

SEQ ID NO: 147272 - protein, 389 aa, unidentified
MGNARMPEPATALDHESTIVAVVELSARSWLVGAQVAGVPRQCRQKLAPSAEGLLDHLDHLRQRAEKAGKRVSRVVVAYEAGRDGFWLARWLLGRGIEVYVIQPSSVPVDRRARRAKTDALDVEMLLRTTLAWLREEPRVCSMVPIPSEVEEDGRRPSRERQDLIRERLALTNKIDGVLATLGVGGYRPLRRDRRERLEALRRPGGDPLPAHAKARLARLLDRLELVLEQIGVLEEARDAVVARDAVPGGEADSLIRRLAGLKGIGPELATLLAWEAFVRPFRDRRALAAYAGLTGTPFDSGDRRREQGIGKAGNRRLRAALVELAWLWLRYQPDSALAAWFRRRTQAAGGRTRKVMIVALARKLFVALWRFCRDGTIPDGAALKTAPA

SEQ ID NO: 147273 - protein, 342 aa, unidentified
MEHYAGIDVSLECSSVCVVDASGKILRETKVASEPEALIGWFRSTGFKLERIGLEAGPLSQWLFAAMREAGLAVELLETRHVRDAFKAMPVKSDRNDARGIAQLMRLGWFRPVHCKSMSAQETRALLTARKLVQSKLRDVENSLRGILRGFGLKVGKTTEIKFAGRIEELVVGHPHLQVIAKALLAVRAVLRTEFAVFQKKTRKMAQSDARTRLLMSTPAVGPIVALTYASAIDDPGRFKSSKQAGAHFGLTPRKHQSGETDYTGRISKIGDSSVRTVLYEAAHIMLTKPVKGCSQLKSWAMRIAKRAGMSKAKVALARKLAVIMHRMLADATPFNTAVAAA

SEQ ID NO: 147274 - protein, 349 aa, unidentified
MRTFPPPAGTRFYAGADLHARSLFLVVLDADGKTVFAKNLPAAPAPFLRAVAPFRDGLLVACECMHCWYWLADICRDHAIAFVLGHALSMKAVHGCKTKCDRKDAEAIARLLKGGNFPPAYAYPKERRGLRDLLRARLRLVRQRAHLYGHVHTARRQANLPPVSSDVKYKTKRTAIAADIVDPFVRRRVETHLALLEPLDTTIRRLEKEIEDAARRLFPVELAVLQSTPGVGLILALTILLEIDTIERFDTRQQFCSYARLCGAVQTSDNKRTGEGNRKAGNAWLKWAFSEAAVLSAQKDERIGGLLNRLAARLGKAKAYSALAHKLGRAFYHMLHSKEVFDVNRFVRH

SEQ ID NO: 147275 - protein, 349 aa, unidentified
MRFIIGCDFHPSYQQVAMLDTHTGELMEKSLGHENKEEVKAFYAGLPGPARVGVEASGQSQWFERLLGELGHEMWIGDAAQIRARENRKQKTDRRDALLLLELLQQGRFPRIWVPSPAERDARQLLLHRHKWVRMRTQVKNQLQALALNQGVRRKSKLWSVAGRAELEALSLAPWTHRRRADLLKLLDDLQPGILDLDRDVAEQAEARPEVRRLMTHPGVGPVTALAFVLTMGPVDRFPRGKQVASYLGLIPSEHSSGGKQRLGHISKQGNAFLRGLLVEAAQSAVRYEPRLRREYWRLAQRKGRAIAKVAMARKLAVRLYWMLRDGKEYAQRVQVRVQDSPRHPVVVV

SEQ ID NO: 147276 - protein, 389 aa, unidentified
MIFIGVDIGKQKHCAIAVDERGKELSHAFSFENDESGFCSFLAFLSKFSSSDDICVAMEATGHYWLNLYSFLLHKNIEPHVFNPIQTDAVRRMSIRKTKTDTVDCKYIADVVRIGNYSDVRIQSSELQELRQLCRFRYGLTDELSRLKNQITGVLDRIFPEYASLFSDVFGVASMALLKKYPTPGDIRKVPTSRLSDLLRKHSRGALGEAKAKEIKEACLHSVGITSASPAFVFQLQLLLSHIDFLHLQVKETETKIEELYNRSGCFLHTIQGIGVISAAVILSEIGDIRNFDSLRKITAFAGIDPSVSQSGNFESSRNKMSKRGSPYLRRAIWNCAVVAARQNPKLHEFFEKKRSEGKPYMTSIGAVSHKLCSFIFATLRDQKPFVIS

SEQ ID NO: 147277 - protein, 427 aa, unidentified
MSKSGRHEFQHQEVQQMNAVGIDVSKGRSTVAILRPMGEVVQTPIDVMHNAVSLERLAYQILALGEDTRVVMEATGRYHEPVARELHNHGIFVSVINPIAIHGYCTSGTVRKVKNDRKDALKIARFALDRWTELREYTPMDALRQQLKIFSRQYNLYMKSCVALQSNLISLTDKVFPGVNELFKSPQRADGHEKWVDFVTTFWHCECISMVSENAFTNRYQKWCKRMGYNFSAAKASDLYFESLGHIVTLPKNNNTKLLIQTAAKELTAMNELIAVVRGEMTRLAKELPEYETVHAMYGVGDTTAAQLIAEIGDIRNFPRRSSLGGFAVVDPAVDDSGKNVGNSKAATKRGSPHLRKTLFQIMTIYLRLAPQDEPVYQFLNKKRSEGKPYYVYMTAGSNKFLRIYYARVKECMAKLDESAKPSETIE

SEQ ID NO: 147278 - protein, 424 aa, unidentified
MKVSYQTCCGVDVHKSFLVATIVKNTGGIEPSYQKKRFSTFNNSILEFKQWLLDNDCHDVCMESTGKYWVPVFNLLEDDINVVIANPKWVKAVKGNKDDTKDSKWIGDLFRLGLVRGSYVPCKKIRILREYTRYRYKLISCRSSEKNRYQNALTVCNVALDSVVSDIFGKSSTSIIDYLLEQSGTSINHEEIASKLLRSLKSKEDAVIESVEGYQMTDAQKYRMRLVRAHMDYITAEINDVDKMMENMISSNPDFENAVQFLCTIPGVKRDSAITIISEIGTDMSQFSSSKRLCCWAGLTPGSNESAGKKKSVRITRAGVYLKPALVQCAHAAVKSDKSPYYKKKYDSLVKRRGKKRAIIAIARMILTAIYQMMSTGEQWNPSDLYKIDMPVALVEKQKAKAIKQAKKLLQREGLLPPDEPLAS

SEQ ID NO: 147279 - protein, 388 aa, unidentified
MQFVADQSVTPTTIGADLCAIFISLELSRSTWLVTSLSPGRGEKMSKHSVAAGDIAGLLARFSELRRKACARTGKSFPIVVIQEAGLDGFWIHRVLLSEGIESHVVDAASIAISRRRRRAKTDRIDGETLLRALLAHKRGEPRVCSMVRAPTPEDEDRRRVCRERKVLIMERVQHVNRIKGLLFSQGASGYEPLRRDRRARLDALQTGDGRRLPPHLKAQICRELDRLELLLEQIKAVEAERDALLDAEQTKASAPPPMLLGVHGVGPEFASVLWSEGLSRHFDNRRQVAAYAGLAPTPWQSGSVNREQGISQSGNRRLRTMMIQLAWLWLRHQPRSALTLWFKDRMERNGGRRRKTTIVALARKLLVALWKYVSAGVVIEGAMIRAA

SEQ ID NO: 147280 - protein, 392 aa, unidentified
MNRIVYIGMDVHTSNYTLCSLDPGYGVEKDNYFAEVQFTNDFIKNVVNYVSNLKKKLKDCEFVCGYEAGCLGYSTYKDLTKVGIKCVIMAPSTMAVQKGGKKVKNDRRDARVIAQCLAYQTYKEVYVLSEHDEAVRGYLRMRDSHNKALKRIKQQIIAFCTGHGLFSPTKSNWTVAHLKWLKDLKFNDPVEQEILNEYLSSLTFLSDKIKAMDVRIEELASEKQYCENVKKLRCIKGIETNVALTLLAEIGDFNRFSKPTDFASYLGLIPGEQSSGDKVRGTGITKAGNSTLRRKLTESAKGYWRGRIGIKSATFKKLEKELPKEVTEYALKANTRLQRKFFNMTHVKGKNMNVAASACAREMACFVWGLITNHYDKAPAVPKTDEELLDLN

SEQ ID NO: 147281 - protein, 309 aa, unidentified
MKEQLVYCGVDIAKSHLDAAIGKEKGRLPNDATGHRQFIKWIKQIEAQVQVICEPSGGYERRLTQALVGAQIKVSLVQANRVRQFARAAGILAKTDTIDARVLCAFGEAMRPQTLSASALEQERLRELESQRRHLTHLLVMEQNRAARVSEVLVRRLNRRLIHQIKKHIEQLDLLIQEHIEASPELSHKASKLTAISGVGERTAALLLAQMPELGQLNRREVAALVGVAPFNRDSGKWRGKRAIFGGRRFVRHGLYMAALVAARHNPILRAFYQRLRAAGKPAKLALTATMRKLLIVLNSSLKTHLTYA

SEQ ID NO: 147282 - protein, 314 aa, unidentified
MSTPVFIGIDVAQARLDIAIRPGSSFSRAHDESAIVTLVEQLRALRPTLIVLEATGGMEIPLTSALATAGLPVVVVNPRQVRDFAKASGQLAKTDALDAQTLAQFAEVMRPTARPLPDEQTRALAALLTRRRQLVEMLTAEKNRLLSAPPPIRKRLRTHIAWLERELHHTDTDLSAAIRQSPVWREKDELLRSVPGVGPVLTSTLLANLPELGTLTNKQIAALVGVAPLNRDSGTLRGKRTVWGGRAQVRAVLYMSAIVAARFNPVIRAFYQRLQRAGKAKKVALTACMRKLLTILNAMLKHRTPWRDMEAHHA

SEQ ID NO: 147283 - protein, 453 aa, unidentified
MSQRNMKISFKPGKTRAALTITHPNAAGIDIGSASHFVAVPPDRDETPVREFPSFTVDLNSLADWLKACGVDTVAMESTGVYWIPLFELLESRGFTVLLVNARHVKNVSGRKSDVLDCQWLQQLMSYGLLSGAFRPTEQVCVLRSLWRQRAMLLRNQGRAVQHMQKALTQMNVQLANVISDVVGETGQKILRAIVAGERDGQVLGAMKNARIHASIDEIAKSLQGNWRAEHLFALKQALGAFDFTGTQLVECDCEIEQQLKCLKVHEGDPAKGKQRGRSRNAPKFDLRAQLFKMCGVDLTRIDGIDVTTAMAVISETGTDMSRFPTVGHFASWLGLCPGTKITGGKVMSGKTKRCANHAAQALRLAAAALRTSQSALGAYFRRMCSRMDKPKAVTAAAHKLARLIYTMLTKGEEYTDKGQEYYEERYRQRVMHHLAKRAEKLGMHLVPIPQAA

SEQ ID NO: 147284 - protein, 341 aa, unidentified
MQITTIGLDIAKNVFQVHGIDAAEKVVVRKQLRRSKVIAFFEAVPPCLVGMEACASAHYWARELRKLGHEVRLMPAKDVKAYIKRNKNDAIDAEASCEAVRRPTMRFVAVKSAEQQGQLMQHRTRDLLMRQRTQVINALRAHLAELGIVAAQGREGLKDLLAIIADEKDERLPVDARASLIVLAAQLQAVQTLIGSIEKRIIAQHRATEASKRLQSIPGIGIIGASAIVSTVTDPTAFRSGRDLAAWIGLVPRQDSTGGKQKLGPISKQGDRYLRRILVVGAHSVLRRAKHNPEKYPWLTQLLARRPFKVVAIALANKMARIAWALLARGGTYRVPALAAA

SEQ ID NO: 147285 - protein, 422 aa, unidentified
MTLGQNTSILRVMHEVCCGLDVHKELINACVITTNENGHEDSELKVFQTFTDDLFRLRDWLLDHNCPIIAMESTGIYWRPVHNILEVFFEVILVNARHFKNLPGKKTDMSDCQWICGLLRVGLLKGSFIPQKHVRQWRDLTRYRRSKIEDLGDVKRQVHKLFESANIKIDSVASHLFGRSGRNLMELLLEKDRELSLEDVRKCLKGTLKSKSEELYRAVQGFFEEHHRWLLEKMLAHADHLEHLINDIQARLRVLLEAHEDAIDRLNEIPGINFISAYAIISETGPTLSTFPNTASLCSWAGVCPGNNESAGKRHSGRSPVRRGNLKTILIEVAWSAVRTKRSYYRAKFFSLRSRLGPKKAIMAIAHRILKAIYHVIKHGEKFKDLGEDYLSDLHKKSKINYLIRQAGKFGYMLTPCAVIEK

SEQ ID NO: 147286 - protein, 353 aa, unidentified
MAGANVNQDVVGGVDTHKDVHAAAALSVTGQLLGTALFPTTRAGLSQLLTWLTGYGALIRVGVEGTGSYGSGLSRQLRSAGISVVEVNRPNRQFRRQRGKSDTVDAEAAARAALSGTAAGTPKSQDGMVEAIRLLRLARRSAMKARTQTGNQLHAVVQSAPTALRDALRGQSLAKLVTLARRFRRRAAMTPLAAARFTLKSLADRWAALEAELRDLDHQLELLVSAAAPSLVALTGVGTETGGALLVAIGDNPDRLHSEAAFAALCGASPVEASSGRQKRHRLNRGGNRDANRALWVVVMSRMATDATTRAYVERRTQQGLSKREIVRCLKRYVARQIYRTMLPTLRHATTTA

SEQ ID NO: 147287 - protein, 310 aa, unidentified
MEAIVVGIDVSKDRLDVCVLPAGERFVVARNADGLEALNARLVPLGAKAVAVEATGGFETVVAASLGGAGLPVIVVNPAQVRAFAKALGKRAKTDPIDAEVIARFVVATEPQIRPLPDEATRFLADLVARRRQIIQMIVAEKLREKQMPTRLLKKSAARLIKALEKELNALDTGIGEAVRGTPAWREKEELLTSVPGVGDVIARTMIAEMPELGTLDRRQIASLAGLAPWTHESGKWKGRSFTSGGRKAPRGALFMGAMVAIQHNPTLKAFYQRLIDARKPKLVAIIAVARKLLTILNAILRDKTPWQPA

SEQ ID NO: 147288 - protein, 339 aa, unidentified
MYYYGIDQHKRDSFITTYDSQGTVVKQMRVANDPLLIQNYFAQFSGSHRAVVESTGSWYWLADLLQKLDVKLTLAHATELKAISAAKVKTDKVDSDILAQLLRADLIPEAHKISADKRGPRDLMRTRLRLISKCASCKNSIERLLEKFNGSAITELDDLYQLQIRAHKEQIALLEQQIHTIERTLHPHLIPNEDIQRLLWIPGIGKIGAFTICTEIDGIERFPSAKQFFSYCRLVPGADNSAGRTRHRSGSKAGNCYLKLAFSHAGVRAVQYYPEIKTFYKAKLRRKPQRIARTLVSLEIARIVYHVLKTREDFNGHFKKQQLSRRKQSQWPRLASPAA

SEQ ID NO: 147289 - protein, 389 aa, unidentified
MLLDHPSDGLTAIRTHIAAIFMSLELSRSNWLVTSLSPGKGEKMSKHSVAAGDTAELLALFAELRRKAEVRTGQSYPIITIQEAGLDGFWLHRVLQQNGIESHVVDPASIATPRRRRRVKTDRLDGEALLRALLAYKRGEPRVCAMVVAPSPEEEDRRRLCRERATLIAERITHVNRIKGLLFSQGISDYAPLRRDRRSRLETLRTGDGRELPSHLKAQIGRALDRIELLLEQTKVVEAARDALLAAATNTTGKQGAPEPVAMLLALKGMGANFAAVLWSEAFYRQFANRRQVAAYAGLAATPWQSGGIRHEQGVSKAGNSRLRTTMIQLAWLWIRHQPQSALTRWFKERSQQGRKRAIVALARKLLVALWKYVTQGVVIEGAVMKPAA

SEQ ID NO: 147290 - protein, 467 aa, unidentified
MSHCTEQTVTVSRPVSNKAVKGVSKRGLRQIHRNAAGIDVGSTEHYVAVPEDRSDTPVRVFGCTTPDLHAMARWLAECSIDKIAMESTGVYWIPVVQVLEQYGLKVIVVDAHYIKNVPGRKSDVVDCQWIQELHTFGLLRGAFRPDRNIRTLRSYWRHREGLVQSCAQQIHLMHKALEQMNLQLHKVLSDVTGLTGMKIIRAIVDGERNAVELARMKHPLVKSSEEDLVKALTGEYCPEHLFALRHAVELYDVFQTKLGECDREMEKYMATLESKANPKDLGGKRTQKRRKNQAHFDLRKELFRLSGVDLTRIDGIDALTAQTIICECGFDLSAFPTEKHFASWLGLCPNNRITGGRVRNTRTRKVQNRAATALRIAAQSLHRSHSALGAFLRRLKARLGAPKAITAAAHKLARLVYRMLKYGMVYVDKGQDYYEQQHQQRVLKNLAKRAKQMGYQLIRPQTAELVS

SEQ ID NO: 147291 - protein, 373 aa, unidentified
MTSMTVEPTAQVVRRRVIVGVDTHKYVHVAVAIDHPGARLAACHAAANREGYAQLEAWAAALADGGRVVAYGVEGTGSYGVGLASFLRRSGHRVVEVNRGDRRARRANGKSDTLDAEAAARAVLGGQALAIPKSADGTAEMIRQVKIARDTARKARTSAIVTLKAVIVTAPAELREQLAGLSDKVLIDRCASLRPGAVTSPTASTKHTLRALAKRFQTLDGEIRDHDTILDDLTRATAPTLREAVGIGADTAAEMLIVFGDNPEGVHSEAAFAKLCGTSPVPASSGLTNRYRLSRAGHREANAALYRAVIVRMRFHQPTIDYVARRTAEGLSKRDIIRCLKRYLAREVYQRVMTDHRTRQQGSAPAERRSLDL

SEQ ID NO: 147292 - protein, 344 aa, unidentified
MEYYAGLDVSLRSCALCIVDSKGTVLFERELPCEVSDIAECLAGFPHPIERVGFEAGAMSQHLFFGLTAEGFDVVCMEARQVSAALSAMRNKTDKTDARGIAQILRTGWFSPVHMKSRKSHGLSALLSTRKALLKKTMDLANEVRGLLKIFGVRLPKTMKHGSFDSVVRPMIEIDDVLAHALVPLLDARVVLYQHYLELDRRVKRAASHDDVCMKLMTIPGVGPIAALSFKSAVDDPTRFKSSRTVDAYFGLTPRRYQSGEHDNPGRISKAGDRDVRAVLYAAANALLMRTMASFQIKSWGMRLMRTKGHRRAVVAVARKLAILMHRMWIDGSEFRQDQVGGMA

SEQ ID NO: 147293 - protein, 503 aa, unidentified
MVSSYWENPFRSLVPNDVNQALAKLLLSRLKEYPFIITIRPPSIIAKGKMMARKIRKLKMKKVQPLHTLQPNAAGIDVGATEIFVSVPQDRDVEHVRCFTTFTDDLHKAARWLKKCEIKSVAMESTGVYWIPVFQILDAHGFDVMLVNAHHVKNVPGRKTDVEDCQWIQYLHSVGLLRGSFRPGQDICSVRSLLRHRGNLIKIASTHVQHMQKSLTQMNVQIHNVISDITGVTGLTIMDAIVDGQRNLNKLANLKDPRIKASKDTIKKSLKGDYRPEHIFTLKQALQSYRHYRQMIYECDIEIEKHLKDLESRIEPDQPARPPGDIKPRGNAPNFDLKHHMHRLLGTDLTLVDGIDVGTAHTIFTEVGPDLSCFPTPAHFCSWLGLCPNNKISGGKILSSKTKPGSNRVAQVLRMASISLLRSRSYLGEFYRRMRAKSGAPKAITATAHKLARIVYHLIKYQKAFDQSVFNKEQEMHKIRMEKNLRKQAKYLGYQIVPAVTMS

SEQ ID NO: 147294 - protein, 351 aa, unidentified
MKKIIIGIDVSKEKCDATAILTENGLMEVKKLDYIVFENRANGFRSLLSWSRKLMPEATDEELLFVCETTGAYDRAMCDYLFGKGMDVWRESALQINRCGGVRRGKDDRTDSLMIAEYAMRHMDKMHLYESPDSRILELRAVFMYRRKLEQEKTSKLVRVKELEATAGKSRTLSFILRDAKKSVRQLENSIRECEKRIRDLINDDEDMQRNYSHLDTVKGLGIVNIAAFIIFTNNFRNFRTARQMATYWGVVSFRRISGTSVDKRADVRRLSSSMLKSYITQAAMHTIVRGGIYYEYYQRLTARGKTHSVALNNAKNKLIHLAMSLVENDMDYEPNHEILRLQRTQKENAM

SEQ ID NO: 147295 - protein, 345 aa, unidentified
MKLYGGIDLHSNNSVIAIINEQGETLSCKRLNNDISVILSFLAPYKDKLTGLVVESTFNWYWLVDALMDAEFKLHLANPAAIQQYSGLKYADDHSDARWLAEMLRLNILPEGYIYPRELRAVRDLMRKRMDIVQQSTKNLLSVQSCYMRHLGYKLSSNKIKQMAAIRKGVDTEQVHADFSSMNTALSVISNLSLIRCAQQQINVIEGAILKQISLSPEFINLSSIDGVGNTLALTIMLETGTIKRFDSPGNFSSYCRCVKGARYSNGKKKGATNQKNGNRYLAWAFTEAANFAIRYNPTVKKYYQRKLAKTNKVVAIKTVAHKLARACYHVLKDNVPFDEHKAFA

SEQ ID NO: 147296 - protein, 419 aa, unidentified
MFKIFRKNCCGLDVHKTWIYACVGITDANGRTDYKQSRFSSFSKGLNELAEWLAKCECKEVCMESSGKYWIPVFNILEKTCWVTLAHPKYTKPQRGNKTDRKDAKFICDLFMCDMIKPSFIPPPDIRHLRDLMRYRFKLTNILTGEKNRAQNCLTVSNLKLDDVFSDVFGKSASSITKYIIEHPGEQFDVTPFVDGRCKSPISEIQAAVDGSISRETAAKLREILSHIDELIAHKHKIETEILRLAVKYETALQLIRTVPGFSNDPMTAIAIIAEIGADMSVFKAAKNLSSWSGCCPRNDQSGNKRKSTRISRAGVYLKPLLVQVANAIVKSDKYPEFKERYRRLKARRGHKKAIIAICRMLLTAIWNILSKLEPYSANGYNTDRPVAEEKVITKSQALNLLRLRGYIIKDDVTELTPV

SEQ ID NO: 147297 - protein, 425 aa, unidentified
MIPDNPCPTPSFAALIGLDWGDRQHAVALWTPDSQAPESFDLEHSPENVRRWLKQIEERFSGRPVALAVETSKGPLINMLFEVPWLSIYPIHPATSARMRKAFTPSGAKDDPQDALLLLGLLRDHLDRLRPLPPEDLLTRKLGALCELRRKSVDRRTQLTNQLRAALKGYYPQALELVGDILHSPLALAFLKRWPDLIELKASRPSTIKTFYYRHNLRRPEAIQKRVDRIAQAVALTVDEAVVSAGRREVARLIEELAVIQKHIRQDEKLIAEHFAQHPDATLFRELPGAGAALAPRLLVAFGTDRDRYPSAAALQRYSGVAPVKEKSGNRVWVHWRWNAPRFLRQTLIEWAGQTVLYSQWARAYYQQKKEHGKHHWSILRSLAFIWLRILWKCWQTNTPYNEERYLEALRRQGSPLLQSMSKSC

SEQ ID NO: 147298 - protein, 361 aa, unidentified
MSESMALVGLDVHKSRTVAAVLDRVTGELRMERLRGAPERVVPAFLEELDRPVEAVYEAGPTGFVLAREAEQRGLDIRVVAPGSIPRAPGDRVKTDRRDAKRLARLFAAGELRFAFVPSEADERFRDLVRCVDDVRRDLMRARHRLSKFLLRRGVRWQGKTWTQPHERWLCTLHFEDPLSQAVFVDYLAAVQGLAQRRKTLGSVLEGAVPNSSHAETIKRLRCFRSIDTLTAAGLCAEVGDFTRFAKPALLSGFLGIVPSEYTSDEKRTQGQITKAGPTNARRLLVEAAHNYRHRPAIGENLKARQSGQDPRVAQIAWRCQQRLHQRWMHLGGKRGKPTGKVAIAVARELAAFCWEAATLN

SEQ ID NO: 147299 - protein, 350 aa, unidentified
MDRYIGLDAHTSSCTVATIGQSGKRLHSHVVETNAKALIEVIRVVPKDRHLCLEEGQHSNWLYEVLSPHVQEIVVALVNESRGPKNDKLDAFALAEQLRIGAIRTKVYKKRGGFGRLGYRAKAHALLVADSVRVQSRIKALLRSRGVATAGGDVYSTRERDEWLLKLPQSARSLAELLYLEYDGLQGLRQRAEREMILEARKHDIYRIIQSCPGIGDIRAAQLMPVVVTPYRFANKRVFWSYCGLGIVMRSSSDWVRGPDGQWIKAPVQQTRGLNRNFSRPLKSVFKGAATTVIARAQDEPLYRHYVSLLDGGTKPNLAKLTIARQIAAIVLVLWRSKEVYDPKKLGHAI

SEQ ID NO: 147300 - protein, 370 aa, unidentified
MEEGIKFFVGLDVHKDTIAVAAAEAGREPARWVGTIAHDVGKLLKRLARYGEPAQVQVVYEAGPTGYGLQRELTRRGYGCQVIAPSLIPKRAGDRIKTDGRDSVRLAELSRAGELRAIWIPDPADEAIRDLARAREDAVNARTQVRQQRKGFLLRHDVRYAGRTSWSKTFYRWLATLNFGLSGAQTAFTEYWQAVAAADERVARLTQALAGSIAGWRFESVVMALQALRGIDQISAIGLVAEIGDIGRFAHPRQLMAYLGLVPAEHSSGERVARGSITKTGNAHARRLLTEAAWNYRFQPRIGYRAQRRAEDLPQELRDLAWKAQLRLTGRFARLRARGVQINKVCVAVARELAGFVWAIAQARAKLPQS

SEQ ID NO: 147301 - protein, 470 aa, unidentified
MKRKPQAKTRQRHSKRAKREQKLLEKIHLNAAGIDIGSGSHWVAVPEDRDEQPVREFRSFTHELIELAVWLEACGIDTVAMESTGVYWVPLYEILEERGIEVLLVNARHVKNVPGRKSDVFDCQWIQQLHTFGLLRGSFRPNAEITAIRTLVRHRDKLVEEAAACIQRMQKALTLMNLQLHKVISDVTGVTGMLILRDIVAGETDPAVLARHRDSRCKASEEEIAASLTGHYRDEHLFVLRQQLEVYDFYQEKIHCCDEQIEIRIHALEAPCESPARELPAPRRPSPKRKPQDNAPSFEIRSPLFKLSGGVDLTELPGIGPYGALKLISEIGLDMHCWPTEHHFTSWLTLAPSNKISGGKLLSSRTQPSANRAAKILRIAAMALHRSDHALGAFYRRLAARTDKPKAITATARKLAILVYRMLKYKMPYHETSAAEYDKHQHTRILRGLRKRAKSIGFDLVDTSTGLVMS

SEQ ID NO: 147302 - protein, 302 aa, unidentified
MAYIKEGKMKTQKYSYTALDMKKFISSLDNEAHCVMESTGVYHLRLAHALHEAGIVLSVVNPLSVKRFIQSKMHRTKTDKRDAIMLVEYGNIMEPALWKPDASHYTQAQQLLNIQSQLIKNRTSVNNQMEAIDLSVNQSKTGLGLLKKQLKFIENQLKQIDKELEELMGRNDDEDVSNLQSIPGIGRKTALALTVYTKGMKDFDNHRQVASYFGISPRIVQSGSSVKGRGHICKMGMGHIRMLLYMCARSAIKYNKACRELYERLLAKGKAKKLALIAVANKLLKQAFAIVKNKSIYIENYA

SEQ ID NO: 147303 - protein, 364 aa, unidentified
MSEHTNATMNHETLTLEVPAWTVGLDVGDRRSDLCVVDAPGEVVRRRRVATTDPGLTRALAPYPGARVILEVGGQSPWISRRLAALGYEVIVANPRKVQLIAKSHDKNDRRDAELLARLGRMDVRLLSPIQHRGEQAQRDRALLGVRDGLVRARANLVNQARGQAKALGQRLPQCTTGGFASRLRQEQLLELYPGLAAQVELIGQLTQQIRALEKQIETLCAERYPETTLLRQVPGVGALTALAFVLTIEDPRRFWRSRQVGAYLGFRPKRRQSGKQDPDLRISKAGDPFVRRLLVQSANHLLGPGRADTTLRRFGERLRERGGRAAYKKAVVAVARKLAVLLHRLWVTGEVYEPLRGVQEVTA

SEQ ID NO: 147304 - protein, 354 aa, unidentified
MNSIKYIGIDVHQSTSVFAVRDSHGNIIGESVLKTEPAAIVDYLRGQRGCVRVTFEEGTYANWLYDVIKPHVSKVIVCDPRKNKIDGNKTDRIDARKLAELLRLNALNAVYHGEQSNQTLKEYARSYLSLQQDSTRIMNRLKAIYRSRGIGCRGPSLYRPKNRKEWLDKLKDKGARCRAERLLRQLETFGKLRLEAQRDLIRESHKLKDYKVLKGIPGLGQIRIALILAFVMTPHRFRNKRQFWTYIGLSVVRRGSSEYEIIEGEMQRKKRKPLPRGLNNNYNHILKDVFKGAALTAAYRGPFKELFDQRVANGAAENLALLTMARKIAAITLAIWKKGERFDIERHQLSEQRI

SEQ ID NO: 147305 - protein, 340 aa, unidentified
MQDIKKFYLGIDVSKPWFDASLLIVINHQKQAIQTNRFTNDITGLKLFGKWLKSFEVSYDSNSMVVIENTGIYHRLLWSWCVENNITIHIGNAAHIKWSFGIARGKSDTIDSIRLSQYCFTHYDELKATAPLNPGLVQLKDLMCSRSKLLNQLNSNKTYLQELKKVNDKQVQATLETAYKTAIAGITKSIKAIETLIKKIITENKAFQHNYELLNSVPGIGHLVAVYIICCTNNFANKITGKQLACYAGVVPFEHSSGISVKGKNRVHKMANKDLKKMLHLSALAAIKYYPEFSQYYQRKKIEGKHSMSILNAIRNKIVLRAVAVVNNQMPYVYNQNAVS

SEQ ID NO: 147306 - protein, 339 aa, unidentified
MKLYGGIDLHSNNSYIVLMDSGGTVVQRSRVGNEIGLVLRTLAPYREQIDSLVVESTYNWYWLVDGLKAAGYAVKLANPSAMQQYQGLKYSDDRSDARWLAEMLRLGIVPTGYIYPEAQRPLRDLLRQRSFLVRQGTGQLLHTGNILCRNQGRKSSRQQIRQMTVADAQQLFPDRERTLAVESSLRVIEVLEQQIASIEKQVLGRIKPEAGFQNLQTVYGIGPILAMTIWLETGDIGRFHQVGDYASYCRCVASTRLSNAKKKGENNSHNGNPYLAWAYVEAATYAARFYRQASRFVERKTAQVNRTLAIKALAHKLARACYYVLRDGVVFEPTRLLGS

SEQ ID NO: 147307 - protein, 331 aa, unidentified
MNYSHFVGLDVGKKTFDASLMSADEKELSHKSFDNTPEGIQSLLDWIAGYHLSLSKLLFCAENMGSYVTELSVSSVSMGFSLALVCPLTIKKSIGLQRGKNDRIDAKRIANYAVLHYRKLELYKLPDKDLVRLRGWIIIRDNLVKQKVSSIKLLETFSQMAKLANVTEAISFLEEQLKSIKEKVLEVEEDMEQLIAASTSLYTNYLLLRSIKGIGIINAIVLLCVTDNFQRFDNPRKFACYCGVAPFEHTSGISIRGKTQTSSLANKEVKVYLTRAAITAISWDPQMKAYYKRKIAEGKHKASVINAVRAKIIARSFAVIRRQTPFVTLAV

SEQ ID NO: 147308 - protein, 337 aa, unidentified
MGNITMGLDVGDRFSQLCVVDQDGVVIQEDRIPTTRVALRERLAGPPARVVLEAGTHAGWMSRELTALGHEVLVANSRKLRWLYHNEHKTDRVDATYLARVGRWDPTLLAPIRVRSAGADGALRLVRARASLVRARTRLINHVRGAVKSVGGQLPPCDATSFARRVAAHLPAELHAALEPLLAQIAGLTQTIARYDRLVEHLAAQVYPETARLRQVAGVGALTALAFVLTVDDPRRFGDGRAVGAYFGLCPRRADSGAHRPQLGITKCGDGLVRQLLVQAAHYILGPFGPDCRLRRWGLELARRGGKNAKKRAIIAVARKLAALLYSLWVHDTRYAP

SEQ ID NO: 147309 - protein, 363 aa, unidentified
MIIIGVDYHPSFQQIAFLDQETGECGERRLNHSDGEAEKFYKDLKQKGISVRVGMEATGYSRWFERLLAELGIELWIGDAAEIKTKRVRKQKTDRQDAQLLLKLLLENRFPQIWVPSPENRDLRQLLWHRHRLVQMRTRIMNQLQAVAMNEGRKWKKRLWSERGRTQLEKFPLAPWASRRRQDLVELLDRLNPRIEELTAAVEEEAKTRPEVLRLMTHPGVGALTALAFVLIIGTPQRFRCGKQIGSYVGLIPREDSSAGRQRLGHISKQGNALLRFLLVEAAQAAVRSDPGWRRRYLHLAMRREKSIAKVAMGRRLAVQLYWMWRRDWEYRQLLEFGSYAGQLATGHGVNSSTVHLIGHPAP

SEQ ID NO: 147310 - protein, 401 aa, unidentified
MKRACGLDVHKDTIFCATYDGKKHGPVVEYSTLTSSIIEMGKDLQVKGALTIAMESTGMYWIPVWNILEEMGFTLVLVNPYLIKQMPGRKSDVKDAQWIATLLHKGLLRSSLVPCKEIRELRTYSRRYVKLQQRQTSVLQDLERTLEVCSIRITSFVSNISSKSVLKVIEMIVQGETHPDALVTCIHGRILKAHTKQKVKQSLEGFITDHHRFMLELSLQEYELLTRQSEMCLSKMERLCNEHYTKEMRLLLTIPGISNISAMIVLAETGADMKAFENSGKFSGWTGLRPRNDESAGKYKSTATTKGNRFLRAVLVQIAWAASRTKGTYFKEKFTRLAMKKSRKKALVAIARKIGVLIWNVLAYEQPYNPQKLIILDPGKVQAKIAYHQKEWDRLQLLLQK

SEQ ID NO: 147311 - protein, 342 aa, unidentified
MDTIGLDLHKRESQLCILTEAGEILERRIVTSRERFTAVLGSRAPARILLEASTESEWVARHLESLGHEVVVADPNFAPMYATRRRGVKTDRRDARTLMEALRLGAYRPIHRASVRQRHVRAQLVVRDALIRTRTRYVNVVRALTRRDGLRLASGGPEHLETKLAALPLAPPLQAEIAPLRVVLEPVNAQIDHADAQLAATAAGDPLFARLRTAPAIGPVTAVAFVATLDDVRRFRTAHQVAGYLGLTPREYSSGERQQRGRISKTGSPRMRALLVEAGWRILRSNDPGAAPLRAWAERIAARRGTNVAAVALARRLAGILYAMWRDGTTYRPPVVRDVAVA

SEQ ID NO: 147312 - protein, 393 aa, unidentified
MRKPKKQKKPLNDLSRSLTSFDPNQTLTAVVELSKKNWLVAGIIPGVERQPLKKLAADENELLKLLERWRAEAEKAGHKITRIAVAFETGRDGFWLARWLSKRGIEAHVIHAASVAVSREHRRAKTDRLDTEQLMRAFLGWLRGERNHCKMAAVPTSAEEDARRPHRERETLVGEQTTIINRIKATLARLGIRYFDPKLQKAPERLEQLRTPEGEVIPPNTLAELKRDVARKQFVVDQIQQIEKARLEQLKQAPKAGPNLMILLLVRVIGIGIETADMLVKEILSRNLRDRRAVARYGGLTGSPDESGSQRREKGLARSGNARVRKGMIQLAWRFLEFQKESALAKWFRARTENNRSSRKKMIVALARKLLIALWHFVRGGVVPEGVVLRPAH

SEQ ID NO: 147313 - protein, 335 aa, unidentified
MYAVDTAKSVFQVHGEDAGRSVRVQKRLGRGQFLGFFSRQPPTVVVMEACGSSHHWARELIGLGHDVRLIPPQHVKPFLKRNKNDARDAEAIYEASLRPGIHFVPVKPVEQQCDRALHRGRDLLVRQRTQLGNAIRSMLSEIGIIAAQGAAGSAQIYAKIEAADAAIPPKLLSVLRPLLAQWRGLQAEVQHLESQICTAARTDPRARRLMKIDNVGPITAHAAIAAIGDGKQFRSARDFAAWVGLTPTHHASADRIRLGHISKAGDRSLRRLFVLGASSGLRQVRARPEKASPWLKGVLARRPIKVAVVAQAAKTARILWAVLTSGEEFRAPAKA

SEQ ID NO: 147314 - protein, 325 aa, unidentified
MPPRRELVTNKAEFNPNFMSEKIYFGVDVCKESLAFCGAGVAGQVANNAPGVRRLLARLPKGAHLIIEASGGYERELVRVAQQSAVQLSVVNPRQVRDFARGVGRLAKTDPIDAEMLARFGAEVNPPPDAVPTAAEVVLQELVSARQQLVEERTVLLQQKAQHLNSIVRRLDCARLKLLQRQIAQLELAIGSILEEQSALKQKVERLQQVKGVGLITAVTCVALCPELGSLSRGQTAALVGVAPYNDDSGARKGWRHIAGGRPKLRRALYMAAISAIRSNPVLRRFYQQLRQRNKPPKIALVAVIRKLAILLNQLLRNPSFLPAS

SEQ ID NO: 147315 - protein, 369 aa, unidentified
MANDILFVGLDVHKKTISVATVLERPGESCRYYGSIPNTPDALRRLCQKLQADDASLYFCYEAGPCGYGVQRLLTRLGNRCDVVAPTLIPRKAGDRVKNDRRDAMSLAQNLRAGHLTEVWVPDEAHEAMRELVRLQALAKRDIRRARQQLLSFLLRHGVHYPGRHWSKAHRRWLSDLSFEYPAQHLVLEELVQRIERAEVLGERIEQSMVELLPRWALAPVVEAVQALRGISILNAITLIAEIGSFSRFENPRQLMAYLGLVPSEHSSGSTTRRGPITKTGNSLARTCLVEAAWTYRFPARVSRIILKRTEHLPEPIRAVGWKAQVRLCRRYRHLMATGKAAPKVITAIARELVGFIWAIARMVEPVRT

SEQ ID NO: 147316 - protein, 345 aa, unidentified
MLYVGLDFHKYFSFVTVMDGQGEIVERVKLQNHPDTLLSFFGQLEDEVTVAVEATWNWYWLQELFEDHHIPMKLVHPQRAKAIASARIKTDKIDSEILAHLLRTDLLPEAYISTRETRLLRERLRYRASLVRLVTQIRHKLHAVVAKNGFRLPNRNILSKKSLSYLREISLADAFRQAIDGYLRLVELLREEIELVSETIASEAQQDPRALRLTELYGIGYYLALLIVAEIGDITRFPRAKGLCAYAGIVPSVHSSGQTHYTASITKQGSKWLRWALVQVAQHIHKKPPFDGIYQRVKSRRGPKIAKVAVARKLCKTIYHMLTEEENTIIVGQARWGHGLGGPQV

SEQ ID NO: 147317 - protein, 346 aa, unidentified
MGKSITDLSSVTAVGLDLAKHVFQVHGVDASGRVVVVKAIRRNKLLEFFASLPPCLVGLEACGSAHHWARELIELGHDARMMPPAYVKPYIRRQKNDAADAAAICEAVTRPSMRFVGVRSLKNQAAFMRHKTREMLVSQRTQLLNGLRGHLTEVGVIAAQGPRHARELAGLIEACDETIPFEVCEALAELVHQLHRLDEAIARLDRAIATMAQKDETARRLMSIPGFGPVTASAMAATVQDASSFAGPREFAAFLGLTPKQNSSGGKQKLGRISKMGNRYLRKLLVVGAHAVLFHRKPHVDPLRMWAKRLLEKKPFKLVAVALANKMARIAFAILRRKTVYREIPA

SEQ ID NO: 147318 - protein, 363 aa, unidentified
MDVHKESFSLCYYDMMANQFKHSTKVGPNVSYIVNYVNELRRLYGQDAEVLCGYEAGCLGFTLYHQLQAHGIPCIVMAPTTVMKEGSKRVKTDKKDAAQLAKALAFRSYRPVHIPTVEDEQVKEYIRMRTDHKVALKKIKQQILAFCLRHDFRYTEGSSNWTQKHVRWLRSLNPDGLYAEILTEYLLTYEKLVDQIERYDARIEQLGQSDSYQEKVSRLSCFIGIKTLTALSIVTEIGDFNRFATAQHFASYLGLTPSENSSGDKERRGAITKAGNSHVRRLLIEAAQSLAKGTIGYKSKELKRRQSGNRVEVIAYADKANERLRRRYRTLVLGKNKKQNVAKTAIARELSGFIWGMMTGRIA

SEQ ID NO: 147319 - protein, 342 aa, unidentified
MQITVLGIDLGKNSCSVVGLDASGKVVLRRRLQRDGVVKLAMGLPGCVMAMEACCGAHHLGRRLRDQGHRIRLMSPEYVQPYVKAQKNDDRDAEAIAEAATRPTMRFVELKSEEQLDMQSLHRARDRLVGERTALINQLRAFLLERGVIVPKGRRNLELHLETLLAAEQVALSPRTRLLVEDQRAEWRELDRRILAFDEEFGLQARTDERARLLTTIPGIGPLNATAMVAAIGKAETFRRGRDLAAWVGLVPKQMTTGGKQKLLGINKRGNVYLRKMLIHGARAALPTLSKSETPLGEWLRGLLARAHVNTVVVALAAKLARIICAVLRSGQRFEIAAAAVS

SEQ ID NO: 147320 - protein, 348 aa, unidentified
MEGITTVGVDLAKSVFQVHAVNAAGAVIVKRALRRKDFAAFMAKLPWCLVGMEACASSHHWARELTKLGHDVRLIPPAYVKAYVRRQKNDAADAAAICEAVSRPSMRFVPIKSEEQQAVLMLHRARALLTAQRTALINALRGHLAEFGMVAPRGPRSLGALLDVVKDEADESLPATARLALAPLARRLAALEAEIDDLDRHLLEWHRGNETSQRLATIPGVGPITATALAATITDPGMFKSGRELAAFLGLVPRQSSSGGKERLGRISKMGDRYLRSLLIVGATAVLRHAKVGGSSSRVWAEGLLTKKPFKLVAAALANKTARIAWAVMVRGEVFRKTEGSEVRATAA

SEQ ID NO: 147321 - protein, 340 aa, unidentified
MEQVIGIDLAKRVFQLHIASQLGKMIKNTVVSRDKLTAFIAQQPPSKIVMEACGSANYWSRQFKRFGHEVKQISPQYVAPFRLGSKNDKNDAMAIVEAGSRPGMRYVPEKTQAQQDIQCLHQVRQRLMKNRTALINQIRGLGLEYGIAIPEGAHKVEQCLPEHLENAENDLTSMSRELFQELLFELKEQQQRLKALDKRFNHLNVQQEDIGRLLTLPGIGPLGASALMVALGDSKDFKNGRHFASYLGLVPREHSSGGKVRLLGITKRGDSYLRGILIHGARSVVYRVQKLPDEQCNGLQRWLKGVIARSGINKAAVALANKNARIAWALVNQQSVYEAR

SEQ ID NO: 147322 - protein, 404 aa, unidentified
MFYIGIDWSKDHHNMCIMSESGAVVSEIEYKQSLEGFQRMEGECQKLGVSPRQCIAAIETTYNLMVDFLVERGYIVYIIPPQATKGYRNRKHSSNAHTDTSDAFLLASIMRTDRDSHRRLMPNSPLTQQILAQVRLIELLRCSIQRQENQLGAVLLRIYPQALGLFDKLGSQISLHFLAAYPTAQEATALSLEDFREFCTAHHYTRPSYIPIRYAHLIDPAPAANKAAIQAYQGHVSTLAEVLLPQVERRIKAQIRLTKLFDQHPDAFIFDSLPGAGKLLAPALLAKFGDHRGRFPSHADVQALAGTCPTTEHSGRRKTVRFRRGCDKEFRRISQQYARSSTPESGWANAYCGEIRSHHPSNSHAYRCLANRWLAIIWKIWQTRQAYDEGYHLRQRAARRRPRS

SEQ ID NO: 147323 - protein, 437 aa, unidentified
MRRKKKNANRSVNLQVLPLVHPNAAGIDVGAKEHVVALPCDRDPKPVRTFQAFTPDLHELAAWLKRCGIETVALESTGIYWISLYEVLEQYGFEIRVVNARHVKHVPGRSKTDVLDCQWIQKLHSFGLLNGSFRPDQQIRKLRTYMRLRDNLVVASTQAVHHMQKALFEMNVQLSNVISDIVGETGLNILEAIIAGERDPKQLAALCSSRIKASRDVVAKSLHGNWDQALLFALKVALETYRFTQIKIQDCDCCIQHHLAQFESRAELINSPQNLKTQLHRVCGVDLTKIPGIKEQSAQIIISEVGLDMTKWKTEKQFCSFLGLCPDNSISGGKVLHRATRKVYNRAADTLRLCAQSLTFSKSALGAKYRRLKAKLGAPKAIVAMAHHLARLVYRMLRYGQNYVEQGIHHYELKFRLQRIKWLKKEAQSLNLQLVAA

SEQ ID NO: 147324 - protein, 412 aa, unidentified
MKQIRDKVGGLDVHRDTVVACWRVQQPDRSVDTAKQSFATTAKGLGDLATWLSEAGVTTLVMEATGVYWKPVYYALEGLFSELWLCNAQHVKNVPGRKTDLSDAEWLADVASHGMVRPSFVPPAEIRELRELTRYRKTQVDVRAKEIQRMEKVLQDAGIKLTSVASSVWSQSSRSMIEAMIDGERNPKVLAQMAKSRMRAKIPQLEEAFSGHFGTHHALVCRQIIDHIDFLDHSIAALTAELTARLVPFEPAVTILCSITGVSSTTAEVMIAEMGVDMSRFPTAGHLCAWAGVAPASHESAGKRRPVGSRHGSTWLQRALIEAARAAARTKGSYFSAQYSRIARRRGPNKASVAVAHSILAVAWHLLTNGALYEDPGAQYFERRHNPDIEAKRLQRKIEALGYEVTLTEKAA

SEQ ID NO: 147325 - protein, 344 aa, unidentified
MDHFAGLDVSVKETSVCIVDDTGKIVRQVKVASEPEALLAVLKNPAYHFKRIGLEAGPLSQWLFSALAEAELPVVCVETRHMQAVLKAQINKTDRNDARGIAQMMRVGLYRPVHVKTLRSQKLRMLLTHRKLLQSKAIAIENDLRGTLRNFGLKVGMAGKVKFEARIKELVENLPDLAELVEPMLIVRRALREQIVILHRRLLAIVRDDEVCRRLMTTPGVGPVVALTYRATVDVPARFRKSKAVGAVFGLTCSKYQSGEVDWSGRISRCGDEMMRVMLYEAAQSMMRSKKWSWLKAWAMQIARRRGMKKAIVALARRLAVIMHRIWVDGTEFRWTREQAAAAT

SEQ ID NO: 147326 - protein, 339 aa, unidentified
MRLYTGIDLHSSNSYLAIIDENGKRVFKKKLPNDLEQILSALGPYKDAIIGIVIESTYNWYWLVDGLMSEGYKVHLANPTEIKQYKGLKYSDDQHDAFWLAEMLRLGILPEGYIYPKEDRSIRDLLRKRSHLVKLRSSLIISLQNIICRNNGFRIKTNDIKALNIDRVAPFLEQNEDLALSGKISKESIDFLTRQIKAVEKVVEDKMELREQYKNLLTMQGVGKTLGLTIMLETGPISRFAQVGNYCSYCRKVSTKWISNEKKKGKGNKKSGNKYLAWAFSEAAEIARRCYPEARTFYQRKMQKTNAMVAHQALSHKLARAAYYIMRDGVRFMPEKIFT

SEQ ID NO: 147327 - protein, 438 aa, unidentified
MEQVEDEPLFAERVAGIDIAKAEVMVTIRVPSDARRGRRQQETRSFRAVRKDLLALADWLRAWQVTKAGMEATGDYWKPVYFLLEQEGFDCQLYHAAQVKALPGRPKTDKLDSVWLAKITERGSLPSSFVPPEDIRRLRTHTRYRRHLTQARTSEMARAEKLLEDAHLKLSSVISDIHGVSGRDMLNAIIAGERNPKVLAQMARTRMRGKIRQLEEALDCSFFTGQHAFVLAMMLANIDHLTAQIKELSARIDVLCEPYAHQIAQLDAVPGFGILTAQDIIAEIGVDMTVFPAAGHLASWARRCPQVTSSGGKRKGSNATGRGNPYLGAVLGEAAVNAGRTQTFLGAKYRRLVKKMPKKKAQGALSRSQLVICHALLSDPQAVYTDLGTGYYEQRMNIRRQVRNHVRAIERHGYKVTIEALSPDPDPETSPLPVTKTS

SEQ ID NO: 147328 - protein, 443 aa, unidentified
MSKKRTAHLRGARGQAFADLTRGIASERILCVSLDVSKYFHVVMIHNGLGEIVTPTFEIDIFQSGYDQLCQAIDQAKSRTNAQLVLIGMEPTSHYFENLARRLLQRTQPVTLINSFAVKQNREQQLMRREKTDEIDVAAIGDLLRRGEGTPFRSPTGIYLQLQQLDRVRLGKVKIQAMLKNQILGHLDRIFPGLVILGDEAKERYTPLFEADFWTCQTLQHLIRVCPNPHQLARMLSAQLVQVFHAHQYRLGPAVAAKLIAYAQKVLLPDPQLAAIRCELLQHDLTLLDEVQAHIAALERRLADLVAQTPYQVWTKIKGLSTVQVASLAAAIGDPANYIHAGQVFRRSGLVSGRNDSGRRQRKGKGNRVLKTGDVYLRRALMNAVATLILHQPTLGRYNQLLQKNKPAGVARVATARRSIGILWATLRDQYPTTLISCKGAEM

SEQ ID NO: 147329 - protein, 343 aa, unidentified
MQTVTTIGLDIAKSLFQVHGVDANGVVVIRRQLKRRYVLAFFQKLPSCLIGIEACASSHFWARELRALGHIPRLMPPAYVKPYVKRQKNDAADAEAICEAVTRATMRFVEIKTPEQQGCLMLHRTRHLFIRQQTAVINSIRAHLAEFGIVAPVGRRGIEELLAIVADARDNRVPEVARACIVALGMQLRMLKAQILEFDRMINAWHRSNEMSKRLDEIPGVGPALATALVASIADPKAFRSGRNFSAWVGLVPKQNSSGGKERLGGITKQGDRYLRSLFTAGALAVIRYAKLHGTRRRPWLTALLARRPTKVAAIALANKIARMAWAMMARGERYKEPVALAR

SEQ ID NO: 147330 - protein, 318 aa, unidentified
MPESLVVGIDIAKLTFDAAIGLTGSIQTYANEDSGHDALIAELAGQPVDLIVMEATGGLERDLACALQAAGFAVAVVNPRQARNFAKAMGYLAKTDRIDAKALAEFAQVLSCHPERERFVSVLPTPEQQALQALVARRRQLVAMHVAEHHRLSVSHAAARKSIEAMIKAIRAQLDGVETDLAQHIERHHADLAKRLASVRGIGPATTACLIAEVPELGRLSRREISALIGVAPFNRDSGQMRGKRAIFGGRPQVRRGLYMAALVAIRFNAVIKPFYERLVAAGKPKKVAIVACMRKLLTILNAMVRTGKPWDESLHQA

SEQ ID NO: 147331 - protein, 405 aa, unidentified
MKQPARLHYAGIDWATRTHAVCVVDQTGAVRARFQVPNTGKSFAGLCKRLAKLGVAGVAIERPDGPLVEAMLDAGLKVVVITPRQVKALRSRYAASGAKSDPADAYLLADVLRTDGHRLAPLTPDSEPTKVLRALSRTRKDLQEARVALCNQLTAQLERCFPGAIGLFADLHSPVAVAFLRRYPTSHAAAGLTQAKLAALLRRIHYPGRTPVATLLGRIQTAPLSGIGPAEAAGRAVCVLALLDAIQVTARQERELEAEIIERLEVHADAKVFTSLPKAGHGVRAAALLGELGDVRARFPDNDCLAALGGAAPVTITSGKRRVVKFRWACDKKLRNAIIDFADDSRHASPWAAKVYADALARTGRHPHAVRILARAWIRVIWRIWQDGVAYDPAKHRGAVRLLAA

SEQ ID NO: 147332 - protein, 317 aa, unidentified
MSTSGRFIGIDMLKMQLDLAVQGAGAPWQVAYDPAGLKQVVAQLRALAPPLMVVEATGGLEPRLVSALAAASLPVAIVNPRQVRAVAHAAGILANTDRLDAQVLAQFAATMPPTPRPQPDAATQQLSAVVARRQQVVDRLTAEKNRLPQQVEPALRKRLQVPITWLTKEVERTEQERTQLIQQSPAWQAQDELRPRAKGVGPILSQTWLAEVPEWGQLNRKQMAALIGVAPCNRESGGYRGKRRIWGGRARVRAVLYRGALVATRHNPVINAFDERLLAAGKEKKVALTACMRKLLTMLNAMIRQQTTWQDIRMKAH

SEQ ID NO: 147333 - protein, 414 aa, unidentified
MTEVLQVAAGLDLHKKFILATILTLAGNKMQERFERTQVGLLKLKDWIINNHVQAIGCESTSDYWVVVHDLLDKYIPVIVGNARDIKSLSHKKTDKVDSEFIALLTLKGMIRPSRVMPRSHRQFRSQSRLRHRLVQKRTDFKNEIHHILDSELFRLSDALKDVFGKTGKIVLNGIINGMPVEEILKCIPTNVKYKERQLQEIMEQTLSIDAILRLKVCMNALRCLDEQIDLITRSAVDYAYKNYSEEMKILISVPGIGEIGAMTLIAEIGNVNDFSSGDKLASWLGIVPRVYQSADKLRTSSITKRGSEHARWILVQIAHAASRARNNALKPFFIRKKAIIGAGKAIIALARKIVVIIWHLLTNRESYDDGLYVKSRQPLHINVKVPSVISMEEVIQLLKDASVIIKKRDPDPT

SEQ ID NO: 147334 - protein, 332 aa, unidentified
MSLELALRKAGPIGKEHVVNPMTRFAGIDVSKAHLDVAVRPDEIEWRSPNTEAGVKEVAVQLKELCPDLVVLEATGGMESAAASALAIMGVPVVVVNPRQVRDFAKSTGHLAKTDALDALVLAHFAEAVKPEPRPLPSEQAKQLSALLSRRRQISEMLTAEKNRLQSADIIVRRRLKVHIRWLERELSDTNGDLDVAIQESPLWRMKAEILKSVPGIGPIVSFTLLSELPELGQLNRKQIAALAGVAPLNRDSGTRTGKRTVWGGRARVRAALYMAALVASRYNPVIRIFYQRLCAAGKPKKVALTACMRKLLLILNSMIKHDQKWNVPEAA

SEQ ID NO: 147335 - protein, 347 aa, unidentified
MRFYTKQHPFYCGIDLHARTMYVCILSQDGEVRLHRNMKASPDALLKAIAPYRDDMVIAVECIFTWYWLADLCAQEGLPFVLGHALYMKAIHGGKTKNDTIDSQKIAVLLRGGMLPQAYVYPAAMRAPRDLLRRRTHLMRKRAELLAHIQNTHSQYNLPEIGKKIAYKANRDGVAERFPDPAVQKSIEVDLALIGHYDQLLRDVELSILKTAKQHHAQTLYLLRTVPGIGEILSLVLLYEIHDITRFPRVQDFLSYCRLVKCTKESAGKRYGTSGTKIGNAHLKWAFSEAAVLFLRANPAGQKSLTKLEKKHGSGKALTLLGQKLGRTVYDMLQRQTAFDMGKLLNG

SEQ ID NO: 147336 - protein, 341 aa, unidentified
MKNLFIGIDFSKEKVDVAVIFAEGLVETSVRVFNEFKNSVSGYKLLVKWVEKNANGIDSSLWLFCGENTGDYSKPLCNHLYGRGFDMWLENSKCIKDASGIRRLKSDRADAAMIAEYAMRNHDKAIIYEPLSESLTQLREYYLYRQMVIRHRCSFEVRRGEKRLMMEKSAAKTVIAQSGKHIVSELNKEIAKIDRKIASLIESSDELSEVYRIVTSVPGIGTQNAVCLMVYTDNFRKFNYNARSIACYYGIAPFGQDSGTSVHVDPHVHYMANRHIKAMLTQAALAAVRFNPIIAQYYQRLIGRGKKMPVAMNNVKNKLLHIVTSMVKNKQVYKPEYRLSA

SEQ ID NO: 147337 - protein, 338 aa, unidentified
MKTYAGIDLHSSNNFIGVIDTKDKRLYSKRHPNRMQDVLKVLGKFKATLQGVVVESTYNWYWLVDGLMDHGYRVHLANPSAIKTYEGLKHTDDKWDSFWLAHLLRLGILPQGYIYPKEQRPIRDLLRRRQLYVRQRTSHILSLQSMITRNRGLNFDGSQIKRLRDDFIKKMFDCPHLVFTAQKQMATIGFLGQQINDIEAVVRPQIQLKPEFEKLLSIPGIGDILGLTIMSEVGDIKRFAKAGHYSSYCRCVSSKKMSNGKKKGQNNKKNGNRYLSWAYVEAANFCIRHCSDAQRFYQRKLAKTNKVVAIKALSNKLAKASYYIIKDQVPFDAKKLFR

SEQ ID NO: 147338 - protein, 344 aa, unidentified
MTVATIGLDIAKSVFQVHGVDSAGQVVVRQRLTRRRVLAFFEKLAPCLIGIESCSSSHYWARELIARGHEVRLMPAQYVKPYVKRGKNDAADAEAICEAVTRPTMRFVPVKTPEQQSVMMLHRVRLMLNRQRTQLSNSIRAHLSEFGIVAPIGRRGLDQLLAIVADEDDARVPADARLCLQMLAAQLAVVKQQILENDRRVRASARETELGRRLMEVPGVGPLLASALVATVADPAAFKTGRDLAAWIGLVPKQNSSGGKERLGSISKAGNRYLRQMLVVGAMALIRYAERHGTRRPWLVQLMQRRSAKVAAVALANKMARIIWALMTSGERYREPATVSAMAA

SEQ ID NO: 147339 - protein, 364 aa, unidentified
MKKITTKKAMTSKRLERQEEFSCYIGIDLGDKHSCVCVLDRQGRIVEELRGRTTVQEFEEFFRKLGRSRVAMEAGSQSRWVSELAKKYGHEVYVANPHKVQYISGGDDKNDPGDAYKLAELSYVRPSMLHAISHRKRQEQVHLEAIRARDLLVRSRADMINAVRGMSKAFAETLAQCSAESFTTKAAGKIPEDLRTATAPLLRVIDQLSEEITELDQWIEHVARQHYPAYVLLEQVNGVGTLTALTYLLTLGDAGRFQRSREVGAYLGMRPRQKDSGSSSPQLGITKTGDAYLRKLLVNCAHYMLGRFGADSDLRRFGLRLAGRGGKNAKKRAAVAVARKLSVLLHRLWVGGEAYEPLRNSQAA

SEQ ID NO: 147340 - protein, 350 aa, unidentified
MDKELYIGVDVSKQTLDLAYYDGESIDWKKAHIKVSNNNAGFKKIGSWVAKVSKGFDIVLFCMEYTGLYTQNFRLWLEEKHYIYRMVEPRKMHRFEPDLDDGLRSLDRIKTDELDSFRIAIYCEQNHRKILRNPSKLPPPVYFKLKRLLAERKQTVKQSVLYKQQLHDICAYDTDLSVERKNGQLKTLNDALKGIDNEIDMYIKEDADISKNFSLLTSIPGIGRVVALETIVLTENFMAIDNPRKYACYIGVAPFKKESGTSVRKGSSVSKKGFKQAKADLSIACLVCMQHIPNIRDYWERKRKEKCSGIVFNAIKFKMILRIFAVIKRGTPYVETDNYRNGKNKQPGVN

SEQ ID NO: 147341 - protein, 313 aa, unidentified
MAQIVATAGIDVSKDRLDVAVHPTDQQFSVTNDEAGWRILVRRLKPLGTRAIGIEASGGYERGAIVALFKAGLPVRSVNAWKLRQFARAAGLLAKNDRLDARAIAWFVATLPSREVRHDPAVDRLAELVTARRQLVDAIQQTGNQIEHLRDAALRRMQQRRIRQLERDLAQLDLRIARAIDESPVLAARRDLLCSMPGVGPVLAATLLALLPELGTLGSRPVGALVGVVPYDFDSGRMRGLRCIFGGRAAVRRILFMAAQAAALWNPTLKAFKHRLIAAGKKPKVAIVAVMSKMIVPLNAMLRDNQTWRTAAA

SEQ ID NO: 147342 - protein, 330 aa, unidentified
MSGFVGIDVAAKTVDLVVRNDDKTSKSEQFSQTPDGHAAVVRKLQKLAPELIVMEATGIYYLDLAVALAKANLPVAVINPKSFHHFAALKLNGSKTDAVDAALLAEFAQCMRPRLWTLPQDELLGLRDIGRQLNRLTGSRTQAKNRLHALMSKGMTLPMLIEDEQEGIEQLERRIKRLTQAALALIAGNNTLAAHFSRITAAKGIGETSAIAILAELCVLPSTMKAPQVSRYAGLDVRKTESGSSVNKPGRLSKAGNVYLRAALYMPAMSAVRHDVRAKAFYEALTGRGKKKIQAQCAVMRKYLVGIWACMQTQATFDSTLLFSEKHLNH

SEQ ID NO: 147343 - protein, 349 aa, unidentified
MSTEHCNAVTYGIDLGKTWFHVVGLDPAGNPVKRAKLNRTSITRFFVNLPRALVGMEACPGSQWMARKLQALGHEVRIVPAQFVKPYVKSNKNDMIDAAAIAEAITRPTMRFVQIKHREQVDLQALHRSRDLLVSTRTRLINQMRAFCLEYGVTMRNGVGAFKVALPTALGDESNDLTPAMRELLADLCQELTTLEDRIAQFTRKINAQADASDSARRLMTIPGVGQLTATALVAAVGDARQFKTARDLSAWLGLTPAQYSTGGKTHLTGISKRGNSYVRKLLIHGARSCSMHLDRTKDRLGLWIEQIEGRLHHNKMVVALANKLARIAWVILTKPGALYERRAPQLVA

SEQ ID NO: 147344 - protein, 322 aa, unidentified
MFLGLDISKLNFDAALLGGPDARPRHKAFPNTAAGFERLQEWIGADQVYACLEATGTYGEALARSLHAGGHTVSVVNPARIKAFGQSQMSRAKTDKADAALIARFCALHRPEAWTPPAPEMSELQSWVRRLESLHEMRQMENNRLKAGPAASVQVSFEEHIAFLDAEIQKTEQRIHDHISQNPSLKGQRDLLVSIPGIADATAAALLAELLDVAQFAGARQVAAFAGLVPRIRQSGTSVRGRACLSKMGSWRLRKALFYPAMVALRFNPVLQALNARLLAAGKNKKLIVGAAMRKLLHLAFGVLKSGKPFDATIALATATKA

SEQ ID NO: 147345 - protein, 346 aa, unidentified
MKVKTLGIDLAKETFGLHGVDALGRVAVHRRVTRKQLLGFLVKLEPCLVGMEACGSAHYWAHEIEKLGHTVKLMSPQFVIPYRKGNKNDPNDAEAICEAVSRPSMRFVPIKNEEQQDLQALHRVREQLVKNRTALANQIRGLLRERGVVVAQAIARLRVALPVILEDQSNRLSGLMRELLGEMAERLRMLDDRLRQYDQRIARICQQDERCRRLVKVEGVGPLVATAVVAAIGSARPFTNGRELSAWLGLVPRERSSGQRTMLLGISKRGNRYLRTLLIHGARAAASVAERKRDARGIWLSRPKLRGGPNVAVVALANKNARVMWALLARGDCYRVRPALDRAAAA

SEQ ID NO: 147346 - protein, 513 aa, unidentified
MYTIPHLYPFEGGTPVSTQSISPEERLSHLEGHYADRVTAFRQRLAQVGLDRVLIFLLDIGKNVHWATAWTAAGRELVRPFRLPTTRAGLTQFIHMLDALIAEHLPLLVLLGHEPSGVYHEPWARALMAYYAPHLNGLASPAFDYRFFNPYQVKLARQQTHLRHRKSDPLDLAAMYDLILRGLGQPAFLPSGTELLIRQEIGFIRAQSRLLGHLERQLHPQLDRLWPGAVVNLNQFTQAHPDLPKPTPLVETRPFQRDRLRVLLAYCPNPHDLLAMSDPQILDLYRSHVGRAGPALLRDLHTWANHAVLLPPDVADPLADQLQRLFLQYAAAETLVTEGHARLAPLIHLTPARHLTPIPGLGDMDAAAYLAGVGSIRRFQHPAQVWAFAGYDPISDGTGDRPERIGRLSKHGDPAFRDALFQMAYRVALNYAPISLTFLDAFERGKCEVEATIHAAHRLNRLCFHLMQHDEPFENRSTPQLETEKARRWKEFKMHKQQRGSRRTRGRRRAQHR

SEQ ID NO: 147347 - protein, 343 aa, unidentified
MKIYALGIDLGKTVFHLVGLDASGQVVVRKRCSRTQLLAFTANMQVQLIGMEACSGAHFLGRALREQGHEVRLMPAQYVKPYVQTNKSDYIDAEAIAEAVQRPRMRFVPIKTEEQLDLQALHRVRERWVMRRTAVVNQIRSLLLERGLTLPKGRSHLDEQLPRILEDAELNLSGSFRVLLAQLKLELEQLAARIEQMDAVIQKTAKENEACQRLTEIPGVGPVTATALIGAIGNGSAFGKGRALSAWMGIVPGEYSSGGQQKLLGISKRGNKYLRRLFVQGARSVLQQRHKQAPGLRDWLAQLLGRTHQNVVVVALANKLVRLAWAVLCKNERYRAPVLAMTT

SEQ ID NO: 147348 - protein, 435 aa, unidentified
MEKIRTNAAGIDIGAKKVFTAVDGQPVVSHFTFTEDFMLLRDYLLKHKVKTVAMEATGVYWVILYEMLEEAGIDVWLVDGRQTKQVPGRKTDVKDCQWIQELHSYGLLNRCLVVDTTIKELRSYLRLREDHIHTSAMHINHMQKSLTLMNIRLKEVLSQIHGASGIAIIEAILSGERDKNVLVKLCHQSVLKNKKELIIKALEGKYTEAGLFALKQAYDGYMFYIRQIEECDKRINTVINRIGIGGTGQDVKKKRKEIRHHKPKVEKLAPNLINIFEGKDATVISGITDYTWMQLLAETGPDLKKWPTEKHFTSWMGLSPGQHNSGKMRRNAKKKGRPKAGQIFRIIAQGLINSKDIAIGSFGRRLRGRKGPSIAIKAMARKLAVLYWRVMVKGLNYAEQGIKNYQEQLLANKMKTFNKLAKELEIQIPVNVHVA

SEQ ID NO: 147349 - protein, 468 aa, unidentified
MELILGIDLACRTAHQASLARPDGTFVWTGRKFFTRPAELEKLWKAIELGKQDTLRVVMEPTRNAWAPLASWFRHRGARISMVPTTQSADLRAYYSKHTKNDRLDSRLLARLPLLHPEGLREHTGDGPAEPLRRVVKIRSSIVKRRTAVFQRLDAQLELLGPAWYDALGSNYGKAALALLARYGDPHSLIRLGHARLTRFLIRHSRGAWREPHATMLLTAAQESLQLWGSGADARIDFAELAADIATEAEQAQMLTEQIDDLDERCANLYAEADPTAIIASAPGVGPVTCAIIAGRIGDPHRFHSLAAIRAYSGLVPKLSQSGQAEHQHGLTKAGDPLLREALFNAADQARKIDPQLAAKYQRLMSTERHHDSAICHIATILLTRIATCWRTGQHYVLRDTDGRPVTEEEGRRTIRTHHTVDKKTRINAASKRYSQRQKGRTGREQQESPSAPIHRPVHPRIKPTEVA

SEQ ID NO: 147350 - protein, 470 aa, unidentified
MSKGSGMTRGDRRRNARRERLRAVLPRDGAVIGIDLAEDKQAIAVIDHDVRVLARKTVRVKAFRLGEALDWAVGQARAKGFSLVTVACEPTGPRWLQVQRLCAERGLPLVCIQPLVSHIAREQQDYTTHKTGEADCVLIARLAVELHCYLPGELDETWAHLRHLGRRRAQLITAATASAQRIRDFLSVAWPTVTETCARPLESVTWLAALQVVTSRCGADPGRLAAMGDEAFTALVRGAVPGWGGKKGWGTICRRIFAALTETEGVVVSSRRGLLRRCADELGDLQRTRAQRRAVEADMVAVLEELGLSRLADIPALTAVGAAAILAETGDPRRYDSSSSVVKHAGLSPSDNASGAFYGEAHISRRGRPGLRLTVWRAVWPMLRFNPVMAAKYQAMTSAADDAAQAAASQADAGSRQVSAAAAASRARRARARVACAASLLRWIYSMVAHDTSWDPDVASGAASCPAEAA

SEQ ID NO: 147351 - protein, 411 aa, unidentified
MDRIYDNCCGIDVHKKLIVACFRKGNKQEIREFGATTRELLEMADWLKDGGCEMTAMESTASYWKPLYNILESSGLNAMVVNARHMKAVPGRKTDVRDAEWIADLLQHGLLQPSYIPDKEQRELRELVRYRKSLVGERTRELNRLQKMLEGANIKLSGTVSDINGKSARNILEYLLTGASVDGPKYDEMYEQKIIAHNLKATKEQIIDDLNGVMSPLQRRMMKELLAHLDELNIHIKNLNDEIDNFMKPEEKQASHAIQNVTGIGNTSAQAIISVIGTDMERFPTDRHISSWAGLCPGDNESARKRKSGKTRKGNSLLRTTLITCAHSAVKNKKSYFHAQFMRISSHRGKKRAYVAVAHSMLIAIYHILKDGVVFKDLGADYYNQFNKERKINAYLKKLKALGWEAPVVAA

SEQ ID NO: 147352 - protein, 418 aa, unidentified
MKSMEITAVGIDVSKSKSTVAIRRPGGVIVARPFDISHSNHDLEKLVSILKTTGGDIRVVMEHTSNYWKPIALTLKEADFYVSVVNAMLIHDFSDNSIRKLKTDRADSLKIANYALTFWNELPPFNDEDETRLVLREQSRMYERLSSTATALRNGLIALADQTFPAIDQAFGHAIKNADGHEKWVNFFSIYWHRDCVLRLSIEKFTESYRKWCLRRNYKFRTNTAHKLYALAQDAVPTLPKNNGTKALVLQACKSLNAVCEAKQATQEEMNRLASLLPEYEVVMQMEGTGPITGPALMAEIGDVRRFKNKKALVAFAGIDAPPFQSGNFESKSRHVSKRGSPHLRRTVFLVANIILTLSHKDNSVFCFMDKKRAEGKHYYVYTIAGSAKFLRIYYARVTEYLRAQEPTATAICLDCKD

SEQ ID NO: 147353 - protein, 427 aa, unidentified
MKYTQNEKIMQITENTLIIGVDIASDVHYARAFDYRGIELDKVIKFNNDIQGFKVFSDWITKIATNNHKQHVMVGMEPTGHYWFTFAQYLEENNIKIVLVNPYHVKTTKELDDNSPTKNDRKDPKTIAMLMKDGRYMEPYIPKGIYSELRNATNTRWQLVKKLNSIRNQVKRWIKIYFPEFNNVFADWEGKAALMILKHFPTPEKITKLDAPEIIATWRKEISRAVGIKRATKLIKAAKASVGIKEGLIAAENELHILLEEYELLMKQHQNTMNLIEKLTMQIPGVKEILKIKGVGLKTLSGFIAEVGDIERFDHPKKVQKLAGLNLKENSSGKHKGQTTITKRGRKRLRSILFSTIMPIVAKNKEFQQLHKYYTTRKENPLKKKQSLIVLCCKLIRVFFVILKTGVKYDPVKMMNDIKRPILQEVA

SEQ ID NO: 147354 - protein, 338 aa, unidentified
MAIIAIGVDLAKNVFAVHGVDETGKAVLIKPSVRRDALLELIAKQPPCVIGMEACSGAHHWARQFQKFGHKVRIIAAKFVAPYRLSGRKGKNDAADAQAICEAVQRPHMRFVPIKSEDAQGRLCVHRVRQGLVEARTAMINRIRGLLSEFGYVLPLKADVVRRQAGQCLEDLPGWANLAIGDCLSELHHLDERIDQYDKHIAQMAKSDERSQQLMAMPGIGEKTATALLSSIGNGHDFKCGRQLAAWLGLVPGQYSSGGKQRLGRITKAGDSYLRNLLILGARAVLVASKNKTDRLSRWAQSVEQRRGYWKAVVAIAAKNARMAWAMLSKGEAFKPMS

SEQ ID NO: 147355 - protein, 391 aa, unidentified
MYLVGIDVSKFKYDCFIMTETGEVINNSFSFDNNDSGFILLLNTLKSLDKSQKIKIGLEATGHYGNNLKLFLTENNYSFMELNPYLVKKFSQALTLRRTKTDKLDAMTIASVLGSPNLTYEPYQISSYHISSLKSLTRYREAFIKERSLHLVQLTNIMDQIFPEFKPFFNGKFGTTAIYILKKYKTPERISTLTDEDILKIKNVSRKISAAKLVKLRELAKNTVGHSSISNQILLKSILNLYTNVDDEVTEIEKQIDSIMSEYKNHIVSIPGISKYSAAQIIGEVGDFKRFSSASKLLAFAGMEPSTIQSGTMDFKGKMVKHGSGHLRYVLMNIAITIIIHNPTFYSYYSKKHHQEGKNHRVALSHVVRKLVRIIYHLEVTNQDFNLNLLK

SEQ ID NO: 147356 - protein, 329 aa, unidentified
MKDLLEISCGLDIHKEKIVACILTGPLGKPTHSEIREFTTLIPDMLALRDWIISENCHHIAMESTGIYWIPIYEILEDAFSGDITLLVVNARHMKNVPGKKTDMRDSEWISTLLRAGLLNASFIPEKRIREFRDLNRYRKSIIRDITSQKNRVEKFLQSSGFRLSSFISDIFGASGRNIILHLMEHGQIDKISLDSYLKTKTRKRIDEILMSVKGTLSEHQKSFLKILMCHYDSMKEHLIEIETHLQEDMLPFALQIEQLNTIYGISTTASCAIIAEIGTDMKPFKTAEHICSWAGLCPGNNESAGKRESTSITKGNPYIKVCFVRLPG

SEQ ID NO: 147357 - protein, 334 aa, unidentified
MLYAAIDIHKHAFQAAVLDAESGEVVEERFAADRESLTRWTERWRGRVVAVAIEATTGWRWVWRELEREGFDVHLAEPVQTRALLGRRHSAKTDRLDARWLARLLAKEMLPESWIPPAQIQELRDRTRLRKALAEDRRRWGQRLHAHLLHEGWPCSRSNLLRPPGLRWAAALKLPEHARLQVDSLLAVMAALEEQLDRVDGELRRFARADQRCRALQSIYGIGPILACHLLAEIGEACRFQRAEQITRLAGLDPVVDESGDSRRRGKLAKAGSPHLRWALVEAAVHAHRTTAPDLALYRATRERRDTTVARLTVARKIGKRAFHALRELELAAA

SEQ ID NO: 147358 - protein, 351 aa, unidentified
MTTIARRITGGVDTHLDVHVAAALDERGAQLGVESFAATAAGYRDLLGWLQGFGTLELVGVEGTGSYGAGLTRHLLSHQVTVVEIDRPNRQRRRRTGKSDPHDAVAAARAAQGGDATGSAKTRDGNVEAMRVLRVARRSARGNRTQAINQMRSLISTAPEELRGELRNHLSIYKVLTVASAFRHTGRTDVTTVTKLTLRTLARRALSLEEEVKEIDRLLGTLVAETAPELNAVDGVGTDVASAILVAAGDNPERLKSESTFAKLCGVSPLDASSGKQERHRLNRSGDRQANSALWHIVFTRMVNDPRTKHYIERRMKEGRTKKEAIRCLKRYVAREVFAALPRSQFALDSP

SEQ ID NO: 147359 - protein, 339 aa, unidentified
MKNKKYFIGLDVHKKKTTHVVRDRIGNIVLEGETATLYSELYERLEHYLKSSVIGLESCTSYYTLYQNFLKSNYNIKVANTIQLRQLIAKNDSLDARRLAEMLRLGTFPCSYIPGEKIQRLRSLLQLRHSLVEEKTRCNNRIQAFLDRNGIVMPSQDAFGKKWRQALLQYIGSGEVSLEIRYEYDHFVYLEKQSEHLGQEISGYTMKHWKKEYLLLQSITGFGPVLSCYVIANILPISRFSSNRKLRRYAGVVPAFQESGGKKSKGHIPKTSSRKLLRWAFIQAANSAGRTNTKLGYYYRKKKKQKNNAGIAHVAVASSMIDIIYKVLTTKKPYNPKIC

SEQ ID NO: 147360 - protein, 366 aa, unidentified
MKKISTAAGKQTSSFQDQKLTIGLDLGDRSSWYCVLDGAGEVLLEQRVSTTAKAMKEVFGGMPRSRMALETGMHSPWVSRLLSELGHEVIVAHARNVRLIGESRKKDDRLDARTLARLARIDPQLLAPVKHRSAQAQVDLSVIRARAGLVRARTALINTARGLSKSYGERLRSCNPRNVNLEKAEGLSPELQAALEPLLVAIESLSQQIREYNERIEGLAEESYPEVALLKQVKGVGTLIALTYRLTLEDPNRFRQSRDVGCYVGLQPGRRNSGQSEPQLHISKEGDPYLRTLLVQGAQHILGPFGDDSDLRRWGLKLAERGGKNGKKRAVIAVARKLAVLLHRLWVSGEVYEPLRNSSQPVPAAA

SEQ ID NO: 147361 - protein, 428 aa, unidentified
MRLFAGDDWAEDYHDVEVMDEAGKVLAKRRLPGGVAGMAQLHELIGRHLGGDGEDTEVVIGIETDRGPWVAALVAAGYTVYPVNPLQAARFRQRHGVSGAKSDDGDRHVLADMVRTDAHQLRPAAGDTPGAAAIKVVARAHKTLIWERTRQVQRLRHQLREYFPAALAAFEDLDAPEVLELLGKAPDPAAAAKLTRAQVSAALKRARRRDIAGKTDAMLAALRSPQLGQPPVLSAAYAASARALIAVITVLNEQVKALQGQVEAHFGQHPDAEIYRSQPGIGAVLGARVLGEFGDDPHRYADAKSRKNYAATSPITRASGKKKIVAARFIHNSRLVDALMAWAFASMKGSPGARAFYDELRARGIEHNDALRRLANRLVGMPQDPHALRRGHRLVSSRILACRLTFKLLGCLSCCRGRPGRQLSAGGR

SEQ ID NO: 147362 - protein, 339 aa, unidentified
MASVPVFVGLDYHDEQVQVCVLDATGKIKANRSVANDAAQIDRLVRRHGEVVGAAIEACCGAADLAEGLATQQQWPIKMAHPGYVARLKQSPDKTDFGDARLLADLERVGYVPKVWLAPEATRQLRRLVRYRQQLVDRRTKTKLRMRALLRENRLRPTLECNAWTKAWLGWLAATTELGEDDRWIMNQHLAELKHLLDQVRQTEKRLKQHAENDPLVVQLMQLAGVGLITAMTLRAEIGRFDRFANGKQLARFCGVTPRNASSGARQADAGLIKAGNPGLRRVLIELAHRLINRVKGRWFSLAHKLLRRGKPRNVVVAAIANRWVRWLYHEMCPQGLLT

SEQ ID NO: 147363 - protein, 431 aa, unidentified
MPRRHPKRLDVEAMPFVNPNAAGLDIGSEEFWACVPEGRDTQPVRPFGTFTPDLYALAGWLTACQIETVAMESTGVYWIPIYEILEARGFKVHLVNAHHLKHVPGRKSDVKDCQWIQHPHTCGLLSGSFRPEADMCALRAYLRHRATLLEHRAAHIQHMQKALQQMNVQLTQVLTDISGVTGLAIIRAIVAGERDPVQLARFRDRRCASSTEDIAKALTGHYQPEHVFALRQALALHDAYTEQVRECDAEIERRFQAIMPVWPDELPPLDRANKHRTRNKNAPPYAARGMLYQLTGVDLVAIPGLNASTVQTILSEIGLDLRKWPHAKAFCSWLGLAPRHEISGGKILRRSTLKTHNRAGQAFRLAAHAVSRSQNSLGAFYRRMRARLGPKSAIVATAHKIARIVYHLCAMCALINDTDQRSERLTEGASL

SEQ ID NO: 147364 - protein, 336 aa, unidentified
MNKISKLDFKGQQIYVGMDIHKKSWSISILTEKFEHKTFTQPPNVGVLVNYLKRNFPGGSYKSVYEAGYCGFWIHDRLQEYGVECHVVNPADVPTKDKERRSKTDRVDCRKLARSLRSGEIESIYVPCRPKVEDRSLIRTRHSMVRKQTRCKNQIKSILHFYGIQIPEEMGESYWSKRFITWIETIRMERASGNFTLKVHLEELNNMRKIIADITRSIRSIANSEEYRQNVRLLKTLPGISTLNAMTLLTELYDISRFKNLDKLCSYIGLIPDTDSSGETERRTGITKRRNAQLRNILIESAWVAVRKDPALLMTFNTLCKKMPKTNAIVGSPGNC

SEQ ID NO: 147365 - protein, 288 aa, unidentified
MEQELHFIGIDVSKAKLDVDVLRPDGRHRSKKFTNTPKGHEELLNWLRNHNVAPAHVCMEATSTYMEDAAASLSDAGFTVSIINPTLGKAFAQSEGLRSKTDAVDARMLAEFCRQKRPAAWEAPHPVERALRGLVLRHQSLTDMHTQELNRRETARDVQMPSIDAHLLWLEAELKRLEKQIKDLTDDDPDLKHRRKLLDSIPGIGEKTSAVLLAYVGLKDRFGQARQFAAFAGLTPRQHESGSSVNRASRMSKAGHVSLRRALYMPAMVALYKTEWGKRVQGASGKER

SEQ ID NO: 147366 - protein, 388 aa, unidentified
MIEAVIERCAGIDVGKKFVVVCLMVGSLEKEPKTELRKFGTIMAELEQLRNWLVHEGCTHVVMESTGSYWKPVFNVLESELKVILANAFDVRNRRGHKTDPNDSRWLAHLLRHGMIRPSFVPPRHIRELRDLTRRRRQLVAEGSRERNRIQKILEDANVKLGDVLRDVLGLSGRLILNALLEGNLSAEEMAQLAQRSARKKIPQLTAALERHRLTDHHRFLLQHALHHLDFLEREVEVLNQEIRSRLKTEPFAQAHALLQTIPGIKEESAAAILAEVGPDMTQFPSGSHLASWAGVCPGNHESAGLRKTGQTNRGNNWLRSILTQCAWAASSQKNSMLRTAYFRLSPRCGRRRTIVALGHRLLRIIYQVLSRLQPYSENGSQPLAATT

SEQ ID NO: 147367 - protein, 494 aa, unidentified
MNCNSVYPIPMKRPSNKARRSAPSIATRGEGPIRPATSLPVVHPHAAGIDVGASELYVCVPEDAVSPGDSPVRRFGVFTGELDKLVEWLQSCGVKTVAMESTGVYWIPLYQKLEAGGLEVVLANARHLRQVPGRKTDVKDCQWLQRLHSYGMLQGSFRPSEEYCRLRSLMRHRENLVDGCVKQVQYMQKALDQMNVRLHQVVSDLNGETGLRILDAILAGERDPKNLTSLRDERIKRSTPPEMEAALQGDWREEQLFILQQARETYRFVERQLAQCDAQIEKVLQQIVVVAAREPSLEPPPNPTAAPTPRKKKERRPRKTGHGLKRDLRAELQRICGVDLTQVIGLNVLSVLIIISEIGVNMSRWRSAKAFCSWLGLNPGNKISGGRVLSSRTPHVVNRVSLLLRTLATAVGRSETWLGIFHRRMKARLGPAGANTATARKLACLIYHLLKYQEQYIDVDTLMYAEKIQRIRLNKLRKTAQELGFELLPIKEAA

SEQ ID NO: 147368 - protein, 359 aa, unidentified
MKEFNVIAIDLAKDVFQACIMNRHGKITFNEELPRKSLLDWLPRQKLSLVTMESCGGSSYWARLARSLGHKVMVIPPRQVKPFRTGQKTDSNDAVAIAVASQAPNIKPARYLTLEQQTLQSIDKMRDILNKQKLQLSNQTRGLLLEFGIVINKTESSFKRRIPEILEDAENELSIPLRDGIARMWALYIRLDEDFEFFDGQMKQLTLQDEECQRLMKLEGVGPITAARLKLQISHAEHFQNGRQASACIGLTPKQHSSGGKVRLGSISKTSCDRSLRSCLFLGARAVVSRLKTRLPKTAKERWLKGIIDRRGVNCASIALANKTVRTAYSLLKHGTDYKPVALTMPFIAPKAGAALAIH

SEQ ID NO: 147369 - protein, 344 aa, unidentified
MSIKVVGIDIAKNLFQVCVLGTNGQILSNRKVKRDKLLDTVLQLPEQTALAMESCATSHHWGRIFQELGYTVALIPAQHVKPFVGRQKNDANDARAICEAYSRPNLHFVPVKSVEQQDFKAIRSVRKRLVENRTALANQIRGLAAEYGVVFPLSIKALRSHLPLALEDAENALSPVMRNLLQTLYCDFVSLSEEIDEMTQSVTMLSQQNPKYEAIRNIPGFGPILTAALISEVGAGNQFQNGRQFSAWCGLVPKQNSTGGKSGLGSLSKNGNRELRALLIHGARAVVRCGANKADAMGVWLRGLIARRGKAKAIVALANKLGRVAWHILAKNSEYDINQAFKPV

SEQ ID NO: 147370 - protein, 367 aa, unidentified
MKKIYIGIDAHKESNSIALAFSGREAPTFYGKCSADLDRFLAALRKIQKQNDLEKDEVELCYEAGPTGFVLARRLIKLGYDCLVIAPSKIPTRSGDRVKTDRRDARKLAGLLRAGELTGIHIPSVEDEVIRDVCRGRTDAVQERTRCKKQLLGFLLRNGYRYPGTAHWTEAHMRYLRELVFAHPAQKLILEEYIQRIDVTEKQVLRIEDQMDFLLTTWSRRLFVEALMGFRGFKRTAAMVLTAEVGDLTRFKHPKKLMAFLGVVPTEDSSGGKRRQGAITKCGNSRARWMLVECAGHYRMPPKISKELSKRQEGLSREIRTLSWHAQNRLNKRWYKLSMRGVHFNKIRVSIARELSSYIWDLAHIMK

SEQ ID NO: 147371 - protein, 403 aa, unidentified
MDRVYDKCCGIDVHKKLIVACFKQGNRQEIRDFGATTRELLEMADWLKEGGCEMIAMESTSSYWKPLYNILVVNARHMKAVPGRKTDVKDAEWIADLLQHGLLTASYIPDRDQRELRELVRYRKSLVGERNRELNRLQKMLEGANIKLSGTITDINGKSARNILEHILSGKKIDSAEYDILYRQKVIAHNLKATKEQIIDDLNGVMSDLQKKMMRILLNHLDELNAHIRELDDDIDNFMKPEEKRAAEVIQDIPGIGNTGAQAIISVIGTDMERFPTDAHLSSWAGLCPGSNESAHKRKSGRTTKGNALLRDTLVVCAHAAVRNKTSYFSAQFARISAHRGKKRAYVAVAHSMLVAIYHILKDGVVFNDLGADYYNQFNRERKINAYLKKLKALGCEVSVVAA

SEQ ID NO: 147372 - protein, 412 aa, unidentified
MKVIGRAIGLDVHLDFCEIAICEDGKVRSAGRVKSTPEALKVLAESLLATDRVALEVTGSAWEILRILEPHVAKVIVVSPGDTGITQARAKTDRLDSRTLARLLWAGELDSVWTPDELTRVLRRRLARREQLVRSRSRSKNEVHAVLMRRLKGRPPVSDLFGVKGRQWLRQLELPVEEAETVEGCMRHVEFLDAEIAEVERLVARQMLSCSDARRLMSVPGVNVICAASFLAAIGDIRRFKTSRQLAAYLGLDPKVRQSGSQPARSGRISKQGSASARWALVEAAFSVVRQPGPLHAFYERLRVRRGHQIAVVASARKLACLFWCLLTREEQYAHQQPSLTAKKLRRLELTAGAHRYDSKAAGVWSTNQAMRDAERKLAEQAEASYVRMVSDWQATAPRRGGVGASVTPGRA

SEQ ID NO: 147373 - protein, 362 aa, unidentified
MTIMPTDTRSGRAIVGVDTHKHFHAAAVLDERGALLGTGTFDADSAGYRSLIQWAAQFGVVRRFGIEGTGSYGRGLASAVRRAGHDVVEVMRPDRQDRHRRGKSDLLDAENAARAVLAGKAEAIPKSDEGIVEMIRHLKIAKDAAVKARTAAMQSLKAVLVNAPAELREALEPLPNMALLRRCAALRPGELTSVNAAVKHTLRAIAQRWLTLNDEISGHEKLLSTLVDQLAPQLTAAVGIGPDNASELLLALGDNAERLYSEAAFAKLCGACPIPASSGKTHRHRLNRGGNRRANTALHRIVVVRMKYHEPTRAYVTRRIAEGKTKSEIMRCLKRHITREVWTRTKHLRQQPNTHQTTTCHL

SEQ ID NO: 147374 - protein, 347 aa, unidentified
MNFYTQQHKHYCGIDLHAKAMYVCILDQSGTKLVHKNLPTTPEAFLRTVAPYREDLVVAVECIFTWYWLADLCEREGIAFVLGHALYMKAIHGGKAKNDKIDAHKIAVLLRGGMVPQAYVYPAEMRATRDLLRRRCHLVRKRAELLAHIQNTNSQYNLPEIGKKLAYKANREGVEDHFPDPSVRKTVEVDVSLIDHYDKVLGEVELYITRSAKAHDVQTFARLQSVPGIGKILALVILYEIQDIARFPRVQDFVSYCRLVKCAKESNGKRLGTSGKKIGNVHLRWAFAEAAILFLRQNHLGKEYFAHLEHKHGKAKALTVLGHKLARAVYYMLTRGQPFDLQRFVSA

SEQ ID NO: 147375 - protein, 410 aa, unidentified
MNAVGIDVSKGYSTIAIMQPLGVVVASPYEVKHTDSEISKLARELKKLKGETKVVMESTGNYHLPIANALHAGGLYVSTVNPQLTHDYGNNSIRKSRNDKTDSLKIANYALSNWLKLPKYMPEEETRQMLKIYSRQYSKYGKIKTMLTNNMISLLDQIFPGVKELFTSPPRKRDGHEKWLDFAEYFWHRECVSSLSQKAFAERYRKWCKREGYNFSQTKADEVYAFACSQISVIAQNDITKMLVMQAIHQVNATSETIAFFAAEMKRLASSLPEYPVAMAFYGVGEILGPQVMAEVGDICRYPKKSSLVRFAGLEPVENQSGKSRGQESVSKQGSPHLRKTLFQIMDCILKNAPADDPVFLFLDRKRAEGKHYYSYMCAGAAKFLRIYYARVKEYLDDLYDDSRSIVPHG

SEQ ID NO: 147376 - protein, 414 aa, unidentified
MALKIVYKICCGIDVHKTFVVACIASTNSNGVTTYKSHRFSTYTKGLKELLQWLLDSNCKDVCMESTGKYWIPVYNVLEKGCSIVLAHPKYVKAIRGKKTDKKDAKWIADLFKHDLVAGSFMPTADIRQLRDLMRYRYKLTCFMSSEKNRLQNCLTVSNIQLGSVVSDTFGKSSMKILDKILEDPLNTSFDLEPLIHGSMKDKIPELELAVDGYISPEQAGKLKIIKKHCEDLESRKAELEKLILALASPYQQELDLILTAPSFKNPFSAITVISEIGVNMEAFPSAKHLCSWAGLTPTNNESAGKKKSVRVSKAGCFIKPLLVQCATAVVKSEKHPEIRNRYLRIKKRRSHKKAIIAIARMLLTALYNMLKNKEPYNADLYKKSDVFPIQREITVEQAILIAQNQGYKIKSAS

SEQ ID NO: 147377 - protein, 386 aa, unidentified
MMVIGVDPHKSTHTATAVDPQTNRAVASVRIQASLADYRRMLTWARQFDQRRWAVENAEGLGRHLSSWLLARGEQVVDVPSTATARVRQLSRGGGRKNDQIDAAAAACVAALQGDGRPLVAEGVTDALALLDESRMNLAQSRVRLVNQLHALLRELIAGGAPRDLSATSAATLLRHIRPAGDVERVRKQIAAGLVTQIRAVDTLLKSNAHQISELVAASGSTLTGTVGIGAITAGRLIGRTGRAGRFPSPASFANYAGAAPVEIASADKARHRLSRGGDRQLNAALHTVAITQIRTPGSRGHAYYNAKIAQGKTAREARRCLKRRLADHIWRTMITDERRMATSPGGHPGAALTSSAAGSTPTTSSSDKSLPGPARADSTTLRSTA

SEQ ID NO: 147378 - protein, 340 aa, unidentified
MNVTTYGLDIAKRVFQMYWVDAGTGEVVNRRFGREDLIEFLAKRCAGRVVMEACGSAHWWARKIGSLGHEVVLLHAKFIRPFVQNNKTDVADAKAIWTAVQQPGMRTVAVKSEDQQAMLGLHRVRAQLVKFRTMQVNELRGLLYEHGVNFRAGRLAGLAEIRRRMDELEGLVAGLLWEALKEQLERIEQLDEQIDTLERRIGSWQKQEAACQAVAGIPGIGKLTATALVATMGDAKAFKSGREFAAYIGLVPKQSGTGGKVKLLGISKRGDRYLRTLLIHGARCVLFNAKHKGAWSEGLLKRRPTNVVTTALANKMARTAWAIVAHSRTYQRDYVSVKPA

SEQ ID NO: 147379 - protein, 423 aa, unidentified
MDVVFARCAGIDVHKKTVVVCRLMVGADGQRHGETQTFGTTTDELLRLSDWLAAGGCTHVGVESTGEYWKPVHNILEGSFEVWLLNAQHIKAVPGRKTDVKDAQWIAELLSHGLVRPSFIPPRPQRDLRDLTRHRTKFVRERASLVNRLQKVLESANIKLAGVASDIMGLSARKMLAALVEGEEEVVRLAELAHGKLREKRAQLEQALSGCVRPHHRFLLSELLAQIDGIEDTIRHFDAQIHQARAADAEVAALLDTIPGIGSGTAEVLLAEIGTDMRRFPSAASLAAWAGLAPGNNESAGHQRNGRARKGNVWLRTALVQAAQAAAHTKGTALSAQYHRIAARRGAKKAVIAVAHTLLVIAYYVILRHEPYHELGPDYADRQRPAATATRLVRRLQQLGFQVALSPLEPSRSSPVASAAMTP

SEQ ID NO: 147380 - protein, 344 aa, unidentified
MQTMYYIGLDVHKRTISYCVKDGSGAIHAEGTLPATRFDLDRWMRTLPRPWTAAMEATVFTGWIYDHLQPHAAALKVAHPLMLRAIAAAKKKNDRMDAKKICDCLRCDFLPECYMASTEIRERRRTLRYRNLLVRQMVQMKNKIGMLLMEAGVSYNKQRLHKAGYFRELLATNPDIDEGLVSLLRLCRETVVRLQKTESALVRSLERDSLLTDRVERLMTIPAVGPITALTWALEVGDAKRFSSIKKAISYCGLCGAEKSSGNTVQRTPLSKQRNKHLQTTLIEAAKMAPRNSPELAMLYDKEKQKGNANRATLAVARKLVAYLMAVDRGQRNFQAVETNCIAA

SEQ ID NO: 147381 - protein, 326 aa, unidentified
MAIIGIDVSKAKLDCLWLRDPGRLKVKSKVFPNTPAGHTALVAWALKQTGAAVTELHAVMEATGIYHEGLAYALHEAGARVSVVNPTQLRDYAKSLGARTKTDKKDALVIARFGVSQQPRLWQPEPPEVRRLKALIARLEAVKQDIQRELNRLEKARITDTSVEVVASIETVHRQLNEEKTRLEALIDDHIDQHPGLKQDRALLESIPGVGPVISQQMVALLRGRAFTSAGQCAAFLGLVPVQHESGSSVRGRARLSKAGNARLRAKLYMAAIVATRFNPDIRGQYERLLQHGKCRMSALGAAMRKLVQICFGVIKHQMPYLPRVA

SEQ ID NO: 147382 - protein, 407 aa, unidentified
MDLLKTVFGIDVSSRKSNVCIMVNGQKVNDYAISNDMVGFNQLLDDLKQVTNPQIIFEATGVYSRRLQAFLNMHELRYVMMNPLEAKRKTKDDLHQNKTDKLDALYLAKLQSEHPQRLAYVKSEEYQELMANNRIYEQASHDLITNKNRLHKAIQLTFPEIEHVMATPRGKNYWSIVLRFPHPDIVLETKEADIIDFLKSLSGIGKKRANDIMQKLIRLAKVACPAVKKDSAYVHGLKIAINNILSAEEECQTALQEMAKLAPKRDLEILTSIPGIGENTALRIISELGDIRRFKNPNQLNAFVGVDPQVYESGNLTAHLSISKRGTAIGRKVLYLAINQIQSAKKAGNPCHIADYYEKRKRSSETASHKKAAIASIHKLLRTIFALIKNDQLYSYDVAKHNQRLLS

SEQ ID NO: 147383 - protein, 477 aa, unidentified
MIKSVGIDLAVTGEHKVRCLDEKAQPCDGFSFHTTSEGLAKLEERIFGDGSNPVIIFEPTGLAWLIVAIYLKSQHPDCHLVRVQGRKVVALRKYLRRSSKSDKIDALTLAKMSFIDSEQLEEVYLPPVKIYVMHRLARQRKRLESEITTRKTRIGSIVDGYFPGIRQAFSDPWSAHARAFLRSRLNPVAVIRAGEKTLHAFLTKERRHGKADAVESHMVYLSCKDAATIYELSKSVGTIDDDFFADLQEEIFRELRIMEMTEAESDAIAKRLEQLYLELHPSDNLRTIPGVGEHTAPMFLAAVGDPARFRSQSAFSSYSGVVPAAKQSSNAEAKGLRMTKAGPAILKWALYQSGQIGRRCDPQLACVYYREMVHHGKNHKQAMGAVMSHMGARVLAVLREDKPYELRDIQGKPITREDARKLILSNFQVPEEIKRERRRRKATSSLTKPRRKYQEMAAHRTNEAAVAPQPVVTVAIS

SEQ ID NO: 147384 - protein, 321 aa, unidentified
MTSRGTEKMTQVTIGVDVSKDTLDAYRLPDGVKQRFGNDKAGHTAFVAWCGQDVARVVFEPTGPYHRAFEKALAQAGLPAAKVNPRQARRFAEATGKLAKTDGLDAAMLARMGAILDIETKPRNSDEIIELKEMLLARSALVKDRVATKNREKNLTIPLLKRQNGFRLKQIERHLEALDADIKARIAASHEMARRCAILTSIPGIGFLTAFALLVEMPELGTLEPGQAASLAGLAPITRQSGQWRGRSFIQAGRATVRTALYMPALVAARFNPDLTAKYTQLIAVGKPPKVAITAIMRKLIILANALLKKGTQWQKKTACA

SEQ ID NO: 147385 - protein, 422 aa, unidentified
MQVMHERAAGLDIHKDSVVACVRSMSGSKATRECRTFETTTDGLLGLLEWLVSCRCELVAMEATGVYWMPVWKILSEGQFTMIVANAAHIKAVPGRKTDVNDATWIADLAAFGLLKASFVPDEDLHELRTLMRTRKQLVREQSSHIQRIQKTLTEANVRMDSVISDIMGLNGRRVIEAMIAGERNPRKLVALTDRRLKASPKELYDALHGRLTDHHRFLLQLHLRQYDALDEAVRIIDREAEARLSRLDQRIEPKPGFRDLIRLLVTIPGVSSLSALTILSEIGRDMSRFATAGHLVAWAGLCPGQNESAGKRKRSRLRKGAPWLKTMLVQCAWAAKRAKDSYYRAQFFRLQAKRGPQKAICAVAASILTAIYHMLKDGVVHTDLGASYFDNRPREAKLKRLIRQLKNLGFEATLQPIARAA

SEQ ID NO: 147386 - protein, 414 aa, unidentified
MDKREWRPGSEAPEVRQQLNMRFIGIDVGSETHVVAVVDESGKVVFKAASFSEDADGYAKFRQILGAPGDAMCALEATGHYWQNLFAFLAAEGFPVALLNPLRTHHFAAEDLRRAKTDAIDALSIARFAQQKRPAVTVLPDEATLELREMVRLRDRMMEDLGDRIRQLHRTLDLTFPEFPRLVRDLSSYKATALLLRFPTATAFREASPGNIAEMRYDGRHRIGPELAATLCDTAGRSVGRHEGPSYRLQTQYACEDISTLRERLKTLDDDIHRSLGQHRVGQLLTTIDGIGPNTAARVIAEVNLLAFRDAGALAAYVGVAPSVNQSGKRVPQRGGLHSVGHARLRAKLWMPTLRAVRNNAWLRHFYEGLVARGKPKKLALVAALRKLLSAMLSVARSGKPFEPRLPEAAISLA

SEQ ID NO: 147387 - protein, 342 aa, unidentified
MQIAVLGIDLGKNYCSLAALDGSGQIVLRRRVRRENVLKTVSRLKPCTVAMEACGGAHHLGRLLRDSGYEVRLMSPEYVRPYVKAQKNDDRDAEAIAEAATRPTMRFVELKSAEQLDMQVLHRARDRLVAERTALINQLRAVLMERGITVPQGRRKLEQALAQMLEGCETALSPRVRALINDMREEWCALDHRICAFDNEFATRAREDDRARRLATIPGIGVLSATALVAAIGDAQSFARGRDLAAWLGLVPRQATTGGKPRLKGISKRGNVYLRKLLIHGSRAALVSLSRSETALGSWLRGLLARAHVNTVVVALANKLARIAWAILRTGHSFEAKRVAVG

SEQ ID NO: 147388 - protein, 481 aa, unidentified
MSKPKQHSKKPSAEKIATGPGKRGRKRKGMCLEDRPILEGNAAGIDIGAREIYVAVPPDRDEHPVRVFSTFTKDLEEMAQWLVSCGVTTVAMESTGVYWIPPYDVLERHGVKPCLVDARGMKNVPGRRTDWHECQWLQFLHAVGLLRAAFRPDRDVCAVRSLMRHRSNLVEMTSPHIQHMHKAVTQMNVQIHHVISDITGLTGLAIVDAILDGQRDPVELAKLRDPHIRASEETIRKSLVGTWLPEHLFALKQSRRMYQHYQEQIAACDVEIEKLVVAFQPRVDPGEKPLPPDRKKRRRRGRKKSTHPKMGFDLRTESYKLFGVDLTQIPGLMAMVLTLFSELGRDMSRWKTAGHFVSWLALCPDNDISGGRVLWRARRRVHNRAGDLFRMAAYSLHHGQSRLGDYLRRMKSKLGPEGATVATAHKIAIIFYTMVKKQVEYDETQWAQRDTEREKRFEARLKRQAQQLGYKLVPIEERPAA

SEQ ID NO: 147389 - protein, 422 aa, unidentified
MLAESHDEEQIIARVAALDIGKAELVCCVRVPASAGGKRRLQEVTTYSTMTTSLTELANRLVEMRVERVVMEATSSYWKPVFYLLEAHGLDPWLVNARDVKHLPGRPKTDVLDAVWLCKVAERQMLRPSFVPPWPIRRLRDLTRYRTDLVAARTAEKNRVEKLLEDACIKLSVVASDIFGVSGRAMLAALVAGERDPKVLAQLARARMRGKIDRLEQAFDGHFADHHRFLLSRMLSRIEGLDADIAAVDAQIEAQLAPFAEAAARLDEIPGIGPVAAAAIIAEIGVDMSRFPTAGHLCSWAKFAPGVNSSAGKTKGSASSGHGNPYLARVLGEAAVCTTKTDTFLAARYRRIARRRGQPRAVVAVGRSILVVIWHVLHDPESRYQDLGSDHYARHVDPSAKKRNHIRQLEALGYTVTLTPAA

SEQ ID NO: 147390 - protein, 359 aa, unidentified
MKIVGCDFHPGWQQISIFDAETGEISEHKFLHGDGEAERFYRSVEEPALVGIEACGNSQWFIDLLQRLGHQVWIGDAAQIRASYVRKQKTDRRDAGHILRMLLENRFPRLWVPTAEQRDLRQLLIHRHKLVEIRTRVKNGLQHLALNRGLQKKSSLWSVRGRAYLEELPLAGWSARRREDLLQLLAELDRQVGELDQAVSRAAEQHPQAQLLMSQPGVGPITSLAFVLTIGDVSRFEHSGQVASYVGLIPREHSSGGKQRLGAISKQGNRFLRQLLVEAAQSVARLDDGFRKEYQARCHHKPKAVAKVAAARKLAVRLYWMLKQNLGYPEIAFIESSPRVPLARTKKADGLVGRSRTQH

SEQ ID NO: 147391 - protein, 347 aa, unidentified
MYKANRRDGLCERSLTMFPVGIDVSKNTLDLCMLYDGIKGRIKTRNIQNNRHSVENILRWLRLQHCSPEDVHVVMEATGVYHERLATELHDAGFRVSLANPHRSREFARGMGIMTKTDKVDAYMLACYAFLKKPHRWEPPAPEIRYLGALLRRRDVLLGDALREEKRLEKYLSTDTPADIISSCRRMAQLLREEVSNIERQIKAHIKASPALRRDYTLLTSIKSVGPQLGMHMLVVLRSHNFVSAEQAAAFLGVVPIEKRSGTSVRRRPRMSKIGPPQLRAKLYMSALCGKIYNKRMRNIYDEMCLRGKPKMVAIGALMRKLVHWCYGVLKTGTVFNDEDLKPVLST

SEQ ID NO: 147392 - protein, 355 aa, unidentified
MKQEKYIGMDVHQATISVAVMDGKGKLIMECILETKADTILEFVHGLRGTVSVTFEEGTSAAWLHDLMKPHVAHLVVCDPRKNALLKDGSKSDRIDARKLAELLRGNQLHSVYHGEHGVRTLKELGRSYQTLTKDVTRVMSRIKALYRSWAIPCSGTTVYAARHRAEWLAKIPQPGVRLRAERLYQQLDLLQPVRQEARRDLLRESRKHEAVKRLQQIPAIGPIRAALLVALLQTPHRFRTKRQLWAYSGFAIETHDSGEYRYVRGKVQRNRERITVRGLNDNHNHDLKNLFKGAALSASTQPGPLHDFYTALVEKGMRPTMARLTLARKIAAITLTIWKKGVSFDAKQLHRQAA

SEQ ID NO: 147393 - protein, 320 aa, unidentified
MTHLPVPHSVPTAPDYDRTLVLAIELSNKSWVLAAQVPGLPRVKAKRTIEPTAEALLTAIQGYRERAKAAGRPVERVVATYEAGWSGFWLARWLSTHGIETHVVQPSSVPVDRRARRAKSDGIDAELLLRTLLAWLRGEPRVCSMVPIPAEADEDARRCIRERTELVAERVALVNRIGAVLATLGMDEYNPLLRNRRERLDALRTAQATPLPPNAHAKIGRMLDRLDLVRTQITALEQERDAVLEDEVPDRAGGMIQQLATLRGIGVQSATVLVREAFVREFANGKALGSYAGLCATPYSSGGTEREQGISKAGNRRLRP

SEQ ID NO: 147394 - protein, 371 aa, unidentified
MTKHSTFIGMDVHKNSIDIAIAQDGRKGQVRHYGKIDGTLAALDKVIRKLIGTGNQLHFVYEAGPCGYQIYRHLTTQGLDCSVVAPSRIPKPVGSQIKNDRRDALMLARLHRAGELTAVYVPRAEDEAIRDLTRAREDAKSDEKRSKQRLLSFLLRAGIRYTGGSPWSKAHIRWLSDIKMPHRSQQIVLQEYIGTVNQCKERVQRLTEQIQQLLPEWQLFPLVQALQSMRGVSTIVAATTVAEVGDLKRFHTPSELMSYLGLVPSEHSSGQKTKRGSITKAGNGHVRRVLTEAAWSYRLPARVSRALLKRQEDLPESVCDIAWKAQLRLCSRYRRLWNKGKAKQVVVTAIARELCGFMWAIANEIETPANA

SEQ ID NO: 147395 - protein, 344 aa, unidentified
MDHFAGLDVSVKETSICIVDDAGKIVREVKVASEPEALLAVLKNLAYHFKRIGLEAGPLSQWLFSALAEAGLPVICVETRHMQAVLKAQINKTDRNDARGIAQMMRAGLYRPVHVKTIRSQKLRMLLTHRKLLQSKAIAIENDLRGTLRNFGLKVGMVGKVKFEARIRELVENLPDLAVLVEPMLIVRRTLREQIVILHRRLLAIVRDDEVCRRLMTTPGVGPVVALTYRATVDVPARFRKSKAVGAVFGLTCAKYQSGEVDRNRRISRCGDEMMRVMLYEAAQSMLRSKKWSWLKAWAMKIARHRGMKKAIVALARRLAVIMHRIWVDGTEFRWTREQATAAA

SEQ ID NO: 147396 - protein, 422 aa, unidentified
MEGIAYARTIGLDVHQKMIVCCFTAVQADGKIIKETAEFETFKRGLKALASWCAERKPDVVLMESTGIYWKAPYVYLERAGIIPAVVNARHIKNLEGKKTDIADAEWLAVVARGGMFCRSYIPKEAYRNLRVLSRHLLGVTKSRQQYKNRISKILADGGARLNVVFSDISGVNAQRCVKGLIAGMKPEDIAATLDYTHLKATREDIVAAMECELSPAHLATLDELVAIVDFLTEQIDKGRKTLLEMLPEESREMLLILQTIPGIQETAALELIVELGGDNLEAFATADRLASWVGLCSGNNESGGKRRPAHTRKGNIYLRRILCEIAHAATKTKGSTFQSKYKSLRMRKGAGKTIVAIACKIIKLVYTLVKKREGYRDPHIDYEKMRLQKNPKRHIQSLFKLEDWKIKAVNTKTGEVLESTP

SEQ ID NO: 147397 - protein, 420 aa, unidentified
MHVLTDKPFTACIGIDWADSKHDACLQAAGSEQREFTRFSHQVDSIEAWAHSMHQRFGGPIAVVLELSKGPIVYALQKYEFFVLFPVNPSMLAKYREAFIPSRAKDDPTDAELALDLLMRHPERFKELQPQSVEMRTLVSLVEQRRRLVSDKIRFTNRLRNTLKQYYPQTLEWFDHIDTPIFCDFISRWPTLIQVKRARRSTLERFFHAHNMRFAHVLEARLRSIKEATALTLDEAVVTPHRLQALVLIDQLRVTLQAIQRFDDEIAALASTHADYPLFSALPGAGPHLAPRLLVAFGEQRERFRNAAELQQYAGIAPVTERSGKKHWVHWRWQCPTFLRQTFVEWAAQTINKSFWAGAFYSQQRAKGCSHQAALRALAFKWIRILYRCWVTRTPYNEAEYLRALERRESPLLEQFATPK

SEQ ID NO: 147398 - protein, 356 aa, unidentified
MSIVAHTRPFVIGVDAHARTHALAVLACPTGEVLDEAQFPATTAGLARAVAWVARRTGADLDALWVIEGVGTYGARLARAAADAGYAVAEAPRMNARANRGVGKSDPLDARRIAQAALPLDHTQLRLPRTDEGARAALRILIASRDHITNERTAAINALIALLRVVDLGIDARGTLNTGRISEIAAWRARAEELSIGVARAEAVRLAKRVRTADRELGDLTRQMTALLNESPAAGLLDQPGIGPVTAAIAYAAWSHPGRIRSEAAFASLAGVNPIPASSGNTVRHRINRGGDRRLNRALHMAVVTRMRMDPETRAYVDKRTAQGRTPREIRRPLQRYPARHNYRQLNATTTPAAAA

SEQ ID NO: 147399 - protein, 357 aa, unidentified
MLSSNVKYIGLDVHKEAIAVAVLNGAGKLVAESIVETKASTLLDFLHGQRGELHVTLEEGTWAAWLYDLLKPHVREVVVCNPRRNALLKEGSKSDKVDARKLAELLRSGMLRAVYHGENGLRALRELARTYQVVSKDLKRVMNRLKALYRSWGIPCTGTRVYSQRHREQWLKKIGEAGVRRRAELFYQQLDALQALRHTVRGELLAESRKHQAVKILRQIPSIGPLRAAQLVAVMQTPHRFRSKRQLWTYSGLAVETHDSSQYRFVDGQLQRSKKPQQVRGLNQNHNHAMKEIFKSAALSATRRAGPFQDFYEGLLAKGMKPELACLTLARKIAATTLTLWKKGECFDARYVKPQAA

SEQ ID NO: 147400 - protein, 313 aa, unidentified
MAQMVKTAGIDVSKPWLDVAIWPTREEIRVSRDGVGLAQLIAWLGECEVARIGLEASGGYERAVIDALQLAGFEVALLNALRVRCFAKAKGRLAKNDRVDARTVAQFTAVMLDEAVPPQRRRDLDELVELLTYRRQIKGWSTDCTNQLEHLRGSALRKAVAQRRVSFERDLAKVDAKLAKLIGEHDDWNALARRLRTVPGVGPVVSASLIALLPELGSLSRRAVASLVGLAPFDDDSGNRQGERHIKGGRKAVRDALYMAVLSAKQYNPIIAAFATRLAGKKPKVIMTACMRKLLVMLNAMVRDGTDWRTQAA

SEQ ID NO: 147401 - protein, 385 aa, unidentified
MQANTTKAPAAIRVDLAAIFVSLELSRSKWLVTSLSPGGGERMSRHIVSGGDIPGLLDHFAELQRKAEVRTGQSFRVISIQEAGLDGFWIHRVLEREGIESYVVDPASIATSRRRRRAKTDRIDGEALVRALLAYNRGEPRVCAMLRVPTPEEEDRRRLVRERKALTNERIRHVNRIKGLLFSQGVSGYEPLKGDRRKCLDALITGDGRPLPPALKAQISRELDRIELLIQQIKDVEEARDALLVAADVPTPALLLSLKGIGPEFAAVLWSEGLSRKFDNRRQVAAYAGLVPTPWQSGQINCEQGVSKSGNPRLRSTLVQVAWLWVRHQPNSALSQWFRARVTQNGGRYKKTAIIALARKLLVALWKYVNAGVVIEGALLTKPSA

SEQ ID NO: 147402 - protein, 345 aa, unidentified
MQPMYYIGLDVHKRKISYCVKDGSGKVYAEGSLPATRADLDLWMKTLPQPWSAAMEATMFTGWIYDHLKPHAAGLKVAHPLMLRAIAAAKKKNDRIDANKICDCLRCDFLPECYMASTAIRERRRTLRYRSLLVRQMVQMKIKISSLLMEAGVSYNKQRLHKAGYFRELLATNPDIDEGLRSLLRLCRETVVRLQKTEGAMVRLLERDSLLMDRVERLMTIPAVGPITALTWALEVGDVQRFSSIKKAISYCGLCGAEKSSANTVQRTPLSKQRNKHLQTTLIEAAKMAPRNSPELAMLYDTEKQKGNANRATLAVARKLVAYLMAVDRGQRDFQVVETSNGIAA

SEQ ID NO: 147403 - protein, 347 aa, unidentified
MRFYTKQHKAYCGIDLHARTMYICIVSRDGEILVHHNYTANPETFLKVIAPYRDDIVVAVECIFTWYWLADLCTREGIAFVLGHALYMKAIHGGKAKNDRIDAQKIAVLLRGGMLPQAYVYPAAMRATRDLLRRRIHLMRKRAELLTHVQQTNSQYNLPDIGKKIAYKANRAGVAERFADPAVQKSIEVDLALIDYYDELLRDLELAMVKTAKQHDANTLYLLQTVPGIGKILSLVLLYEMHDIARFPRVQDFVSYCRLVKCAKESAGKRYGTSGTKIGNAYLKWAFSEAAVLFLRNNPAGQTYLARLENKHGKGKALTVLAHKLARAVYYMLQRGTAFDMDKFLHS

SEQ ID NO: 147404 - protein, 342 aa, unidentified
MIYLGMDVSSKSFVGYAINEKKKVVFEGEVEPMRLGLRGLIGKLGKETKLVVFEAGNQLKWIALTLKKMEGVEVHVVHPNEIKWIKESSGKTDKIDAKKLGHLARGDMLPRKVHIVEGKIRELRELISANEHPTKQANSMNQQFTRIHKTGGVSAAGKVFSKSRLGRNTLKTEGWPDSEGHYSMKAIESLEAAEGELTERMVEIKDERIALVETIPGVGKLTSRVLVSAIDNADRFDNKKSVAKYGAVTPRVYQSGGITHLGRISQDGRHEVRRVLLQCAHTRTRMKSYEAYPLKAFFERIKKRRGKKIAIVAVARKLSTIAYGVLKAKAAYNPARLAIRAV

SEQ ID NO: 147405 - protein, 424 aa, unidentified
MNCNQNFKISQVTEGTLVLGIDVGSNTHYARAFDWSGLELSKVFKFKNSFEGFQSFVLWVNDLCCKYNKSKVIAGLEPTGHYWFSLGELLKENNITIAIVNPYHVKQSKELDDNLQTKNDSKDPKIIAKLVIDGRYSFPYIPEGIYGELRVADKLKNDITQQIISIKNKIHRWLSIYFPEYENIYSSIDSKSGFLLLKETPLPKDIVELGSEGIVERWKQTKLRAVGLDKAKKLEEAAKKSIGCKNITSSARFEIKLLIEDYEYKQNQLNSITEELNKLCEKIPMIKEIAEIKGIGIATAISFVAEVGDIRRFKSAKQVQKYAGLALKENSSGKHKGLTRISKRGRKKLRTILFRATIPLIGFNKEFSSIYNYYIERKDNPLKKKQALTAICCKMIRIFFTILSKGIKYDETKMLHDIKRPVAA

SEQ ID NO: 147406 - protein, 385 aa, unidentified
MGGQTFIPRNYDVFAGLDVDKRSISVTFADHQGLLKSMRMPYSVEYLVNHVRKHYGDKKVAFAYEAGPTGYGLYDGLVAQQYLCLIASPSMIPKAPGQRVKTNRLDSRGLAENLRGGQLKSIHVPTTLYRELRHLTQLRDALVSEMVAMKQRIKSLLLMEGMEFPPAPPGSQWSLVVKDKLRKLPCSSVVRFKLDQLLDNLEFNEKQVLKVTGEIRRFCQDDPELSLCIEYLKTLPGIGWSVASQMMARIGDWRQIKNIRELPAFLGLVPTESSTGDRTERGSITHSGDPRLRSKLIQASWSAIRQDGELREFFRTVARKHPRHLGPRVAIVAVAHKLCVRAAVVLMKQRPYEVREKVQSAPLTQEETVPQGTTRRHAVPGEKTS

SEQ ID NO: 147407 - protein, 345 aa, unidentified
MQVTTIGLDLAKNVFQVHGVDVNGLVVIRKALRRAQLLLFFKELPPCLVGMEACSSAHYWARELSALGHAVKLIPPSYVKPYVKRGKNDAADAAAICEAVTRPTMRFVAMKSPEQQAVLMLHRTRALLMRQRTMTVNALRGHLAEFGLIAAQGAKSLSALIERVFGAGGADKHAVPPLARRALAPLVGQLRELQAQIKSIDAELLVWHRANAASKRLETIPGVGFITATAIAATVTDPSHFTSGRQFAAWLGLVPRQNSSGGKERLGSISKMGDRYLRALLVVGATSVIRYARGKNAAGAQWINTLLARRPARLVSVALANKTARIIWAVLVRGESYRAAALATA

SEQ ID NO: 147408 - protein, 396 aa, unidentified
MATIGIDIGGRSHAVARCREGLARADREVLRVSQSRAGFAALDTWLERQAEPVSLVTMESSGHYWMPLASHLRRQDVPVAVVNPLSAKYFARSRLARTKSDPADARSLAEMGMRDQPAARDPLAGAELRQAARFAMTLVDEQAKVCQRLIRLVELGFPELGELFDDPTCRTAREVLRIAPTARAATKRRTTTLANANAGPGHRRLGQTKAERLQAAAADSIAVPELDAEVAFEVGILLDQYDLLERQIEVADARVAGLLDGETARRLRTIPAVGPAIAATFLAEIGDIDRFSDFDQLLAFAGVHPAERSSGRKGSNPETAWHMSKAGNSHLRAAAYRMAVVGVQHNPVIRAHYERKRAAGKSKMNALGHCMRKALSLVWGVWRNGQDFDPNWGLEA

SEQ ID NO: 147409 - protein, 402 aa, unidentified
MYSSFVGIDIGKWNHQAAFLEVSGKETARSLAFQNTSEGFQSLSESLAPFDKGQTVIGLEATGHYWLALFSFLVDNGWTVKVINPMQSDAMRNMNIRKAKTDRKDCVVIADVLRFGRYTETVLPDEDLLQLRELSRCRVAHVELLGDLKRRVLGILDRIFPEFASCFSTVFGAAPTELLQECTDPEELADYDVDKLIKLLEKESRGRHSREKAEELKAKASRSVGTRFGRDALKFELKMLLEQLDFIKGQVKEFDKFLKKLMKNHELIYTIPGISVTLGSAILGEIGDVKRFGTPQQLQAFAGMDPSVTQSGNFQGTQGKMSKRGSPYLRRAVYLAANAARRFDPVFKEFYDRMIARGKHPKQALAAVGTKLLRVIHAVMTSQKPYNPQKLLTPAAISQLNP

SEQ ID NO: 147410 - protein, 315 aa, unidentified
MAMPVSVAKPIVGVDVAKDELVIYHAETDRLEAIPNTKAAIKKWLKELSAPVDVAIEATNIYHQEFADLAYAQGCVIYMIGGYELSHYRKGVKVRAKTDALDARLLARYLNNEGHQLHPWTPPSPLYCRLISLFRRRAALVQARVSLKQSWSNEPLLKRAFENQIKAMQRLEILLEKTIQTQLEAAGLGAQLKRCMKVEGIGLLSGARLLTSFQRGDFRNADAFIAFLGLDLRISDSGKKKGRRCLSKRGDPEARRLMHNAAMSARRTAAWKGFYEALRARGLSTTEALVALARKLARVVFALLKNQSEYLPKGI

SEQ ID NO: 147411 - protein, 402 aa, unidentified
MNSVGIDVSKGKSMIAVMRPFGEVAVSPFEVRHTDSELCELAKLLRSLPGETRVVMEATGNYHLPVAWLLNDSGFYVSVVNAMLVHGYGNNSLRRAKTDKKDAIKLANYGLDHWLALPRYVPEEDTRLMLKNCYRQYQQYSKVQTMLKNNLISLLDTAFPDANRLFSSPPRADGSEKWVDFVATFWHCECVCGSSEKVFVAKYQKWCKKLGYNFSEDKALDIYASACGHFGVMPKTDTTKLLVEQAVSLLRVTSTALASLKQEMQSLAASLPEYPVVMKIFGVGPALGPQLMAEIGDVRRFHSKKALVAFAGIDAPPYQSGQMDVYSRSISKRGSSSLRRTLFLVMGIYLQNAPPDEPIYQFMDRKRSEGKPYKVYMMASANKFLRIYYATVKAYLDALDEA

SEQ ID NO: 147412 - protein, 463 aa, unidentified
MAARKPKRMGAQTVEDEDYQLRYERVAGIDVAKGSAMVCLRLPPGPGKVRRTCRTWEVMARVPDIEALAAELKAARVERVSMESTSDYWRIWVVVLEGAGLDVQLVNSSQARNLPGRPKTDKADAQWIARLTEMGLLRGSFVPPPEIRALRQYTRQLVHLSQDRTRYWQRLEKLLESALCKLTSVVSGLAGSASCLAMLEAMIAGERDPQVLAGYARGPMRSKHAALVKAFTGMQFGPEHVFSASSDLRMIKMLDAEITGLEQQVRDHLAAIPAAWGTDADGVTGPGAGTGPDAAVLPAVDRLTEIPGVGPAIAAGLIAEIGLDMSRFPTPHALVSWVGMAPVPNQSGPRKGRGRKGHGSSYARRLAGQAGNGAARTDTFLGQRHRRIRSRPAGGGWKKANVALGRSIIIIVWHLLKDPAARFTDLGPDHYAKHTDTNRKARNHKRQLEALGYDVILTPREAA

SEQ ID NO: 147413 - protein, 371 aa, unidentified
MLSRKVSNDERAIAAVIEAVTALGGQVSWTVDLSGAYAALLLTMLWQTGQPVHYLAGRSVHHASTIYRGEGKTDARDARVIADQARMRTDLPVLAPGADLIAELRMLTAHRADLIADRTRTFNRLHQQLMAVCPALERAAQITQHRGWVILLTRYQRPKAIRRTGVDRLTQALAKAGVRNAVTIAQAAVTAAKAQTGSLPGEDVAARLVAALAKEVIDLDARIKDTDTAIEERFRRHRLAEVITSMPGMGFRLGAEFLAAIGDPSLIASPDHLAAWAGLAPVPRDSGKRTGRLHTPSRYNRSLRRVFYLSALTSIRCHPESRAYYDKKRAEGKRPVQAVGCLARRRINVLWALMRDNRTWTPHMPATPQAA

SEQ ID NO: 147414 - protein, 371 aa, unidentified
MKDTIKYVGLDVSKEKIAVAIADEGRDEPRYWGMISNTPEAVKKLMKKIGNSENLRVCYEAGPTGYALYRLLLTLNIHCAVIAPSLIPHRPGDRIKTDRRDSVRLAQLYRAGELTSVYVPTSEDEALRDLVRCREDAKEDELRAKHRLSKFLLRYDIQPPSKGKKWTVRYYRWLDTLKFENSKLQVVFQEYYHQIKEIQQRVVRLEEEIRIQATEGSHAPTIQALQALRGVALITATSIAAEIGSFKRFSTPRQFMAYVGLVPSEHSTGDSRRQGKITKTGNRHVRRLLVESAWSYRYKPSVKGELQKRQNGQSPTVLAISWKAQNRLHKKYFRLLSRGKESGKVVTAVARELAGFIWAVTQELDEVVPKA

SEQ ID NO: 147415 - protein, 325 aa, unidentified
MSENLHSIGIDVCKRFLDIHVYPTGQCWRVPNTIVGLLSVRSQFPEPAQVKRVVLESTGGYEREAALWLSQAGYPVAVINARQGRNFARAMNQQAKTDQVDAHVLALFGDKITPAVRPLASEAQQQLDDLVTRRRQLVDILTAERNRMALLRGKAQANVEGHIEWLTEQIKELDGEIEAQIQACQAWRHTQELVLSVPGVGKVMASTLVSALPELGKLNHKQIAALVGVAPFNCDSGQMRGKRRVSGGRANVRQVLFMSAMVAVRFNPVLKEFYNRLLQRGKEKKVALVACMHKLLTILNAIVKQGKAWVAPGKGTETEKVALPA

SEQ ID NO: 147416 - protein, 345 aa, unidentified
MQYVGLDVHWRTSTGCILDENGREVKTATVKGGWDKMLAWLDREVRRPFAICYEASCGYGALYDRLRLKASRVVVAHPGQVRLIFRAKRKTDRIDARKLARLLFLDAVPPVYVPSADVRSWRRLIETRRRLVAKRTRAKNGLRSLLRSHGVRPPMRGLWTRRGLAWLREASWPSEGAALERDLLLEELETLAEQVHRVTRVLDRLGRGHPGVMLLRTIPGVGPRTAEAVVAYIDVPDRFADSRQVGAYFGLVPRQDQSAAVNRLGHITKEGPPSVRHLVVESSWQVIRRSPTARARFQRISGGQKERRKIALVAVGHWLVRCMHAMLRTGECWRETVSAASSVAA

SEQ ID NO: 147417 - protein, 446 aa, unidentified
MSYRIAGIDVHKKMLAVVVADVEVQGEYQFERIRYGSNPEHLRLLAAWLIEHEVEEVVMESTAQYWKPVWGALERHWKGSCQKREGAGPMSGTLHLAQARSNRGRKGRKKDFPDAERLVKRLVADELILSFVPDAEQRLWRTVTRRKYQLTRNKVRLQNQLEALLEEAHIKLSSLVSDLLGVSARRMLKAIADGGTDPAALAALADKKLRATPAQLCDALGACAELKPIYRRLLKMFLEELQLIEQQIGQLDQEMAALLSQHPEAVQRLAEIPGLGVDSAQQIIAEVGATATTFPSGKHLSSWVGACPGDEESAEVSRSHRSPKGNRHMRRILNQCANAAVKAKGTIFEIVYRRLVSRLGHNQTIGAIAHRLCHLIWIILHRGVRYEERGPSVTTKSRRQRTTRMIRETPKPRLSGRTAGNSSMTAGEFSTLRLEAYSFFRLSEGA

SEQ ID NO: 147418 - protein, 346 aa, unidentified
MGKAHVDLRSVTTVGLDLAKHVFQIHAVDADGRIVIATALRRKDVLSFFEALPPSVIGLEACGSAHHWARELVKLGHDARLMPPNYVKAYVRRQKNDAADAAAICEAVGRPSMRFVPIRSIGNQAILMHHKVRELLVSQRIQLLNALRGHLEEVGVIAAQGPNGAYALAVAISGGDSSIPLCVLDALTPIVRQLQTLNDEIAVSDRAILELAKADRTARRLMSVPGIGPITASAIAASVQDVGAFSGPREFAAFLGLTPKQNSSGGKERLGRVSKMGNRYLRKLLVVGAHAVLFHRRSHQDGLRTWAAKLMETKPFKLVAVAVANKLARIAFAVMRDGSIYGTAVP

SEQ ID NO: 147419 - protein, 475 aa, unidentified
MEEATVNDNREAGRRRTKGSRQRKSPGLLERIQPDAAGIDCGAEYHYVAVPPDRDPEPVRPFRTFTADLERLADWLAACGVKTVAMESTGVYWIPLYELLEARGFQVVLVNARDVRNVPGRKSDVADSEWLRELHRVGLLRASFRPAGEIAALRAYLRHRETLVHGAATHIQRMQKALVQMNLQLHTVIADLTGVTGQRIVRDILAGVRDPHALAAHRDHRCRASADVIAASLTGHYRAEHLFALRQNFEAYEFLKRQIDACDAAIDAHLTTLAERQAPPPHTLPTPRRTRKPRDNDPRFEIRAPLFRLTGTDLTQIDAIGPSTALQLIGEIGTDMSRWRSEKHFTSWLTLAPHNKVSGGRLLSSKTPPSANRAAAILRRCAMSLGRTATALGAYYRRLAYRVGKPKAITATARKLAILVYRVLRGDLVYRDPGALAYEQLHRARTLRGLRKRANQLGFGLLNLETGEVLDAAVS

SEQ ID NO: 147420 - protein, 355 aa, unidentified
MDRTKYIGMDVHQASISIAVRDASGKLVIESLIETKAATILEFLQGLKGTLWVTFEEGTSAAWLYDLLKPHVVKVIVCDPRKNALLKTGNKNDRVDAQKLSHLLHAGLLTPVYHGESGVRTLRELARSYLTLTKDLTRVMNRLKALYRSWAIPCVGEKVYSPRHRSAWLEQLSEAGVRRRAEQLYQQLDILLQIRRDARRELLRESRKHPAHELLRQIPQLGPIRVALLIALVQTPHRFRTKRQLWAYCGLALQTRSSGEYRFTAGQLQHSNRLPALRGLNTNHNHDLKNVFKSAATHVSTSPDAWGDFYRSLLAKGMKPAMARLTLARKMAAIVLTVWKKGARFDPGELKRQAA

SEQ ID NO: 147421 - protein, 318 aa, unidentified
MTASPMVGVDVAKDRLDVAVRPSGEAWSEANDDAGVRALVARLRPLGPALIVCEATGGFERAAIAALAAAGFPVVVANPRQVRDFARATGQLAKTDQLDAAILALFAERVRPTPRPLPDAAAQLLDAVLTRRRQLLEMLVAEKNRLGFAPKPLHRGIQAHIRWLERQVDDVTKELAGLIEASPVWRAKDDLLQSVPGVGPIVSSTLLGELPELGTLSHKQIAALVGVAPLARDSGTLRGKRLVWGGRASVRTALFMAALCGRRWNPALKRFYERLKAAGKPTKVALIACARKLLTILNAMVRDGKRWAVPAPSVQYSC

SEQ ID NO: 147422 - protein, 344 aa, unidentified
MPHYVGLDVSQKTTAICVVDEQGRRLWRGACVTDPGAISARVLRHAGVVDVKVGVETGSMTPWLVHGLRRAGLDVECLDARRTKAALQMRLNKTDENDAEGLAQVLRTGWYRPVHVKSFDAHRARALLGARAQLVGMTTRLSNMIRGVLKTFGLLPGAGRGLRFDRRVEALLESAPEIGLIVRPLLATWRQLREQIAIFDKAVQQRVRTDPICRLLMTVPGIGALSSLVYVSTVEDPGRFSRSRAVGAHLGLTPRRYQSGETDRSGHISRCGDGLARTLMYEAAVVILHRIKRSLPLKDWAAAIEQRSGPGKARVALARKLSVILHSVWRSGEPFRWAPHTIAA

SEQ ID NO: 147423 - protein, 377 aa, unidentified
MNNNSTLYVGLDVHKESITVAYAINSEPVELMGKIGTTPTDIERLCKRLTSKAGQVQVVYEAGPCGYGLYRRLMKKGFDCMVCAPSLIPKKPGERVKTDRRDAARLVRSLRAGDLSAVYVPDVKDEAFRDLARAWASARDDLRHARQRLKSFLLTHGIHYVGRADWRAAHRRWLSKYSFEDAWRQLAFDEHRRTIEDRLAQCERLEAALREAVTEWRLYPVVLALQAMRGIQFITAVGLISELGDLSRFEHPSQLMAWFGVTPSEHSSGGTRRQGSITKTGNSYARKLLVEAAWSYRHTARISPQLQIRQENLPKPIIDRAWDAQVRLCRRCHRLVAKGKNANIAIVAVARELAGFIWDIGRLAMSLSLEPHNTRMA

SEQ ID NO: 147424 - protein, 325 aa, unidentified
MEQAVVGIDVSKATLDVALVQAAQATRAAQFANTRAGCKRLERWLKKQAPGALHVCLEATGLYGDEVALWLHTAGYRVSVVNPARIHAYAASQLARNKTDRLDAALIADFCRTQQPPAWTPPDPVWLELRALARHLLDLKDMRQQERNRRQAGVTSATVQHALDAHIVFLDQQIDALERQMQQHINQHPSLKHDRDLLTSIPGFGSLSAALILAEVPDLRAFSTARQLVAFAGLNPRQRRSGSSVRGQTRLSKTGNAALRRVLYMPALSAQRFNPRLAPWAAQLAARGKSKMQILGAVMRKLLVLAYGVLKSGQPFDAHFSTVSP

SEQ ID NO: 147425 - protein, 411 aa, unidentified
MNEGIAVSALTVGIDVAKEFHWVVATVPHPETGKARVALSRRVDNLPSAIDTLLVEIAELEAEHGSAVVGIDVVGGIARLVEVMLCGAGLEVRHVPGLAVKVTRRATRGGAHKSDPRDARVIADLVRARDDLRCLTVDETENVGLSLLVARRRALVEDQTRGIAQLLDLLCSIHPGLERVIRPRNKADLALLARYVTPTEIRRAGRTRLLAYLRRTGRHNAPVLDRLVTAALTAAAEQHIHVPGEDIAAAIVKDLAADLLAIRTRLATVDTQIAEQLADHPDAALIQSLPGMGATLTAEFLATTGGITRFATPDQLASAAGVAPTLQQSGKVRYLQRSAGGDRILKRVFYQAAFCALRRDPTSRAYYDRKRAAGKTHHQAVIALARRRVNVLHAILRTRQPYETRPPRVAA

SEQ ID NO: 147426 - protein, 333 aa, unidentified
MQTAKKIVGIDVGKEKLDICYPNGKKETTRNIKSCRTKVIKKAAQFGAFIAFEATGPYEEPLADECLARGVKAVRLDAWGTRKFAESQGRIEKTDAIDCEMIRDYAASLKDEKLHFVKQRSEAQKRLKKSVRTRKNLLKARAIIANQFEDDLDPETARHLKSALNSLDKNIAKVEAECDAAIASDERLKELDRRFRDVKGVGPCLSRTVLAQCPDIGDFNSKSIAKMCGNAPLDHESCTIKGKAKPRRGRSDLKKALYMAAVSASRNNHILREFYQRLVANGKPRKVALTAVARRVAILLNTIAKHPDFKPAQDPKAASKKVNARRGRSRKTK

SEQ ID NO: 147427 - protein, 371 aa, unidentified
MKIYNLKATPVASVKELKDEQRPKAKQIVLGTDAHLRGYQVGRKIDHGVVGAVESFRSEEALLFFAQKQLERAERVVLVYEAGPLGYSLYRKLKALGVECYVCAADSSEQQRKRRKNNRIDARNLTSKLFNYLNGDQNALQMVRVPSEAQEQLRLTSRQHDQLVEERKRLAAQGNAMLLSQGFGSWSNWWRPKTWARLSSLVPGWLLERLQVWVDVLKMLDEKICQAKVGLTRGCSGPRPKGVGALSQMQLRSEVLDWHFYSNRRKIACLAGMVPSEWSTGDSERRGSITKVGVPAIRRIIVEMVWRMILFQPQYKPVQKWQEVLRGSNPALKKKAVVAIGRQLIVDLWRLETGRVTAQELNLVMIEAEGV

SEQ ID NO: 147428 - protein, 366 aa, unidentified
MIKKLLKQVVGIDIAHKEIDVYLGNMDQEAATQLYAYKTFKNNEKGFAALILWVKKHTQADMPIRFVMEATGVYHESLAYFLSNKAYAVSIVMPNKITNFFKTLEGKTVTDKSMSAAITQYGLEKKMTNWVPPQKAYKELRQITRERDQLIDERSMNKNQLHAEESEAYPNEKTIKRVKARIVMLNKQIKEIMTEISEINKNNSEVAEATKLITTIPGVGLLTAVTILAETDGFSLIHNKRQLTSFAGLDVKEKESGTSVKGKSHISKRGNKQLRKAMHLPALAAIRHTERYRSTFTTITGKTGIKMKGTVAVQRKLLEMTYTIYSTKKPFDIEYLQKETKRKQELKDTNKIENSPIGLLSMQADI

SEQ ID NO: 147429 - protein, 340 aa, unidentified
MGEQYVGIDLHRRRSVIVRMTGEGEVLETIRIDNDPVALSLELAKAGPDPEVVLEATYGWYWAADLLQACGAKVHLAHPLGVKMFGYQRVKTDARDSTNLAELLRMDRLPEAWLAPRQVRELRELVRYRAKLVALRSGLKAQVHAVLAKEGVRVPMSDLFGVAGSRLLDQLHLGHAYALRVASLRSLITTYDQEITMLGREISTALAGDVGYLAIQAIPGVGPVLAAVFVAEIGDVHRFASAPPLCSWAGLTPRHRESDTTVRRGPITKQGPRLVRWAAVEATQRLPRGSKQATDFHRIADRRGTGIGRVAAARRLLTLVFYGLRDGQVRCLAPAPREAM

SEQ ID NO: 147430 - protein, 341 aa, unidentified
MEEYIGLDVSMKETAVAIRRDGVRVWRGKCISDPRVISELIRKRAPTVKRVVFETGPLSVWFYHALRAEALPVICIDARHAKAALDMATNKTDANDADGLAHLAEVGFFREVRVKGFESMLARTLIAARTRLVHMTVELSNQIRGIMKTFGLVVPAGKGSVFEKNVRNLLCSQDDLAHVVLPLLDAWKGLRARAADLGRQLVTDARQSQACRILMSIPGVGAITATSFATAIEEPENFRKSRSVGAWIGLTTRRYQSGEVDYDGHISRRGDRHLRGLLYEAASVILTRSSVQSSLQTWGLQLRERIGFKRAAVAVARKLAVIMHTMLKTGEFFNPTAGVAA

SEQ ID NO: 147431 - protein, 347 aa, unidentified
MNFYHSTHRHYCGIDLHARSLYVCIIDQQGEVLLHKEIKARPEPLLALLKPFRDDLVVGVECMHCWYWISDLCEEQGIHFILDHALYMKAIHGGKTKNDRTDSFKIAMLMKGGNFPLAYTYPKEMRATRDLLRRRTRIVQHGAMLKAHVVNTTSQYNLPPNKVNLKNVGAREQVQAAFAGQDVQHNIDLDLAIIECYHRELTKLEEHLERQAKQHDPTSLSVLRTIPGVGRILALTILYEIGDIQRFESVQKFASYARLIKCKAESAGKVYGTQGNKIGNAHLKWAFSEAAVLYLRGTDKAQRYLQKLQKRMNKAKALSALAHKLGRAAYFMLKHQRVFDEQRFLKG

SEQ ID NO: 147432 - protein, 418 aa, unidentified
MTATTRSFDPTALHDTLCMALELGEGRWKLGFVCGFGGNVLRRQVVARDQHGLLAAIAWAREKFALSRPTRVVSLYEAGRDGFWLHRFLVARGIENLVIDSSSLLVDRRKRRAKTDRLDLEGLLDLLQRHLAGSSKKVFSVVRVPSVEEEDRRHLHRELLSAKRDRTRVTNRMKGLLANQGLTLDLKKEVPAQLAALRQWDGSALPEGLQARLAREWERALFYDGLIDRLESERREQLRRVSDPVLKQVRQLNTLRGIGTNSAWLYAMEFFGWRQFRNGKEVGALAGFAPTPFQSGESEREQGMSKAGNRYVRAMAIEIAWGWLRFQPQSALTKWYQRRFGHREQATAQDRDRGTGAQALDRAVALPRDGRAARGSVAQTGSASPLNSPTPRERRRSIESDRVRAARPRCRVSDDTAR

SEQ ID NO: 147433 - protein, 345 aa, unidentified
MAEVSTIGLDIAKTVFHAHGADARGQMVFSRRLTRAKLLEFFAAQPRCVVALEACGGAHHWAREIASLGHEVKLIPPAYVKPFVKRNKNDAVDAEAICEAAQRPSMRYAAIKTEAQQAAGMVFRTRDLLVRQRTQLINAIRGHLTEFGWIAPKGPSHVTVLASLLEEGEEIGASLPEAARSMFLVMTGQLEHLNEQVALLDKEIARRAREDEAARRLMTIPGIGPITATALLALAPPAEGFARGRDFAAWLGLTPRQHSTGGKERLGAISKMGERTLRRLLIIGSSAVVLQASKRGAPRGSWLEQMLARKPRMLVTVALANKTARIIWAVLIKGEDYRAPVAAAA

SEQ ID NO: 147434 - protein, 339 aa, unidentified
MVHAGVDLHKRSSQLAVLMPDGEVTQQRLENDPTRLEQFFAQVPRGAQIAIEASGTWWWFVGLVERLGHHAVLSNPKQTKAIAAARLKNDRVDAERLALLLRGDLLPTVWIPPVGLREARELVRHRVSLVWVRTEIKNRLLALLSRRNLQPTSSKRWLTVRGRQELEALPLGAIPSTVRADCLTLLRVLDEQIRRLDHELVERWGADPRVQRLQTIPGVGPFTAILLILELGEIQRFPSAKHLASYVGLTPRVRASANRVRMGHISKEGNRLLRWALVVAATQAARRPGPLRAWFRAVQQRKGLKIARVALARRLAEIVYQIWKHDMDFVTLVCGGVRR

SEQ ID NO: 147435 - protein, 427 aa, unidentified
MGLIVPTTIHPEREDQPLPYEWFVGMDWGSQQHQVSVLDRDRRRVGERVVDHDGASLARLADWLWTLSAGQPQRVAVAIEVPRGAMVEGLLERGFHLFALHPKQRDRFRDRHNVAGAKDDRRDAFVLADSVRTDQPSFRRLHLEEPQLLVLRELSRAEETLLEDLGRSANRLRDQLHRLYPQMLQLCSAADEPWLWDLITLAPTPAHAMLLSEEQVQRVLKAHRIRRLKAPAVLACLQAPALPVAPGTPEAAQAHCGFLLPCLRVLAEQLQACSQQVSTLLRTMADEPGEEERPSDVAIVQSLPGVGRKITAWLFAEAAQPLAERDYQVLRTHGGVAPVTKQSGKRRQVVMRHGCNPRLRHALYHMARVAMQRDAHFSSVYAALRAKGQRHGQALRNIGDRLLRILMAMLRHRTGYDASRIRCEPVV

SEQ ID NO: 147436 - protein, 267 aa, unidentified
MEKIIRIGIDTSKSVFQLHGVNAVERPVLRKKLSRREMVKFFEKAPPTTVALEACGGSHHWARLLGSFGHDVKLIAPQLAKPYVKRGKNDAADAEALCEAMSRPTMRFVPVKTADQQAALMLVGLRERLIRNRTQLANAIRGFAMEFGIVAATGMCRIEPLLERIAADQSLPELARELFAMHGVEYRDLLAETKVVEEKLTALHRSDECSRRLAEIPGVGPVGASLLMMKTPDPRTFKSGRDFAAWIGLTPKDRRQGQIGGDYTCWR

SEQ ID NO: 147437 - protein, 362 aa, unidentified
MSQHTTTHVGLDVSKASISVALLRPDGRLDEERIANTPEAVRRLVRRWPEPTTVRACYEAGPTGYELYRQLTALGVDTTVIAPSLTPRRPGDRIKTDRRDARKLAGLFRADELTAVRVPTPEEEAVRDLLRSRQDQREDILRARHRLSKFLLRHGRVFTDGTAWTGRHTAWLAQQHFDEPAAQRTFAHYRAELDMRLAALKLLDAELLAIAHRPPFARQVARLSALRGIAELSALTIAVEVGDFRRFESAPAFMAFVGLVPSERSSGERRDQGPITKTGDAHLRRVLVEAAWHARRRPNVGPALAKRLVGQPPEVLGIATTAQRRLHDRYWRLVGRRKPSNVAVVAVARELSGFCWALGRAA

SEQ ID NO: 147438 - protein, 339 aa, unidentified
MSIVMGLDQHRGQITGEWIDTDTGEVQCTRVAPADREHVRRWLERFRGRELEVALEATTGWRFLVEELYRVGAVVHLAEPAETADLRGSKKRAKSDRADARHLRQLLMIKRLPESWIPPEHILDLRARVRLRHTLSEQRGEWQQRIQATLYHHGFPQRRQLMTGEGREWLAVQPLPATAREQITVAIAIIDALEAQLAPLDKELRAYARRQVGCKALMAHYGIGELTAVTILAELGDCTRFSSSRQAVRYAGLDITVYQSDRRRAPGHISRQGPPALRWALYEAAQVARRGERSPDRAYYLQAKERVGGNRACLSVARKLLKRSYHTLSELGEEALAPA

SEQ ID NO: 147439 - protein, 344 aa, unidentified
MKVTRVGFDIAKRVFQVHGVDDNGKVKVERTLPRAKVLEYFAQLPSCLIGMEACGGAHYWGRELTKLGHTVRLMAAQFVVPYRKRGKNDANDAEAICEAVGRPNMHFVAIKSEQQQSVLMVHRARTLAVANRTAQVNQIRGLLGEFGLVVAKGVARLRRELPGILEDAENGLPALAREVLAGLLDQFREFDARVSAYDRKIRALAEASEPARRLMQVEAIGPQTATALVASMGDPHVFKSGRSYAASLGITPRQHSSGGIDRLGRITRQGDRYVRTLLVHGARAYLRVVDKKTDGKSAWARRLKERRHINVVAVALAAKHARIAWAMLANGTEYRPVEPEEAAA

SEQ ID NO: 147440 - protein, 277 aa, unidentified
MQITTIGLDLAKHVFHVVGLDARGKVIKKKVLRRAQVLAYFAQLPACLIGLEGCASAHYWARELGKLGHRVRLIPAQHVKAYVRGNKNDYNDALAIAEAVGRPQMREIGVKTVEQQDVQALHRLREGQIKMRAGLCNRVRGLLGEYGLVLPQGINALRRRIPQILEDADNGLSDFFRRLLAESYRQLQALDEQIAYYDQALREHGRCDQACRRLQSMPGFGPIVSSVFASYVGDGRDYRRGRDVAASLGLVPRHTAVAENRCCWESASAATAMCDVN

SEQ ID NO: 147441 - protein, 341 aa, unidentified
MTTTTIGLDLAKSVFQLHGVDSSGVVTFRKKLRRAEMLAFFEELPACLVGMEACATSHYWARELAALGHEVRLMPPNYVKPYVRRQKNDAADAEAICEAVTRPTMRFVPVKSADRQSVLTLHRTRELLVRQRTMLINAIRGHCAEFGLIAPQGAGRIAELIGRVGSTGDDTMPDLARSTLMMLADQLQVLAVHIHQLERRLLAWHRQDKISQRLATIPGVGIISATALSASVTDPSLFRSGREFAAVLGLVPRQNSSGGKDRLGRISKMGDGYLRKLLVVGATSVIRRIRTGGSLASADWVRTLLERRPARVVTVAMANKTARIAWAVMMRGEVYRPVTMA

SEQ ID NO: 147442 - protein, 344 aa, unidentified
MEYYAGLDVSLRSCAVCIVDTKGKVVFERELACEVSDISDCLREFAHPIERIGFEAGTMSQHLFFGLPAEGFDVVCMEARQVNAALSAMRNKTDKNDARGIAQILRTGWFSPVHMKSREAHGQRALLSSRKALLNKTIDLANEVRGLLKIFGLRLPKTVSHGSFDDIVRPMIQMDDVLTHALLPLLDARVALYQHYLELGRRVKRTASQDEVCMRLMTVPGVGPIAALTFKAAVDDPLRFKSSRTVAAHFGLTPRRYQSGESDNPGRISRAGDRDVRSTHYSGANAMLMRTMAASQLKSWGMRLMRTKGRQRAVVAVARKLAVLLHRMWIENTEFRLEGVEGIK

SEQ ID NO: 147443 - protein, 370 aa, unidentified
MKEPTTSYIGLDIHKESIAIAIADAGRAAPRFIGTINPAPAELCKAMRRVCTKETTLIVYEAGPCGYGWVRYLRKQGWACDVIAPSRITRQPAEKRLKTDRRDALLLARESRAGNLTSIVVPDERDEAIRDLVRAREDVRVARHRVRLQMQAMMLRHGRHYQGKRNWTQAHDRHLSTIRFEHPAQELAFNEYRLASKEACERVERITEALRVQCEDWRMNPVVKALMCLKGFDFVAAVTFVAEMGDLTRFAHPRALMAYLGVVPSEFSSGASRRQGGITKSGNKHARRILVEAAWNNRFKAQVSRELEVRQEGHPKIIRDISWKAQLRLSNRWWSLSMGRKLAPNKICVAIAREFAGFIWDVARHVKVSP

SEQ ID NO: 147444 - protein, 395 aa, unidentified
MYYLGIDIGKKEHEAGLIDNTGEPVGKTLRFSNSKSGSDKLLTFMNKHHVTQDNCFCCLEATGHYWLSIFSFLYEYGFKVTAFNPLQSDALRHFYIRKTKTDAVDAHLIAQVIRIDQPEATPFMEEDLLQLRQLERLRYSLVDQSSDIKRKIISLLDQVFPEYEDSFSEVFGISSSQLLAYYPMPEDIQALDTDDLAAFLNNASQKAYGKNRAHEKATQIKQSAQNSFGIHLATDAFRTQLHLLLEQLSLLDRQVIEINEKLTCLVERQNTHLTTIKGIGYPTAAVILGEIGSVDRFERPEQLVAFAGIDPAVKQSGQFHATSVHMSKRGSPYLRRAIWYAAFSASQCDPALSQHYKKLRDRGKGHHVAVGAVARKLTHIIFAVLRDNKPYEPNV

SEQ ID NO: 147445 - protein, 356 aa, unidentified
MNCTQNYKIDQVTEQTLVVGIDIAKRTHYACFVDDRGRVLRKSFPIFQSKEGFRQLYEAIQEAMQAFGKSEVIVAVEPTGHYWLNLAYFLEEHEIPLVMVNPAHVCRSKELDDNLPTKHDAKDALVIARLAKDGRFLVPRLLHEIEADLRVGSTLKEKLRKEQTAVKNAIVRWTDRYFPEFWTVFRDLGKTALSVLEWTPLPADMAGRTVEELLEVYRQSEGLKCPQKAKIQALINAAKDSIGVTEGTTMARFEIAALVRRYRQLEAEIAALDAELKALVQTTMEYQWLKTVDGLGDATIIDLLAEIGSFAHYRDPRQLVKLAGLTLKENSSGQRKGQKHISKRDGNGCDRCCFGR

SEQ ID NO: 147446 - protein, 366 aa, unidentified
MKKISTVRVNGNMIFKGHKLTIGVDLGDRWSCYCVLDEAGEILLEQKVATTPEAMKQIFEKIPRGLIAMETGTHSPWVSRLLKELGHAVLVAHAQKVQLITKSNRKDDRHDARTLARLARIDPQLLGPVRHRSAKAQIHLTVIRARAELVSARTGLVNAARGLAKSYGERLRKCGTQQVSRELAAELSVELREVLEPLLKEIESLNERIKEYDVRMEQIARESYPQVELLKQVKGVGTQIALTYVLTLEDPQRFPKSREVGCFLGLRPGRRDSGESHPQMHISKEGDPYLRTMLVQGAHYILGPFGEDSDLRRWGLKLAARGGKSAKKRAVVAVARKLAVLLHRLWVSGEVYEPLRNSQKAMRAAA

SEQ ID NO: 147447 - protein, 346 aa, unidentified
MLYAGLDLSRQRLDVHLLDQDGRTVEVTAVRPDADALRTLAARIGRHGQPVEAAIESMSGARFVHDELELAGWDVAIADAVKARGLAPLAAKTDKIDARVLAELARRDLVPAIWLPDPSVRAERERARFRLHLVKHRTALKNRIHATLITFGHAVPVADLFGVRGRALLAGFEIPEPWASSLATSLALVDELAADIRRCEAELRAMGADHRYVPLLRTVPGISWVLGYTIAAEIGDIGRFASPTRLAGYTGLCPRVYQSGSSDRRGPLAKTGPKYLRWALIEAATTAARNPLYRDHYRRTKRRLGKQRGSKVARVELARELASVIWHMLTRQEPFRAAGPTSGLVA

SEQ ID NO: 147448 - protein, 332 aa, unidentified
MNYIGMDIHKQFTFAVVKDEQGKELASQKFDNNKTNFETFLLPFKPSETEIVMESTGVWEHIYEILETLSYKDVKLANPFRTRAIAEARIKTDKVDASTLADLLRANLVAESYIPPKNIRILRDIARERKTFVKSINQIKNKINAFLTKKGLSLPSVTFSISTRLWLNEQKDESGLLKHYLIILEDNERELKMIDDQICNLAEKDEDAKLLMTIPGIAEIRALSIIAEIGDISRFDSAEKLSSYVGLVPSVRQSGRTLHFGRLIKQSSKTLKYHLIEASWNIVRTKESNNLQEFYKRLSKKKGKQKAICAVARKLCCVVYSMLSNKREFMFL

SEQ ID NO: 147449 - protein, 343 aa, unidentified
MQTVSTIGLDIAKSVFQVHGIDAEGKVVIRRQLKRRYVLAFFEKLPPCLIGIEACASSHHWSRELQALGHTVRLMPPAYVKPYVKRQKNDATDAEAICEAVTRANMRFVATKTPEQQSGLVLHRTRHLFIRQQTAVINAIRAHLAEFGIVASVGRNGVEELLGVVVDPSDKRLPEVARACLTALGAQLRMLKAQILEFDRMIRAWHRSSETSRRLDHCPGVGPVLATALVATVADPKSFRSGRNFSAWIGLVPKQHSSGGKNRLGSISKQGDRYLRGLFVAGALAVIRYAKIHGTKHRPWLTALLARRPTKVAAIALANKIARMAWVMMAKGERYKEPVALAA

SEQ ID NO: 147450 - protein, 363 aa, unidentified
MNYVGVDVHKRYSVLCALDGSGRKLREARVEGNAPSGFGQFFACLDGPSKAVVEACWNWGLIHDELEELEQVEEVVLAHPHKTRLIADAQIKTDRLDAHALGTLLRGNLVARAHVPSRQTRARKNLLRQRLYWARLRTMLRNRMHALLDRQRRLELPQCSDIFGVRGLSFLRALELAQPDATLLREQLALHDLIAQQMKAQEKRIALDFAQEAMHRRLKSVPGIGVTLAAVIACEIDNIARFSNAEKLCAYAGVVPTTRSSGGKTMHGSLLYFCNKWLRWALVEASWVAIGCSPYFATLYKQHRARGKKSNTAILIVARRMCRIIWQLLHEKRDFEKRPLSPKLNSFPGCSVVRLTAVKATSP

SEQ ID NO: 147451 - protein, 334 aa, unidentified
MENIALIGIDLGKNSFHIHCQDRRGKAVYRKKFTRPKLIEFLATYPATTIAMEACGGSHFMARKLEELGHSPKLISPQFVRPFVKSNKNDFVDAEAICEAASRPSMRFVQPRTESQQAMRALHRVRESLVQDKVKTTNQMHAFLLEFGISVPRGAAVISRLSTILEDNSLPLYLSQLLLKLQQHYHYLVEQIKDLESQLKRKLDEDEVGQRLLSIPCVGTLTASTISTEIGDGKQYASSRDFAAATGLVPRQYSTGGRTTLLGISKRGNKKIRTLLVQCARVFIQKLEHQSGKLADWVRDLLCRKSNFVVTCALANKLARIAWALTARQQTYVA

SEQ ID NO: 147452 - protein, 433 aa, unidentified
MSKFFNSPVVGIDVSADFSYAAILAPNGDVCKKSFKIKHDVNGFNHLVNEIKKVEKEFNMKTAIFMESTGVYHLSLFHYLKNTFDNTFVINPLVTKCNKNVDIRKVKNDKKDALSIANIGKFQNIKLSQPNDLDIFLLKNLIREYYKLRDSCSTYKKKLSADLRVIFPNYNTVFSDSTSNTSLEILSNYPTPKSVINAPKQDVIKILMDKSKKGVTWSENIYLKLITIAKEADIIGVPLSGLAIKISSSLVLIKAFESQIENLLNEINTLIESSEFPESIKENIELINSIPGIGRLTAITLIAEIGDINGFIKPKHLVAFFGIDSSVNQSGKFQGNQCKISKRGTRIGRRALYAVALASIRRSRTRIPINKVLLEYYQVNLKGKKAKVALVAVMHKILNYIFAVLRNQTPFEVRDPKIHKQMFLENKHLHNAA

SEQ ID NO: 147453 - protein, 347 aa, unidentified
MEIRTLGIDLGKSVFHLVGVNSVGKVVVRKKCSREKLLHFTANLRVERIGMEACAGAHFLGRALRAQGHDVRLMPAQYVKPYVMTNKNDYIDAEAIAEAVWRPKTRFVPIKTDDQLDMQSLHRVREGWVHRRTSLVNQIRGLLLERGITIRKGRRHAEEALSEILEDPDTNLSWPLRTLLAQLQDELRQLQREIEEADAVILRTASEHEACRRLMAIPGIGPVVATATIAAGGNGADFEKGRGFAAWLGLVPRQYSTGGKQKLLSISKRGNRYLRHLFVHGARAVLRYREKQSSGLSAWLGKLISRVHHNVAAVALANKLARIAWAVLAKGESYRPPLLVAAEPVAA

SEQ ID NO: 147454 - protein, 340 aa, unidentified
MFYVGLDIHAKHIAICVLNETGQFVHRSQVRTIDQMMRILEGLPDRFEVCYEASCGYGHFHDLLCPVAARVLVAHPGQLRLIYRSKDKNDRKDAERIAKLLYLGEVPTVHVPSLDVRTWRELINCRSQMIAKRTRAKNVVRSLLRSAGISPPRQPGLWTKQGLSWLCQLTLPTLSQQLRRDLLLEEIETLNRQLRRIEQALSHWAQHIPAVLLLQSIPGVGVRTAEAVAAFVDDPHRFPNAKAVGRYFGLVPRQDQSGDRNRLGHITREGAPVVRKLVAEAAWQARRHSPTVRAYFERTQRDDPQRKKIALVATAHYLVRVMWAMLKRGTFWEEDKAAAG

SEQ ID NO: 147455 - protein, 398 aa, unidentified
MYAVGIDVSKGRSTIAITRPFGETVAKPFEVCHTKSGMNDLVNYLNALEGECRIVLEHTGRYYEPMVRWLSDAGLFVSAVNPKLIKDFDNNSLRRVKTDKADARKIARYTLDKWSELRQYTAMDKIRTQLKLMNRQMSFYQKQQTAYKNNLIALIDETYPGANKFFTSPKRPDGSEKWVDFIEKFWHVDCVCKISLNAFTDKYQKWCKKHNYIFQPDKPKEIRDASLELIAILPKEDMTKMFVQQAVAQLNAISKAVEELRQAMNSLASQLPEYPVVMSMFGCGPTLGPQLIAEIGDVQRFTKRSQLTAFAGVDPGVNESGNYAQRSVPTTKHGSPYLRKTLFLIMDTLIKNQPENDPVYRFMAKKRDEGKPYHVYMTAGANKFLRIYLGKVKQYLAE

SEQ ID NO: 147456 - protein, 419 aa, unidentified
MKAWNEIKHYAGFDWAKDHHDVIVLDAGGKTVAEFRFDHTAGGWDEFSKKLAAFPDVAVAVETNHGGVVERLLERECCVFPVHTRSAKGYRQRKVPSGNKTDKIDAWSLADALRLDGAHWKQLSAQDPLTKELRLLCRDEVALIRDRSALITQLRQTLYDYYPAALEAFDDWTMPAAWSFVVSFPTPEVLVKASKRKREKFLHVHKLARPATYQRRLEIFARAHQFAGSEATIRAKSKLAVARARQLQLLETQIVEYRQEIRRLFAQHPDAKLFGSLPGAGDKIAPRLLAEIGDDRALFSDAQGLQCLAGTAPVSYQSGQIHRVYLRRQCNKSLRNAVHLWANLSREFCPWAATYYTALRAKGKSHACALRALGQRWLKIVWKMWQTRTLYDPDLHARNQLKHGSWVLQMVNQPTAIKT

SEQ ID NO: 147457 - protein, 346 aa, unidentified
MKKIFIGIDFSKEKFDATVIKAVGVEECAERKHEVFDNKVSGFLRLLRWVKSVADEQDAGLWLFCGENTGGYSKALCNYLYGSGYDMWLENALSIKRSSALQRNKSDKADSNIIAEYAMRNYDQMRLYKPLGKNLERLREVFLYRHNLVKLKASMTARKGEKKLTQEKSDISRFMAMSSKHLISEFNKKIAECDMRIEKIISEDEELRRNFEIITSVPGVGMQNAVCLMVYTDNFNRFDYNSRKIACYYGVAPFGRQSGTSLNTPPHVSPFANKLIKTLLSQAALASIRFCPHLAMYYHRLVETGKKPPVALNNLKNKMLHIITAMVRKGEKYDPDHDYYAAIKAA

SEQ ID NO: 147458 - protein, 455 aa, unidentified
MKNEIAKLQIVNPNAAGIDVGAKSYFVAVDQQRSNVCEFGVYTRDHEKMIDHLKTHDIKTVAMESTGSYWQTLFSSLQAAGFDVILVNGSQTKNVKGRKTDVLDCMWIQKLHSLGLLSGSFLLSDMLQELRTYYFHRQHLIEQTVVYGNKMEKSLRLMNIRLDIVLRDVTGKSGLNIIEAILAGDRDPVNLAGLADIRVKKSQGEIANALQGSWRAELIFELKAALQFYKLYEEALKECDKIIEAKLKEYLPKEPLSSEIENKKKISIKKIGKHSPAFNVSKVSYQYFGTDLFAIPGISHTTVLCFITNVGHDIHKFPTGKSFASWLRLAPNNKISGGKIISSRSPSGKNYLAIALRQAANSIGNQKSHPLTPFFKRIAFKKGRISAITATARKLAVIIWNMITKVEPYNREDVQIHNERHKRTLLKNIERRIFSLQLNQEELMKLFTRTSLLTI

SEQ ID NO: 147459 - protein, 354 aa, unidentified
MSEINKLSFEGQIIYCGLDVHKTNWKVNARMGNVEVEAFSQNPDPVRLKKYFNHKFPGAELRVAYEAGFSGFGIQRSLSELGIDCIVVNAADIPASDKDRKRKDDKRDARKLSQELGKGALQGIYIPATPIEHARSLVRLRSRFSSDQVRYKNRIRHTLLFNGLKVKTDSERWSAKYVKQLQQMDCGDVVLNLTLKFAIEQYLQSRQLLKAITLEIKNLSKQEPFAKVQSILQSIDGIGLINGMVIQTEIMEMQRFKTIDRLCDYAGLVPDIYSTNDNMVSRGVTKRRNEFLRQAIIESSWILIRKDPAMLLKYQKYCSRMHSNKAIIRIGKHLLARIRHVWNNGKQYERGKMS

SEQ ID NO: 147460 - protein, 351 aa, unidentified
MIIGVDPHKSSHTATAVDPATNMPVASLRIDASLVGYRQLLRWAAQFSDRRWAVENARGLGRHLAQWLVARDEVVWDVSATATARVRELSRGGRRKNDVIDASAAASVAALQGDASVVSGEDHTVVFALLEERRANLAAQRVRVTNQLHALIRDLIPGGAPLALKATVAAAMLRSVRPSSPAERMRKELAQDLVRDLRAADANLADIAKRMTDALDEHGTRLREVDGVGPINAVRLIGRTGPASRFRSADAFAAYAGVAPIEVASGDKARHRLSRSGDRQLNSAIHLVAVTQVRMRDSVGRHYFDAKLAEGKTRNEALRCLKRRLAAHLWRLMLADERRAPGQLEPGEIAA

SEQ ID NO: 147461 - protein, 465 aa, unidentified
MPTNKKGTRGRKERKELARQLRSEDPGLEVVHPDAAGIDVGNSAHYVAVRPGRDKEPVQRFECFTADLYRMANWLRSCGVKSVAMQSTGVYWIPLYDILEDSGFEVFLVNARHTKNLPGRKSDVQESQWLLKLHTHGLLNNSFQPASEIRVLRTYWRQRAEHATGMATCVQRMQKALTQMNIQLANVISDLSGRTGQAIIRAILAGERNPRKLAALSDRRIHATKEEIANSLEGNWRSELLFVVKQQLEMYDVYQQRIAECDQKLQEHLAGFADAVLPEPKEGLSLSKKTRQHRYMPQFPLTGELLRIAGVDLTQIDGVDVMTAQTLISEVGLDMSRWKTEAHFASWLGLCPDNRISGDKVLSRGTRRVINRAATALRIAATTLLKSKTYLGAQYRRLRTRLGAPKAITAMAHRLARLVYRMLKYGQQYVDKGAEYYEQKSRRQHMDFLTKRAAQLGFRLTPAQT

SEQ ID NO: 147462 - protein, 367 aa, unidentified
MIHDTVIGLDVHADSITAAILAPDRDHPEVLTLSGDLMKVRQLFRRVAEHGPIRSCYEASGAGFVLQRVLTDDGFSCEVIAPSLIPRKPGDRRKTDRLDAVMLARLYRSGHLTPVHVPTQDHEALRRLLRLRTTYHIYITATMHRISGILRNHGYVFTEGKSTWTQKHRVWLAHLRQSLDGPLATALAIELEHLEYLETQERAMDADLQTVALSPRYRKYVEALCCLRGVKALTALTLLCEIDDIRRFPSPRKLMAYFGLVPSEHSSGSREFRGSITKAGNTHVRRLLVEAAWNNHHTAGAALILNRRRQGQPPEILAIALKAQHRLAKKFFTLDQRKHRHVAVTAVARELCGFIWAILMALPTPEL

SEQ ID NO: 147463 - protein, 377 aa, unidentified
MKRIKFVGLDVHAETIAVAVAEQDGEVRSLGVIPNREESIRKLVKKLGPVEQLRFCYEAGPTGYVVYWQLTALGAKCEVVAPTLVPVKSGERVKTDRRDALKLARNYRAGELTPVWVPDAAHEALRDLVRAREAAKKDQLRAKHRLGKFLLRHGRRPPTGVKPWTLNYLSWVKHEVHFEQMAQEATLLDYLNEVEHAELRIARLNLAIEEAVKLTPPKMRAVIQALQALRGIAQVAAVSIVAEVGEVSRFTRARQLMGYGGITASEHSSGEGSWRGGITKTGNAHLRRVVVEAAWAYRHRPSLGVALRKRQEVVSEDIREIAWKAQHRLHTRYRKLTARGKDKGKVVTAIGRELLGFIWAIGVKVEATQKLTDRQAA

SEQ ID NO: 147464 - protein, 436 aa, unidentified
MRGCRCSMIMGFTKPIEHFNLQRKKVITMNTLYVGIDVSSKSNVVYLMLPNGDKHSNFSVANSHEGSTLLVKKIYSALTSHSLDTVLIGLEATSVYGDNLVYFLREDATLAPFNRKIHVLNPKQVKKFHDTYNDLPKNDYVDSFVIADCLRFGRINKEVYMGDYRYKALQNLTRARFFAVQNLVKEKQRFMNVLFKKYSTMTQEKVFSDAFSTTALAVYDEFESAEALANMDLHELTDFIIEKGKNRFPDPDAVAKAIQKAARSSYRLPKTVNDSVNQVLSISITSMKALESQIKEFDKAIKALMELLPNVLISIPGIGPVYSAGIMAEIGDINRFDNQASLAKYAGLAWKQHQSGGFEAEVTRLIPSGNRFLKYYLCEAAFSLVRCDKKYSDFYHLKYKEVNRYQHKRALALTARKFVRLVFRLLKDNRLYCPAK

SEQ ID NO: 147465 - protein, 399 aa, unidentified
MGEGMVAGIDWASEVHVACVMDGDGAVASRFSFTHDGAAIRAMAGRLRAAGVAGVAIERGDGPVVEELLSAGLAVFVVPSRQIKGLRTRYGSAGNKDDRFDAYVLADTLRTDGHRWKPLRPDTGPTRALRAACRSRKDLVETRVQVLGQLRANLELAFPGTIGLFTKLYSTISLAFLQRFPTAAKAAWLSPKRLASWLASVGYTGGVSAGILYDRLATAAPGLTGAEGEARGQITLALVRVIGALNTQIAALDAEIGRLFAAHPDRHIFASLPRSGTIRAATLLAEIGDCRQRFPTDDALAALAGACPSTRQSGKRTQAVFRWSCSKKLRAAVMDFANGSRMADPWAAAIYAAAIARGCRHPHAIRILARAWLRIIWRCWQDGAAFDPALHRSRQTATA

SEQ ID NO: 147466 - protein, 369 aa, unidentified
MGCFPGGRSGVLISTTTVSRRPLVDELYVGQQVVGLDLHRRRTVMVRMTPAGEQLEAVRFVSDPAVLAEQIAKAGPAPEVVAEATYGWYWVADVLEEAGARLHLAHPLGVKGFAYRRVKNDFRDAADLADLLRMGRLPEAWIAPKQVRCQRELVRHRHKLRQLCSGLKAGAHAVLAKNGLLIPRSDMFGLDGRRRLEELALPEAFRVRLNSQLRLIDTLEAEIADLDGRIRATLRADAGYRALLRVPGIGPVFGAILRAEIGEIGRFPSPRQLTSWAGLTPRHRESDTTVHRGAITKQGSRLVRWAAVEAVQRTRPGTPMRACYERILARRGASAKHVAKVAAARELLDCVFYALRDGHVRRLGQTSAA

SEQ ID NO: 147467 - protein, 301 aa, unidentified
MAKARTLVGLDVHATKIVAAVLDAETGEIAFFAMTADIGRTAGFCAGLPRPVRVAYEAGPTGYGLARELIKRRVDCVVAAPSKIPRASGDRVKTDRRDAELIVRLLFAGKLHAVRIPGAEEEALRDLVRAREQVRVDLMRCRHRLSKLLLRHGVRFDDGDAWTERHREWLGEVVLEWPAAQATLLDCQGAIDALCHRRDGLEREIVSMLPSSPWREQVGVLRCLRGVDTLSAVGLCAEVGDFTRFARAEQLMSYLGLVPSENTTGHQRRLGSITKTGSAHARRLLVEAACITARDRTSANA

SEQ ID NO: 147468 - protein, 366 aa, unidentified
MLYLGIDQHARQITISLRDDGGDVLQARQVSTQPDKINAFFRQLTRERLHDGESFVAVLEVCGFNDWLIRMLQEYRCHKVILIQPDQRKKCKTDRRDAAALSELLWVNRDRLLQGKPVRGLRQVDIARGTDQENRRLTTLRKDAGQARTRLVNRVRHILRRHNLQWQMPTKKFPTKAGIAWLKQLALPEIDRLEMNHLLADLERVQGRRKELEQVIAQRCGVSEEAVLLSSMPGVSYFTAVSLACRVGRVERFPRARSLANYWGLTPGCRNSGENTQRLGNITKAGSAMARWLLAQVTHKVLRKDARLREWFKRIRRRRGSTIARVAVMRKLATIIWHMLSKRKTYAECRALAEAGAKEKEKQECT

SEQ ID NO: 147469 - protein, 346 aa, unidentified
MEHYAGIDVSLEYSSVCVVDASGKIVREGKVASEPEALIAWFASLGLPVARIGLEAGPLSQWLYAAMRQAGLAVELLETRHVRDAFKAMPVKSDRNDARGIAQLMRLGWFRPVHCKSLAAQEVRAVLTARKLVQSKLRDVENSVRGILRGFGLKVGKTTPRDFACRIRELVARHPNLKSVAAGLLSVHAVLLREFQAFEKQVRALVRQDARARRLMSTPGVGPIVALTYASAIDDPGRFGSSKRAGAHFGLTPKRYQSGETDYSGRISKIGDAAVRTALYEAAHIMLVKPLKGCTALKSWAMRIARRAGMKKAKVALARKLAVILHRMLADGTVFNAAARTMTAAA

SEQ ID NO: 147470 - protein, 352 aa, unidentified
MEEISVIGIDLAKRVFQLCATTRSGTIVWERRLRRAAFIKFLEDEAPRCLVGLEACGGAHHWARWLVARGFSVKLMPPKAVKAYRQGVHKNDRRDARAVAEATSRSQVAAVRIKSAAAQATQALMRVRERRIRQRVQTANQLRGLLNEFGIVLPKGHRLLLVRLGELIPTAEFAALPAIVQELVQTLSDEIIEQATKVEAASAALTTAVHADMNCRLLMSIPNIGPINAAALSVALETPGAFARGRAFAAFLRLVPRQHASAETARLLGVGQMQACEMRRYLVLAAQGLLTRVDRMKELPQDRLLAWAGRMLRRKMRNVAVVAVAAKLARIAWAVMAHNQPYQPRPVGAQPV

SEQ ID NO: 147471 - protein, 353 aa, unidentified
MNSLTDLGEVVDVVIGVDTHVGTHSAAAINAATGGVLGEITVEATANGYAQLVDFANNHATLRAWAIEGTGGHGAGLARHLAQRQEIVVELDRPKRAARRNGAKSDPLDAIRAAREAMARPRLGTPRSGGERQALSVLLAARRSAINASTEAQQQVFSLVIAAPEPIRLRFRGQKLAVMLNTAARMRVQSAWDVETTSTVVALRTLARRAHAMLKEARELQKAMLAIIRSWRPDLLEEFGVGPIVAATVLCAWSHPGRIHSEAAFAMLAGVAPIPANSGQVTTRYRLNRYGDRNLNNALHTVVQSRIQYQPATRDYVARRTAEGKTSREIKRCLARYVARDLYRLLESGAAAA

SEQ ID NO: 147472 - protein, 371 aa, unidentified
MKQQSKSNHITVGLDLGDRRHRFCALDERGEVVEEGSICNERDSLRKLAGRYHGALGVMEAGAHSPWISRFLEALGWRVVVSNPRKVRAIYQHERKSDQRDALMLARIGRMDLALLYPVRHGTAEAQQDLLRIKLRDSLVRARVAVINSVRFTLKSLGYTVRNPSSERFHKVVMEEVPESVREMITPSVQALAELTARIKVLELEINTLAQMKYPQSAQLQQIPGVGPITALYFVLKIEDPNRFAHVRDVGAYAGLCPRRDQSGESDPQLHISKRGDAYLRRLLVSAAHYILGPFGPQSALRAYGLMLAADGTARAKKRATVAVARKLAVLLLSLWKSQQPYQPFPGACLNGEQEDRRSGTIALHRMEATD

SEQ ID NO: 147473 - protein, 386 aa, unidentified
MDVGKGEHHAVAVDRAGKKLLDKALPNDEARIREILAGLEHHGRVLVVVDQPATIGALPVAVAQAAGMLVGYLPALAMRRIADLHPGEAKTDARDAFIIAEAARTMPHALRSVQLADEQIAELNMLCGFDEDLTKQVTAAANRIRGLLTQIHPALERVLGPRLDHPAVLDLLRTWPTPAALRHTGRRRIANRLTKLAPRMGERLADEIIEALGKQTVIVVGTNAATIVLPQLAAMLAGLHESRLTVYAQVEALVEAHPLHAVLTSLPAVGVRTAARILTEVAGKDFPTAGHLASYAGLAPVTWRSGSSIRGDHSSRKGNKVLKRALFLSAFAALKDPISRAYYDRKRAAGKRHNQALIALARRRCDTLYAMLRDGTLYQAKTLTTA

SEQ ID NO: 147474 - protein, 408 aa, unidentified
MTRYYLGVDWADEFHQVWVSDPQGKKVVEMKVVQSPEGMSEFGRWLHERKAEEIELWGSIEKPHGRIVEFLLDHGVVVFPVNPKALNRVRDRFRMSQSKSDSFDAYVLAEFVRTDHAHLRALEPDSHEAQELKMITRDHHRLVRQKARLLNQLKVTLKEYYPRPLEVFADLESQIALGFLKQYPTPQALSELSRRNWSRFSMREHHLGEARCNELWEKLHKPQLAVPQHVVRAKAQLLGALLVQLEALLPVVESYSEKAKSFFASMPAAELVGTLPGGKSGTIVPMLWAELGDAKSRWESFRHLQAEAGAVPVTKASGKSRFVQFRFSCNKHLRYAAYWLAFTSLNRSEWANAYYRDQRAKGHRHPQALRALGAKWLKIIFLMWRDHKPYDENYHLANIARQKMRQAA

SEQ ID NO: 147475 - protein, 318 aa, unidentified
MNNSNRTPVILGIDVSKGWIDAHMLPSGETWRIANDAKELKSWVQQLPEGITIAILEATGGLETQPAIALAQAKIPTAIVNPKQVRSFAQAMGQRAKSDPIDARLIAQFGERIQPKAKTLPDEDQADLKELLARRQQLVADKVAEQNRLGSMRSKQAQKSIKAHIQWLIKQIERIDQQLDDSIQNSPLWLAKQQLLTSVPGVGPNTARTMLALMPELGQMNRRQIASLAGLAPFTRESGKWKGKRFIGGGRKDARSALYMAALTATRCNPVIASFYTSLTSQGKPHKVAITACMRKMLTAMNAMIRDQKPWNKNYEIA

SEQ ID NO: 147476 - protein, 355 aa, unidentified
MGIDLAKDIFRVHGCDARGRVVVSKSLTRHELRIFMAKLGPCLVGMEACSTAHYWAHEMQKFGHQVKLMAPKFIRPYVKNNKNDTRDAEAICEAVTRPTMRFVPVKSRAQLDVQAVHRVRQQVVRERAALANQLRGFLAEHGIVIRKGFAVVKHALPDIIEDSDNGLSGLMRELMRDLHERFKLAEERLHRYDERVAELVRQDERCQRLAELPGVGPLTATAVVASVGNAREFRSGRELAAFFGLVPRHRASGRRTVMLPIARRCDHYLRTLMVQGARALLRYVERRRDPRGVWANRLRLKRGSYIAAVAIANKNARVMWALLTRGESYSETPAHRPQSALHMKLEQRRKLPRRA

SEQ ID NO: 147477 - protein, 419 aa, unidentified
MRIHRNCCGLDVHKKMIAACLIREDAEGNSVTEKRLFGSMTRELHELAQWLCSAQVTAVAMEATGVYWMPVWNVLEPYGLQLLLINPEHYKAVRGKKTDLKDGTRIAELLQDGRLEGSYVPPVTIRVLRDLTRYRIKLVQYQSSIANRIQKLLEQCNIKLASVASDALGVSAMAMLRALAQGETDAVRMAGMAKKQLRKKIPQLQLALEGCVLPHHRLLLSEMIEDLDHVGAKITRIEDTIEQHMRPFQEAVNRWLTVPGIKHRLAWTLVAEVGPTVQAFPSAADIVSWAGICPGNNQTAGKRKSGSTRAGNPWLRRALCEAAWAASKSKGTYLQAQFRRLAALRGPKRALIAVANSILTAGYYMLQRATTYQELGPDYFDKRNKVRATHRLVKRLEALGHRVILEPHFSAYPLKASSS

SEQ ID NO: 147478 - protein, 338 aa, unidentified
MNHRRQIDPATCWAAFDLAKLNLQAATWGHQELCDRTIQSFNRTRKAMKLLLAWLRDRAPEGKQIAIVMEATGSYAEEVAEWLLDLDPTLRIAIVNPGLTSAFIRSLGLRNKTDDLDAKALAQYGQERQPMLWQRPSPEMKALKDLVRTRIDLIQARTAMKLRLGDHERTAKVASKAMATVIESLTAQIAVLDLAIEKHVAAHEELSHQVRRLSSIKGVAMVTATTIMVELGDLRRFSSSRQLSAFAGMSPKQRQSGTSLNGKAHLCKMGSGRARAALYMAAGSASRYNPDLKATYEALQAKGKTKRSALGAVMRKLLVLMRAVLVADHDWVPMGSAA

SEQ ID NO: 147479 - protein, 410 aa, unidentified
MLKIVYPVCCEIDVHKTFIYCCIATTDNKGITTYKSNRFSTFTNQLKRCATWLKENDCKDVCMESTGKYWIPVYNILELSCNIVLTHPKYVKAIKGKKTDKRDAKWIADLFKHDLINGSFIPPADIHQLRDLTRYRNKLTNFIAGEKNRAQNCLTVSNIKLDYVFTYVFGKASSSIINTLLLNPSEKITDVSKFRTRGMKSTDEEILAAIDGNICNEQAEKLKIIRSHMDSIEECKANLESVILNLAEKYLPKLNLILSVLGIKSFSAVSIILEIGVDMSVFPTSKHLCSWAGLTPQNNESAGKKKTTRISRGGAYIKPLLVQCALAAVKSNKHPKIRNRYLALKKRRGHKKAIIAIARTLLTAIYNILKKNEPYNPDLYKKSDLPPQHKTVSFDEAVFILQRQGYIITS

SEQ ID NO: 147480 - protein, 392 aa, unidentified
MVVSVGIDVSKDKHDCFIVNSESEVLADVFIIPNNMDGFHYLLQRIQDCTNTQDKIKVGLEATGHYSYNLLGFLLDNGLATYVLNPLCTNLYRKSLSLRKTKTDRVDARTIASMLLSDVGLKPYTDTAYHNEELKSLTRYRFDKVKERAKLKSSIARLICILFPELEKLVPSLHIASVYSLLEEFPGAQQIAAAHLTRLKALLETASKGRYKRDMALEIRDAARNSIGSRMPAKSLELQHTIRLIRELNAEITEIEEQIQSIMAELHSPITTIPGLGFRMAAMILAEVGDFTRFESPDKLLAYAGMSPSIYQSGQLKNCYPHMEKRGSRYLRYALYNATKYVCQWDPTFSDYLAKKRAEGKHYNVALSHAAKKLVRLIFAMEKSRTTYRLAA

SEQ ID NO: 147481 - protein, 338 aa, unidentified
MTFLTIGIDLAIRGDHFAQIYDDGRPNGRAIRFRHDQPSLDAFVQTAVMGLSAEDHIQAIMEPTDMSWFPVAHHLADAGVTVARVKGKRVKALRRYLSEHAKTDMADAHILAAMPSFGGPRLDPVHIPDPRSHALQRLTKQRSRFQNESADAKRRVLDLIRWASLRLEAVLPDLGTRLSLALLQKWFQPSDVLKARHATLAKYVATHAGGNHPRGGPFVETLITGLREAAQYAQDLHGTHIDFAELQFEIATEIENVLAKIQTVGDLERHIVDIYKQLDPQALLLSIPGVGRHLAPTLIGILQNIERFHSEKDLRGFCGLFARRADSGGVERAGQTLT

SEQ ID NO: 147482 - protein, 393 aa, unidentified
MPRSSKTGGLPVLNDRAAGIDIGARIQVVAVPPELSDEPVRTFQAFTADIERMADWLVSIGIKTVAMESTGVYWVPVYEILEDRGLEVILANARECKAVPGRKSDVNDAQWLQRLHACGLLRASFRPGREIAALRAYMRLRDRHLEYAAAHIQHMQKALTFMNLQLHHVVSDLTGVTGLKIIRAIIDGERNPDVLASMRDSRCKQTEETIRAALVGNYQPEHLFALSQALALYETYRERIADCDAQIEKVLQTLVLDKPLPEAPLGKNRSRTKQTNSVSFDVRPLLYQLTGTDLTEIHGIGPSLALELVAECGTDLSRWPTEKHFTSWLTLSPGCKISGGKVLSSHTRKSTNRIAARLRLVATAVGRTDTCGWRIRSMREFACPVQSCARGQP

SEQ ID NO: 147483 - protein, 353 aa, unidentified
MVTIGVDAHKRIHVALALDDAGREIGEWQGRNSVAGWRDVSQWASGFEGERQWGIEGAWGYGRGLAQHLVERGETVFEINPRWTAAGRRRARKPGKTDRLDARAVALFVRQEAPLLPVVRTEDDSATLNLLSTERDQVSAEIVRLRNQIHALIVHVDPEYQSRLPVLKSRSGLAALEAYDAPGDHPVQLERAAAVRRLARRLALAVEQIDELTDRIRTAAQTRFSPLTGLCGVNFLTAGMLAGILGPGRRFANDAQLAAYAGVAPLETSSAGLMRHRLNRGGNRRLNAIVHRIALTQAHHSPEARAYLERRAAEGKSRREAIRALKRFIVRAIWRLWLECEPDSAAPSMEIAA

SEQ ID NO: 147484 - protein, 325 aa, unidentified
MAKRITVCAGIDTGKRKLDVAIDGNCELLQVENTAEGHKVLLEWLQRHKVKRIGIEASGGYEQPVVAALRRKRFVVIVFQPAQVRAYAKFHLQWAKNDKIDAALIAACTAAVKKIYPAPDPRLSPFAEQLTMIDQIGEDIMKLKNRIETCRNERIRAVWKEEVARLAKRERAELKALVAAIRQYPDLAERLELIYSVGGAGLPTAVAILVRMPEIGQLTREQVAALAGLAPHDDDSGDQVGARHIDGGRERLRRALYLAALPASMRWNPQLIALYQRLRAAGKEHKRALIACARKLLIFVNTVVARGTPWQSEPPATRTANPSAA

SEQ ID NO: 147485 - protein, 375 aa, unidentified
MASIPANHRSSSRRREPDVQGTLGVSQQTRKRRKETPVEQQREYVGIDLHRRRSVIVRITENGEVLETVRVDNDPLSVVHAVMHEDPNPEVALEATYGWYWAADLLQAEGATVHLVHPLGLHWDSRRVKNDERDATELAKRLSRGDLPEAWIAPPQLRELRELVRYRAKLTALRTSAKAQVHAVMAKEGVLPAYGRMFGPAGQRLLDEMPVEGVYRDRVESLRHLLEIYERELLLVESHLSRRLKHHQGYSAIQAIHGVGPIMAAIFVAEIGDASRFPSARHLCSWAGITPSHRESDVKVHRGHITRQGNNLVRWAAIEAVARYHGGAPIEPTFQRVAKRRGTMIARVAAARKLLSLVYYGLRDGEIRCLTREAS

SEQ ID NO: 147486 - protein, 394 aa, unidentified
MGKLYVGIDIAKDRSSAKGIDEHGRSCFEISFDMDSTGFAELLKAIEAHSDGNKDVVAGMESTACYHINLYSFLTAKDIEAIVINPLLIANFAKLSLRKTKTDKKDANTIAQFILAHKDSVKQLAVSQDQQDIRDMARERESLCHQMSAAKVEIRRLLNTTFPELESMCNPFTKVMLHFIQRFPSARLVSMAKPNLIAKTLKEKPCSCRIRFTPSELIKIARRSIATVSLGKEIILSGKIDTLSHLQKRRDELSKALTKYCESSIVEDLKIVTSIDGIGNNTATTFLAEIGRINNYASHKNLIAFAGIDPTVYQSGKYEGTSKISKRGNRHLRRVIWLMTMRVINHNPIFRKYFLKKRNEGQPFKKAVFATAHKLMRVIFAMLSNRTYFQEECI

SEQ ID NO: 147487 - protein, 353 aa, unidentified
MAKDTSSVTRTVGLDLGDQHSHFCSLDPDGEIEEQGRLRTTPQALAGRFAGGERCRVVLEAGSQSPWVAEQLEAWGHEVLVANPRQMATIYAQPTKSDTIDAETLARVGRADPKLLRPIRPRRPGTLADRALLRSRAVAVRCRTQLINHVRGTVKAVGARLPACSTKGFARRVRGELPEALRPALEPVLDLIQQLSDQVRAYEGAIERLGAERYPETALLRQVAGVGATTALAFVLTIEDPRRFPRSRTVGSYLGLRPRRDQSGARDPQMRITKAGDREMRRLLVQAAQYQLGPFGPDTDLRRFGQRLAARGGQAARKRAVVAVARKTAVLLHRLWVTGAVYEPLRHPTRPVD

SEQ ID NO: 147488 - protein, 367 aa, unidentified
MSNREEYMKYAIGVDLHKETVVIVVLDMEGKVVEQKTFSTKCKQMLKDYFSSYGLHCEVAFESVGFYQWFWELVRPVVGKLHLADPVGVRARAGRKAKTDKNDALVIAEMLLDGKIPEAYVPEEPYASLRKLVRLRHSIARSLAHARKALRWISLKTNLPGPAILTSDRAQKWILAQDQKFSETDRKSGRLHIDMIRNMEYALEDIEREICGYVKKAPELQERYLILQSIPGIGPIAAATIISETADILRFTSAGQICCYAGLAPRVSQSGETIRHGHISKQGPPILRWVLQQAAWVAIRCSAEARKIFNRISRKAGKKKAATAMARKLLVYAWSVCRRNQPFKWEVKADTQNIVRKTIEGGWSYQI

SEQ ID NO: 147489 - protein, 355 aa, unidentified
MEDYDGRQIVGMDLHRHRSVLVRMTEDGRRLATARITNSPAALRTEIARAGKSPRVVLEATYGWYWAADVLEAAGAEVHLAHPLGVKAFTYRRVKNDQKDAADLADLLRMGRLPEAWIAPHAVRELREITRYRHKLVKLRTSCKDQVHAVLAKLGIAVPHSDLFGTGGQAWLDSLKLPQPYAGKVTSLRQLTGELTTEITMLSDVTGDLLAGDRGYQVIQQLPGIGPVLAAVIVAEIGDVARFRNAGQLCSWAGLTPRHRESDLKVARGHVTKQGSRMLRWALTEAIQRTPAGNPVRQRKDSIIARRGKEAKNIAKVAAARELLTLVFYGMRDHQIRCLARPAAGPPPAADQQAA

SEQ ID NO: 147490 - protein, 436 aa, unidentified
MRGCRCSMIMGFTKPIEHFNLQRKKVITMNTLYVGIDVSSKSNVVYLMLPNGDKHSNFSVANSHEGSTQLVKRILSALTSHSLDTVLIGLEATSVYGDNLVYFLREDATLAPFNRKIHVLNPKQVKKFHDAYNDLPKNDYVDSFVIADCLRFGRINKEVYMGDYRYKALQNLTRARFFAVQNLVKEKQRFMNVLFKKYSTMTQEKVFSDTFSTTALAVYDEFESAEALANMDLHELTDFIIEKGKNRFPDPDAVAKAIQKAARSSYRLPKTVNDSVNQVLSISITSMKALESQIKEFDKAIKSQMELLPNVLISISGIGPVYSAGIMAEIGDINRFNSQAALAKYAGLAWKQHQSGGFESEVTRLIPSGNRFLKYYLCEAAFSLVRCDKEYSDFYHLKYKEVNRCQHKRALALTARKFVRLVFRLLKDNRLYCPAK

SEQ ID NO: 147491 - protein, 331 aa, unidentified
MTATSQLDNAQRESNENFFVGIDVAKDELVVHVLPTNQQLTVPNSLKGIKELLKLFKEIQPKQIVLEATGGLERELVIHIAANGFEVVNLNPRRARDLAKGLGQLAKTDAVDARMLATFAQLQCLKARPVPSRETQEMSDLVTRRQQLVEMKTMETNRSHWTKQKYITKSIEKNIDALEKQIADIDERITKMIDDNPAWSAKDKILQSVPGVGPKTSQMLISALPELGTLNRQEIAALAGVAPFCDDSATKSGARHIRGGRANVRSALYMATFSAVRHNPTFKEFFDRLIAAGKKYKVAIVAAMRKLISTLNSMIKTKTLWNEHRVRSENF

SEQ ID NO: 147492 - protein, 372 aa, unidentified
MKEHTRKMKRQNSNANTTAASKKEEFAFYIGIDLGDKNCEVCVFNPAGEHKESFRLAMKSADLQGYFATIGRSRVAIEAGGQSRWVAEVIEQCGHQVYVSNTRKVAYIHASDDKDDPGDAYKLAELVHFKPRLLHPIQHRSREAQADLSWIRAREVLVESRTQLVNAVRGISKAFGERLAKCSTEGFTAKLATQVPEAIRGAVAPLLETIDHLNDQIRYYDQMEEHIARERHKKYWLLQQVNGVGVHTALSFMLTIGDAERFEKSRLVGAFLGMRPRKKDSGESKPQLGITKAGDEYLRKTLVNCAHYILGPHGADSDLRRYGQRICERGGKNAKKRAVIAVARKLAVLLHRLWVTGEVYEPLRNSKKPVAA

SEQ ID NO: 147493 - protein, 334 aa, unidentified
MKKFNVFTGIDVSKSTLDFCIIDAKANVLIQGKTENNSPGIKLLLNHFKKLKVSLNEVLFSFENTGVYSMPLNIFLSERKCDFAEIPALEIKKSKGITRGKSDKTDAKDIALYGLKNLDKITLSSVPQIEILQLKFLFAEREKVIEAIKTFDSTNEAEGFLPNSVFKIVNPINRKILTHLKKALKSIEEKINKIIEQNEKLKRQKALLKSIPGIGDVTALYFLLATKGFSVFKDWRKFACYSGIAPFEYSSGSSVRARTKVNHFADKKIKSLLHLVALNAIKYDAELKEYYQRKRDEGKHTLLVLNNIKCKIVSRAFAVIRRETPFVNTYKFAS

SEQ ID NO: 147494 - protein, 342 aa, unidentified
MDVKTLGIDLGKNVFHVVGLDERGAVALKRRVTRTQLTVLVGNLPRCLVGMEACPGSHHMARRLEAHGHTVRLLPPQYVRPYVKTNKNDFRDAEAIAEAVGRGTMRFVTPKTVAQLDLQALHRVRARWVRHRTALVNQIRAFLLEQGRPMRPGRAALRGELQRLLAADAAGISPSLARLLTQLLEEWRQLQERIDRVTGEITAVATADPACQRLMAVPGVGPLSATALVAAVGNGSAFSKGRDFAAWLGLVPRQHSTGGTPRLLGVSKCGNTYLRRLVVLGAQSVRRSKLRDRQRFGPWLQRLELRVHRNVAVVALANKLARIAWAVLANATPYRPRLEEAA

SEQ ID NO: 147495 - protein, 360 aa, unidentified
MLTQSTVLDFKGQNIFVGIDVHLKSWTVTILTEELTHKTFTQPASAEILSNYLKRNFPGGTYHSVYEAGFCGFCAHYKLNAMGINNIVTNPADVPTSQKEKLQKDDPTDSRKLARSLRSKDLKAIYVPNPATLEDRSLVRMRATLVKDMTRFKLRIKSFLYFYGINYPPQFEKSGSHWSKRFMKWLSEEVVLEHDTGRQALRMLVQEAEQQRKLLMEVLIKIRLLSRSEKYAKNIALLRTIPGIALITAITFLVEVENIARFENTDQFAGFVGLIPKRHGTGEKTNDGEMTFRGNKTLKSLLIESSWTAARSDPALTLSYHGYIRRMEPNKAVVRIARKVLNRMYYVLKNEKEYVPGVVR

SEQ ID NO: 147496 - protein, 422 aa, unidentified
MYKRVTNRTNYVQNKTLIVGVDVSKGNLSAYGRGNGREMKTFEVSNNYEGLSFMWANIKIYQVKYGCDQIIVGFESTGHYSEPLINFMSDKPVKLVQVNPMHTKRVKDINDNSPGSTDRKDPRVIVDIIQLGHYLSLVTPVGPSAELRSLTHAREFLETEKVRHLNRLESLVFRVFPEFVRTMKSLSSKTARYLLKHYPTAQEIKAVSVEDLSSEIKKVSRGQLGREIAERLKQASETSLGTKEGKDGFLDEIAYIVEEITRFEIRVKQIEGKMEEQIEKLPYAKKLLSIKGIGVVILGGILGEVGDFRNYHKQSELVKLAGLDIYEISSGKYHGERHISKCGRWLLRKLLYFASLNVVRKGGIMRDTYLRLTKRMAKTKALIAIARKLLCMMFAMVRDGTEYQENRQKTSETVKEKEKIPA

SEQ ID NO: 147497 - protein, 369 aa, unidentified
MKQLITYIGLDVHKETIAVALAEAGKRNEVREYGKIANTPAAVKALVARLARNGHELRFCYEAGPCGYGIQRQLTASKHDCIVVAPSLIPRRPGERIKTDRRDAINLAKLHRAGELTPVWVPDEAHEAIRDLVRARLAAVRTVRHARQQLSGFLLRHGHHYNRPAWTLMHRRWLAGLRFEHAVHHIVLEDYIAAVEAATARRDRLEAHIAAALPDWSLAMVVHALQALRGMALVAAATLVAELGDITRFANPRQLMGYLGLVPSEHSSGGTRRQGGITKAGNGAARRMLIEAAWSYRFPARISREQLLRQEGLAKPIRDTAWKAQERLCRRYRKLARAGKPPTVVTTAIARELAGFVWAIARQAQPTDA

SEQ ID NO: 147498 - protein, 365 aa, unidentified
MLIHVPSDVRVLAMDVHKNTISTGLLEPGWDTPVLDKLSADDETVRRLIGRFDAPGQVWACYEAGPTGYELARVLRGAGMHCEVIAPSLIPARPGDRVKTDRRDARRLALLFRAGQLSSVRVPTAAEEAVRDLCRARADMVIDRTRAQHRLGMFLLRHGRVWRGGDHWTLKHRAWIRQQRFEEPALNEALAHYQATLDARDAAVEAIEADLRPWCDRRPFADAVHRLGAYRGVTQLGALTITSEVCDWRRFPTAGLFMGFTGLVPSEDSSGDRTRRGGITHAGNSHLRAQLIEAAWTYQHRPQVGVTLRKRQEGLEPAVVVRAWSAQQRLCGKFRRLDARKTYRKTVVTAVARELAGFIWAEMTA

SEQ ID NO: 147499 - protein, 369 aa, unidentified
MAKSTTIIAFDQHAATTVAAVLLPGHRTPALHTLASDSPTILRFLDRLQRQGPIECCYEAGPCGFELQRALTARRIACDVIAPALIPRRAGDRIKTDRRDAGQLAVLYRAGALTAIHIPTEQEEAARDLLRCREDIRADLLRCRHRLLKFLLRHGRRFTGTKKAWSKRHAVWLRAQTWPIAALEHTHRAYLRAVDETVARLRAVEEDLRALLDLEPLRPRVQRLRCFRGIDDLTALTIAAELGDARRFPRAASTMAFVGLVPSEHSSGAKRVQGAITKTGNAHLRRVLVEAAWHYRHHPFVSDALRRRQQGAPPAIVAQAWTAQHRLHRRYARFAARGKPKQHIVTAVARELTGFVWAALTHASDRPTS

SEQ ID NO: 147500 - protein, 322 aa, unidentified
MASFLGIDVSGLSLDALVRPEGIKISVPNDSAGFVALEKSLRGLNIKRILLEATGGYEREVMRFLQDAGYKVLRVNPRRARSFADSMGIKAKTDAIDAEVLAHFAEVIPDKPALQISPDRALLRELLQQRDRLVQQRDDDRRRLKQTQSMVVAHFLKANLQHFRLQIKLVEQAIKQQAAILNDERIAQLIQVKGIGLVTAGKLVALLPELGRVESREIASLVGVAPFNHDSGKSVGKRSISGGRFEVRRALYMACLVAVKHNPALKARYEALRGRGKFAKVAIVACMRVFIVRLNAMLRTGTPWRDLALPVPENTAQLQGTA

SEQ ID NO: 147501 - protein, 493 aa, unidentified
MSKPTRKIQSVYRNQNAIVRAIFERAGDARKVLCVALDYAKRKHVALICDGHGDILKAAFPVENNAAGIAHLIKEISATARRRKIPKDQIFLGGEDEAAYVANFTEALRVKGYLVVRVNAYEAKENRENLLASTDTLDLLGIAKTLLSRRARLTGETGTPNPAYHHLREITRCRRNLVRQQTAASNRIHALADQLFPGFLNGSKSALTPFCDASLELMKERFSAPEIARRKPISLANLLRRHRVQLPDETASQIILLAREALPPAAHRVATLQRALAATVDLYQCLQRNAIELRADAALTLATTPYVMLTSIPGIGFVLAAGLAGELGDPKHLGKLDSLCAYAGIVPRTLQSGGPDSPAVQGHASPRCNRILKDWTVQSAQKIHLYGPPELKDRITRWNAEGKHGIFAAARHHLRLVSTLVKNEIPYLSPEGRDRHATPEQIASAAQATWTIIQRKWRTISGGLDLITDEAHPLGFWRKVMLELHRIDLPPRP

SEQ ID NO: 147502 - protein, 312 aa, unidentified
MINSKTIGIDVAKLHLDAYCHETAKTLTVPNTDVGIAKLLRWATTDQSHVLIVIEPSGGYERSLQQRALETSGVQIAKVNARQIRDFARAKGRLAKTDAIDARIIAEYGALMSPRTIIMPSAEQRELADLNIRRRQLVKILADENNRLDKIKHPTSVASIERTILFVKQEVADIDRAIKDIIAKTEDLAKAKNVVIKMRGVGPIVAATLLAELPELGRIGNKEISSLVGVAPHNVDSGMMRGERTIHGGRASVRKLLYLATLTATRYDGPIRDFYTHLVARGKKPKVAIIAAMRKMIITLNAQMRDHYATIA

SEQ ID NO: 147503 - protein, 358 aa, unidentified
MESQEVKYVGVDCGKKSIEVVRINSENSLERRQFSTTESGINNLLQWLTLNDIVGLEAGSQSFRIAKSILNKGVQVIVLNPGNLATIYQSLKKTDKEDSLKIARLIQRHPIEELPTVPIPNDEEEDNRRLCSEHENWTKQLTQGKNRLHSLFTQAGLTQITKKHLRTKANREISVALLPSRYQKEAERILKVLDLVEQNLKLIEKEITRRLSKKQKAYVQTIMSMPGIGMITSLAIMSYMGDCKRFSSAKQAAYYAGLVPRVDISGDTVRYGRIINRGCHSIRRVIVQAAWSLVRCQHGGKVKEFYQRLYLKKGAKKSIIATSRKMIEVLYVMIRTGKLFDSMPENILNRKLTQYGLM

SEQ ID NO: 147504 - protein, 370 aa, unidentified
MHTIHRSQTLFVGIDVHKDTHTAVGLSPFGEKVFEMTIGNETEDFISLVEKTKVEAEKVGLVPSFGLEDVHSWGERLSSFLVEEQLPVRAVAPILVDHRRSKTTHPEKSDSLDAQGVAEVMIQKIDSLPLYKVTDEAQKAKQIRELSLEREWLVKERSRLKNQLHILLHRIHNTGYRAKFKDPFSKKALRSWMRSVPKNTDAILGQRMKRSVRRILDLREEIQEIEKELTAMMKDNGQTLSTASGCGTVIAAEIVGEIGDIARFHSPGALAKYAGCAPREHSSGKTIRWRKTRSGNRRLNRSFHRMALSQISRSGNDAARTYFKRKVSEGKTKAQALVCLRRQLVNVVWMILKHKTEYVYPQKKVVDFFS

SEQ ID NO: 147505 - protein, 355 aa, unidentified
MHAKKKGSTEELAVVGIDIGKETFHLVGFDRSGQLVLRKQIKRLALSATFEHFPRCVVGMEACLSAHFVSRTLRGMGFEPRIIPAIYVKPFNKGQKNDYNDAEAIAEAALRPNLRTVAEKDQDQLDLQALHRVRARLVSRRTATINQIRAFLIEQGITVRSGLRTLKNSFEAILDQRREEISRRMRGILMGLYGDWLWLDRRIEDVLTEIEEISRTEENCANIMSIPGIGPMISTAMVAAIGKGEAFDRGRDFAAWVGLVPTQYSTGGRTILGRITKRGSRYLRMLFVQAAKVFMMRQHRWADFSFGPWLTGAVARTPRNKAAIAFANKIARTAWSVLHHGTRFDAKQDPALEAI

SEQ ID NO: 147506 - protein, 443 aa, unidentified
MSRKKRTHLRGERGQAFADKIRGIPLEQILCVSLDIHKYFHVVIIHNALGEIVTPPFEIDIFQAGFDRLCQAIDEAVARTNAQVVLIGMEPSSHYFENLARHLRERPHPVTLINSYAVKENRNQQMMRYEKDDEIDTAAIGDLLRRGEGTPFQPAAGVYLQLQHLDRVRISKVKMRTMLQNQIIGHLDRIFPGLIIMGDEAKARYTPLFATDFWACKTLQHLIRVCPGPRRLAAMSPQDLVDAFHAQNYSLGRLTAAKIIAYAKQVLLPDADLIAIRCELLPHDLALLEDVERHIAQLEERLVALLAQTPYQVLTKFKGLSDVQVVSLAAAIGDPACYTYARQVFRRSGLVPGRNDSGTRQRKGKGKKVVKVGDVYLRRALLNALATLILHQPVLQQYYNALKQSKPAGVARVATARRTVGILWATLRDQHSTTLILKKGAAM

SEQ ID NO: 147507 - protein, 355 aa, unidentified
MNYIGMDVHKKSITMAAFSQDGSRLAKKKVAATPEGITGFLNLLEGGQPLTATMEATGFWYWVAEVLEDIDGVTVKLANPRKVRIIAESNLKNDDVDAAALAHLTRLNWLPESRLVPKKVRLVRERLRCRISLVQTRSSLKNRLTSILLKRGLSHPFSDLFGKKGRAWLDSLDLPEEYRQNMDIYLRLIDATGAEIASVDKWLTKKVKTSRQGRLLTTIPGIGKFSAMLLLAEIGGIDYFKSPKKLSAYAGLAPSMWQSGEKRRLGRLRPDCNKYIRWICIEAVTKAVRVVPCWKRLYDSICCGNDSKKPVARTAVARKIICAAWRVLTSGEPFDHLAAGRRNPKDSPAMVTGLK

SEQ ID NO: 147508 - protein, 358 aa, unidentified
MSELTFIGLDVHARSVVAGVLEGTSGEVRSCKAPAGTVELVAWLRAQGEALSVAYEAGPTGFGLARACEAAQIPCLVAAPSKIARAPGERVKTDRRDALRLAKLLRLGELVAVRVPSVAEEAARDLVRAREDARGDLMRARHRLSKLLLRQGLLWEGSAWTQAHERWLGAQRFRERGLQIAYDEAVAAMAGVRERRDALDRAVAQEAVREPWAGVVGRLCCLRGVSTLTAFGLAVEVGDWRRFDGRSLGAYLGLVPSESSSGERRRQGAITKAGNGHARRLLVEAAWHHRRRVRQSRELARRREGQPALVRARAAAADRRLHHRWAALDARGKRSTVAAVAVARELAGWCWSLATMEA

SEQ ID NO: 147509 - protein, 345 aa, unidentified
MKYYFIGIDVSKEKLDATLIHYESESDSEQQLAYTTVENNPKGFRSLVSWSKKNAGRGVKTDTMLFCCETTGGYDRALCDWLYGNGLNIWRESALQIKRSMGLRKGKDDKADSEMIAYYALRFRSKATLYKPLDENMRSLRNLFLYRQSLVVERRAKMVSAKEKQHISSKSKADSFIYRDAQKAIDILTKSIKECERRMLEIIKEDEEMYRNYQHLISCKGVGSITSIMLIIYTDNFKGWNAKKMASYCGIAPFYESSGSSVFHKANTSGYSNRRLKGILTQAARSAITHNPTLRQYYQRMKAQGKPYGVILNNVNNKLVHILFSLVLHDCDFELDHETKRTARA

SEQ ID NO: 147510 - protein, 327 aa, unidentified
MNSICLSTDSLPVLGLDVAKKSVQAELRRAGGKTVRFGFENNAKGFAQLARVLKEHNVPKVWAGLEATGPYSHALALWLHGAGHRVSLLNPRRVKQYARSAGKRNKTDLLDAAIIADFVCAHRPAPWQPPTLEVAQLRALVRRREELSLMLQAEKNRLEGVASNVSCSLRRIIATLSAERARLEKLITQQIRSHQQLSCDHQLLCSIKGIGSLTAAILLAEMARPGQVERARQAAAHAGLVPRREESGTSVRRNRGLGKEGNRYLRKALYMPALVAIKYNAPLRHFASRLRAAGKPKMSILCAIMRKLIHIAFGVLKHQKPFNPSLA

SEQ ID NO: 147511 - protein, 476 aa, unidentified
MNCAAQPFRWRQQEELEMNPKRSKSRHGRKMPMVHPNAAAIDVGATMHMAAVRADRTPEPVRSFGTFTADLHRLVDWFTQCGVETVVMESTSVYWIPVFELLDARGFTVFLVNARDAKHVPGRKTDVSDAQWLQRLHSYGLLRASFRPKGQIAELRSYVRQRERLLEYAASHIQHMQKALTEMNLQLHHVVADITGATGLRIIRAILAGERDPEALAALRHYSCHSSAETIAKALTGSYRAEHLFALEQALALYTAYREKASACDVRIEAVLKELSIHRGRDHGAVPPPRRRHRTDQVNALAFDVRAALFALLGKDITAIDGLGAYLSLKLIAECGDDLSSWPSAKHFTSWLGLAPSNKVSGGKMLSSRTRRSGGRAAALLRLAAVAVGRTDTALGAFYRRLSSRIGKAKAVTATARKVAVLFYNAVRHGMEYVDPGASSYETRYRTRVVNNLHRRAKAFGFLLQPLEPKAGATVS

SEQ ID NO: 147512 - protein, 469 aa, unidentified
MPNRKKSKSKTSPQKKKNPGLPASLECVNLNAAGIDIGSSEHWVAVGDDRDEQPVRKFEAFTADLYRLADWLEECGIDTVVMESTGVYWIPLFQILETGGFEVKLVNAKHVKNVSGRKSDILDCQWLQQLHTFGLLSGSFRPENDICVLRSYLRHRDNLIRQCSSAIQHMQKALTQMNVLLHKVISNIVGLTGLRIIRAILEGERDSTKLAQMKHPGIKSSANQIAKSLQGDYREEHLFVLKQSLELYDFYHKQLDELDLKIAAHMESFEPKVDLQQKPMPAPKQARKKPRGNAPKVDWRSAIYKTAGVDLTQIPGIDTLTTQVLISEIGVDMSLWKSEKQFASWLGLSPNNRISGGKILSSRTRKSVNRAAQALRMAASTLSKSKTAFGAFFRRKRAQHGSAKAITATAHKLAKIVYQMLKTGKEFIELGEQYYEQKYQQRIIKNLQKRAKSLGLAVIPIQQLTATVS

SEQ ID NO: 147513 - protein, 323 aa, unidentified
MQGKSAPEAGAEEAVYVGIDVCKAWLDVYLHPTGQSFRVANSKEGIKALCCKLAGAKVVLVVMEATGKLHRLAHRMLSQAGYPVAAVNPARPRKLAEAMGQLAKTDKIDARLLALFGACLGPKVTPVPAQTLAELQELAQARQAAKDSETALKNRHTAAESRVLKRVLERQLKACARAIGELDAAIAALLERDPVLKHRYSILISIKGIGPVVAAMLAACLSELGLLPAGKIAALAGVAPFNDDSGGERGLRRIKGGRAHVRRALYMAAVSAARCNPDLKAFYDKLRANGKEAKLALTAVMRKLLVLANTLIRENRHWTEKHA

SEQ ID NO: 147514 - protein, 343 aa, unidentified
MKITSIGIDIGKTTFHLVGLDPHGSIVIRRKFSRKALLAYTANLPSSLIGIEACGGAHCLARVLREQGHQSRLIPGQFVKPYRKSNKNDYLDAEAIAEAVTRQNMRFVPIKTEDQLDLQGLHRVRERLVHNRTEVINQIRGFLLERGITFNRGPMSLRKEMPLLLEDAQQNLTPSLRTLLDHLWHEWEHLDSQVDQIADAMDAVANSDAACRRLRKIPGVGPLVSTATVAAVGNGAAFKRGRDFAAWLGLVPKQHSTGGKARLLGITKRGNRYLRSMFVHGARAVLLRVKYDAGGFGQWVHRLAARAPRNKVIVAIANKLARIAWVVLSSGNEYQHQPIAAVA

SEQ ID NO: 147515 - protein, 400 aa, unidentified
MKKRTTKKPKVDRMKIMAGIDLHSNNAMCGLVDSEGKRLLHKKVPCDLRCVLSVLEPYKQRLESVAVESTFNWYWLVDGLQEHGYKVALANPAAMQQYNGLKHTDDKSDAFFLGELQRLKILPTAHIYDRKTRPVRDLLRRRLLLVHQRTSLLLSLKSLHARTSGCSLSLGLAKALLPEQAAKLFRHPADQLIAREQAQHIRQLSQSIEAIEKMVLGEVKQLFCYRQLQTLPGVGSILALTITLETGDITRFPSAGDYASYCRTVDSARLSNERKKGQNNEKCGNKYLAWAYVEAANFAQRSDGPCRRFFDRKLAKTNRFVATKALACKLSKAAWYVMSQGVDFDSARAFPGPRPEAQTQRSSKAQAGQATKQTELKKKTDLGRASVNPSKGSGSKTLRD

SEQ ID NO: 147516 - protein, 340 aa, unidentified
MKQIKRIGIDLAKSVFQLHGVDAHGHVVLRRQVKRAQLRAFFAQCPPCHIGMEACGSAHYWAREFGKLGHTVRLIAPQFVSPYRKNDKNDGNDAEAICEALGRPTMRFVPIKDEEQQAVLCVHRARSLLVEERTALANQLRGLLAEYGLVIPQGVARLRAALPGILEDAENGVPMLAREVFADLYERLRGLDTHIAAYDRRITHLARTMAAAKRLMQVEGVGPLTATAVVASVGDARLFKNGRQFAAWLGLVPRQHSTGGKSRLGRITKRGDVYLRTLLVHGARSVLMHRAEKTDAKSRWGAALQARRGFNKAAVALAAKHARILWALLAHEADYKPATT

SEQ ID NO: 147517 - protein, 410 aa, unidentified
MLFIGDDWAEAHHDIEIEDESGRVLARRRLPEGLAGITTLHELVAEHLDPAAEPDQVQVGIETDRGPWVQALLAAGYVVFAINPLQVARYRERHSPSGAKSDAADAHLLAEIVRLDRAHHRRIAGDSEIAEHIKIAARAHQMMIWSRVRQVNTLRSLLREYYPAALAAFGTDLAGRDALAVLTVAPSPELGRRLSQLRIETLLRRAGRQRNVSTAAAKIRAALTSEQLAARPGVIPAYTASASALLAVLTAMAAQTEVLAGQVEQGFGQHPDAEIYRSQPGLGDILGARVLAEFGDDPGRYMDAKARKNYSGMSPITKASGTKRVVLARFARNRRLGDALFLQAFAALNNSPGARAFYDRQRSRGATHYQALRTLANRLVGILHGCLRHQTLYDEHLAWHSEPDKLSPAA

SEQ ID NO: 147518 - protein, 346 aa, unidentified
MMIIGCDYHPSWQQICWVDTATGETGEKKLEHALGEAEKFYRGLPAPALIGMESTGNCQWFVEMARTAGHGVWIGDAAQIRASEVRQQKHDKRDAALILKLLMEGRFPRIWAPSGEEKDLRQLLIHRYKLVRIRAQVKNELQHLAMNQGITKKRKLWSKAGEKVLRELPLKPWASRRREDLFKVREMLSTQIGLLDQAVVAAAEKNEKAKLLMTQPGVGPITSMAFVLTLGDVNRFQRGKQVASYLGLIPREYSSGGHQRLGSISKQGNRFMRMLLVEAAQNAVRCDPGMRSEYLHRCHNKAKGVAKVAAARKLAIRLYWMLRTNTGYPGVVRVESSSRVPLVSAS

SEQ ID NO: 147519 - protein, 342 aa, unidentified
MYYIGLDVHKKTISYCVKDASGQVHREETIGATRNELDCWVRTLPQPRIMAMEATIFTGWIYDHLLPHAEQVKVAHPLMLRAIAAAKKKNDRIDAGKIADCLRCDFLPECHMASTEIRDRRRTLRYRHLLVRQMVQMKNRISGLLLETGVSHNKQRLHKVGYFRELISHNQEVHENIRPLLRLSRETIVRCQKTDYALVSSLQRDPLLAERIKRLRTVPGVGPITALTWALEIGDVSRFRSVKQAISYCGLCGDEKSSADKVLRTPLSKQRNKHIQSVLVEAAKLAPRQNHELALVHEREKQKGNANRATLAVARKMVAYLLAVDRREREFIPAEGHRTTAA

SEQ ID NO: 147520 - protein, 420 aa, unidentified
MHASTDKPFTAYVGIDWADSKHDICLQAAGSEQREFDCFPHRVERIEEWASSLYQRFGGPIAVALELVKGPLVYALQKHDFFVLFPVNPSMLAKYREAFKPSRAKDDPTDAELALDLLLRHPERFKALQPQSVEMRTLMSLVEQRRRLVNDRIRLTNRLRNTLKQYYPQTLEWFDHIDTPIFCDFISRWPTLTQVKRARRSTLERFFHEHNMRFAHLLQARLKSIKAATALTFDDAVITPHRLQALVLVDLLRVTLQAIQRFDEEIAQLAPKHADYALFSALPGAGPSLAPRLLVAFGEQRERFRSAAELQKYSGIAPVTERSGKKHWVHWRWQCPTFLRQTFVEWAAQTINKSFWAGAYYRQQRAKGCSYQVALRALAFKWIRILYRCWQTRTPYNEAEYLRSLERRGSPLLKQFATSE

SEQ ID NO: 147521 - protein, 338 aa, unidentified
MKVYAGLDLHATNTYVAMIDAENKVLYKQRHRNDVPSILSALDPFREDIQGVVVESTFNWYWLVDALMDHGYRVDLANVSAIKQYEGLKQIDDRRSSLWLANLLRLNILPTGYIYPKEERPTRDLLRKRLQLVRHRTSHVLSVKNILARNLGIRMKTYDIKKLKASEVSTLFADTEMRLAIISSIGLIQHFQEEIDRIETVLTKKFKVKEEFKKLLTVPGIGEILGLTIMLEVGHIDRFPTVGDYSSYCRCIRSIHTSNGKVTGYGNSRNGNKYLSWAYLEAAHFARRHHERIQRYYERKRAKTNKVVAIKAVSHKLARASYYVMRDGVDYDEARLFV

SEQ ID NO: 147522 - protein, 408 aa, unidentified
MARYYLGVDWADQSHQLYVSDESGRKIRELEVQQTADGLAELGRWLDESRSQGIELWAAIEKPEGRVVDFLLDHGVVVYPVNPKALDRARDRFRMSPSKSDGFDAYVLAEFLRTDHAHLRALEPNSAEGQELKMLTRDHQRLGRQKTRLLNQIGITLKEYYPVPLEVFESLDTKIALDFLKAYPTPQALSKLTRRGWKRFAKRDHHLSEARCSELWDKLNKPQLAVPAHVVRAKAKLLAALVMQLEASVKAVDSYSQEVQSFFAAMPAAEIAKTLPGGKSGTTVASIWAELGDAPKRWNSFRHLQAEGGAVPVTKASGKSRMVQFRFACNKHLRQAMYWFSFNSLQRSEWAKKYYRNQRAKGHSKHESLRALGAKWLKIIFVMWRDHKPYDENYHLANIARQMMRQAA

SEQ ID NO: 147523 - protein, 350 aa, unidentified
MHFIGVDYHKKYSYVVVKDEQGRRERKGVIHNTREEFQKFLGSYQPGKAVVEATRNWGLVYDWLEEILGDVALAHPLKVRAIAEARIKTDKISADILADLLRSDLLPEAYVPGKQTREAKNVLRQRMFFVRLQTMVKNRIHVILDRHPDVLSGSPDVSDLFGASGMQWLEDIVLPGTDSQLLSSELELLETLRNKISQSNGLVNELARGDKKAKLLRSIPGLGPFFSVLVAKEIDDIRRFKGDKKLCAYVGLVPSTYASGGKVFHGRIIKQGNKWLRWAVIEAVPHTIKSAPDLHAYYERIRAKKGKNAAKVATARRLLTIIYRVLRQERLYEKRPSKRRDSTPVALMSS

SEQ ID NO: 147524 - protein, 341 aa, unidentified
METVYFTGIDQHKHTSFLTTLDQDGDIVRSTKLKNNPGSIRAYFNTLPGEHHATVETTTGWYWMNDLLEREGVDLSLAHAKFVKAISYAKVKTDKVDAMTLAQLLRVGLIPQAHKISSEMRDVRDTLRARLHLVEKRVSAQNSVHRVLEKFNTDSVDDLPELFCLQADMHSERARLISEQIKTIDSTLNHLLLDTEDIQRLLWIPGIGRLNAFSIYLEVDGVERFSTVKNFYSYCRLVPGAHNSGGKTRHRTSKEGNKYLKIAFSHAATRAIQYFPVVKKYYQRMARKKGAPIARALVAKEIAKSVYFVLQTQEPYKRVFKGINLEREKLASWPRRASPGS

SEQ ID NO: 147525 - protein, 355 aa, unidentified
MNQEKYIGMDVHQATISVAVMDGRGKLIMECILETKAGTILEFIGGLQGSLSVTFEEGTSAAWLHDLLKPHIAHLIVCDPRKNALLKDGSKSDRIDARKLADLLRLNRLNPVYHGEHGVRTLKELGRSYLTITQDLTRVMSRIKALYRSWAIPCSGSTVYAPRHRAEWLAKIVEPGVHLRAERLYQQLDLLQPVRQQARHDLLVESHRHPAVKLLRQIPAIGPIRAALLVALLQTPHRFRTNRQLWAYSGFALETHDSGEYRMVRGKVRRNRERLTVLGLNDNHNHDLKNLFKGAAISASTRPGPLYDFYVGLLQKGMRPTMARLTLARKIATITLTMWKKGVDFDAKQLNRQAA

SEQ ID NO: 147526 - protein, 341 aa, unidentified
MGQAITIGMDIAKQVFQLHGADEAGSVVFRKKITRAKVLVFFGSQPPCVVVMEACGGAHHWAREIVKLGHQVKLIAPKYVKPFVTRQKNDMADAEAICEAAQRPTMRFVAVKSEAAQASGLVFRARDLLVRQRTQIINALRGHLTEHGWVVAKGPAHVAKLIDHVDDPACQLPQVARTILKVMISSLKDLDAQIDLLDREIGKRAKGDQIAQRLTSIPGVGPITATAISALAPPVETFKRGRDFAAWVGLTPLQRSTGGKQKLGATSKMGERTIRRLLIIGASAVVRHAARRAPDGSWLGRMLARKPRMLVTVALANKMARIVWALLTKGGVYKAPIVAAA

SEQ ID NO: 147527 - protein, 330 aa, unidentified
MHFAAINLDNKVVLKKAMDRKSFFENLSTMFPESETFVFEACGGAHYMAQRLESIGHKAILLKPKDVKAYAKTRQKNDINDSIAICKASCDPDLMHVKAKTIEEQEISYLHKARQNIIQQRIQYSNSLMTSLFEFGYLVTCGKSTFAKSCQNFVNFALEEGCINNTIAEQMLLDCKEIEQLMIREQSLDKELAAKNRSSKKAKILETILGIGTINVSILSIKPVEAYDSAKDFAASLGIVPKQNSTGGKIILGRITKQGDRYARTMLIQAGRSLLMSSYKTNQTLGALSEFIERLKEKGKSFNVIAVAIANKLARIAYACLVKNRNYQLV

SEQ ID NO: 147528 - protein, 330 aa, unidentified
MTHAVLGIDIAKLTFDACLIRPDGSLRHRTRFANSPAGFTELAAWLKKHHVTTTHACLEATSTYADALARDLLERAHRVSVVNPARIHDFGKSRLTRTKTDKADAELIARFCLTQTPPAWTPPLPEITELQGLIRHLEKLEAARQQHANQLATATTQIVRDSLTALIRHLEGQVVEVEAAITEHIARHPDLRADVALLVSIPGIGERTAARLLAEIIHLKSYASARQVAAYAGVSPQQRESGTSVRGKTQLSKTGNARVRRAVYLPAVVAKRYNPLIKALCERLAERGKPPMVQIGAAMRKLLHLAYGVLKSRKPFDPNYGRPQQQPHAA

SEQ ID NO: 147529 - protein, 356 aa, unidentified
MKYVGIDYHKHYSVVCIVNEAGGIVAEERIEHAFSERFQQLLSVHTPCQVGFEATMNWGWLHEILEEIAGIERIVLANPLHVRLIAAAQVKTDKVDARKLAQLLRAGLLPASHIPDRATRLRKEVLRQRTFWVRQRTQLRNRIHRLLGRQHGLEMPQVSDLFGKKGRSALAKIALPSPDDLLLRQQVTMLDALGAQIRELEERIGMSGQNDSSVGLLATIPGLGPILGNVIATEIDGITRFDQSDSLCAYAGLIPTTSSSGNKTYHGRLVNGCNKWLRWALVEAAWVAVGCSPYFGSLYRHHRSRGKKANTAIVITARRMCQIIFCVLHEQRPYQSRAWSQNLPGCSPCGRTKRVA

SEQ ID NO: 147530 - protein, 339 aa, unidentified
MQVVIGIDPHKASHTAVAIDEAEDEISSVKVRATRRQVEQLVRWAEPFEKRRWAIESAGGMGYLLAQQLVAQGEEVLDVPATLASRIRVLATGRSNKNDPNDAHSIAVAAFRAPSLRSVEVADHSQVLRLLAKRNVDLGSHRTRVVCRLHALLAELVPGGIAKEMYVSDAERFLANITPSTPVEQVRYDMALELLDDVRRLDAQTKASHRRIRLAIRASGTSLTEIYGVGPIVAAQLIGYAGDVRRFANRDAFASYNGTAPVEFASGGRVVHRVSQRENRRLNHGLHMVAVTQIRNPGSEGRIYFERKIAEGKTKKEALRSLKRQISNAVYRQLLLDAR

SEQ ID NO: 147531 - protein, 519 aa, unidentified
MKRSFTGSQYTLRFTFIAMWWIRHAEQDLCATSTGAIGCWRAAVLETGLRIARGHPLVAARDEHPALGTDQPDAVGVAADDHPDAVGVQRLRLERTVDVPQPFCRKLRRAARVWGVGLIRGLPLTGDTADTLMFPCILISDGSFHRTSTCRRQLDISYGPSRPNDSLGVAGVSSVSPNKLRGGVTPYRQGRVKTDPCDVESPMTSTAIFVGIDIAKPDFVVACRPDGTAWTAPNDAEGITATVDRLRALAPTLIVLEATGGYDTPLVAALAAAGLPVVVANPRQVRDFAKATGQLAKTDRLDAQLLALFAERVHPTPRPLPDAAVQHLEALMTRRRQLLDMLTAERNRLEHASALIRRNITEHLRWLERRVAAVDRDLDDTIQQSPVWRAKENLLRSVPGIGPVVSRTLLADLPELGRLNRKQIAALVGVAPLARDSGTLRGKRMVWGGRAPVRAVLDMGALVATRRNPVIGAFYRRLLAAGTPKKLALTACMRKLLTILNAMRRTNTTWRQIAQPQNA

SEQ ID NO: 147532 - protein, 374 aa, unidentified
MIKIARIGIDTSKGSFQLHGVNEKDEGVLRRTVRRRQFLEFMAKLEPTVIGLEACGASHHWARELGRLGHRVMLIPPQAVKPYVAPGRKNDKNDAEAICEAMSRPRVRARLVPIKSVEQSASQMLMGVRDSLLKRRTQLCNTIRGHAAEFGLVAAKGLDKIEPLLARIAGDDGLPALAREMFGDLGQEHAELSQRIVQIDRKLAAFHRSNELSRRLMAIPIVGPVGAGLLITKIINPHGFRSGRLCAAWVGLTPKDHSTAGKQKLGGITRAGDESLRAVLVSGATAYIQQVRRGRIVPSPWLAALLERKPPKLAAVALANKTVRIAWKLMTSGERYDPTHRVDREGLAASQYGGLRAEPLAPAPTGGDSHAVAA

SEQ ID NO: 147533 - protein, 344 aa, unidentified
MVVLGTDAHKRSHTVVAADEAGVELGSTTVAATPEGHLKLVKWAARWPERRWAIEDCRALSRRLEADLLKLGELVVRVPPKLMAGVRRSARTRGKSDPIDALAVARAALREPDLPTAVLDGPSRELRLLVDYRESLVKDRTAAQNRLRWRLHELEAGYDPAPGSLNRYKTLDNIDELLAAHSSMVAELGRREAARIRELTREANQLEHDIRRRVVELVPSLLEIPGCGALTAAKLVGEAADISRFKNRDAYAMWAGTAPIPVWSANNQRFRLNRGGNRQTNAAIHRIAITQLRIHPDAQTFIARRLENGSTRREALRLLKRKLANVVYRTLLNDVQQPALADAA

SEQ ID NO: 147534 - protein, 242 aa, unidentified
MSGAVVGIDIAKRKFDVALFLKGKFKHKACMNNKQGFEDLSRWLKKQGVEHVRVCMEATGTYGDELATYLYDAGHLVSIVNPVRIKGFAQSELLRTKNDKVDAGLIARFCVAMNPGTWTPPPPEIRRLQSLVRRADTLIDMRTQEQNRLGTTHETIEPSIKEHIGYLDQEIEKLKRQIAEVIDHDPNLRGKRDLLDSIPGIGETTIAVILSALHVFEGVECVQKTVAFIGLAPKETLSGSSI

SEQ ID NO: 147535 - protein, 442 aa, unidentified
MRVMVKCGAGIDVHKKNVVVNCRRVEGKEIEAETRTYGTTTPELLQMTDWLASWGVTDVAMESTGVYWHPVYNLLEGSYTVLVVNAKHIKHVPGRKTDVKDAEWIAELLSYGLLKASFVPDRPQRDMRDLTRYRTKLVQERAREVNRVQKLLEGANIKLASVATDVLGVSGRLMLKALIEGNASEKEMAEMAKGRMRSKIPELEKALTGIVSDHHRFMLGEQLAHINFMDGQIANISQEISVRLEKMSRKQQPPTPSAGADKIEKVEDAETLLTWQAAVELLDTVPGINQRAAEAILAETGIDMSQFPEDKHLTAWAGLAPGNNESGGKRYSGRTRKGNQTLKSTMIQVAHAARRKKGSYASALYKRLVGRRGKKRAIVAVARSLLVSIYHMLTRQEAYKDLGSEYFQARRKENKVDYLTRQLSKLGYEVQLMPQLNPIPAG

SEQ ID NO: 147536 - protein, 372 aa, unidentified
MMVWTAPYGIECARMRLLRSQTREPSVNQIIRIGMDTSKHFFQLHGVDTAEHPVLRRKLRRKEMLAFFAKQPPTVIGMEACGASHYWARVLCELGHTVKLIAPQHVKPYIKRNKNDGRDAEGLCEAMSRPTMQFVPAKTAEQQAALMLAGMRERLVGQRTQLSNAIRGYAAEFGLIAAKGLDKIEPLLADIAADEALPVLARELFAMHGREYAQLQAELKNIDARLKAWHRANADSRRLAQIPGIGPIVATALIMKVPDPRLFPSGRHFAAWIGLTPKDHSTAGKTRLGKITRAGDERLRSVLVAGATAVIQQAKHRRGHPLPWLLALLKRKPPKLAAVALANKIARIAWKLMTTGESYDGMRMPGASAFAA

SEQ ID NO: 147537 - protein, 346 aa, unidentified
MLHVGLDLSRKRVDVCLISGEGELVDRFCAPPDRDGLHGLAQRLAVYGEPIRGVVESMNGARFVHDELVCHGWEVLVADAQKVKGIAPLACKTDRIDARVLAELSFRDLVPAIWLPTLELRREREISRWRLHLVKHRSTLKNRVHATLITFGHQRHMSDLFGVAGRRLLNQLEIPEPWRSHVEASLVLIDDLEARITQIANQLRRSGADHRYIPLLLTAPGFGWITSFTVACELGDIDRFASPVKLTGYTGLCPRVKQSGQSDQRGPLSKHGPKYLRWGLMEAAIAASSHPLYRERYQRTKRRLGRQRGPKVAQIDLARRLAEAIWYMLTRGQPFAPAGAINRLAA

SEQ ID NO: 147538 - protein, 320 aa, unidentified
MHAVLGIDIAKARFNVTLQGADGKRRRKAFDNTPTGFGELGAWLGRYAGGPVHASLEATGTYGDALATWLHDQGHAVSVLNPAVISGYAKSRLSRAKTDRADADLIADYTATQRPPLWAPLPRDVRELQALVRRLDALIGMQTQEQNRLKAGGVVPAVQTSIEAVLAKLEAEIKAVKALIKRHIDSHPDLRQQRDLLVSIPGIGQSTAAVLLSDLLHKPFTRARQAAAFAGLAPRIRESGTMRGRPTLSKIGPSRLRHALYFPAIAAMRFNPSIIALRERLTRKGKPKMVIVGAAMRKLIHLAYGVLKSGRVYTPDAVRA

SEQ ID NO: 147539 - protein, 366 aa, unidentified
MQTSSKAYIGCDVHKKDTCVCLVWVGEGEKIYRRDLGYVPTRRERLEQALAEWQDKYAQLWPPVAVLETGSLSLLVHDTMVPFVDQVWVVDAKRVRELRGHKAKTDKEDAFGLAELAARGLLEPLWVPPPRVLGMRGLMRTRRGTVRYRTSVANRLRSLAGLGGHPLEQGYVWSTPNLAHLRSQQWPNLDFQRAVESLCRQAESLTAELGILDGYVQEIFAQDHQAQLLATIPGCSRVLSLTISTEIGDIRRFRSAPALRSFSGLAPGDKESAGKKTGGGLAKHGNRHLRWAFCQLANEIGFIAADEDPLALRYHRLKNRLRHHRHRDIICKVVIASELCKVVFAMLGQGREYEKRWPAGHICLAD

SEQ ID NO: 147540 - protein, 343 aa, unidentified
MYYIGLDIHKRTISYCVKDAAGQVHQQGKIGTTRCELDAWIKTLPQPRMMAMEATIFTGWIYDYLLPHAEGVKVAHPLMLRAIAAAKRKNDKIDAAKIADCLRCDFLPECHMASTEIRDRRRMLRYRNLVLRQMVQMKNRVSGLLMETGVTYNRQRLHKLGYFTELLSSNDEVIDTIRPLLKLSRETITRSQKLDRALTSSLERDPLLSERLRRLRTIPGVGPITALTWALEIGDYTRFRSVKEAISYCGLCSAEKSSADKVMRMPISKQRNKHIQHVLVEAAKLAPRYSHELALVREKEMQRGNTNQATLAVARKLVAYLLAVDRRKQDFVPAEELGSKAVA

SEQ ID NO: 147541 - protein, 347 aa, unidentified
MTLVGCDLHSRDQQVAVLDTATGEVQERRLVHDGDTVEQFYTSLASPVTVGIESTGYALWFHALLHRLGHEVVVGDAAKIRAMVVRKTKTDRRDAAHLLDLLKHGRFPTIWLPDPAVRDQRALVTHRMRLMRMRTMVKNGVHAIALNHRLALGPSLFTRAGVSQLQALSLPPHTSRRRGESLELLSWLNTHIKGLDDQIEEAAHAHPDARRLMTHPGVGPLSALATVLVLGPVTRFPTSKHVVSYVGLAPAIESSAGKHRLGRITKQGNALLRYLLGQAGQAAIKRDADLKRLYYAVLHRRGRSRAKVAVARKLLVRLYVMLRDEVDYRTFLDRAPAARRKEMSATP

SEQ ID NO: 147542 - protein, 352 aa, unidentified
MPKHKYVGMDVHSATTVIKIQNEAGKTVATSIVETKSGAIKDFVRGLTGTVHVTFEEGVHATWLYEIIKPLVAEVIVCDPRHNKLIQSGNKSDQNDAEKLAELLRIGSLKPVYHGDCGTRELREAVRAYNVLTRDCLRVMNRIKAMFRGRGIDCRGTQVYRAVHREHWLDCLGHPAATARLELLYQQLDGVSQLRETARREMLRQVRSHRAYKVLKQVKTLGPVRIAQIIGVVRSPFRFRTKRQFWPYCGLAVQTASSADYEMVNGKVHRRAKRAVTRGLNHNYNRELKNVFKAAALLGTVTEPFKQYYDGLRATGMKPEMARLTLARKIAAITLAVWKKGEGFDASKVIQG

SEQ ID NO: 147543 - protein, 345 aa, unidentified
MPIVGGLDIHRKQLTFDYLDTVTGEVYRGQVIPADRAHLRAWLARFAGRDDVAFALEGCTGWRYVAEELTAAGCAAHLAEPADTAAARGRKRHAKTDKTDSRHLRQLLAEGRLPECWIPPPQILECRALLETYHDLRRERTAWAQRIHAVWFHQGAPRLGEGALRTEAGIAALPAAAACHLSPAGQLQVATALDMLTALDARLHVLRHQLLHDARHLTGARVLAARLYGAGPFAALAMTCWLAGAGRFSSARKAVRFAGLDITVYSSDGKRTPGRLSRQGPPVLRWALYEAGKTHARASAPDHAYYAQVKDRKNGKRAALSEARKIVRQACHILTELGDDALTAA

SEQ ID NO: 147544 - protein, 410 aa, unidentified
MLKIVYPICCGMDVHKSFLVACVASTNGQGVTSYKSKRFSTFTGDLCRLADWLSENNCKDVCMESTGKYWIPIYNILEATCDVVLAHPKYVKAIRGKKTDKKDAKWIADIFKHDLVSGSFIPPSDIRQLRDLVRYQWKLTNFMTGEKNRAQNCLTVSNIKLDDVFSDVFGKAASAITTRLLESNEPFDVKPYLTKGIKAPIEKIQSAVDGEICVEQAEKLRIIRSHMDALKLCKLNLESLILSVAEKFLPQLNLVLTVPGIKTFSAIGVISEIGVDMSVFPTPKHLCSWAGLTPQNNESAGKKKTTRISRAGAYIKPLLVQCSLAVIKSTKHPEIRNRYLSLKKRRGHKKAIIAIARMLLTAIYNMLKKNEPYNPELYRRADRPPTHREVSIDEAIYIIQRQGYLVTAPT

SEQ ID NO: 147545 - protein, 491 aa, unidentified
MAKPKQSTFQRLTSAKLNRKQRKELGRRLYSDHPGLEVVNRHAAGIDVGNKSHFVAVAPGCDPDPVREFGSWTADLHRMADWLQSLGIQSVVMQSTGVYWIAVYEVLEQRGFQVWLTNARDTKNLPGRKSDVQEGQWLLKLHTYGLLRNSFRPPQAIRSLRTIWRLRDRHVQDAGREIQHMQKALTTMNVQLANTISDVSGLTGLAIIRAILKGERDPYKLAQMKHYRIQASEEEIARSLEGNWQEDVLFELQQAVDRYDFCQQQMGECDRQLQRYLAELPSRSIAPPEEPAPGAAATSSSGAVAAQRKRKRKKAGGKPRKNEPKFDLQEELTRICGVDLTTIDGVDVMTVQTWVSEVGVDMTPWATEDHLVSHLKLAPHRQISGGKVIKHEHSKTTNRVAAGLRMAASTLVHSESYLGARFRYLRGRLGPAKAIKAMAAHLARLIYRMLTRGQAWVDRGAQDYQDRRQQREKVWLQRKAAALGFRLMPEA

SEQ ID NO: 147546 - protein, 311 aa, unidentified
MSGVNAAIDVGKHSLEIALGSDGELFSEPNQSRAVTRLAKRLAELGCERVLIEGGSYQNVLVGGLRAAGLPAVIINPRRVREFAKSIGQWAKTDHLDARVLALYGERIQPPVRELPDEQNQVLRGLWVRREQLIEMLVMEENRLEHAPKALHRSLRAHIDYLRKQIKQADNNLDREVRNSALWEKYELLRSVPGVGPVLSIALLSDLPELGRLNRGEIAALAGVAPFNCDSGTLHGQRKIQGGRKRLRRVLYSATVAAVRCNPALRPFYQRLRATGKPAKVALVAAMHKLLLILNAMLKTKTLWRSACPAA

SEQ ID NO: 147547 - protein, 310 aa, unidentified
MADIVITAGIDVSKDRLDVALWPAPGTRCSLGPDEIEQLIVWLDQHRVVRVGLEASGGYEREVIARLSAVGVVVVVVNPLRVRRFAQAKGRLAKNDRADAATIAEFTATIAPDRPLREAALERLGEYLLVRRYLQQTITDTVNQLEHLRQAELRRLVAAQRRGVARRLQQLDRHIAALVAEHPQWHALARQLRSVPGVGPVLAHTLIALLPELGRLTRRQIASLVGVAPFDDDSGRRNGARQIEGGRTAVRGVLYMAALVAKRCNPPIAAFAQRLAGKKPKVILVACMRKLITILNAMLRDGQPWQPAVA

SEQ ID NO: 147548 - protein, 344 aa, unidentified
MFYAGIDAHMKSSTIWIVDRKGRKVSSSTVVTSAEGFAAGLGRWARRGLKAAVEASGITPWVCQLLKDLGVKVVVVNPNRVRLIAESRKKSDRVDAETLAQLLRLGGLPEVHQPSLEARRLRTELSVRRQLVRRRTGLINQARGLLRGWGVILPARFFQGRGGWKDLAAKKLPEYLGPLLETMKGVYEQLTRAIHQVEATLKQREHSDERVAQLESIPGVGPLSALTLVAAVDKIARFAKAKRLTAYNGIVPTVRSSGEREQQGSITRQGRSEVRAVWIQAAHSLVRSRQPAARPLQKWFWKVARRRGLRTAIVALARKMLSLAFYLLRDGTQYEPLRLRQAAA

SEQ ID NO: 147549 - protein, 440 aa, unidentified
MAPWVPGPRSALDSLPSRKEVSLSMTKTLYVGIDVASRSNTAQGLDPTGQALGKPWTFPNTLPGAQALEARLAQMLQAGAYAKVKIGLEATAFYDWHLADYLASSCALRQWQPEIYRLNALRVSRFRKAAEEPDKTDRGDAGVIADFLRVGRNLPAPHVSGDPYLPLKRLTRYRFHLVGTLVRETSHFLTHLFLQCSGLAQANPLGRPLGATGCALIEALPSAEALAALPVEELVAFLVKQGKNRFPDPAGMAQRVQQAARESYRLRPELARSEHFILANLLRNIRALKASLKEINKAIADELAAFPNTLTTLPGVGPVLAAGIIAELGDIHRFARDDQLAKLAGLVWKRHQSGTFEAQDRRMITSANRYLRYYLVEAANALRMHDASYRAFYEAKFQEVPKHQHKRALVLTARKLVRLVYALLTRGQIYRPAAVQPAGR

SEQ ID NO: 147550 - protein, 345 aa, unidentified
MELHTIGIDLGKTVFHLVGLDLRGEVVVHKKFSRKQLLHFTANLQVKLIGMEACGGSHFLGRALREQGHEVRLMPAQYVKPYVKTNKSDYIDAEAIAEAVGRPKMRFVPIKTDEQLDLQSLHRVRERWGMRRTAVINQIRGLLLERGITLRQGRGHVDAALPGILEDASAMLSGALRMLLAQLKLELDHLQMRIDEADAIIKKVAGENEACRRLVAIPGIGPVTATAIIAAIGNGAAFKKGRGFSAWLGIVPGEYTTGGKQKLLGISKRGNSYLRRLFVQGARAVLQQRAKQSSALSAWLARLTTRTHSNVAAVALANKLARMAWAVLAKNEPYRPPMLVGAATA

SEQ ID NO: 147551 - protein, 380 aa, unidentified
MKEHTTNAPATTIGIDIGDTRSHVTVIDQAGQWQEAATLPTTREAFSRAFSAYGGARIVLEVGTHSPWISRILMQRGFDVVIANPRRVRLIAAADRKNDQVDAEVLARLGRLDPALLAPITHRERQAQQDLVLLRTRDGLVQTRTKLVNMARGHAKALGLRVPSCSADAFHHRAASVLTDQDVPGVSVVLQTIEHLTGSIRELDRQIQALADRRYPETKVLRQIAGVGPLTALCYVLTIEDPTRFSSSRRLGAYLGLTPKQRDSGDRQPQLGISKRGDILLRRLLVGSARYIIGPFGPDSDLRSFGLRLSASGGRAGRSRAAVAVARKLAVLLHRLWLTGEVYQPVGYSAAAGRLTVEPADETFVAPKIECHVASAPAVG

SEQ ID NO: 147552 - protein, 349 aa, unidentified
MKIYAGIDLHSNNAVCGLVDGSGRRLERKKLANELGEIERVLRPHKARLEQVAIEATYNWYWLVDGLQDQGYPVVLANPAAMHQYEGIKHTDDVSDAFFVAELSRLGILPTAHICERKLRPFRDMLRRRMLLVHQRTSLLLSLKSLYARNTGQRLSQGAVKALELEEIEELFQHPADQLIAGEELKVIEQLNQSIARIEKAVEACADKLPCYGRLKTLPGVGRILALTITMETADIRRFASAGEYASYCRCVNTERQSNGKSKGQNNSKCGNKYLAWAFVEATHCARRCDPPCLKFYDRKKARTNTMVATKALACKLSKAAWHIMSKDQDYDAGRVFPFLKENEKQAGT

SEQ ID NO: 147553 - protein, 346 aa, unidentified
MTNSGIDLGRRMSQICILKQDGELIERRIRTERERFAAVFKAHPGARILIEAGTESEWVARCLEDLGHQVIVADPNYAPMYGQIHRRVKTDRRDAQALAEACRLGAYRPAHRTSEAQRHVRWQIAVRETLVRTRARSIVLIGSLLRQAGLHLPGGGAETFLNRLKALNLPEPLHQAIDPLLPVLEMLNRQVATADGALEELARSDPRVRRLDTAPGIGPVTAATFVATVDRTDRFAGPHQLEAYLGLVPREYSSGERQVRGRITKSGNTRLRCLLIEAAWSIVNYPKAETAALRQWTLRIAARRGMPRAVVALARRLAGILFAMMRDETVYDSSRLTSRSRRVQVA

SEQ ID NO: 147554 - protein, 349 aa, unidentified
MRFYTKTHQYYCGIDLHAKTMYVCILNAAGEILVHRNIRTDQQRFLALIEPYREELVVSVECIFTWYWIADVCAREHIAFVLGHALYMKAIHGGKAKNDKLDSHKIALLLKGGMLPQAYTYPAAMRATRDLLRRRLHLARQRAHLIAHIQNTVHQYNLPALGVRLGKPTERGGIADCFPDPVVRRMIQLDLDLIAYYDQQLAQLEWQLVKQARGHDAQMYHLLSSVRGIGKILTLVLLYEIQDIQRFPTCGQFLSYARLVRCAKESAGKVVGKSNKKIGNSYLRWAFGEAAVLFLKGNPEAQHWLEKQASRHGKGKALAILARKLGQTVYAMLTKNRCFDEAKFMAHLQ

SEQ ID NO: 147555 - protein, 377 aa, unidentified
MHSENIAAYIGLDVHKETLAVAIAAPERLGEVRYYGTINNEAQAVRRLFQKLQGLYGNILSCYEAGLCGFGLYHQLTAMNIKCQVIAPSRIPKSPTDRIKNDHRDAISLARLLRAGELTPVWIPDLTHEAMRDLIRARAAAKRDSRVARQRILSMLLRTDKRYAGKHWTGKHRTWLANQSFSQPSQQIAFQHYCQSLEQIEDRILQLDQEISRLLPEWSLCNLVCQLQALKGVGQLTAITLVAELGDFSRFSSPKQLMAFLGLVPGEYSSGNSIRPRGITKVGNSELRRLLYEAAWSYRTPAKVGAWLIYYRPDSVTQYSKDIAWKAQQRLCSRYRSLTAKGKKSQVAITAVARELTGFMWDIALAAQSSFSQQKQN

SEQ ID NO: 147556 - protein, 457 aa, unidentified
MSDSKRSRSQRNLSPVHPAAAAIDIGATIHVAAVGPDRDKEPVRTFQTFTDDLHRLADWFTAYGIKTIVMESTGVYWIPVYEILEQRGFEVLVVNARDAKHVPGRKTDVSDAQWLQRLHEYGLLRASFRPQAEMAGLRAYLRQRERLLDYAAAHIQHMQKALTQMNLQLHHVISDITGVTGMQIIRAIVAGERDPDVLASYRDRRCHASAETVRQALVGNDREEHIFALTQALELYEVYQTKVLACDEKIEAILKRLKQSAAPPINKLPVARHRTRQPNAPAFEVRDALHAILGVDLTQIHGLGPYLALKLVGECGANLAAWPSAKHFTSWLALAPHNKISGGKVLSSRTRRTSNRAASLLRLAAIAVGRTDTALGAFYRRLSARVGKAKAITATARKIAVLFYNSLRHGMAYADPGAGYYEDRYRQRVLSNLQRRAKSLGFVLQQAESGGAQAGVS

SEQ ID NO: 147557 - protein, 449 aa, unidentified
MREPQEIEDEDHEQVLERVAAVDVAKASGMVCTRVPHESKVGRRVTKVWQVDATTNAIIELGEHLAGLGVERVTVESTSDYWRPFFYLLEAAGLGVQLVNAHQVKNVPGRPKTDKLDSVWLAKLTERGMLRPSFVPPAEIRQLRDYTRLRVDLTHERTRYWQRLEKLLEDALIKVSSVASTLDTASTRDMLEALIAGERDPKVLAGLARGKMRAKHAALAEALTGRFDDHHAELARMLLDQIDTLGVQIGTLTTRIQELLAAIPAAQGVDADGSTGPGAGSGADAPVLPAAARLDAVTGIGPGAAQVIIAEVGLDMGQFPSPGQLVSWAKLCPRTIQSGAKTRAGATGKGNPYLRGVLGEAAAAAAKTDTFLGERYRRLVKRRGKLKALVAVARSILVIVWHLLADPAARYHDLGAGYHASRIDKGKKARNHIRQLEALGFTVTLAPAA

SEQ ID NO: 147558 - protein, 316 aa, unidentified
MSRSDVFVGIDVSKGSLDVATYPGIEVTCFANVPEGINALVAHLKVQGPTRVVLEATGGLEAEVAGMLFDAGLPVVVVNARQVRDFARAVGKLAKTDAIDAGVIAHFASAVKPSVRPLPDQQAKELSGLVTRRRQVVEMIGAETNRLATTGGQLKAQVQAHITWLNECLRRLDKDLSEQVRSSPIWCEKDNLLQSVPGVGDALSCCLLAHLPELGKLSHKKIAALVGVAPFNRDSGKFKGRRCVWGGRADVRRVLYMGTLVATRHNPAIQKFYQRLLQAGKPKKLALTACMRKMLTILNAMLKNRTAWQPNYAFSS

SEQ ID NO: 147559 - protein, 360 aa, unidentified
MEYFAGLDVAMEETSICVIDREGKVLLATSVATDPDAIFKALRVYAPKLRRVGHEAGSLSPWLQVELKQRGLPAICLEAWHVRAALSAMRNKTDKADACGVAHIVRTGWFREVHIKSEESYRLRLLLTQRRNLKRKFLDIENSIRHSIKTFGLRLGKVSRGQFEVRVRELVAGDPLIASLTDCMLRARAALWQEYLRLHKVVIAIVRRDELCRRFMRIPGVGPISALAFRTAVDDPRRFRRSKTVGAYFGLTTRRWQSGTSIDVRGRISKAGDGEERHPLYEAANIMLTRYRGFSSLKAWGLKIARKHGHKKACVAVARRLAVIMHAMWRDGTEFRFTAGKESTARAATGCPTKRIAVAA

SEQ ID NO: 147560 - protein, 448 aa, unidentified
MIAAAESQPSPQPEPEWAAFVAIDWADKKHFWRLLAAGSQQQEHGEVEHTPEAVDAWAMQLQVRFGGRPLAVCLEQSRGALVYLLAKYAHLVLFPVHPKTAAQYREAFCPSGAKSDPSDTASLLDLLLRHREKLRGLQPDTIETRLLRILVEGRRLLVHDKTRQKNRLTDCLKMYFPQILQWFDDVESPLVGAVLQAWPTLPELQREPPGTLSQFFHQHNCRNEERLQERIQAIYHAMPATQDVAIVEGEARKAQALVEILAVLRRQIERYDRGIAQVVSAHPEGRLFASLPGAGPVLTSRLIAAFGTRRERFANAYQVQCLSGIAPVTESSGEGRRWVHFRRACPQFLRQTFHEFAAHSIAQSDWARAYYQAQRKNRKSHHAVVRALAYKWIRIIFRCWKDGQPYDEQTYLRSLKRTGSPVIDSFRLDTVGVWKTVAGFQKFSQLNT

SEQ ID NO: 147561 - protein, 389 aa, unidentified
MLLDHPSDEPTAIRTYIAAIFVSLELSRSTWLVTSLSPGKGERMSKHSVAAGNVAELLTLFAELRRKAEVRTGQSYPIITIQEAGLDGFWLHRVLQQEGIESHVVDPASIATPRRRRRAKTDRLDGEALLRALLAYKRGEPRVCAMVVAPSPEEEDRRRLCRERRTLIDERITHVNRIKGLLFAQGICDYGPLRRDRRARLEALRTGDGRELPSHLKAQIGRELDRIELLLDQIKAVEAAQDALLATARKPASEQAAPDPVTMLLALRGVGANFAAVLWSEAFYRQFANRRQVAAYAGLAATPWQSGGIRHEQGVSKAGNPRLRTTMIQLAWLWIRHQPQSALTRWFKLRSPQGRKRAIVALARKLLVALWKYVTQGVVIEGAAMKPAA

SEQ ID NO: 147562 - protein, 345 aa, unidentified
MDQITRIGVDTSKNVFQLHGVDEMEQPALCKKLHRRQVLSFFGRLTPTEIGMEACGAAHYWARALPDMGHEVVLLPPQYVKPYVMRGKNDAADAEAICEAMSRPKMRFVAIKSAEQQAAQMLLGVREALLRRRTQASNQIRGFAAEFGLVAAKGLCQIEALLTELADDTSLPSLAREMFVVLAGQYRHADAQIRELDNKLMALHRNNEQSRRLAEIPTIGPITAAALSVKVTDPKAFRSGRDFAAWIGLTPKDHSTAGKTKLGGITRAGDEMLRYLLVSGATSIINRATHNRGCPSAWLAALLKRKPRKLAAVALANKVARIAWKLMVSGERYNPPSGLTVAATA

SEQ ID NO: 147563 - protein, 343 aa, unidentified
MGEISMIGLDLAKNVFQVHGVDASGAVVVRRQLRRGQVEKFFAQLPACTVGLEACGSAHHWARVIGGYGHQVRLMPPAYVKPYVKRNKNDGRDAEAICEAVNRPTMRFVPVKSVEQQATLAVHTARALLVRQRTMLANSLRAALSELGIVAAQGIKGLRELMVKLEAPNQEIPEMMRGALLMLAQHWQALDVDERALEKQVAKAARGDGEARRLMEVPCVGPIIASVVLAKVPDARVFRSGRDFAAWIGLTGRDHGTGGKHRPGRISKQGDRMLRALLISGASAYLRHQRTRGVSDPWLRDLLGRRPYKVVMVALAAKTARILWAMLVKGEPYRDRASASAAA

SEQ ID NO: 147564 - protein, 322 aa, unidentified
MSVSVLGIDIAKQKFDVALLVDGKTKHKTCKNSTEGFEILMLWLEKQGIQKVHACMEATGSYGEDLAIYLHEAGHIVSIVNPARIKGFAQSELIRTKTDKLDAALIARFCLAMKPSVWIPPSAEIRVLRALVRRVDSLIDMRSQEKNRISTAHESVISLIKEHIAYLDQEIEKIRQQIAGLIEQDPNLKRKKDLLDSIPGIGKATIPHILAELDDLEKFNHVRQLVAFIGLAPKETLSGSSIKGKPRLCKIGHARLRKALYMPALVSIQCNPVMIAFYNRLKDKGKNGKVIVCAIMRKLVHVIFGVLKSGKKYDPNYKPVSA

SEQ ID NO: 147565 - protein, 360 aa, unidentified
MNKMKDFIVRSKKIFIGLEDSKRTWKLSCRSEKMEVHFVSMRADYEVLRNYLRKNYPECQIKIMYEAGFKGFGLHDKLVEDGYECVVTPPNKVTQEKDSRVKTDKVDCRRLAITLENGDYKSCHVPDQELLADRQISRHLVAIQKDITRTKNRIRKFLDFYWVGEGFPAGSWTKSDYNRLMELELEGPLGISLNVFKELLQHLEAIKKQLEQELKAMTKKERYAKLCKIYASAPGIGWFTAIRLVLEWGDDLSRFMDAKHFASYTGLTGSEFSTGDTTRRGHITRQGSRHVMGWLTECAWTAKSRDPVLLEKYMSIVNRDNKKEENKKKAIIAVARKLAVRLWRCAVNGEFYKIGLVETC

SEQ ID NO: 147566 - protein, 370 aa, unidentified
MPKTTPVFVGLDVHKETISVAYAAGGTVEPPQFVGQIGTQQRDIDKLVRRLQTRSSQLVFAYEAGPSGYVLHRHLTGKGLDCRVVAPSLIPKKPGDRVKTDRRDAVELARLLRSGDLTGVYVPSIEDEAIRDVCRARDATRITLKSAKLRLKSFLLRLGFNYVGRADWNAAHRRYLAQVVCPTPAQQIVFQESLRAVDEQVERLARLEEQLLELAPSWRLYPVVEALQALRGVQWIVALTVIAELGDLTRFDNPRQLAAFVGLTPSERSSGASRRQGGITKTGNPRARRVLVEGAWAYRYPAKISAHIQRRIDKLPKVAQDIGWKAQVRLCKRYRRLIARGKHANVVTTAIARELLAFMWAIAKEVPINA

SEQ ID NO: 147567 - protein, 391 aa, unidentified
MQPDGSKHSSFSVPNNRNGAKLIVDRVTSVLQSLDIPQVVIGMEATSVYGDNLMRFFRESGSLGRFDRRLHMLNPKQVKKFRDSYSELPKNDYVDSFVIADHLRFGRINKEVYMDDYKYQALKMYTRARHQTVQDLTREKQRFLNVLFISFSGLAQEKIFSDKFGAASLALIEEFSSLDELAYMNPDELADFIRKHGKNHFENPEGIAEAVQRAAKNSYRPPQVIADTAKQMLAISMNTIRLLQKQVKEYDKAIEMQLQTIPQTLTSVKGIGNVYAAGIIAEIGDINRFPGQASVAKYAGLVWTQHQSGDFDADDKRLVKSGNHHLRYYLCEAANALRRCDPEFKRFYDLKYKEVTKHNHKRALALTARKLVRLVYSLLKTNRLYIPPEEY

SEQ ID NO: 147568 - protein, 421 aa, unidentified
MQPRTSHPDDFAAFVGLDWADAKHDVCLQAAGTDKPEACVLQHKPEAIEAWVSALRQRFQGQPIAIALELDKGPIVAALQRHDCLVLFPINPLTLARYREAFATSRAKDDPSDAQLQLELLLKHRDKLSRLEPQSAEMRALSQLVEDRRTLVNDKVRLLNRLTSALKNYYPQPLEWFSEKDTALFCDFLERWPTLKAVQLARRSTLERFFRAHHVRSAELIDRRLQGINSATPLTTDEGIIMPKRLRVQVLINQLRAVRQGVESIDKAIAEGALSHPDFALFDALPGAGAVFAPRLLVAFGEQRERYADAAALQKYSGIAPVTERSGNACWVHWRYQCPKFLRQTFVEWSGASIQKSFWARAYYEQQRQKGKSHNVAVRGLAFKWIRILFRCWQTRIPYDETAYLNALQRRGSPLIHNLTQ

SEQ ID NO: 147569 - protein, 312 aa, unidentified
MQNDTIGVDVSKDHLDAHRLADGANRRFANDKCGRKAFVKWFGQTPVERVVFEPTGPYHRAFECALGAAAVPFVKVNPRQARRFAEAIGKLAKTDRLDAAMLARMGAMLELTTRPPHSEVLLELKELHLAREALVKDRTAAKNRGKVLAAPLLKRHNAQRLEQIKRQITAIEAAILKRVQADPDLAQRFAILTSIPAVSAITAFALLIEMPELGALEQGQAARLAGLAPVARQSGRWTGRAFIRGGRASVRQAIYMPALVATRFNPDMKAKYRQLIKAGKPTKIALTAVMRKLILLANTLLKANRNWTPKYA

SEQ ID NO: 147570 - protein, 374 aa, unidentified
MDVVFTHGAGLDVHKQSVMACRITPDPTGQQAEGLVEVQEFGTLTVDLLALSDWLAAASITHGAMESTGEYWTPVCNLLEGTGQVFLVHASHVKRVPGRKTDTADARWLAKLMRHGWLPASVMPPAGQRDVRDVTRSRTTLGQERSREVNRVQGGLERAHIKLASVATDMMGVSGRAILAAWVKGRADPATMAELAKRRLRSKIPLLEQALTGLVREHHRRLLAIQWAHIDFLDEHIEALSGEMTRYLTELSAEAVLPAPTAFSPAADRAAEPAVPGVPLTFIRAITLLETIPGVDRRGAERWVAETGIDMARFGTAARLAAWVGVAPGNNERAGKQRSGRTRHGHQPLRTVLTQLAHAAAHTQGPYLSALSHR

SEQ ID NO: 147571 - protein, 606 aa, unidentified
MNAVGIDVSKGKSTVTIRRPGDVVLMPPCDIPHTQSAINALIEQIKSLDGETKVCMEHTGRYYEPVANWLSDADIFVSAVNPILIRDFGDDSLRTPKTDKADSKKIARYALDRWAKLKQYGSMDKTRNQLKTMNRQFGFYMDQKTAMKNNLISLLDQTYPGANDFFDSPARSDGTQKWVDFVYTYWHVDCVRSKSLQAFTEHYQKWCKRNGYNFSVSKAEKIYQSSSDLIAVFPKDDSTKTLIRQAVTMLNTASQTVETLRLKMDQTAATLPEYPVVMAMNGVGPSLGPQLMAEIGDVSRFTHREALTAFAGVDPGKNDSGKRNQKSVRTSKKGSPSLRKTLFQIMDGLIKRSPANDPVYAFMDKKLEQQMGESGEEKDDPFKLKDLKLIFSSKVFWLVALLCVLYYSAIFPFQKYAINMLQCNLGYTAEQAGWVFFVFPLGAAAITPILGNFLDHRGKGATMLIFGALLMIACHLVFALVLPALKGTTAAVIVAYLSIILLGISFSLVPASLWPSVPKLVDNKLLGSAYAVIFWIQNIGLYAFPMIIGAALRISNPGITDPLQYNYTTPMLIFASLGVLALLFGLWLKVEDKKRGYGLELPNIQK

SEQ ID NO: 147572 - protein, 359 aa, unidentified
MDKELYIGVDVSKQTLDLAYYDGESIDWKKAHIKVSNNNAGFKKIGSWVAKVSKGFDIVLFCMEYTGLYTQDFRLWLEEKHYIYRMVEPRKMHRFEPDLDDGLRSLDRIKTDELDSFRIAIYCEQNHRKILRNPSKLPPPVYFKLKRLLAERKQTVKQSVLYKQQLHDICAYDTDLSVERKNGQLKTLNDALKGIDNEIDMYIKEDADISKNFSLLTSIPGIGRVVALETIVLTENFMAIDNPRKYACYIGVAPFKKESGTSVRKGSSVSKKGFKQAKADLSIACLVCMQHIPNIRDYWERKRKEKCSGIVFNAIKFKMILRMFAVIKRGTPYVETDNYRNWKNNLLTHSYLQQMQMAT

SEQ ID NO: 147573 - protein, 327 aa, unidentified
MRYIGIDVSKATFMVAYPLNEKEYKTREFKNTTKGIHEFIRTLEADDHCVMEATGNYSYLLLYLLNQANITTSMENALKVKNFARTMLSVTKTDKADAQLLSLYGERMRPTPFKLPSDSILLLKQKRTAMRQFQKQLHATTNLKKSLEVLPQKDPSTFKSINKIIETLEKQIRKIEEDLIALTHKEFERQMQKLTSIKGVGASLAAAIIISTGGFTYFDNAKQVSRYLGICPTYQQSGTSINVKGHINRNGDSYLRSQLYVASWSMSQHNKECHNLYLRMKEKGKPGKLIMIAVANKVMRQCFAVVKHDTDYVDGFVSQKPQSFNFS

SEQ ID NO: 147574 - protein, 460 aa, unidentified
MQGYLGIDVSKGYADFTLLDENKNGLEESFQLDDTRQGHDCLQKLLQENIKQHHLTALYCAVESTGGYENNWYHSLVQWRSLLPLQVVRLNPFTVKSNTQATLQRNVTDALSSRYIAEYVITHNASVNYIVSHGGYAAYRSLHKHINLLKKQHTQLINQAKNVLYSAFPELLRYCKDSMPVWVLEVLKKYPIVQHIARLKPTTLAKINHVDLKKAETLIAKAKNSVGSRDTETDAFLIKQLATEILEKQYAIEKHKKFLSNQCKGPEIDLATSLIGIGSYSAAAIMIEIEDITRFASPKKLVSYFGVHPELKDSGDKKPTYRMSKKGRPAMRSVLYMCAQSAIVHDPHMKNIYHHHRSKGKTHKQASGVIMQKILRILWGVLTSKVPYHAAVDKENQNKKIVTPKESKSKELKQKRRFQPVDTDAPISARQTKTRKVHLESQVENFEQVRDHQNTPDVNL

SEQ ID NO: 147575 - protein, 342 aa, unidentified
MQQSIFVGLDLGSSHCHQTVINADGTIIRSRSVPTSEQHLRNSFADLQGDIHVHAEASELSDWVRSIINPLVTRFVISHPRSLAWIAKDSVKDDAVDARKLAELLRFNLVHEVYYEDRADRRSFKQLVVHHEQLSREQARLKSKIKARLRTLGIIRKDARLFSEAGQIELFASITDLLIEQMFHQSFAVLNQMLISLMDAKTAMIEFSRRLPEVRLLQTAPGVGVITACRFVAYIQTPQRFSNKQKLWRYARLGITRRESNGKRLSHPHLDPAGCGSLKDVSRKIFEAARRTKTDNSFKRLYEQSLANTKNAVHARLSTQRKILATLRAMWQANQPYRNDGG

SEQ ID NO: 147576 - protein, 483 aa, unidentified
MKSKPEEKNKGATNHPRQHHWDEMNRKQRREMTRKMQSEDLRLEVMHPDAAGIDIGNESHYASVPPSRDSQPVREFGCTTAELKAMAAWLKQCRIRTVAMQSTGVYWVAVYDILEQAGLEVYLVNARDTKNLPGRKSDVQESQWLMKLHTYGLLRNSFRPPQEIRTMRTYWRQRNDLVQSAGRHILRMQKALTQMNLQLANVLTDISGATGQAIIKAILAGERDPHKLAEFRNPRVKASEEQIAQSLEGNWQPDLLFVLKQEHEGYEFCQKQMAECDRQLQHYLQQREDRSQGAPLPEEKRKGRLKKKRANKPQFDLRGGLFRMTGTDLTRIDGIDVLTATTVISEAGYDMSKWKTENHFVSWLRLCPDNRISGNRVIGKGRLPTNNPISIALKMAASTLKESKTYLGAQFRRLRTRQGAPIAIKAMAAKLARLVYRMLRYGMKYVDQGAAFYELRHRELQIKRLKAKAEKLGYRVTPIPVAA

SEQ ID NO: 147577 - protein, 339 aa, unidentified
MRLYAGIDLHSNNNFIGIINEEDQRIFQKRLPNKIETVLQSLEPFRGSLEDIVVESTYNWYWIVDGLQKEGYKVSLANPSAIKQYEGMKHTDDKWDSFWLAHMKRLKILSEGYIYPKEERHVRDALRRRLLFVRHRTSHILSLQSAITRNLGIKMSVMEIKRLNESDAHQLFDDSFLRLTAEEHISVIRFLSDRIKEIEKAVIDHVKIKPEFEVLLTMPGIGNILGLTIMLEVGDIGRFPGVGNYSSYCRTVKSEKISNEKRKGKGNQKNGNRYLAWAYVEAANIAKRYYPEIEQFYNRKKAKRNGIVAIKALSNKLARASYYVMRDQAPYDEKKLFRK

SEQ ID NO: 147578 - protein, 446 aa, unidentified
MKKRIYRRMPVNDFQPQTISHADLGGKLVFAIDVAKVDMVAAVAGADGHVLHTICWKAPEQNPTVLSILRSFRTAGVTVEAVMEPSGTYGDVLRHQLEQDAFPVFMVSGKRTHDAKEIFDGVPSLHDAKAAAIIARLHADGLSTRLRDEGPDRRQLRAALAIMDLYQERYLQLVHRLESWLARHWPELPTLLELTSSSLMALLARIGGPADVAAHPDQATKLLLGISHRLLPDDKVAAVVASAGASVGLPLVGLERDALMAIAEDAYRAHRAFTAAKTKVDQLAAATPAATLAPVVGHTTAAAVFAEVGDARSFPCTRAFLKAMGLNLKEKSSGTVQGQIKITKRGPSRVRQYLWLAVFRWIQDDPIANAWYQRKKQRDGGRASRAAVALMRKLAKGLYHVGRGGSFDSSKLFDTRRLQVGDVARSFVGKGAKPSPLMLNAQISEG

SEQ ID NO: 147579 - protein, 335 aa, unidentified
MHYLYYVGLDVSKEIFDASLVAFEDANEMAHRKFANSRKGICSCLHWVEKRHGIRLDDVIFCAEDMGSYISEMAVCASDRTLNFNFSLISPLVIKYSMGIARGKTDRVDARRIAEYVITHYRKIALYLPAEKELCQLRTWLILRAHLAKQRVAKLVLLEKLDYKEKFADVSIQRSMLQEEIAYAETHMKTIEREMKELIAADSNICRNYKLLTSIKGVGPITAIVMLCSTLNFTKITDHRKFACYCGLAPFEHSSGTSVREGCHTSSTANRDIKVQLNRSALIAIRCDPQLKAYYERKVAEGKHKFSVLNAVRAKIAARCFAVVRRGTPYVALQI

SEQ ID NO: 147580 - protein, 325 aa, unidentified
MIKTMQTSNTVVYAGVDVAKATLQLHLQGQQSEFSNTPKGLHQLCAQLQKVPSVHVVCEATGGYERALVKALHQEQLPVSVTNPARVRAAAQAQGQRAKTDQIDARGLTDYGQRYQPEPTPPTSATQDQLVALTQWLKQLIHGRALAKTQTEHHHDPFVRRQHAKLMTHLQSQIQAVEKQIKALIEQDAALQERVKCLDEIQGVGLRTAWMVLAHMPELGRLNRQEVAALAGLAPWTRESGTMKGMRCIGGGRPEVRLALYMAALSAARCNPILRTLYKHLRAKGKLPKVALTAVMRRLLTYMNHCIKALPSETATVRAKELKTA

SEQ ID NO: 147581 - protein, 353 aa, unidentified
MRTGLFSHHWFVGIDLHKDTMTICVYCRCCGEFSFRKMACKNRAQIVEFFRALPRPHVVAIEAVGFYRWLWELLEPIVEKLVLADATQARALAGRRLKTDREDAFNVAELLAADRLPLAYAPPREVQILRDWTRQRNRLSRSHARSLHGIKSIMNTNNRPGPARLTAERLTGYLRAYGSRLPERHTRMLWQHQRQLSLLEEEIDICQREIDRLLLAPPFATMAALLATAPGVGPVVSATVLAEVGDFSRFPDGKAIGRYAGLAPRVYASGGKQRLGHISKTGPSDLRWALQQAAWTAIRCDSEIKRRWLKISRSSGKKAAAVAIARQLLVAMWQMARRQSRYQPRREAEQQAA

SEQ ID NO: 147582 - protein, 320 aa, unidentified
MKSTRCFVGVDVSKADLEIGVLPESRAWKVSNDGSGIQQLIDNLVTLSPSVIVIEATGGYETLVASSLAMAQLPVVVINPRHVRSFAKAIGILAKTDRIDCLVLAQYGKSVNPEPRPLKDEQAQELTAMLGRRKQLVEMLTMEKNRIDKATNGVLEYIHAHIFWLESQLQEVDKDLHDSIKNSPVWREKDKIIRSVPGAGPVLSVTLISELPELGILNRRQIAALVGVAPLNCDSGKHKGYRRVWGGRSLIRSILYMATLSAVRYNPVIRSFYKRLIAAGKKAKVSLTACMRKLLTIINSMVRNGSFWDQNYFLETQKIN

SEQ ID NO: 147583 - protein, 456 aa, unidentified
MTQKRSKPKIDRTMPMVHPNAAAIDVGATMHTAAVRADWTPEPVRSFGTFTTDLHRLVNWFKECGVETVVMESTSVYWIPIFELLDARGFSVFLVNARDAKHVPGRKTDVSDAQWLQRLHSYGLLRASFRPKGQIAELRAYVRQRERLLEYAASHIQHMQKALTEMNLQLHHVVADITGTTGMRIIRAILAGEHDPKVLARLRHYSCHSSIETIEKALTGSYRAEHLFALEQALTLYDAYHEKVSACDVRIEAVLKELSVRRGRQSGSLPSSHRRTDQANGLAFDARAALFSLLGKDITQIDGLGPYLSLKLIAECGDDLSAWPSAKHFTSWLCLAPSNKISGGKVLSSRTRRGSRAAALLRLAAVTVGRTDTALGAFYRRLSARIGKAKAVTATARKIAVLFYNAIRHGMGYVDPGSSFYETRYRKRVVDNLRRRAKSFGFVLQPFEPTPGVPVS

SEQ ID NO: 147584 - protein, 342 aa, unidentified
MDHYAGIDVSSECSSLCVVDANGKIVREGKVASVPEALINWFGSLGYELSRIGLEAGPLSQWLHGGMKQAGLAVELLETRHVRDAFKAMPVKSDRNDARGIAQLMRLGWFRPVHCKSIVAQETRAVLTARKLVQSKLQDVENHLRGILRGFGLKVGKATNLSFAARIRELVANHASLEMIAEALLSVHAVLLREFKAFEKQVRSMARHDAKARLLMSTPAVGPIVALTYASAIDDPGRFKSSKRVGPHFGLTPKKYQSGQTDYTGRISKIGDASVRTALYEAAHIMLIKPIKGCSQLKSWAMRIARRSGMKKAKVALARKLAVILHRMLANGTSFNAAAAAA

SEQ ID NO: 147585 - protein, 354 aa, unidentified
MSQKLSAAIAVIGIDIGKNSFHIVGHDQRGAIVLRQKWSRGQVETWFANLPPCLIGMEACVGAHHLSRKLQIFGHDARLMPAKYVRPYSKGQKNDFRDAEAICEAVQRPTMRFVATKTADQLDLQALHRVRDRLVGQRTGVINQIRAFLLERGIAVRQGPHSLRSELPNILATRTDVLSPRMFRIIEALAGDWRRLDERIDGLSSEIETLADHDQACERLMTVPGIGPIISSAMVAAIGTGDVFSKGRDFGAWLGLVPKQISTGDRTILGKISRRGNRYLRALFVQAAWVVLVRVKRWERYGLKSWIEAAKKRLHHNVLAIALANKLARIAWAVLNKGRAFECVKTEEMASGPA

SEQ ID NO: 147586 - protein, 320 aa, unidentified
MRNAVGLDISKLTFDATAIVGNAEYSAKFDNDSKGLDQFSDRLKSLGCQNLHICMEATGNYYEEVADYFAQYYSVYVVNPLKISKYAESRFKRTKTDKQDAKLIAQYCRSAQESELVKRQKPTDEQYRLSRMTAAYAQIKSECAAMKNRHHAAKDEEAAKAYAQIIKAMNEQLEVLKEKIKEQTEKPNCKEGVKRLETIPAIGRMTAAVLFHHLTSSKFETSNKFAAFAGLSPQQKESGTSVRGKGKLTKFGNRKLRAVLFMLTMVAYRIRAFPDFIKRLEEKKKPKKVIIAALMRKLAVIAYHVHKKGGDYDPSRYKSA

SEQ ID NO: 147587 - protein, 411 aa, unidentified
MLKIVYQVCCGMDVHKSFLVACIASTDRQGVTTYKSKRFSTFTGDLRRCAVWLSENDCKDVCMESTGKYWIPIYNILEPTCKIVLAHPKYVKAIRGKKTDKKDAKWIADIFKHDLVSGSFIPPADIRQLRDLVRYRWKLTNFTTGEKNRAQNCLTVSNIKLDDVFSDVFGKAASAITGRLLENNKPFDVTPYLTKGLKTPVEKIQAAVDGEMCAEQAEKLRIIRSHMDNLQLCKLNLESLILSVAEKYLPQLNIVSTVPGIQSFSAIAVISEIGVDMSVFPTSKHLCSWAGLSPQNNESAGKKKTTRINRAGTYIKPLLVQCANAVVTSKKHPEIRNRYLALKRRRGHKKAIIAIARMLLTVIYNILKKNEPYNPELYRKSDLPPAHREVSVAEAVFILQRQSYIVSAPIP

SEQ ID NO: 147588 - protein, 417 aa, unidentified
MSYKIAGIDVHKRVLMVVVIDASTPEEKPERRRFTTMPSDLHRLSIWLREHRVEEAVMESTAQYWRTVWLELEPYLRLQLAQAFSNRAPRGRKHDFKDAERLVRRLIADELILSFVPGEEQRTWRNLTRMKTQLNRDRVRLQNQMECLLEEMRIKLSMVVSDLLGASGVRILRALAQGESDSKKLALLGDNQLKCSEEQLVDALTGRPQPMHREMLRLQLERLQLIDRQIKELNALIAQAMKPHQEAVIRLAEVPGLGVDSAQPVIAEVGVQANTFPSAAELTSWVGTCPGKDESAEDNHSSRSAKGNKYLRRVLNQSAHAAVKKKGSHFQAVFRRLLPRLGYKSAIWAIAHRLCRLIWKILHEGVRYIERGSESDPKLREHRARTLARALRKLGYDVAITPINPSTAQKAMQTYGV

SEQ ID NO: 147589 - protein, 427 aa, unidentified
MKHIPIAGIDVGKRFSEMAVLSPDNIVVSRFKIFHDDSSNIDKAIELLHKAEKDFASRPVVVMESTGHYHKILFHSLCKAGFDVCIINPIQTDSIKNLGIRKVKNDKVDARRIALLYRFQELKSTNIPNEDIECLRSLCRQYFNLCDELTAYKNRLIGVIDQIMLNFTDVFKDVCSQTALAILEKYPTPKHILKADGAELIELIQKNSRKNVTWATKKYNLLISKAKDFEALSIDSPANMAMLDVNISMIKSLSKSQEKVIVAIHQLLDEDASKDLPLISMTIALLCSIPGIGLITATTVLAEIGDFSAFSKPDKLVAFFGIDPSVKQSGQFEGTKNKMSKRGSRLLRRVLFTTALANVRKKRNGNELNPVLYDFYRKKTVNKAKKVALGAVMHKLVFIIFAVLRDKIPFELRKPEEHAKTLNKMAL

SEQ ID NO: 147590 - protein, 336 aa, unidentified
MSVVRIGLDIAKSVFQLHGVDARGKAVLTKKLSRSEVLTYFANLPPCLVGIEACAGSHYWARELIKLGHDARLMAAEFVIPYRMSGKNDANDAVAICEAVGRPKMRFVAVKSEEAQAVLGVHRARALTVSERTALVNQVRGLLAEFGIVTGTGIAQARRLLGEIGAGARQLPALARETLGELHDRLRDLDARILAYDRKITYLASESEPARRLMKIEGVGPVTATAIVASVGNARAFDSGRQFAAWLGLTPRQYSSGGKTVLGPITKRGDVTLRTLLIHGTRAVLRLTSERTDRKSRWVEALKARSCANVAAVALAAKNAHIIWAMLTRGTEYRAA

SEQ ID NO: 147591 - protein, 334 aa, unidentified
MNYIGMDIHKQFTVAVAKDKDGNLLAEEKFDNHKCNFEKFLEGFNPEETKIVIESTSVWEYIYDMLEEMKYDIKLSNPIKTRAIAEARIKTDSIDASTLCDLLRANLIAESYIPAKEIRNLRNIMRQRKAIVKGRTQIKNKIHAVLLMNGIKLPYKTLGKTAMKWIIDEINQTSIKSILVSYINLLEQYDFELEKLEERIIEIAIHNNEAKLLTTIYGIASVRALEIVSEIGEIKRFESSEKLCSYAGLVPRIRQSGNKIVFGRLVKQSSKNLKHVFVETSWNLIRPKENNKFREFYLKLSKKKGKQKAICAVARKLCCTVYAMLIKNQEFMLL

SEQ ID NO: 147592 - protein, 371 aa, unidentified
MIYIGIDIAKRKFDYCIIDSELNKIKTGIIINNYDGFKQFLSIVNSYDNIRMGMESTNIYHVNLYSYLIENSYNPILGNPIETKLLKSSRIRKNKTDRIDSEAIARYIIIYKNNTISMENQYDDLKEYINTYIRISRKITAVKNQLIRDMDLLYPGLSSTVNIDSGYFTDTINNIDDIINNKFRIKHISMEKYDEIRNIIIKGNNSNNAVKYDIKINIEAIELLNRQLNNTRKIIEEEYNKIDSRIKTIPGMGTITGSIMLSSIGDINRFDSIVKLRAYAGMDPMTRQSGDYNITSHISKRGNPLMRYALYLSTVSAIRFNPVIRRYYNYKKDNGMSGNKLIVACSNKLLNIIYSVMKNNVDFKDPEELVN

SEQ ID NO: 147593 - protein, 410 aa, unidentified
MEVIVERPAALDVHKAQVSACVRVPGQDGRVEAVQEFKTTVRGLLVLRDWLKAHKVTQVTMEATGVYWKPVWHVLEDDFELLLVNARHVKQVPGRKTDVADAQWLCRLAEAGLLRSSFVPPKPIRELRQLTRYRKAQIAERQREANRLHKALEDTGIKLDCVASDILGVSGRAMLDALVSGTTDPVVLAELSKGRLRVKIHELTEALEGRFEDLHSLLIGSILAHLDFLDTQIEALSEAIEAKLAPFATGAVELLCTIPGVGERTAQNVIAEIGTDMSVFPTAGHLASWAGQCPGNDQSAGKRRSGRTRKGSKWLNLALKEAAMGAIRTNDSYLQALYRRKKSQGGHNKAIGAVKHSMICAIWHMLQTGEIYTDLGPDHLARRNPQRQAKRLLAQLERLGHTVTLQEVAA

SEQ ID NO: 147594 - protein, 424 aa, unidentified
MRFIGLDVHRDFCEVAIAEAGVVRLAGRVQTEPAALELFAQSLGGDDEVALEATGNALEIARIIEPHVGRVVLANPKAVKGITRAGAKTDKIDARTLAQLLAGGFLPAVWLPDEQTRILRRRISARAQLVRQRTRAKNQVHATLIRNLKGRPPVSDLFGARGRRWLAAQDLPADEQETVAACLRQIEFLDSEIALIDRALAEQVLASAEMRRLLTLPGVNFVTAAALMAAIGDIRRFPTARQLVSYLGLDPRVHQSGTEPARHGRISKQGRGETRHMLVEAAWHATRAPGPLRAFHQRVAVRRGGNIATVAVARKLAVIAWHMLSRGEDYAFARPSLTREKLRRLELMTGAKHQKGKRIGVFATKEQHRLDKELAAQAELAYRRLVQDWQPAINKGAGAAPGRASRRPSSGQAARQETAPPPAL

SEQ ID NO: 147595 - protein, 402 aa, unidentified
MNAVGIDVSKGKSMVAIMRPFGEIVSTPFEIKHTSSDINSLVKLIKSIEGESRIVMEHTGRYYEVLAHQLSEANLFVSAINPKLIKDFDNDSLRIVKTDKADSVKIARYALDKWQNLKQYSVMDELRNQLKTMNRQFGFYMKHKTAMKNNLIGILDQTYPGVNTYFDSPARSDGSQKWVDFASTYWHVDCVRKMSINAFIDHYENWCKRKKYNFSKSKAEEIYGKAKELVPVLPKDDITKLIIKQAVDQLNSASITVESLRTLMNETASKLPEYPVVMAMKGVGTSLGPQLMAEIGDVSRFTHKGAITAFAGVDPGVNESGSYEQKSVPTSKRGSSDLRKTLFQVMDVLIKTHPQDDPVYQFLDKKRAQKKPYYVYMTAGANKFLRIYYGRVKEYLASLPKS

SEQ ID NO: 147596 - protein, 334 aa, unidentified
MSIVSTVGIDLAKNGFSVHGVDAGGVVMIRRTVSRAKLAQLIAQLPPCLIGMEACSGAHEWARRFAAFGHSVKLMAAKFVAPYRKGGKNDGNDAEAICEAVARPNMRFVPIKSIEQQADLTLHRVRQGFVEERTAMLNRIRGLLAEFGHVLPLRAAEVRRRVPELFEKLPTRVASCVRDLLEHAMRLEAKALEYEREIRAHVRTNALAQRAQTRLGIGPITASALVATVGNAHDFKNGRQFAAWLGLVPRQYSTGGKTRLGHITKRGDPYLRTLLVMGARAVLQGALRLNDPLSRWALALQQRRGYHRACIAIAAKNARIAWALLAKDTVIAAA

SEQ ID NO: 147597 - protein, 407 aa, unidentified
MRCVEAGAVNDGYGVYLGLDVGKEGHHAVGLAPDGKRLHDAALPNAEARLRQLFDKLARHGRVLVVVDQPASIGALPVAVARACGHQVAYLPGLAMRRIADLHPGTAKTDARDAYVIADAARTLPHTLRRVDVGDEALAELEVLVGFDDDLAGEATRVSNRIRGLLTQIHPALERVLGPRVHHKAVLELLSRCGGPVGLRKAGRRKLLSIAAVHAPRMGERLVEQIMTALDEQTVTVPGTQAAETILPRLADSLRDILRQRDQVAGEVERILDAHPLAPVLTSMPGIGVRTAARILLEVGDGTAFPTPGHLAAYAGLAPVTRRSGSSIRGEHPPRGGNKNLKRAFFLAAFASLADPTSRAYYDRKRAEGKRHNAALICLARRRCDVLYAMLRDKIPYQPRPTSPVPA

SEQ ID NO: 147598 - protein, 402 aa, unidentified
MNAVGIDVSKGKIMVAIMRPFGEIVSTPFEIKHTASDIHSLIELINSVEGESRIVMEHTGRYYEVLAHQLSEANLFVSAINPKLIKDFDNDSLRKVKSDKADAVKIARYALDKWQNLKQYNVMDELRNQLKTMNRQFGFYIKHKTAMKNNLIGILDQTYPGVNTYFDSPARSDGSQKWVDFASTYWHVDCVRKMSLNAFIDHYQNWCKRKKYNFSQSKAEEIYGKAKELVPVLPKDAITKLIIKQAVDQLNSASTTVESLRTLMNETASKLPEYPVVMAMKGVGTSLGPQLMAEIGNVSRFTHKSAITAFAGVDPGVNESGTYEQKSVPTSKRGSADLRKTLFQVMDVLIKTHPQDDPVYQFLDKKRAQGKPYYVYMTAGANKFLRIYYGRVKEYLASLPES

SEQ ID NO: 147599 - protein, 370 aa, unidentified
MQTVRSFVGMDVHKETISISVAEDGRNGPVRFIGVIPNQPDDIAKMAKRLSKHGDLDFCYEAGGCGYNIYRQLTALGHSCTVAATSLIPRKPGERIKTDRRDSQKLAILHRSGDLTKVWVPDATHEALRDLVRARVDASMHLMRARQQLLAFLLRHGRSYPTGKHWTQRHRSWLAGQTFQQEVHRIVFQDYVETVWTAQERRDALIERIGAMTASWSLGPLVEALRGLRGIDLLSAATFICTTGDLSRFESPRMLMGYLGLVPSEHSSGGSVRRGGITKTGNREARRMLIEAAWSYRYPARVAKEKAEILVRLPKNIRDIAWKAQTRLCARYRTMIARGKKPTVVVTALARELAGFIWAIGQEMRTPMTT

SEQ ID NO: 147600 - protein, 319 aa, unidentified
MEAPQVTFKQVVSRGCGLDVHKKVVVATIDGEGIKKQTQEFSTVTSSLKEMRDWLLEHKVTHVAMESTGVFWKPVYNILEPSGLTVWIVNAAHVKYVPGHKTDKKDSAWLCKLLLAGLLKPSYIPAKEQRELRDLTRYRTTLIQSNASNKNRIIRILEDANIKLSSVLSSTSGAVGTKLINKLCDGMEVTMQDIDEVYHKKLEATKEELYEACQGFITEHHVYMLQLIRKEINDTEQTIDSLNKRIKEVLSSYENALELLKKVPGISAKSVEDLVAEIGLDMSVFPTEKHLASWAGMAPGNNESAGKKKADEQPRETSR

SEQ ID NO: 147601 - protein, 437 aa, unidentified
MTYVGVDWSDSFHIVYVTDETGDSLATFKIEHTPEGVESLFLKVKEHAKDPASVLFALETPKGLLSSAILDAGFTLYPINPKAVDRYRDRYKVSGKKDDYFDAMVLANILRTDRQNHRALVPDSLLTRELRAYTEGYQALIKTQTRLTNQITSCLKNYYPVALGIFGKIDQSITLNFLSKFPTPDSFHRGSKAKIENLLKNNRYPGAREKMLEIYALSKKPQFEIEEPIARANSLLLLSLVRQMKEALSSLKEFELKIAELLEQHPDKEVFSSLPGAGNITTAKLISNFGDNRERYGKVSCLQADAGTCPVTIGSGKSLRVSFRYSCRKPFRSTITQFAFSSLQKSEWAKQRYDKYRQNNSKDHNLALRCLANAWLEIIFPMWRDRKPYDVEKHLIGIFKEQGIFSKDVKAPVFVSKPMIARNYRGSPPQVNLLGLT

SEQ ID NO: 147602 - protein, 393 aa, unidentified
MPRKRILVKSIDTSISYQVIGIDLAKHLVSACLITGAGEIFGIDRLTYDDLLKSAERMSPTLFCMEPCPEVHYLAEKLQGYGDHTKVIDGAAVKEYIKTHFGGQKTDLNDAQAIAFLSLDTNLPEITPKNTSNSVLSSIQAVREQFRKEYIQSFVSLKGICQRWGLPISKGVMNKNKVEELVSESKKIPQEVKDWLLELLQSCRELQKRLNKISKYLKEYADNDEICQKIMSVPGIGLITATRLKATIGDIQRFEKPKSIVAYYGLVPKSKATGHNEKKGGITRRGDRVARSLLIEGAGVVLNLAAKGFLRSKPLNKWIEKKRKLKMPWGKLCCALAAKMLRIVRAILIQGTSFNAKIAGVARCSLPKESRNNVMGNNKLSEIPSPNGSVYIH

SEQ ID NO: 147603 - protein, 322 aa, unidentified
MFTERTSVGLDVHARSVVAHALDVQTGEIFKARLCPDPAEVTGWIKALPGPAAVIYEAGPTGYGLARTLLASDIRTVVAAPSKLQRPSGSRVKTDAIDAEHLSMLMRLDAFMAVTVPDELTEAARDLIRAREDCRGDLMRARHRLPKLLLRHGIVYSGGQAWSNAHDAWLRRQRFDSLLLQAAFDEAYDNVITITARRDRLDDRIQTMAADGPYTDAVRRLGCLRGISTLTGVGLAVEIGDWTRFTSNSIGSFVGLVPSENSSGQSRSLGPITKTGNGHALRLLVEAAWHHQHRYVAGKTIRGRWDLVSPAARARETWATAG

SEQ ID NO: 147604 - protein, 345 aa, unidentified
MGENSTTMHIRTIGLDLAKSVFQVHAVDAAGTVLVRRTLRRSGVIGWFAKLPPCLVGMEACATAHYWARELTKLGHEVRLIPPAYAKAYVRRNKNDAADAAAICEAVGRPQMRFVAAKSEAQQAAAGIHRVRDLLVRQRTMLINQLRGLMAEFGVVAPKGAWRARALVEIVADGKDGRLPAALREALAANVEVLATIEERLADIDRQILAAGRRDATWRHLVTAPGYGTIVASAFCAIVVDPRAFRRADDFAASIGLVPRPDGTGGKVKLGPISKRGNRYLRRLLVSGAMAVLMSPAAKTDPWIANLLATKPRKVAAVALPQTMARIGLALAMPPQHFPPRPVPD

SEQ ID NO: 147605 - protein, 426 aa, unidentified
MKVVFPTCCGVDVHKTFVVATIITTPADSLQPHYQKKRFSTFNSDLNRFADWLLEHNCLDVCMESTGKYWIPVFNILEPHMHVILTHPKYVKAIKGKKTDKRDAKWIANLFRFDIVKASFIPPADIRALRELSRYRLKLSYMRSAEKNRYQNSMTISRIRIDCVLTDPFGKTASSIMNYLLSDVPFDEKECAKLIHGGIKVSNEEIFDSIRGFEILSEQRFKMSHAKQHMELLSSYMDEIETELFRLSRPYDEVIKRISRIAGFTERSALFVISEIGADMGVFESDKHLCSWAGLTPANNESANKKKSTRCSKAGQYLKPLLIQCALAAVKSRKNPYYAIKYNRLAKRRGRKKAIIAIARMMLTSIYHMILNNEEWKPDDYEAIIHPSKPEKVALTLDNVIQFLGEQGADPETLKLLQQQCAVHSG

SEQ ID NO: 147606 - protein, 383 aa, unidentified
MIVIGADTHKGSHALAAVDDGTGKVRGHREITADDAGHLAAVRWARGLDDDRVWAIEDCRHVSQRLEQALIAAGERVVRVPPQRMGASRKGERERGKSDEIDALAVARAVVKDGIEAFPAAYLDQQAMEIRLISDHRNDLVADRTRVVNRLRWHLLVLSPELESSLKRGAFNHARVLDRVDRRLRKLPASARVRITREQIGQLRDLNRQIDQLHRELSELVAAHHPDLLAEQGCGALTAAILIGHTAGNQQFRKEASFAMKTGTPPVPCSSGQRTQHRLNRGGDRQLNHALHIIAITRAQRDPATKEYLARKEAEGKTSKGALRSLKRHLARRFHKLLAEPPSEPQLAGSERKLPEIPPRPAPRQPVDPTITGQAPFPMVCIS

SEQ ID NO: 147607 - protein, 385 aa, unidentified
MQKLNDLSRSLAVLEPDVTLIAVIEMSLSSWLVAGIVPGVERQPLKKLAVDESALLKLLYRWREEAEKKGRRIERIAVAFETGRDGFWLARWLRARGIEAHVIHASSVAVSREHRRAKTDRLDTELLKRVFLGWLRGERDHCKMVAIPTIKGEDAKRPHREREGLVREQTRIVNRMKAALIRLGIRGFNPKLKKAAGRLEDLRTPEDEPIPPNTLAELRRDMERRQLIRDQIRQIEDARLERIERAPSDRPHAMVRLLARVIGIGIETADMLVQEVLSRTMRDRRAVARYAGLTGAPDESGAKRREKGLSRSGNDRVRRGMIQLAWRFLMFQKGSALAQWFRARTENSRGTRKTMIVALARKLLIALWRLVTTGEVPAGVVMRAA

SEQ ID NO: 147608 - protein, 406 aa, unidentified
MELKPIYQRVIGLDVHQAKISACALAQQPDGSVLVEQREFGGFKRDRRALAQWAREFGAEVVVMESTGIYWKSPYAALESVGIAAWVVNARHVKTVPGRKTDVADAQWLATLARSGLLRGSFIPEAHVRHLRLIARQRQKLGGILASEKNRLHKVLCDAGIRLGVVISDVHGQAGRAMIKALIAGKSLPEVLDLAGRVRDTRETLFDALQPEELSEMHRFVLLETMDHIEELEARMDRFEQALLRGLSAWQTELTLLQTIPGIDIMGAAMLLVEISTDMQSFGSAERLASWVGICPGNNESAGKRKSGKTRKGNAWVRRLLCEFAQAASRSRCALKDKFAALSIRKGHKKSIVALAHKILRIVFAVIKNKTPYLDKVVDYEALSVQRNAPRWLKMLIKHGYMPAPA

SEQ ID NO: 147609 - protein, 372 aa, unidentified
MKNISIFVGLDVHKESVDIALVEGDRNSAVRYYGTIGGDLADLDKAVKKIKKAHPDATLHFVYEAGPCGYGIYRYLTKAGHECMVVAPSMIPKRSGNRIKTDRRDSIMLASLHRAGELMPVFVPREDDEAMRDLVRARQDAVKAGRVAKQQLKGFLLRHGIKFAGKGDWKQTHVTWLAGLTMQIPAQQIVLQEYINTVKDCTERIARLTTQIQEVLPSWELAPVVKALQAMRGVSLQVAVTTVAELGDLKRFDNPRKLMSYLGLVPSEHSSGGSRRTGSITKAGNGHVRKALVEAAQTYRLKARIGKELLARQEGLPKQICDIAWKAQVRLCGRFRKMEARGKKHQTIICAIAREICAFMWAIAREVKPTTA

SEQ ID NO: 147610 - protein, 410 aa, unidentified
MTMIAITQNTPVLVAIDIAKARHEVLIAVPGKKRRRRLTVLNELADFTRLITALKDYGRPVRAAFEATGNYHRALAYHLATAGFEVKLVSSVALARTREALHNSWDKNDPKDAQVILHMMEIGNEQFYHDPLVRGTNDIQELSKTHDIVSKSKTELWHRILTHYLPLYFPEADRFHRSSRSDWFFAFLERYPSPHFISAMSKDAFTADAWDVVGRKVAKERLLADIYETSKVSVGLPVALDSDAISMFRLVLGEGRSLIAQRNQIEARAVALLKDLPDYQLLTSIPGIGPINALTILAEAGDLRRFGHHRQFLKFCGMDLATVQSGTFRGQTKLSKYGNARLRRTLWMAGQVAILQRTNSFRDKFERYISKDRQNTHLRRKAYTAIAAKMARTVHGIIKNGEPYRPFFEG

SEQ ID NO: 147611 - protein, 336 aa, unidentified
MRELLFVYIGVDVSKGTLCVDAGGAFRGVVPNTPDGIRKTLAAVKRKLGRGRAPHVCLEATGPYGEALLAVCRSWGFPCSVLNPAKVRHYAKAMSESAKTDPIDARVIREFAEAKHPAADRVPGGAETLLRQLMTAREALTKSAVQLEGVLDSMTCASARKAVTLAVGCIRRKIKALEDGMAAALKADRRLQGLAAELANIDGVGPLSAAKIVALVPELGSLGRRDAASIAGLAPFRRDSGKFSGKAFISGGRASVRRALYMPALVAVRHNPTLKAFHQRLIGQGKPFKVAITAVMRKLFIHMDGTAHKWLAAHGGTGEGVSPQPLPLLPSFPRTP

SEQ ID NO: 147612 - protein, 376 aa, unidentified
MKRVKFVGLDVHAETIAVAVAEQGEEVRFLGVLPNREEPVRKLVKKLGPLEQLRFCYEAGPTGYALYWQLTALGAKCEVIAPTLVPVKAGERVKTDRRDALKLARSYRAGDLTPVWVPDAAHEALRDLVRTREAAKKDQLRARHRLSKFLLRTGRRPPMRVQLWTLRYMEWVKREVHFEQPAQEVTLLDYVHEVDHAAARIERLDLAITEAVKSAPPKMRRVIEALQALRGIAQVSAVTIVSELGEISRFPGARQLMGYGGIVASEHSSGEGTRRGGITKTGNAHLRRVVIEAAWAYRHRPGIGKTLRKRQEVVSEEVREIAWKAQHRLHARYRKLAARGKNHGQVVTAMGRELLGFIWAIGNKVEAKKDALRPAA

SEQ ID NO: 147613 - protein, 390 aa, unidentified
MRAGASLAQHRGLPSRALFGSAYMCEEAPVFTERTSVGLDVHARSVVAAAIDGDTGEVFRKRLTSVSDDVIGWVRSLPGPVAVAYEAGPTGFGLSRAFTTAGIRCEVAAPSKLQRPAGDRVKTDARDAMHLAKLLRLDEIVSVTVPSVQREAARDLVRAREDVRGDLMRSRHRVSKLLLRQGIVYYGGQAWTGTHLRWLRQQHFDAPGLQLAFDAEHEAVLAAEARRDRLDAAIEAMAADSEYTPVVHRLGCLRGIATLTAFGLAVEVGDWDRLTGSSIGAYLGLVPTESSSGQSRSQGSITKTGNTHARRLLVEAGWQHLKPYRTPGATMRARWELAPAAARARGHAGNQRLHQRWLHFNERRKAPVIANVAIARELAGWCWSLAVMDD

SEQ ID NO: 147614 - protein, 403 aa, unidentified
MVFLGIDWAEAHHDVCLLDEQGKLLGKRRVVDGLEGVRQLHELVAEQAPEPEQVVVGIETDRGLLVQSLVATGYQVYAINPLAVSRYRERHSTSGAKSDPADAKLLADLVRTDRHNHRPLSVDSELAEAVKVLARTHQNLIWSRQRQLNQLRSLLREFYPAALEAFAGDLASADAIAVLERAPTPHQGRSISQGQLVSALRKAGRERNLVVKAAQIQACLRRPQLEAAARLTQAYGCSVTALVRLVRQLNQELASLEQELSASFELHPDAEIYLSLPGLGKVLGARVMAEFGDDRTRFQNPKARKNFAGTSPITKASGKHKAVLRRFACNHRLLDACYFWAFASLRRSPGAKDYYRRLRARRQSHKQALRALANRLVGILDGCLRHCQLYREKVAWPLLEAAA

SEQ ID NO: 147615 - protein, 441 aa, unidentified
MAMRVSKVLNIQYPNAAGIDIGSRSHFVAVPADRATESVREFGCYTEDLNALALWLLDCGITIAALESTGVYWIPVFEVLEAHGIQVMLVNARSVKNVSGRKSDVLDCQWLQQLMSFGLLSSAFRPPADVCALRAVSRQRDTLLQDQARCVQRMQKALTQMNLQLTNVITDITGQTGLNIIRAIVAGERNPIELAKHRNYRIKASEVEIAKSLEGTWKAEHLFCLSQALSLYDTYRALIAEADAKLETLIAPLRRQDVQTAKGKTKRGGKNAPGFDVQEALREWAGVDLTQIGGIDVCTALKVLVELGTDLSKFKTAKHFCSWLGLCPGTRISGGKRLSVASKRIPNRVARALKLAAQGLHRSQCGLGAYYRKTAARLGKGKAITATAHKLARLIYAMLTKGTEYVQQSQAEYEAKFHDRTLKYLQLKAKTLGFDLVPQAV

SEQ ID NO: 147616 - protein, 352 aa, unidentified
MEQFIGCDAHKKFSVFVAVNEKGQAGEALRVAHDRQLYREFLARLPAHSTIAVEASGSYSWLVDEMERSGHRPKLCNPLEAKRRMGLTNKTDTLDARGLAILLRNGTLPEVWIPPSELRDQRELLRLRIFLVRLRTRVKNRIHGTLSRHNVQVPGADLFGVAARLELGTRLPELPEHSREAIEQELATLDFLKIQIESAEQRLEAIMKVSVEADLLKTLPCVGKILSMVLMLEIGRVDRFPTAAHLASYAGLVPRVHSSGGHTRLSQVCGNVNRNLKWAFVEIGNLVVINQRRLGGAHVVRLYQRIKRAKNHQKAVVAVARHLAEAAWWVLTKQEVYREPQNSRLALSSTHG

SEQ ID NO: 147617 - protein, 355 aa, unidentified
MNQEKYIGMDVHQATISVAVMDASGKLIMECLLETKAATIVEFIQGLRGTLALTFEEGTSAAWLHDLLKPHVSRLMVCDPRKAALLKEGNKSDRMDARKLAEMLRTNQLKPVYHGEHGIRSLKELGRSYLTITKDITRSMNRIKALYRSWGIPCGGTTVYAPRHRGEWLAKIVEPGVRVRAEHLYQQLDSLQPIRLEARRELLHESHKHAAVKLLRQIPSIGPIRAALLVALLQTPRRFRTKRQLWAYSGFAVQTHDSGEFRYVRGKLQRNRERITVRGLNDNHNKDVKNLFKSASISASTRPGPLQDFYVSLVAKGIRPTMARLTLARKIAAISLTIWKKGVNFDPKQLHRQAT

SEQ ID NO: 147618 - protein, 405 aa, unidentified
MEVYIGIDWSENKHDIFFMNQAGAGIAQYTIPHKTEGFVRMDATRRDLGLATDECLIGLETAHNLVIDFLWARDYSHIYVIPPSVVKGNRGRQGQSGARTDESDAWLLADIVRTDRARLQSWFPDSLLTRQIRAKVNLIHHLTCHNVRLSNRLRAVLLRYYPAAVQVFSSLQTQIALHFIHTYPTPQAAADLTWAEFQAFARQHGYPRPKKLPARFAQLQADYPQTSPETVLIYQDEASQLAELLLAGIRAKKQVQRALRSAFHQHPDHTIFSSLPGAGELLAPALLAKFGDDRQRFPAPDGLQALAGTCPVTEKSGKRKRVKFRRACDRQFRHFAQQWAIASLSESVWAIAYWNAVRPRCDSDSHAYRCLANRWLAIAWKLWQSRTLYDEAYHLRQRAKHSRTH

SEQ ID NO: 147619 - protein, 411 aa, unidentified
MEVVVERQSALDVHKASVTACVRVPDEAGDRREEIKEFSTTVTGLLVLADWLRGHGVTHVVMEATGDYWKPVWHLLEDSFELMLVNARHVKQVPGRKTDVSDAAWLCRLAEAGLLRPSFVPPKPIRDLRLLTRYRRTQIEERRREAQRLHKALEDTGIKLDCVASDILGKSGRAMLDALVSGTTDPEVLADLAKGKLRKKVSALKEALEGRFEPLHALLIGSILSHLDFLDEHIASLSEAIDQQLAPFAAARELLTSIPGVGQRTAEVILGEIGVDMTQFPTAGHLASWAGQCPGNDQSAGKRRSGRRRKGSKNLDIALRDAATAAIGANDTYLQALYRRKKSQLGHGRAKGAVTHSIICAVWHMLATGEIYNDLGGDYYARRDPARQTRRLVAQLERLGHTVTLQQADAA

SEQ ID NO: 147620 - protein, 427 aa, unidentified
MPRKARPAPPVPLSCPPPRRAGGLTAGLDWAKDDHVVCVVDVRSGAVRDRFSVEHTAAGLTAVVRRLAKLGCAEVAIERPDGPVVAELLEAGLTVVVISPNQVKNLRARHGSAGNKDDRFDAYVLADTLRTDRARLRVLTPDSPATLTLRATCRARKDLVNTRVAVANQLRAHLDSVFPAAAVLFDEVDSPINLSFLTRFTCQGLADWLSPKRLAHWLRAVGYCGRTNPAVMHARLLAAPRGLTGEDGLARAHITRAYLATLTTLREQITALERQISEQLAAHPDNQIFTSLPRSGTVRAARLLAEIGDCRARFPTPDSLACLAGVAPSTRASGKSRHVGFRWACDKQLRDAVCDFAGDSRHANPWAQDLYTRARDRGHDHPHAVRILARAWLYVIWHCWQAGVAYQPARHGALQRLLAGRASAPAA

SEQ ID NO: 147621 - protein, 353 aa, unidentified
MKPNTETTAAPLAVIGVDIGKEVFHLVGFGTDGKIAFRKKIRRLDLKGAFEQLPPCIVGMEACLSAHFVSRTLRALGHEPRIIPAIYVKPFLKGQKNDYNDAEAIAEAALRPNLRLVKEKSQDQLDLQACHRVRSRLVSRRTATINQIRAFLIEQGIAVRAGARALRNSLFAILENRKDEISPRTAKLILGLYEDWCHLDERIESVTEEIESLGKAEAKCQRLISVPGVGPLISTGIVAAIGSGEAFERGRDFAAWLGLVPRQHSTGGRSILGRISKRGSKYLRTLLIQAARVLLMRPHNWPRFSFGAWLKTASERLHRNKLALALANKLARIAWSVLRHDKAFDTHLEVAAI

SEQ ID NO: 147622 - protein, 494 aa, unidentified
MKAIAGKAKAKHSNSSKRNAKMAARGEPKGMEIVNPHAGGIDCGAEEHYVAVPPQSVEPGQPAVRCFSAFTEGLDASVEWLKACGVTTVAIESTGVYWIALCQKLEAAGIEVFLVNARHVRHVPGRKTDVKDCQWLQRLHSFGLLSASFRPEDGICRLRSLQRHRLNLIWTAGAEIQHMQKALQQMNLHLHHVVSDITGLSGLRIIDAILAGQRDAVQLAKLRDYRVCKSTIAQMEAALVGDYRPEHLFVLGQSLQAYRFYQARIQECDVQIESHLQQLAQRYESSSALAAKLPEPEVLNDAQAHNPQPAKRKVKRKPQANEPKIDLADYLRRICGVDLTQVIGLNVLSVLLIVSEIGVDMSKWRSAKAFSAWLGLCPRNKISGRKVLDTRTCKVISRVATTLRLAAQSLGRTNTALGLFYRRKRAHLGPAKATTATARKLACLVYHLLKYKEQYREPDPTTYQLKVEKAILARIQKQAAVLGYKLLPTALVPA

SEQ ID NO: 147623 - protein, 315 aa, unidentified
MMNAPVFVGIDVSQAQLDIALRPAGRFTAPNDDAGIAKVVDQLRAVTPTVVLLEATGGLELPLVGALAAAALPVVVVNPRQVRDFAKAAGQLAKTDALDAQILAHFAEVMRPAPRPLPDEQTHALAALLARRRQLVEMLTAEKNRLASARKLVRTSLQAHITWLERELTRTDTDLAHAIRESPVWREKDELLRSAPGVGPVLTTTLLANLPELGTLTGKQIAALVGVAPLNRDSGTLRGKRTVWGGRAQVRAVLYMGALVAARYNPVIRAFYHRLCAAGKAKKVALTACMRKLLIILNAMLKHRTPWHANVAACA

SEQ ID NO: 147624 - protein, 403 aa, unidentified
MYSSFVGIDIGKWNHQAAFLEVSGKETARSLAFQNTSEGFQSLLDSLAPFDKGQTVIGLEATGHYWLALFSFLVDNGWTVKVINPMQSDALRKMNIRKAKTDRKDCVVIADVLRFGRYTETVLPDEDLLQLRELSRCRVAHVELLGDLKRRALGILDRIFPEFASCFSTVFGAAPTELLQECTDPEELADYDIDKLIKLLEKESRGRHSREKAEELKAKASRSVGTRFGRDALKFELKMLLEQLDFIKGQVKEFDKFLKKLMKNHELIYTIPGISVTLGSAILGEIGDVKRFGTPQQLQAFAGMDPSVTQSGNFQGTQAKMSKRGSPYLRRAVYLAANAARRFDPVFKDFYDRMIARGKHPKQALAAVGTKLLRVIHAVMTSQKPYNPQKLLTPAARISQLNP

SEQ ID NO: 147625 - protein, 325 aa, unidentified
MSAQVHTAGAASNVVAGVDVGKHRLDANTCTQGTPGKAHTFGNTAEGCAHLVAHLLPMRPALVVIEATGGYERAAVAALQEAGLAVALANPRAVRDYAKALGILAKTDRIDAAVIARFGADVKPRPLAAPDASREACDALVTRRRQLIDQRTAEQNRLEHARHDAIRKNIDEHIKFLEQQIADLDQQITQAVANDRVAGAIAKALRTTQGVGKVVSSTMVAEIPELGTIDRQRAAALVGVAPFNDDSGTHHGHRHIRGGRRCVRNVLYMAALVAVTHNAVIKAQFERLRANGKPFKVAIVACMRKLLIYLNNLARIERQKLAIPA

SEQ ID NO: 147626 - protein, 346 aa, unidentified
MMIIGCDFHPSWQQISWLDTESGDCGERKLVHASGEARQFYERLVAPVLIGMEATGNSQWFIELVEDLGHTIWIGDAVQIRASYVRKQKTDRRDAEHMRRLVVEGRFPRLWTPDREQRDLRQLVLHRHKLVIIRSRVKNELQHLSLNKGVQRKHKLWSQAGQKRLRELPLKPWAACRREDLLGLLSMLNQQIGKLDGAVQQAAEENPQAKLLMTQPGIGPNTALAYVLTVGDVSRFRRGKQVASYLGLIPREESSGGRQKLGAITKQGNRMLRSLLVEAAQSAVQHDPGLRKQYLHRCHRKPKGVAKVATARKLAVRLYWMLRTQVAYPEIVRIESSPGLSLVGAS

SEQ ID NO: 147627 - protein, 334 aa, unidentified
MEKVTTVGIDLAKRVFALHGVDVSGRVVLRRTVRREQLMEVIASLSPCLIGMETGGGAHDWARRFQQLGHSVRLMAAKFVSPYRRNGKNDGNDAEAICEAVSRPGMRFVPVKSAEQQAILTLHRVRQGFIVERTATINRIRGLLIEFGVALPLRSVTVRRQALEAAEPLPALARRAIDDLCAHLRDLDARILTYDRELEQQARQSEAAQRLMKIRGVGPMSALAIVATVGNARDFRSGRQFAAWLGLTPRQHSSGGKSRLSTITKRGDAYLRTLLVLGARSVIHTAVRHTDRMSRWVSNIESRRGYQRALVAIANKNARIAWALLSKNQELRLV

SEQ ID NO: 147628 - protein, 338 aa, unidentified
MIVIGVDVHKQSVTAVAIDGAGRMLDEKTIAVGSDELIAWAAGLAGKRLWALEDCRQLTRWLERQVLGCGEELVRVPPKLLAPKRRAGRARGKSDAIDALAGARAALREPELGRPRPGEQVFRALKLLVDHRDDLVDERRRTQQRLRWHLHQLDPTFAVPLRMLGRPSQLERGSRWLARQEQELQVRLARELVTRCRSLTRAIVELDRELEQRTAATAPALLELPGCAAVTAAKLLPEIGPIDRFKSDAQLARHGGVAPLEASSGRVHRHRLDRGGNRQLNAALYRVAITQARYHPAAHAYLERKQAEGKSRREAIRCLKRLLVRVVFNTLKASPALT

SEQ ID NO: 147629 - protein, 409 aa, unidentified
MARIIGLDVHRTFAEAAIYEHGRVRHAGRILTTAAALELFARGLTRRDHVILEATCNTHAIARLLRAHAGRVVVSNPRQTRIIAEAKIKTDKIDAAVLIQLYASGFLPEVWMPDDGTEALRRQVARRAQIVRHRTRLKNQVHAILHRNLLPRCPASDLFGHKGRAWLALQPLPPDERAAVTSLLRALDHAEADLTELDRGLAGAVLDDAPARRLMTIPGVDFAVAVGIIAAIGDVTRFRSAQKLVSYFGLNPKVRQSGLQPAQHGRITKQGRAHARGMLVEAAWAAAKTPGPLRAFFARVCARRGRQIAAVATARKLAVLVWHLLTKQQDYAWARPSLTEQKQRKLQLRAGQAAHRGQRGRAHAYNLKTLRVRERAIGEQAERAYQTLVAHWRPQPRKRGTGAANAARR

SEQ ID NO: 147630 - protein, 387 aa, unidentified
MSQKVAAFIPASVDYERTLVLSIEVSNKSWVLAAQVPGLPHTKAKRTIDPEPEALLAAIAGYRARAATMGHSIERVIAVYEAGWSGFWLARWLMRHGVEVHVVQPSSVPVDRRMRRAKSDGIDAELLLRTLLAWLRGEPRVCSMVPVPDEADEDARRCVRERTELISERVGLTNRIGAVLATLGVSDYNPLLRNRCRRLAELRTGLGEPLPANAYAKIKRLLARLELVLTQIAELERERDAVMETEASDKASKMIQQLTGLRGIGVQSATVLVREAFVRRFANGKALGSYAGLASSPYSSGGINREQGIGKAGNRRVRTVMVELAWLWTRYQPAAAQVCWFRERVGSTGPRVRKIMVVALARKLLIALWRFVIDGVLPEGAVLKPAA

SEQ ID NO: 147631 - protein, 349 aa, unidentified
MKVFKQVLGVDVAQKELVVTLGRMNEDFSIELYSYRVFSNKETGFIALLKWLKKNTLTDISLRVVLEATGVYHQKFAHFLVDNCIDLSIVLPNKISNYFRTLEVKTITDKSCSEAIARFGLERKLENWKKPNKVYKLLQQLTRERDQIVCERTMIKNQIHAETTEAEPNERSLKRLEERLLFMNKQEKEIKQDISDIIQQDKTVEEQIGYMTSIPGVSVLTASTILGETNGFELIRNKRQLTSYAGFDVKEKLSGTSVHGKPKISKRGNKYLRKCLHLPSLCSVKYILEYKELYTRIVSKNGIKLKALIAVQRKMLELTYVLFKNQTVYNPNYEIQKRVPLKEENTLTS

SEQ ID NO: 147632 - protein, 348 aa, unidentified
MTTTVYCGVDFHARVQTVAYCVIADGEIHLHELDHRKDDVRGFYSQFSGEVVVGLEASGYSPWFERMLEELGHSVWLGHAAEIRRFAKRRQKNDRRDAELILDLLLKEEFPLIHRPTADSLEVLRMLRYRHRMVKMRTMIVNNLQALAIGSGLSLKSRLLTRSGRLRLLATQMSPVMSRQREEWLSLVDTLNARIASVEKWLEQQAQANSRVQLLRTQPGLGLLTSLGLVHSMEPVSRFCNQRKVAAYFGMDPMERSSAEKRRCIGISKAGSRLVRFLLVEAAQTAARKDQELKRFYQRLVARRGRQKALVAVGRKLLTRSYIMLRDGIDYAEFLRRGVEARPARRDA

SEQ ID NO: 147633 - protein, 465 aa, unidentified
MKPHRRLPRKKPVAGPSLLERLNPNAGGIDCGADTHYVAVPPDRDATPVRAFKTFTTDLHRLADWLTACGVTTVAMESTGVYWIPLYEILEGRGFDVVLVNARHVKNVPGRKTDVVDCQWIQELHSVGLLRGSFRPTAAIAALRAYLRHRETLVQSAATHVQRMQKALVQMNLQLPIVLSDITGVTGLRILRDIIGGQTDPHALAQHRDHRCQASAAEITAALTGHYRPEHVFVLRQNLALFDAYQGQLAVCDAAIEAHVLTLAAQTPAPSGLLPAPRTRKKPRDNEPRFEIRTPLHQLTGVDLTQIDAIGPYSALRLLAEIGTDMSRWPTEKHFTSWLTLAPHNKISGGRLLSSKTQPSANRAAAILRMAAMNLGRTDTALGAFYRRLAYRVGKAKAVTATARKLAILVYRTLREGLVYQDPGAAAYDAQHRVRVLHRLRQRAAHLGFSLLNRETGELLEGAVS

SEQ ID NO: 147634 - protein, 358 aa, unidentified
MIVIGTDVHKHSHCCAAVEATTSQVLEVREAHARMPGFRALLEWARGLGDERVWAIEDCRHVSGGLERFLIAAGERIVRLAPKFSAGARRHERTRGKSDPIDALAIARAAIRQGIDTLPAAFLDEQAREIKLLCDHRDALVGTRTREQNRLRWLLHDRWPELEIPSGALERERVLDRLARRLAQAAQSADIRIARELVREIRAVTRRICEIERELAVLVSAKGPGLLEVPGCGVLTAARIIAETAGPGRFSSDAKLARTAGVAPIPASSGRTTRYRLDRGGNRKLNAALHRIAIVQGRVDPAAKEYLARKQAEGKSRREAVRCLKRFVARRVWHLLPKTPNGSDEGASRMASEVLALT

SEQ ID NO: 147635 - protein, 434 aa, unidentified
MGKRRAYRSTAVKKVVLEKVLASAPAGDVHIGMDVGKAEVFAVLRWSDGTFERPWKVKNPTEIMPLVAILQVLAKDRAVTIAMESTGTYGDALRQALGDAELCVHRVSGKAAHDYAEIFDGVPSKHDGKDAAVVAELAALGKSWPWPTKTRTNKDVKMAYWVDWLDAQQSIQMLWIGRLEGLLARHWPELTSLLDLTSVTLLEMLAHYGGPSKVTADGKAADRLARWGGSMLKRKKIKAVLESAGTTVGVRQSTEDTQRVRQYATMALAAFRETQKAKRQLKSLAKDNAVIQRQAKAVGITTACVLWVVLGDPKNYHCGEAYRKAMGLNLKERSSGKHKGRLKITKRGPSITRRWLYFAAMRLSQKPDIRRWYEAKKARDQDRGTGALIGIARKVALALYNVGVYEEPFDAWRLFPGQSLPREPRAFRKPAATV

SEQ ID NO: 147636 - protein, 381 aa, unidentified
MKTVHTKRTGQAGRPSVGADRCVARVVPSLLPKSSNSCQGYPSPHLSQGRASLEQIKSIKEDCLLEAPLIFVGIDVSKAQLDVAIRPSAQSLSVTNDRAGIKSLIKHLKKLRPQLVVLEATGGLERQVLSALIAGEIPVVMANPRHIRDFAKSIGQLAKTDRIDASVIAHYAEAVRPKPRPLPDEASLELRALSARRRQVLDMIVAEKNRLATASKVVKKRITAHIAYLEQELNDADQDLDRFIEKNAAWKQNQQILCSTPSIGPVSSRTLLVELPELGALDRKKISALVGVAPFPRDSATLKGRRTIWGGRASVRSALFMATVVATRFNPVIRDFYKRLKAKGKPSKVCLVACMHKLLTILNAMIKNKIRWSENFTRQTT

SEQ ID NO: 147637 - protein, 411 aa, unidentified
MEVAVITAVGIDVSKSKSTVAVRRPGGEIVLRPFEVHHTNSDLKKLASALKKLGGDIRIVMEHTSTYWRPIALTLKEAGFFVSVVNAMLNHDFSDNTIRKLTTDRADALKIANYALTFWDTLPPFNNEEETRLLLKMQSRANERITATATALRNGLIALTDQTFPGVNIAFDPNTKNANGHEKWVDFFLRYWHKDCVCQYSMEAFTASYRGWCKRKNYKFRTDTAHKIYLLAQEGVATLPKCESTKMLITQACKSLNAVCEAKQSTQLEMQRLAAMLPEYEVVMQMEGAGPITRPALMAEIGDVRRFKNKKALVAFAGIDAPPFQSGAFESKSRHVSKRGSPHLRRTIFIVSNIILTRSNPESAVYCFMDKKRSEGKHYYVYTVAGSAKFLRVYYARVTEFLRSQPSPDAC

SEQ ID NO: 147638 - protein, 557 aa, unidentified
MHRFALLPWGTKAGLSVAGRVRESAWLGSLLVVLGAVAGVEGAWLAVRRLPLPSLLGPFEAVIEKGAGAPLVGNHRCCVRARVSVSCFWPGALAGGVLFMDPIGAASGGGCRVKVMHERVAGIDVHKKMVKVAIRSPGKGRWARKTDVVTFGTFWDELRAMARELRARGVTHVAMEASGVYSDPVYFALAEEGCFEEVLVVNPAHVKGLKGHKTDARDCARIAELLECGLLQGSWMPPQEIREMRDLVRYRQRKVQARTSEVQRLGKVLETAGIKLGSVASEITGVGPMEMIEALIGGERRGAVMAQRARGAARTKEKMAALARALEGRFSDHHAAMCRLITDQVRDLGEAIARVEAQITVKAAAWEREISLLKSIPGFGDATAWAWIAEIGPAPREWFSGHDKLASWAGLAPANHVSAGKRRNAGTTDAGAWIRPVLVQAAWAAIRVKGRLQARYDRLVRRMGGQNSPAARKKAIVAIAHTLLKIAYAVLKSGQPYTEPGPDFYASREAPAQRQAYLQKQIQRLYPGCTVTVTITQPPATTAPPGTPPPGHIPKAV

SEQ ID NO: 147639 - protein, 343 aa, unidentified
MEKIITVGLDLAKSIFQVHGIAENGKVLVRRTLRRSQVLPFFRGLPSCLVGVEACASAHHWAREIAALGHLVRMMPPAYVKPYVKRNKTDVADAEAICEAVTRPTMRFVPVKTAEQQAAGMILRTRELLMRQRSQTANALRAHMAELGIIAGTGMASIAKLLVLLRDEDDNRIPGAARFALIQFAEQIEMLTTRIEKLDKEILVAVRKDPDARRLMSIPGVGPLIAATVRTSVLDPQGFATARDFAAWTGLTPRAQSSGGKERLGAISKRGNRQLRTLLIVGATSIIKLAKRGLKVPLWVRTMLQRRPVKVVSVALANKIARTIWALLVRGGIYQAPSAMLKS

SEQ ID NO: 147640 - protein, 343 aa, unidentified
MTLKASFKWVNPQDINVLGLDVAKAKIDICFLSSNHSWFYQIANNSQAISQFSQELKALGLNATIPFVLESTGSFHLLLATLLKNDGWNVKEINPIITHQYIKHTVRGTKTDTTDAQLLAKIGLIEGDNLKSFDRDLNIIKLRMLISFLAHLETLIQQSKASFNALEKGLATLRLWESQELEKMKEVIKVLEQRAKGLEREILNIQLSPEAQEQVNYLDSIVGISPFTAKVAYALFAHNTFSSKRAMLAYVGLDPKLRQSGTKTWALRISKRGHPYMRKRLFQSAFCSLQHSSYFKSIYDKHIQRWKHHFIAVLAVAKKMVYIMRALLKNNTQFDHNYYKLTS

SEQ ID NO: 147641 - protein, 453 aa, unidentified
MEEPQEVPEEEHERVWERVAAIDVAKGSGVVCTRVPDEDRPGRRKAHVHTVPARAGAIIELGDYLRGRQVQVVTLESTSDYWRIWFVLLEAAGLRVQLVNARTVKNVPGRAKTDKNDAVWLAKLTERGMLRPSFVPPPEIRRLREFTRLRASLVQDRSRYWARMEKLLERALIKISDVMSELNCVSGRAMIEALIAGERSPRVLAGLARAGLRKKQAALTEALTGRFEDHHGELARILLDQIDALTAQVDRLDTRIGELLDQIPAAWGIDAGGATGPDAGYQPGAAVLPAVARLDEIAGCGLIAARAVIAEIGLDMTVFGSPHRLVSWARRCPQTRQSGAKTSHAPPGKGNPWLNGILGEIAASAARTDTFLGERYRRIAKRRGKRKALAAIARSILVIIYHLLASPEARYHDLGPHYYDTRTDRDRKIRNHIRQLQALGLDVTIRPQAEPAA

SEQ ID NO: 147642 - protein, 373 aa, unidentified
MFHFTTLFIGMDVHKESFSLCYYDMMANQFKHSTKVGPNVSYIVNYVNELRRLYGQDAEVLCGYEAGCLGFTLYHQLQAHGIPCIVMAPTTVMKEGSKRVKTDKKDAAQLAKALAFRSYRPVHIPTVEDEQVKEYIRMRTDHKVALKKIKQQILAFCLRHDFRYTEGSSNWTQKHVRWLRSLNPDGLYAEILTEYLLTYEKLVDQIERYDARIEQLGQSDSYQEKVSRLSCFIGIKTLTALSIVTEIGDFNRFATAQHFASYLGLTPSENSSGDKERRGAITKAGNSHVRRLLIEAAQSLAKGTIGYKSKELKRRQSGNRVEVIAYADKANERLRRRYRTLVLGKNKKQNVAKTAIARELSGFIWGMMTGRIA

SEQ ID NO: 147643 - protein, 337 aa, unidentified
MKSALYIGVDISKAKLDVSILSPANTNDIPYQQFSNNAKGFTQLLKWIRQNQKGVPVEGWRVCMENTGIYSLELNCFLHEKGIWQCLENALQIKRSMGVLRGKTDKADSRTIALYAYRFSDQLKPYVLPGKTLQRLRILFAQRERLVAMHRELHGALESLSGFDDKLMKDVRKQNEALMKKLSAQVKDLDEALRQCLGQDEELQRKATLIQSVPGIGLQTTTYLLIVSRGMQTFATPRQFACYSGCAPFEHRSGTSVRGKTKVHFIANTKMKALLHMAAMNAVTFNEELKQYYQRKVTEGKNPMSVLNAVRFKLICRIFAVVKRGEVFQKNYQKIAA

SEQ ID NO: 147644 - protein, 356 aa, unidentified
MSYDVKYIGMDVHKEAIVIAVLNESGKLVMESVIETKASSILQFLHGLRGELHVTLEEGTWAAWLYDLLEPQVQHIVVCNPRRNALLKEGNKSDKVDASKLADLLRTGMLRPVYHGENGLRTLRELGRSYQTISKDLTRVMNRLKALYRGWGIPCAGTQVYAARSREEWLSKLPQAGVRRRAELLYQQLDGLQALRREVRPEFLAESRKHKAAKLLRQIPCIGPIRAARLIALMQTPHRFRSKRQLWTYSGLGIETHDSAQYRFVRGQLHRSKKPQQLRGLNRNHNHEMKEIFKSAATRASCGRGPFHDFYAALLAKGMKPEMARLTLARKIAAITLTLWKKEERFDVEQLKTQAA

SEQ ID NO: 147645 - protein, 362 aa, unidentified
MKKVSKAQWLKEMGSDRPALTVGLDLGDRYSHYCLLNAAKEVMEEGRIQSTEAAFRRHFEGEERQRIALECGTHSPWVSRLLKSLGHQVIVANARKIAAISSSESKNDRNDAEQLARFAASDPKLLAPLLHRSMERQQDLNLIQARATLVRARTMLVNALRGLVKSAGGRLPACSTESFPVRVRASIPSVLTTVAVPLLEQIATLNRQIDSMEEQIEKLGTRYPEIGVLRTVPGVGPVVAATYVLTLDRPNIASNRSAGAWLGLRPGQSQSGDSDPELGISKTGNRYLRSLLVQSAQYILGRFGPDSALRRWGLKLASSGGKRAKKRAIVAVARKLAVLLHSMWRSGQSFQHFPQPAMATVA

SEQ ID NO: 147646 - protein, 368 aa, unidentified
MFYLGIDQHARQITVSLRDESGDVVQARQVSTLPEKVHAFFQQLTRERLTAGESFVAVLEVCGFNDWLIRMLQEYHCHKVILIQPEDRKKCKTDRRDAAALSELLWVNRDRLLQGKPVRGLRQVDIARSTDQENRRLTTLRKDAGQTRTRLVNRIRHILRRHNLQWQMPTKKFPTKSGIAWLKQLALPEIDRLEMNHLLADLEQVQGRRQELEQVIARRCGVSAEAVLLSSMPGVSYFTAVALACRVGRVERFPRAASLANYWGLTPGCRNSGESNQRLGSITKAGSSMARWLLAEVTIKVLRRDARLREWFKRLKRRRGASIARVAVMRKLATVIWHMLSRRMTYAACRAVGEAGTRAREGQGCGRE

SEQ ID NO: 147647 - protein, 365 aa, unidentified
MPKRIALSNPDRAGEPLLVFGGVDTHADTHTVAAISHLGAMLGHQSFPATAKGYRQLYGWLAGHGTLMRVGMEGTSSYGAGLAAALTGHGVELVEVNRPARTTRRARGKSDPIDAEAAARAGLAGVATAVPKTHTGVVEEIRVIFVARRGAVQARTAAINTLHQMIITAPLQLRAQLQPLTRTQQITACAALHTGDITSPTRATKLALRRLARRIGHLTAEITDATNDLTTLVQAHAPHLLTQVGVGSLSAAQLLITAGDNPDRMTSPASFAALCGTSPIPVSSGKTNRHRLNRGGDRQANCALHTIVLSRLRYHPETQAYAAKRQTEGKTERDIRRSLKRYLARRLFTLILTASQATDNTLIAT

SEQ ID NO: 147648 - protein, 335 aa, unidentified
MGAYVGIDLHRRRSVAVCLDEGGERLWWRRFENSPLAMAEVITEAGPDPEVVLEATWGWYWAADVIAEAGGRVHLAHPLGIKGFENRRVKNDLKDATLLADLLRMGSLPESWIAPQSTRELRELVRYRHKLSQLRAGLKNQVHAVLGKEGVIPHLVTLWGPAGDQFLDETLLGDAFGYRVKSLRDLVGVYDREIKLVDDRIHRRLKGDRGYRAIQQLTGVGRVHGAALVAEIGDVTRFRSSKHLCSWAGLTPRLRESDTTTHSGSITKQGSRLVRWTAVEAISSRHGGAPIRDHYRRIAERRGTNIGRVAAARKLLTLVFYGLRDGEIRCLGETG

SEQ ID NO: 147649 - protein, 333 aa, unidentified
MQFELFIGIDVSKLTLDIAFLNQDAEVESFKIENKVVSIKRFFKKLSKQLKLEQCLICAEFTGHYCYPLRKVCLEEGYLLWLESGAEIKQRSGVTRYKNDKVDAIRIADYARRHQDKAKIQMIEDYTLESVRALSSERELFIKERAKYKTQIKDLKGFMDEALYKDRSKRLKKQVDSLTKLIKEIDQQIKSLLESSEKLTSQKAILTSIDGIGDQVAIHTILATSGFTKFHSGRKFACHVGVAPFAFESGTSQRSRRKVSFRANMDLKKLYHMAALSAIKMKGEFKDYFDRKVAEGKNKMTVINAVRAKLINRIFALIRDNRINEKNYQITLA

SEQ ID NO: 147650 - protein, 399 aa, unidentified
MFCGWDWGSTLHGVCLLDEDGATIKTWMVRHTEEDLSALFTEFAQLGEPGLMPVAIERGEGLVVGLIARAGHPVLMVEPTAFKAARPRWGAAGAKSDAADAFMLADYARTDGHRLRRVEPLAQATRELAALVRARTSLVEARTAASNQLWAVLAEHWPGAALVFQKLTSQIALAFLADYPTPQAAALLGEGRMRQFCRRHSYRGGKSPAELMSRLRAAPASANPIAEKVLEAIVRSQVAQIGLLNVEIRGLERKTADALAAHPKTALLKTLPRVATVSLAALIAEIGPLLERCENPEQVAAMCGAAPVTRASGKSRTVGFRYTANKPARVAITSFADNSRHSSAWAGDCYRRARARGARHPHAVRILARGWVRVIWASWTTDTPYDPARHRGEQRLAAA

SEQ ID NO: 147651 - protein, 347 aa, unidentified
MRFFTDPHQHYCGIDLHARSMYICVQNREGKVVLHRNMQARPESFLKAIEPFREDVVVGVECIFTWYWLADLCAEHNIPFVLGHALYMKAIHGGKAKNDRIDSRKIAALMRGGTFPMAYVYPAKMRATRDLLRRRNHLTRKRADLLSHIQNTNSQYNMEPFEANISYKKNRIGVAEQFTDPEVRMSMQADFELIFLLDELKNRLELHITHSAKNHDPQALYRLRTVPGIGSIISLVVLYEIGDIDRFPTVQDFASYSRLIKCSKESAGKRSGTSGGKIGNAHLKWAFSEAAVLFLKGNPEGMTFKKRLEKKHGKGKALSILAHKLGRAVYYILKQDQAFNMNKFLKN

SEQ ID NO: 147652 - protein, 410 aa, unidentified
MNAVGIDVAKGKSMITVRQPLGIVIVKPYEILHTASELERLAESIKSLNGETRVIMETTGIYHLPVADYLHNAGIFVSAVNAKEIHGYDKNPLRKVKTDRADAKKIAEYGLAKWEKIRRYSPEEDTRRQLQIYNRQYCHYAKIKTMHKNNLDAILEQVFPQVKQFFKSPIRDDGHEKWIDFADTFWHIECVSSLSESKFHEQYRKWCQKFGYHYRKTQATKIYEAAKKHIAILPKDEFTKQLIKSAVTQLNSIAETQANLLRKMKEIAQSLPEWEVVIEMSGVGETIAAQLIAEIGDINRFNSKKSLTGFVGVDSPPNQSGIVNRQGEPVTKSGSPHLRRTLFLIMRCLILTKPDDEVYHFILKKKSENKKYLVYMVAGFTKFLRIYYGRVKEHISKLDAMESDEALSCQ

SEQ ID NO: 147653 - protein, 412 aa, unidentified
MDVTVERGAGLDVHKATVTACIRLPGPDRERAQVLQTFGTTTAALLTLRDWLTAHQGTDVAMESTGVYWKPVYYVLEDAVCVLLVNAAHMANVPGRKTDVADCAWIAQLLECGLLRGSFVPPPAIRELRDLTRYRTALIQDRTREANRLHKLLEDAGLKLASVATDVLGVSGRAMLPALVAGTTDPAVLADLARGRLRAKLPALRQALTGHVRGHHAFLLTHLLAHLDYLDELLAALSQEIEAHLVPFAAEAARLQTIPGVKQRSAAAIVAAIGVDMTRFPTAGHLASWAGLCPGNTQTAGKRRRGRARKGDPWLKGTLVEASLAAIRVKGSRFGALYRRICRRAGHNVAIVAVAHAILEIAWFLLRHGTTYHELGADYLDRRDKQRTTDHYVRLLEKLGHRVTLEPAAIAA

SEQ ID NO: 147654 - protein, 348 aa, unidentified
MTTMVEDARVITGGVDTHAGMHVAAALDSIGGLLGVQEFPATAAGYASLLSWLRSFGTLAVAGVEGTGSYGAGLARHLAAAGVRVVEVDRPDRQDRARQGKSDPLDAVSAARAALSGKASGAPRGRDGAVEAIRVLMVAKRSARQERTQAINQARALIMTGPEELRARFARRSPAQLIEAIAALRPRPGDVPGYATRVALRELGRRAQFLDAQLDRLDELIGPLVTARAPGLLALHGVGPDTAALLLVAAGDHPERLRSESSWAHLCGVAPIPASSGKTAGRYRLNRGGDRQANSALWRIVIVRMSSHPATRAYADRRSKEGLSKKEIIRCLKRYVAREVYRQLRDGA

SEQ ID NO: 147655 - protein, 332 aa, unidentified
MTYIGIDVSKDTFVVAYSPEKTSRTRTFKNTTKGIHELIQTVSKDKHHCVMEATGNYSALLVYLLSEAGITTSLENPLKVKNFARVMLSTVKTDDVDARLIALYGEKMNPAPYVMRSDAILTLKQKRTVIRQLKKQLIATKNLKGSMEVLPFFDSKCRKSIEQTIAFLAKQVKHLEDDLAVLADSEYKKQMDLLTSIKGIGVTLAAALIMATGGFTYFDNARQLTRYLGLSPTYQQSGTSVNFKGHINRNGDSSLRSQLYVAAFASLRCNTECRACYDRLRSNGKPGKVAVIAVANKLIRQAFAVVTQEKPYVDGYVSTLRLAPAYSETGEG

SEQ ID NO: 147656 - protein, 354 aa, unidentified
MATYYIGADVDSKMTELAIEKNKKIVRRYRVPTSIPALREVLSSIDGKKHLTFEEGPMAGWLYRNLKDSVHELIVCDPRRNKLIACDGDKDDSIDSGKLAELLRGGYLRAVHQNEDMDRVILKQWVSLYHDKVREAVRQINKIRGRCRMYGIRIPRRALRDQVIRCQWMTKLKERALAEQLSVLWIGFDTAAKQVQMSKRQLIRHSKAYQIVRYWSEMPGIALIRATTLLAYLDTPWRFSNEKKLWKYCGVGLQRTASGTDRRGRPNRGKLKLAWAVNRRLKAVVIGAAMSAINQKQNIFAFEYERMIRNGLTAGNARHAVARKLLSVLWAMWKTTSRFNESLVCYSPATVTAN

SEQ ID NO: 147657 - protein, 343 aa, unidentified
MLYHMGIDVHDEFCSFQHIDSEGSLGLSEHVPTDKHSIVNLLKQLDDPVTITFEAGRNYWWLHELFANQPNVSQVNVVDPRRSRNLAKELSVLSGYGRAKNDDIDAEMLAEQTRRGLAPTIHVPTAEQLEMRTVCRHRFTSVINCTRAKNTVHSILAMHGSKARIKDLLTTDLMMRRKINKSLPYYVLFIIDDLIARINLIDKQIETCTQKLEQMLPESHPQMQILLSHPGIGPVLGRMMHTEILETTYFNEPKYLISYSGLAPIENESAGRKGVVKLNRHCNYYLKYAFVESAHHCKDHVKYRKKYELDVRKHGKIIAKLNLARRIAKTVYWMLTRQQLYRS

SEQ ID NO: 147658 - protein, 338 aa, unidentified
MRIVCGLDIHRTQITFDWIDLRTGEEERGVVRSARPEFRSFLERFGRKGTAFALEATTGWRFVVEEIQQAGMEAHLAEPAETSAQRGPKRRAKTDRADARLLRDLLVMGRLPESWIPPADIADLRTTVRLRKSLVDHRTAWLARIRAQLFHHGLPVAPDLTTLAGRDWLEHAALPPAARQVLDVACHMIDHIDAELDGLDCQLAAIAHRLPGCQILQREWGVGVVLSATILAELGDTRRFSSSRQAVRFAGLDVTVHASDTRRARGHLSRQGSPLLRWALYEAAGGAWRLRSPDHAYYVATKDRLGASQARLAVARRMLRRMHHELANAGDTAFGTAA

SEQ ID NO: 147659 - protein, 367 aa, unidentified
MKQVTTFVGIDAHKKDLFIAMLSGDQSTPVTWQLANEPNAVRRLVRKLEREAPGPVRACYEAGPCGYALQRQMTTTRVRCQVIAPALVPRKPGERVKTNRRDARKLVELLRAGLLTEVRPPTPEEEAVRDLCRARDDARTDLQRCRHRLGKLLLRRGLHYSGRNWTRAHRQWMASLTWTHAAERVVVEDYLLAIDQVEARLRELDAHLTETAQTDPYREPVAWLRCFRGIDTLTAIVILAELHDFRRFQSPRALMAYLGLVPGEDSSGEKHRRGRITRTGNTLVRRLLVETAWHYQHRPTVGVALTRRRKGQPGRVIAIADKAQQRLCRRFRKLAAEHKPAPKIAVAIARELAGFLWAALQPPVVAN

SEQ ID NO: 147660 - protein, 338 aa, unidentified
MAKITTVGLDLAKQVFHLVCCDERGKVVGKRMLRRAQVLGYFANLAPARVGMEACAGAHYWARELEQLGHAVKLLPPRFVKAFVRGNKNDYNDALAIAEAVVRPEVRGVAVKTVAQQDIQALHRLRSECVASRTALCNQLRGLLAEYGVVLPRGVSSLRRRLPALLEDGENDLSALFRRLLAQGYAQLCELDAHIAAYTTEVQRHSHQDAACRRLQTIPAYGPIVASVFHSLVGDGRAYRRGRDVSAALGLVPRQHSSGGKTVLLGISKRGDRYLRSLLIHGARSVVQQAAHKDDRLSRWINRIKAQRGHNKAVVALANKLARIGWAVLRQQREYQAA

SEQ ID NO: 147661 - protein, 326 aa, unidentified
MQGKEASEQETKVQSNVGIDISKCWLDAHVLPGDERLHVANNCAGIRQLKRWLSHYRIALVAIEATGKWHRHLHRSLVASAIPAAIVDPYRVRMFAKAQGILAKTDQLDARVLALFAAMMAPPVRPVAPQAMAELAELVVARGSAVEAQAALKNQFGTAESTFLKRQLDRRIGRAGKDIAALDREILKRIKADASLARRYAILTSIPSFGFAVAATIIACLAEIGSATAKQIGMLAGLAPIADQSGDREGLRVIWGGRPAVRRVLYLAALSASRFNADMKAFYKRLIDNGKPSKVALIAVARKLVVLANTLVSEDRTWQPCAPMQA

SEQ ID NO: 147662 - protein, 468 aa, unidentified
MTSRLRTSITVEIVSPGPSRATIEARPERAADRAPAHGRTSLPPRGPVGCCRRGARRPRRLIGKCRAGAAAGNVSAEGEAIRSNDYRKDTTVKAPSTRPAAVLGLDVGKSSHWACLIDRDGEVLASAPVRNREAELDALFASAPAGTLVVVDQFRNIGSLAVRRARAAGLGVAHLPGLAASRAAGLFAGEAKTDERDAAVIARTALGVPDSLSGVPGRGEALEAARALSSQRDHVVACATRDKNRLRAVLLESCPALEAAVDLSDRRWLELLAGFGGAWGIARSGAEGPRAEAAGEAAAASTAPPPALVEAENRQVRFLAARISEALDEAGALEAETAALLEGDETYACLLTVPGIGPRTAAQLAVSVDIGRFPDHDHLASYCGIAPRVRSSGTSVRSVRASRRGDARLKSLLIFSCNSLVRSSGRYGEYYRACRARGMGHGRALKAVARKRLRAIYAVMRDRVPYRE

SEQ ID NO: 147663 - protein, 428 aa, unidentified
MNFNTQNAKIASITEKTLIVGIDVGSETHYARAFDWRNYEYTKKPLEFSNTEAGFMMFKAWVEDIAEKQGKTAVIPGMEPTGHYWFALGKFLQDSGMKPVHVNPHHVKKSKELDDNNPNKNDRKDPKTIAALVNEGRFSYPYIPTGIYAEIRSLSNLRFQTQEELTRIKNRLARWFAIYFPEYKDVYGDLKAVSGRLVLKEAPLPEDICKLGAEGVNKIWRDAKLRGAGMKRARNLVSAAEHSVGNKEASEAARFELRNLLKDMDVYALRLEELLQNMEEKLKEIPYVDKLMEIKGIGLVTVSGFIAEVGDIGRFDNPKQLQKLAGYAIVANDSGKHNGESRISYRGRKRLRYVLYEAAISLVGKNAEFREIHEYYRTRKENPLKKMQSVVAVACKVLRVFYAILTKGVDYDPLKLLGDIRRPQLQTA

SEQ ID NO: 147664 - protein, 343 aa, unidentified
MESYVGLDVSLRRTSICVVDKAGKLLCEGTVNSTPEAIIEFVKSKAAGAVRIGLETGPTSTWLWTEIKALGLPVICIDARHAKAVLKMQINKSDRNDAFGIARIMQCGWFKEVRVKRIDSHVVRALLESRALLVKMKRDLENQIRGLLKNLGLLIGTARGQAFHARVQELVEGKPYLAVAVLPLLETRNNIVRQITDLDRKVLMLARNDNRARSFMTVPGIGPVTALCYRATIDEPSRFKRSRSVGAYVGLTTRRYASGEVDWTGRISKCGDAMLRSYLFEAAGVLLTRVHKWCALKSWGTRLAKRVGLRKAKVAVARKLAVILHRMWMDGTEFQWSADKVAT

SEQ ID NO: 147665 - protein, 674 aa, unidentified
MEGLGSAAEPNAERCLKPPAEMARLFSRHPEALANTLRVLEAASGFSLDQLRYEYPEEALEPGRTPQQTLEARVVAAAEERRPDGVPADIQARLDHELALVVRLGYAPYFLTVHEIVAFARARGILCQGRGSAANSSICYVLGITAVDPEKHDLLFERFVSANRGEPPDIDIDFEHERREEVIQHIYDRYGRERAAIAATVIRFRTRSAVREVGKAMGLSEDVTAKLAKASWGPGGERSLAEIAGSEGLDPADRRLSMALQLAEELQGFPRHLATHVGGFVITRGPLVELAVVANAAMEGRTVLEMGWTAPNGIDVPGCGPSGSAAKEPSGVSITMIGLDTAKAVFQVHALNLVGKAVSTHKLRRDQLVPFFEKLEACTVVMEACGAAHHWGRLLTGLGHDVRLIPSEAVRPFVKRGRKNDAADAAAICEAASRPNIKFVPVKSLEQQGTLALHSARSILVKQQTMLANAMRGLATEFGLVVPLGIHRIGQLMARIEEEEALPETGRQAMRGLHERLVALQESIDAVEKLVVAHARSDGAARRLATVPGIGPITASLIAATIADIGVFESSRKFAAWLGLVPRQHSTGGKTRLGRITKAGNREIRRLLVLGATSMIRRAQSWNSAVGAWTRSALERRPARLVSVALANKMARMVWALLTHDEVYHPQGRAAAAA

SEQ ID NO: 147666 - protein, 355 aa, unidentified
MKYYTSTTEFNCGIDLHARQMYVCLMDRQGKKLVHTNVKDNDFAYFLKLVEPYKHNLTVCCECMFGWYWLADACQAAGLSFVLAHALYVRAIHGGKNKNDRIDSEKLAHLLRSNLIPPAYVYPAQQRPLRALLRQRIFYVWRRAQLLARIHCHQLAHNRIPAKQSRWTRDDWEERLLKAEIHPLRQLALSNDLAMIRHFDHQIFEVEKELYRQTKQLAAREYALLQTVPGIGENLGLTILYEIGDMERFPSVKDFLSYCRLVKGTVASAGKIKGLRGAKLGNPYLRWAFGEAAVIAKRDQFRIRPLAQRLEARMEGNKFKANTVLAIKLARSVYFMLKNKTVFDPDRLVAPLAKN

SEQ ID NO: 147667 - protein, 354 aa, unidentified
MQLVSDRPIKKVSFGIDISKDNFEVSVGLGYDYSEEPQIRNIGSFNNTGAGMGRFITHSRNLLTGLNLTPEAKIQFVMESSGVYYECLAYRLYQEGLSVHVALATKMKNYTKTLKNKSKNDKQDSLAICRYGLEKNLQDWKPMSDEMKKLKELTRELALHKDDIVAAKSILHSQKAAYKTNPEGINRMKSKIKYLERLIKKVNEEIKATVDNNPELKEKVNMIIKNFRGVGYQTVVILLAETDSFKQVTNSKQLVSYSGLDIMENQSGNKTGKARISKKGNSVIRRALYMPALSAIRFNDRMKELYQRICDGHTDVSKKIAIVAVMRKILCIIYALWKNNTEYNPNYLLMPMAC

SEQ ID NO: 147668 - protein, 344 aa, unidentified
MVTITRFVGLDYHQDSVQVCVMDPEGRVLANRSVPNDWEAIRAVVRGTVPATTKLVIVRASIECCSGAAHLAEELIERAEWAVTLAHPGLVNRMKQNPEKSDHADAIILADLMRLGYLPRVWLAPAEIRQLRALMRYRHRRVQDQTRLKLRMRALLREHRIAGPRGVGAWTLAWMAWLQQLELDDVSRFLMDEHLEELQRVQQKVREVERLLRQRTADDALVAKLQKIVGIGPITAITMRAEIARFERFDNGKQLARYCGVSPRNASSGHRMADAGLVKSGNPHLRRVIIQAAQRLVNYDRRWATFAARKMREGKPRNLVVAAVANRWIRKLYHLMQPEQLAVM

SEQ ID NO: 147669 - protein, 328 aa, unidentified
MENEIHFIGIDVAKAKLDVDMLRPDGRHRSKKFANTPGGHDELVSWLRGHQVIHAHICMEATGTYMEDVAAHLSDAGYQVSVINPMLSKAFVQSQGIRSKTDTVDARQLAYFCREKRPAIWEAPHPVERALRALVLRHQALTEMHVQEQNRRESARDVQLPSIDMHLLWLDTELKRLEKQIKDLTDDDPDMKHRRKLLDSIPGIGPKTSAVLLAYVGLKERFREARQFAAYAGLTPRQHESGSSIRRVSRMSKMGHVSLRRALYMPAMVTLYKTEWGREFRERLEKNGKNAKLIIGAMMRKLAQVAYGVLKSGRPFDATLHTKNACMA

SEQ ID NO: 147670 - protein, 334 aa, unidentified
MEKITTAGIDLAKRVFALHGVDGAGRVGLRKTVRREQLMQTVAALPPCLIGMEACSGAHEWARRFQELGHTVRLMAPVFVAPYRKSGKNDGNDAEAICEAVSRPNMRFVPVKSAEQQAILALHRVRQGWIGERTATINRIRALLTEFGVVLPNRAQHVRRDAMAAAEGLPALARRALEDLRSHLGALDERIGAYDRELEAQARASDAAQRLMQIRGIGPITAVAIVATVGNARDFESGRQFAAGLGLTPRQHSSGGKQRLGHISRRGDAYLRCLLVQGARSVLYTAVRHHDRLSRWVCTLRARRGDHKTLVAIAAKNARIAWALLAKNQTLQTV

SEQ ID NO: 147671 - protein, 426 aa, unidentified
MFLKVVYPICCGVDVHKRFFVATIITTGDGFIPHYKKRRFSTFNKQILEFKEWLLENDCRDVCMESTGKYWIPIYNLLEDTINVTVANPKWVRTIKGYKDDEKDSKWIGDLFRIGYVRGSFIPCKQIRILREFLRYRFKLVCCKSSEKNRYQNVFTVCNVALDAVVSDMFGVSASSITDYIINSDTFDPEHCVSLLKRSLKNKADEVVASIEGFQMTSEQKIRARMIKEHYDFLVSDIQKFDDMIDVLAAPYESAISLFNTCPGVARRSAITVLSEIGTDMSQFRSTKHLCSWAGLTPGNNQSAGKKKSVHITRAGVYLKPALVEIAHAAVKDKENPYYAIKYERIAKRRGKKRAIVAIARMILTALFHMLSTGELWNPCDLQQVDMPPELREKELQKSLRRAAKLLVAHGFVSPDAIHIPEPASA

SEQ ID NO: 147672 - protein, 370 aa, unidentified
MDRVCGLDVHKDSVFMCILTANGEKIEDVFGTLTPELDRLRDTLVSHGVGKVAMESTSIYWVPIWRILECDFDVKLVNPYFIRQLPGRKTDIKDAQWIATVLQKELIKGSYIPDSKIQELRQYSRRIFHLTRRKQQAESAIDLTLQRCNIRLSNYVSDIGCKSMRKVVNALICGETEVLALLVHKRIRNKHCHEVIKSSLTGIVSSSDRDMLKMSLEEVELYDRQLLECKEKMRIICEGHYAEELEILQTAPGIKEESAMRIIAEIGVDMKAFLTASALVGWAGLRPRNDQSAGKIKGRKTLHGNKYLRVMLTQCAWGACRTQTSKFYSRYHTLKKRMNHNKALMANARKLLVVIWNLLAKKQPYMPFVN

SEQ ID NO: 147673 - protein, 326 aa, unidentified
MKELYCGVDIHKENFVGNIMKEDGTIVRESSFPPTKEGAQSFFCGMPIKEVAIEACGIWRGAYNLITAIGYKVKLANPVKTNQIACKKKTDKVDAKTLANLLRTKYLPEVFIPDENTLKLRDTVRHKSNLTRLKVRIQNKIKGYLLREGIAYPKKIWNEKALSELRKLEKEELNDLIDIYWFFRNKEREHLRKIGNISRNTRLSALLSTHPGIGEFGAIMMVAEIADVTRFEDAKHLLGYAGLVPGIYQSADKSHSVQNHAVNKWLKWIVTECSSRAAMFDKEFMTKFAKVKKRKGFKVARREIARKMLRNVYYMLKNEEPYNDAS

SEQ ID NO: 147674 - protein, 357 aa, unidentified
METAYDGRQVVGMDLHRRRSVLVRMTEDGRRLAKARITKSPQELQAQIARAGTSPRVVLEATFGWYWAADTLTAAGAEVHLAHPLGVKAFTYRRVKNDERDAADLADLLRMGRLPEAWIAPAEVRELRELTRYRQKLVHLRTSCKDQVHGVLAKLGVPVTCTDIFGTAGSAWLDGLGLPQPYGGKVTSLRHLTGELTGEITMLSAVIADLLAGDRGYQVIQQLPGIGPVLAAVIIAEIGDVTRFKTAAQLCSWAGLTPRHRESDTKVTRGHVTKQGSRLLRWALIEAIQRVPQDSVIGGVKAAIITRRGKEAKNIAKVAAARQLLTLVFYGLRDGQIRCLSRTPGDAPPMTRPSTRV

SEQ ID NO: 147675 - protein, 396 aa, unidentified
MSNPQIFRLMRTVCGLDVHKDSVFLCILHDSGEIFEKVFGVLTHELRDMRRLMQSHGVTEVTMESTAVYWIPIWRVLEPYFRLKLVNPYFIKQLPGRKSDVKDAQWIAECTLKDLVRGSFVPPERIQQLRQYDRRIFDLDAEIVRKLSKLDAVMQRCNIRLSNYVSNTDTKSYKDVVGKLCEGVTDPEVLIKEIYGRIIKRHGRETILAALTGVVSDAEKDTMRQLRNELDLAEKHKQECMDKMLHICQIYYPDELKRLMTIPGIKERAATSLIAEIGVDMTKFQTAAHLASWSGLKPRNDESNKKIKSRRITHGNVYLRKTIIECAWGASRTKDCFFSRFSYRQTVVRRKNRMKVLVAVARKLLIAVWHVLHDETDYKDFEINNDCDTSVEENNG

SEQ ID NO: 147676 - protein, 355 aa, unidentified
MIIIGADYHPGFQQIVFVDTDTGEFQERPLQHREEAEKFYRDLAAQGMKVRVGMEASGQARWLERLLAELNFELWIGDAAEIQSKRVRKAKTDRADARLRLRWLREDRFPRIWVASWANRDLRQLLWHRHRLVQAGTRIMNQLQAVALHQGLRSKKKLWRESGGQQLESFRLAPWASRRRHDLLELLDRLNPMIAELNQAVEQEVERCPAAQRLMSHPGVGALTALAFVLIIGETERFGGGQQIASYVGLVPLEKSSGNRRRLGHSSKPGSSMLRFLLVEAAQVTVRSIPEWRGKYFHLALRRGRKIAKVAMARRLAVRLFWMWRKQWDDEQLKKFGSQGRKPSSHAGEPMASTR

SEQ ID NO: 147677 - protein, 346 aa, unidentified
MKRLMAGMDLHSNNVMAAVVDEDGRRLVHKKLECDLKKVAEFLAPYKEQQEKVAVESTYNWYWLVDGLSAQGYPMVLANPVKIEQYSGLKHADDTSDAYFLAELLRLGILPTAHIYDAQLRPVRDLLRRRMSLVQQRTALLLSFKGLYARTTGQSLKLGQVKAMTDAEVKRLYEHPANQLIGQLQKVHIKGLTESIYKIEAVIGKVATALPSYKKLQTLPGVGVILGQTITMETGDINRFKTAGQFASYCRTVDARRLSNGKKKAQNNQKCGNRYLAWAFVEAANFSRRSNPKCRQWFDRKAAKTSQVVATKALACKLAKAAWFVMSQQLDYDPNRMFPELAQKTK

SEQ ID NO: 147678 - protein, 338 aa, unidentified
MKLQCGMDLHGKNVLCSLTDENDKVVVERRLPTKLADVLRFLEPYRKSVINIIIESTYNWYWLVDGLREEKYPVSLANPNAVKTYDGLKHGNDKGDARHLAHLSRLGVLPTGYIYPKEQRGLRDLLRRRMYLVQERTGLILSLQSLCERLNGGKIAAEKFKHMKPEALVEKIDDPYHRLGAVEYLEIVRRINQSIYRLETKVLQECEETHQFKLLTTIPGIGRVLGMMIALESGPMNRFAGPGNYASYARTVNAERYSDGKKKGENNRKCGNKYLAWALVQAAHHLIQHCPEARSFYDRKKAKKNGAVATKALACKLARCIYHMLTEKEEFDVKKIFG

SEQ ID NO: 147679 - protein, 503 aa, unidentified
MTTATARGKPASSPPPSAQRIQAQAQRQAYHRRKTRAKGKSEALRHKEAAQVQALPVLRPHAAGIDIGSWSHWVCVGFTAEADSGLIQEFPAHTDGLKAIAAFLREHQVKTIALESTGIYWIPLYELLQAEGFEVLLVDPSYSQQLRGRPKTDRRDCQWIYRLHSVGLLAAAFRPDEKTCQLRAYLRQRANAVRQASRHVQHMQKALEQMNLKLTEILSDITGVTGRSIIRAILRGTRAPEKLAKYRDKQCKASEAQIAQALTGSYREEHLFALKLAYEAWQFSLGQIEKVGGQIALQLGRMKCDRALPPLKPKARPKRRVNSPGFDVRAALYYVVGLDLTEIEGISELTALTLISEIGPGVSQFATVKKFCSWLGLCPNWRKSGGRVKSSRTRRGVNRAAQALRLSAQSLHHSQGALGGFLRRMKGRLGVQAALTATAHKLARIVYLALKHGMTYVRQSQEDYEAQMRQKQIKALRRKARQLGLEVVEKPSEGVAESASVQG

SEQ ID NO: 147680 - protein, 385 aa, unidentified
MQVMIEGQSHFQPFGLPYWSFEDLNKGVESMTASYDYHIGVDYHKSYSHLVVQDSSGKTLRSGRVKNDRQSLGGFLERYRENSHAVVEATRNWMVMYDWLDDICDDVVLAHPLKVKAIADAKIKTDKIDATVLAHLLRADLVPEAWAPSDKARELRVALRERMFYVRLRTMTKNRIVTVFDRYPEQTAQLKKLGDLFGKAGRLQLAQVKVSEIDRIQIDRGLDFIADIDVRIKQSETTIRAMTKANPNVKLLKTIPGIGEFFARLIDAEIDDIARFRNPKKLAAYAGLVPSTYSSGGKTFHGKIIKQGNKWLRWAFVEAVAPAIASDAQLRAQYDHLNIRGTNKARVAIARKLLTIAFHILRDQRAYEPRSESITEGASTISRLS

SEQ ID NO: 147681 - protein, 424 aa, unidentified
MKSASNTPSSERPLALPEVAINDVTAGIDWARDDHAACIVDGRGHKIATTTIEHTIAGLRDLVGFLGRHGVGEVAIERPDGPVVDTLLAADLVVVVISPNQVKNLRGRYGSAGNKDDRFDAYVLADTLRTDRARLRPLVPDTEATIALRRACRARKDLVKHRVAAANQLRAHLRNVLPGAIGLFKDIDSEISLAFLARFDTQDRADWLTPKRMGDWLAKQGYSGRTDPAVLHQRLLDAPRGATGDHATTQAHITASYVALLKTLVEQIKALSTQIDRQLDAHPDAHIFTSLPRSGRVRAARLLAEIGDCRARFPTPESLTCLAGAAPSTRQSGKLRTVGFRWSCDKQLRDAVTDFANGSRDANPWAADLYDRARARGHDHSHAVRILARAWLHVIWHCWQDRAAYNPETHRALQRVLATQPEAA

SEQ ID NO: 147682 - protein, 410 aa, unidentified
MNPLYVGIDVSSKNNVAYLMKPDGTKHSSFSVQNNRGGAKLMSGRIVSALTAMRLNDVVIGLEATSIYGDSLVYALREDGRLGRFQRKIHILNPKQVRKFKEAYPDLPKNDFVDAFVIADHLRFGRIAPEVYMDDYRYKALQTLTRARFYAVQNLSREKQRFANHLFLKCSGLAQGKALSQNTSATTIALMEHFETADQLAYADLDELTAFISKSGHGKFADPAATAKAVQAAARGSYRLPKTVNDSVNQAMSVSIAAMRALESQIKTLDKAITQQFKIIPNTLTSVPGIGKVYSAGIIAEVGDIHRFQSQASLAKYAGLVWSQHQSGDYEAQDTHLIKSGNRFLRYYLLEAANSMRRCDSEFRRYYDLKFKEVNKFQHKRALAFTARKLVRLVFRLLKDNRLYIPPEKY

SEQ ID NO: 147683 - protein, 345 aa, unidentified
MPIVGGLDIHRKQITFDYLDTATGQVRRGQVSPADREHLRGWLARFAGRDDAAFAVEGCTGWRYVAEELAAAGVTVHLAEPADTAFARGRKRHAKTDKTDCRHLRQLLAEGRLPECWIPPGHILECRALLELYNDLRREHTAWAQRIHAVLFHQGAPAMGEGALRTEQGLAALRAAAAARLSPAGQAQIATALEVTAALEARMHAVRHQLLDAARHLTGAKVLAARLYGVGPVTALALTCWLGGAGRFSSSRKAVRFAGLDVTVWSSDRKGPPGRLSRQGPPVLRWAVYEAGKTHARSSAPDHAYYAQVKENNGGKRAALSEARKIIRQACHILTELGDDALAAV

SEQ ID NO: 147684 - protein, 358 aa, unidentified
MTAAGMPQTPPAPAEEQVVLGVDTHEEVHVAAIVTVLGAALGHREFPATAAGYQQLPGWACSFGVVRRAGVEGTGSYGAALTRFLRRNNIQVTEVDQPDRATRRKRGKTDAVDADSAARAVLSGRAAATPKTGEGPAADMRILRLAKESAVKARTQAMNQLKAVLVGIDPVLRESLSPLSNTSLVARCAALPGTADAAAFTLGLLARRIQQLTTEIKELTRRVNRTIQARHPELLEIVGVGPDSAAALLIAAGDNPDRLASEASFAALCGVSPVEHSSGKSQHRRLNRGGNRQANAALYRIVIPRIRRDQRTRTYLERRTKQGKSRREIIRCLKRYVARELYRRLQPPATPPAPFPTA

SEQ ID NO: 147685 - protein, 398 aa, unidentified
MKTSGLDVHKDSIFCAIYDGTSYSVVKEFSTTTISIRSLSEYLRSEQVEKVAMESTSSYWVPVWDILWESGFDLTLVNPLHIKQLPGRKSDSKDAQWIAELLHKNMLRGSLVPSSLIQELRTYTREYRTLVNQRTKVLTQMDRTLVMCGIRLSSCISNIDSKSFMQVVEALIREETDPETLVRLVYGNRKNKESGKLKACLTGNMKVHHRLKLMTCKQQFDLFESQIQLYLNQMQELCGEHFSEEINNLTTLPGVSQISAMIIVAETGGDMSAFANSGKFTGWTGLRPRNDESAGKFKSTATTKGNKHLRAIIVQVAWAASRTKGSFFMDRFQKLAMRKSRKKALVAIGRKMLVIMWHILSKKTQYNPLLVHIYDPVKVKHKIKYHEREIERAKKMIV

SEQ ID NO: 147686 - protein, 412 aa, unidentified
MNIVFERCAGVDVHKRNVVVCASTPDEHGQRHKERCTFSTMMPDLLRMRHWLQSLGVTHVAMESTGSFWKPIFNVLEGHVEVFVVNAQHLKAVPGRKTDLTDAEWIADLLQHGLLRPSFVPPAFQRELRELTRYRTSVVEERSRTINRLQKILEDTNIKLSAVATDLMGRSAREMLAALVAGEADPAVLAQLARGKMRAKRDLLVQALQGQFQSHHRILISAQLAHIDALDEEIGHLSAEIAQRLRAYEPQLKRLETIPGIKRRLAAVILAEIGPDMQRFPSARHLASWAGMCPGNRESAGKRLSGKTRKGSPWLRTALVEAAHAATHCKESYLSAHYHRLVLRRGGKKATLALGHTLLVMVYHVLAEEKDYQELGGNYFDEQDRLAVQKRLVHRLEKLGYEVTLTPTSPAA

SEQ ID NO: 147687 - protein, 462 aa, unidentified
MKLYLGGDVSKGYADWVILSEKKQAVLGNFQLDDTYAGHCKLYSTLEAYFGKHQGLEIYAAVESTGGYENNWFNTLKSYQKVFNLKVARINPAGVNFNRRAGLKRNVTDAISALSIAEYLINHPDNIKYDQDDQWKSLCRHWNFVEMQKQQRVQTINQLETILYSANPTLMRFKKDNLPNWLLGLIIQCPTAETLAKVRPEKLAKIPYLTLARAKTLVAEAKQSIASVTDKNAEILVSQIARQIKSFDQNIKSQMQLIERDLTCPEIDLLKSFKGIDTISAIGLLLEIGTIERFPTVKGFGCYYGLHPKYKQSGDKVIGVRMSKQGSKNMRKILFNIAKGAITYNPLIMGVYEKKLSQGMTKMAAIGVCMHKILRIIYGMLKRKEAYNPLIDKQNRERSKEKQQEKQQQENANIEKSRRYQEFDGKAPISRKQTKKRREHDLSQCEITSQSTGSTCSSKTKL

SEQ ID NO: 147688 - protein, 409 aa, unidentified
MNKVDIAPFEVFCGIDVGKSLNHIVALDRYDDKPLINRKVPQEEAEIRAALEEAGDFGLALVTVDQFGAFGRLVVGVAKSMDIPLAHMSPRRFRQVAETYGEDKFDEKDAFILADASRTTPRNIEFVGNRAESMAEIKVLSSRRDDIVEERTRCYNRLHDFIHQVSPPLEELFSKRKLHNDLEIRLIARYGGPIGFRQAGRARASTWAAELKYHCVDGPKKVEQVFDVLDRQTVMLPGAAVIEEQIRSIASRIIELLAEEKRLNLMIDQRAKMIPEVDLLQSIPGVGPVYAALIAVEIGDIGRFRNSNHLASYAGVAPRKEESGTSVHKRRKRKGGNRRLKNALMQSSQRSVQCDPVARAYYERKRAEGKKHLQALRALARHRVTVIFAMLNEGTFYEPPAEVDENGRG

SEQ ID NO: 147689 - protein, 323 aa, unidentified
MTQTICGVDVASKSLEARIGQQGAAGSFANNPEGIAALGAFCQAHQADLVAMEATGGYEQQAFAQLSEQGLPVAILNPRAVRQFAHSMGSLEKTDRIDAGMIAWYAEVKKSRPVCLAPESQQHLRALVTRLRQLTEMRAVQLNQQRLVTDRAVQASFKKLLAVLARQIRELEQRIAALLEKDPLWRQLNEAFRTIKGVADRTVARLMAEMPEIGTLSNKTISKLAGVAPLARDSGQYQGKRAVRGGRPAVREILFIVASVVGRYEPDFIAFRQRLRAAGKPPKVVRIALAHKLLVRLNAKAREVRQRLATLQPDPRALQAESR

SEQ ID NO: 147690 - protein, 407 aa, unidentified
MSKRITDEGQQDKRIRFVRGERVEVGIDVHKRSYNVTLWSEQRQSVVSRWTQPADPAALIRSLAPYKKRIDGVVYEAGPTGYALVRRLREAEFRADVIAPSRTPKSTGQEAKSDRLDSRKLAMWSAKGLLQAVRVPSVEEEGDRQVFRMRHDVAPKRRRIKQQIKSLLLQHGIAQPDGLRTWARRGVEALRRMQLSAQLRFSLDLLLEDLAHYDWRLKKADAALKALAETKRHKRSVEALRSVGGVGPVTAMAMRTELIAPERFSDGRQVAAMTGLAPMVSRTGQTVREGALMKCGNARLRKALIEAAWRWVASDAWAGRQYARLALNTGDKKKAIAGMARRLVIILWRISVTGEPYRPRPIEEPTVARSPGAKKRCQPGRPSTQNRSRRGTIAQTTAPRALVQPPG

SEQ ID NO: 147691 - protein, 338 aa, unidentified
MGRYIGIDLHRNCFTSCIQAENNRSYLRTWRLEDLEIFCAKLRKSDEIAVEVTGNTRLFYDAVFPLVSRVVVVNPHQFKVISDSVNKTDNNDARRLALFLSKDLLPEVRMTNKEHAQIKSLTQSRDKLVKLRTALKNKINNICSAHGINLKRECLSSEKGLNRILEFSFDPMVKIEVRVLVDQIRSLNKSIKELEEAIKDAGSKLSGSKNLKSIKGIGDLGSAILLSVIVDVNDFADEGKLAAYFGIVPRVSNSNGTNHSGRITKSGNKLGRTTLVQCALIAKRYSPYLSDYYERIKAKRGAGKAIIALARKFLNVIYNTLKNDWVWKDFPNGVLAEV

SEQ ID NO: 147692 - protein, 349 aa, unidentified
MRLYTNTHRHYCGIDLHAKTMYLCILDRDGKTVVHRNMRSRPEDFLRAIDPFRDDLVVAVECIFTWYWLADLCRNEGIEFVLGHALYMKAIHGGKAKNDKIDAFKIATLLRGGTLPKAYVYPPEMRATRDLLRRRLHLVRRRANLLAHIQNTHHQYNLEPPAAKIAYKANRVGVAEAFRDPDVRKSMEIDFALIEHYDATLRELELHLERRAKQHDPQAYYRLRSVPGIGKVLALTILYEINDIRRFERVQDFLSYARLVKCEHSSAGKKLGTGGSKIGNAHLKWAFSEAAALFLRNNPEGQKHLRRLAGKHGKGKALSILAAKLGRAVYLLLSKDRVFDMDRFLARTN

SEQ ID NO: 147693 - protein, 401 aa, unidentified
MNAVGIDVSKGKSMVCVMRPFGEVVLEPFEVLHTAQSLNDLAGKLKALDGETRVVMEATGNYHKPVAFVLHDAGLFVSVVNPVLIHDYDNNSLRRVKTDRKDAVKIANYTLDKWTRLRQYLPEDDTRLALKNCYRQYQQAVAVRTMLKNNLISSLDLTFPDANKLFSSPAKSNGCEKWVDFIGDFWHSECVSSLSSDAFAKKYLKWCQKHGYNFTRSKSDTIYACAVNAASLPKSPTSKLLIQQQVAQLKAVSQSVAAFQQEMLRLSQQLPEFDTVMEMYGVGPSLGPQLMAEIGDVRRFSSKKSLIAFAGIEPQPNDSGKVVGNDKGISKVGSAVLRRTLFLIMTVILQTQPQDEPVFQFMNKKRSEGKPYKVYMMASANKFLRIYYARVKAVMDSKHSK

SEQ ID NO: 147694 - protein, 402 aa, unidentified
MMPTHPSTVVAGVDTHLATHHVAVLDHTTGALLGDLEIETSLTGYRQLLDFVTSFGTVALVGVEGTSSYGAGLSRFLTRAGIAVREVIRPKRAARRLHGKTDLLDAILAARTLLTGETLPLPKPGTGNVEAIRVLLTARESAVKARTQAIVQLKSLLVTAPDQVRDTYRRLTGKALHAKLAACRPHGPVDQSSTMTALRSLARRIRDLDDEINLLNPQLQTLVAQTAPGLLDLVGVGVISAAQLLVTVGDDPTRIHSKAAFAKLCGVAPIPASSGKTHRMRLNRGGDRRANRALHTIALARARIDPATIAYLAKKQAEGKTRREATRCLKRYISHLIITAIWTPPVVPPINDLRPLRHAKGLTTTQAGHALGVWPARISGIERGTLRNDTLTTRYREWLTTA

SEQ ID NO: 147695 - protein, 355 aa, unidentified
MNDAKYIGMDVHQATISVAVRDSSGNLVMEAILETKAETILQFIRGLRGSLYVTFEEGTWAAWLHDLLQPHVTRVLVCDPRKNALLKVGNKNDRIDARKLSELLYLNKLSPVYHGEPGIRTLKELARSYIAMTRDLTRVMSRLKAIYRSWAIPCAGKQVYAPRYRAEWLARISEAGVRRRAELYYQQFDALAALRQQARRELLAEARKHPAMRLLRQIPSIGPIRAALLIALMQTPNRFRTKRQLWAYCGLALRTYTSGEYRFVGGQLKRSKKVLAVRGLNINHNHDLKNIFKGAATRAASTAGPFQHLYEACVAGGIKPHLARLTLARKIAAITLLVWKKGVRFDAEHLKQQAA

SEQ ID NO: 147696 - protein, 406 aa, unidentified
MKQIVSVGIDVSKGKSTVCAMIHPNTIIKESFEVLHTVEEMSMLADYIGSLDGEIRIVMESTGHYHLPVAQFLYQKGFFVCVENAYIIRQFSRIMLHGAKTDPLDAKKLAKYGLAYWSELKPYKFHPSCYTELSLLSKQYQTYIKLLIAAKQNVIHLMDEMLPGFKEALDTASSVQFSKVKYVDFAKEFYHVDMIKSMGKEIFRENYKQWCKEKGYRFQSEKADELFHLAEDGIPTLPTEFPSTRLCMEVATEQVSQLGYALEQILSQMQNLAKTLPEYQTIRQMGGMGEKLCVRFIADIGDVRRFHNGKALVAYAGIDAPPYQSGQYTGTKRRISKRGNSALRKTGYEVMKSLKSHPPKTDTRVYDFIIKKENEGKSRKQAKIAGLNKFLQIYYARVMEIYKNIA

SEQ ID NO: 147697 - protein, 327 aa, unidentified
MILSALGIDIAKLKFDVCLMNTQGKLKHKVFPNTASGFAQLAAWLSKQQVERPHACMEATGAYGEALAYDLHAAGHKVSVINPAAVRAFAGSRLSRTKTDKVDAELIARFCLAQQPLAWTPPAPEVRELQALVRRLEALIEMRVAEENRLEAGSVVAAVRSSVEAHVAYLDAETKRTEELIRHHIDSHPTLKQQSALLDSIPGVGETTAALLLAEIVDVTQYRSARQVAAYAGLVPRERRSGSSVRGRTRLSKIGNARLRKALYFPAITALRCSPFFKAWAEGLRQRGKCKMSVIGAAMRKLVHLAYGVLKTGKPFDPEWAQNAKSA

SEQ ID NO: 147698 - protein, 362 aa, unidentified
MRIIGCDLHAGQQTVAMLDTTTGEIVNMTLLHEGNNVREFYSTLPGPVRVGIEATGSMQWFVNLMEELGIECLVGHPAEVRAAEPRKQKHDRRDADLILKLLVENRFPAIWLPSKELQDLRSLLRHRHQWVRMRTRIQNALQAIALANGLRRGPSLWSQTGQHTIASLPLAPHTAYRRSELQAVYAKFEVEIEKLNQRVEEQARGRAGARLLMTHPGVGPITALATEVFLGDPARFADSKALASYVGMIPREYSSGGRQRLGGLSKQGNPLLRFLWGEAGMHAVRQDPELKRFYHRKLIQKGLGKARVAVARKLGIRMWIMLRDQIEYNEFCRRGQKQQKSGDACAGMPETRNGAKSHRPVD

SEQ ID NO: 147699 - protein, 340 aa, unidentified
MEEVSTIGLDIAKQVFHAHGADASGAMLFSRRITRQKLIQFFASQPSCTVAMEACAGAHHWGRELMTLGHEVRLIPPAYVKPFVKRQKNDAADAEAICEAAQRPSMRFVAVKSEESQASAAVFRARDLLVRQRTQLINALRGLLAEHGWVAPKGLFHAGAMMANIEDPSCSLPQSARDVFLVMIASVKALDERVHLLDREIAKRAREDETARRLMTIPGIGPITATALLALAPPPETFRKGRDFAAWVGLTPLQRSTGGKTTLGGITRMGERTLRRLLVIGASAVVLHAAKRGAPRGSWLEQMLARKPRMLVTVALANKTARIVWALLAKGGVYRAPAVA

SEQ ID NO: 147700 - protein, 399 aa, unidentified
MFAVGIDISKSKSVAAILNQDGSMHTSPFEFHHTQPELDAFIKYILNSKQSATILMENTGHYHYPVLKAFQEAGLPVCMVNAYQIKKFGDMDLRKAKTDKKDAVRIARYALEKSYSLVPYTSMEQKYEDLRFLARQYNQRMLTLKTNKVFLLNLLDETMPGITNILPLTTRTPETSLSVLFINRFKSYDRIKKMGKSRFLDAFEKIARKSRNRQTKTYGLAIYEAALRNITTRGENEYTLAAQDQCLELVCESQKAADSIILKMKTLAETLPEYAVLRSMAGVGDRLGPLILAEIGDIRRFHSGKALNAYAGNDAPPYQSGTFESHNRHISKRGNAALRKYCFEVMQALKLTRPQDDPVYLFLLKKEQEGKQYNVAKMAGVNKFLRIYYARAMETLKQQ

SEQ ID NO: 147701 - protein, 433 aa, unidentified
MGVFHQPPSGVKMFHATVKRLSFSVAAQKIIVGLESTGHYYENLYRTLTNLGYDVAMVNPASVYAQRSGQLNWCKTDEIDLCAIGQVLIDNQATETRLSQGLYYNLKQFTRLRRDEIRKRARLKIQTRVLCDHIFPGLQHSGIFSDFWGKSSMLLLEDYPTPSSLIRLRTRRLARFFKKHNTKLGLYTAERLLNLARNTLCSNKVNLEAHLFNLRFKVADLKMADEKIRKLHLELARYLVQTPGIVLLSIKQINVPSAAEYVAEVGPLEQVSNAKKIISRAGLNPSKFQTSQYERANTPITKHGSNLLRNISLIISQNLIRVDPHSSQPHNPYFREFFERLLEGGKDKRVTKVACANKFVRVSYRVMRGRELFSPPTWRKNNVSDDPLAKLKVFLYLNKSEELFEELAENAKEQLSSRYRSSFQKYSRVEKGN

SEQ ID NO: 147702 - protein, 399 aa, unidentified
MKSNHVLELRVGVDVGCHNHNVAIGLSTGEVLEEFSIVHAPEGFRKFFLRIEHNEKTYGCPVAVAMEGCNGYARPLDTLIRTRNYRLFNINNLKLARFKEIFPGAAKTDDIDARKALELFQLRDHLPIAKDVLQEIKVTPVENDILKRISRRRRRLVNERIRVLNNLQADIQSVCPGLLEITGEAGNLWFLRFLTSTDDLRKLARVREATILKIPGIGTKYTKILLKWQEHAEFSRDVEWVGDMILADARRVLDLYEQIKTLEAQAAEKAAISNIAQIISTMPGFGHVTIAELAGEIGAIERFENESSLALYLGMANLDNSSGKQKGSKAPKQVNERAKSAMMIAVDRHRKYVPQSQKYYEKKRTEGKKHNQAIRSLGRHLCRIIFKMLKENREYFFPK

SEQ ID NO: 147703 - protein, 309 aa, unidentified
MLTAEADKRKTKVVVNTAAGVQALLAWCAKHGAQPAQLHAILEPTGLYHEQAATALPQVRVSLVNPAQARDFAKALALRSKNDALDSYVLARYGQTLSPALWHPAPLHARQLRALLTRREALSKDLLRELNRKEKSQFSPSAPLVDGSIDKAIAFLREQIKQIERAIDQHIDNHPDLKQDCELLNSIPAIGPQAGNAILAVMHNRHIDSAQSLAAYLGVVPVQRQSGSSLNSCAHLSKAGPSQVRATLYMAALVGTRHNPHIRALYQRLLKAGKSKKAALGAAMRKQVHLCFGVLKNRIPYQPNYAMNG

SEQ ID NO: 147704 - protein, 445 aa, unidentified
MKQKKSLKKVGMTLPKHLQHINVNAAGIDIGSRSHFVAVPEGVDEKPVREFSGFTGDLERMAEWLIACGVTTVAMESTGVYWIPVFEILESHGLEVKLVNARHVKNVPGRKSDVLDCQWLQQLHTYGLLRGAFRPVEQVCTLRAYVRQRAMLVRSAASYIQRMQKALAQMNLQLHNVVTDITGMTGMRIIKAILGGERTPEVLAAMRDRRCKNSATTIARSLQGSYRPEHLFSLQQAVELYAFHQEKIADCDRQILEQLKSFDAQNAPDDAPPSNVEEALQRMSGVDLTSIDGIDTNTALKILAEIGTDMNRWKTAKHFASWLGLSPGTKVSGGKVLSSATKPVANKAAAALRMAAFTLFNSKSALGAYLRRQRARLGAPKAITATAHKLARLVYTLLKQGTAYVDAGQEYYEKRYRLRVIQNMKRKAQGLGFELVAIQGATIPA

SEQ ID NO: 147705 - protein, 412 aa, unidentified
MEGETVIAGVDTHKDVHVLCLLDGLGRKIRSGSFGADPEGYDRLAEAIGDPGSCMVVGVEGTASYGAGLTRRLVELGYNVVEVLRPKRDKARPGEGKSDPLDAERAARKAASGRGCSVPKSQDGWVEAVRQLYVARRLAVATSTSCVACAKSMLTTAPSALRERFRGRERPKDLMPLLARGRKAGDALEESVLASLRSVAAVWKEARSQVESLDERIRALLEANAPALLGVEGCGTTTAAALVVAAGDNPGRLKGEAAFSMMCGASPIPASSGKTDRHRLNRGGNRQANWALYEIAIKRMAYDERTRRYVARRTSEGKSRREAVRCLKRYIAREVYHVLMDPNPDGAAPEGPELAKMRKAMRVTQKKAAAELGLSAATLGHLERGKRRSTKLERRYYELLCELERTLPQTAS

SEQ ID NO: 147706 - protein, 368 aa, unidentified
MKLTVRYLGLDVHADTIVIAVAEEGRAPAKVLATIPHCWKTLHARLKVLAAQGQLQICYEAGPTGYVLYRKLRSAGFDAQVIAPSLIPRKSGVGVKTDRRDAAALAHFLRSGDLTRVWVPDEQGEALRDLSRAREAAKSAELAARQQLGKFLLRHGRRWELSTWTKKHLDWIRTQKFEQAAQNRVLADALRAVEDATARIERLETDLQELAPKVQHLWPIIRALQAVRGIAFVSAVTLVSELGDLQRFGSARQLMAYLGLVPSEHSSGLTQRRGSITKSGNSHARRILVEAAHHAPRPTTTSKILRQRQLGLAPEVIRIANKAQQRLQRRFLALYQKGKSKPKVVVAIARELAGFLWAIAQQSQLLAT

SEQ ID NO: 147707 - protein, 373 aa, unidentified
MESIIYVGMDVHKDTYSLCCYDFRNNEIFSEMKTKATTKHVTKYLAQIKKARGEDTLFVCGYEAGPTGYGLCRGLQKEGYSCVVMAPTTMTNPDGKKRVKTDRIDARALSRILAYKSYSPVVLPSEELEALKEYTRARDSKKTMLKRAKQELQSFLLRNGKVYPETGNSWTIKFFKWLESLEFSKEYLQESFKEYLSEVYTLKAKVEQMDAKIEEIAQLDLIKDKVDKLVCFPGINIQTAVAITVEIGDFQRFANAQQFSNFLGLCPGEDSSGKHIRKLGITKAGNNRLRRLFSESAKAIKMTNAYGKKSRRILERQKGAPADIIAYADKAAKRIREKMRSMENRGKHSNVASIAGARELSCFVWGMMTANMA

SEQ ID NO: 147708 - protein, 340 aa, unidentified
MHYVGLDVHRKSIAFCIKLADGTIVGEGRVEARREKLDEWLATLPQPWSGAMEATIFSDWIYDYLAPHAAALAVGHPERMKAIAAGKKSDRLDARTIADLLRANLLPPAFTMPAPLRDLRRVLRYRARLVSDGADARNRIAGMLMQLGVPYDSSRLHGKKYFRELVKTHGQLIPDSARALLAFSRRQIETIAAMDRQLTRALAQHPDLAARVARLSSIRGVGQVTALTWALEIGPVERMGSIDRAVRYCGLCSEQKESADKRMRGPLSKRRNRHLQTVLIEAAHLAPHWNPELAAVQAREVARGNRNRATLAVARKLVAWLRGADRGHQPRAVPAEKAAV

SEQ ID NO: 147709 - protein, 377 aa, unidentified
MKRIKFVGLDVHAETIAVAVAEQEGEIRSLGMIPNREESVRKLVKKLGPVEQLRFCYEAGVTGYALYWQLTRLGAKCEVVAPTLVPVKAGDRVKTDRRDALKLARNYRAGELTAVWVPDAEHEALRDLVRAREAAKKDQLRARHRLSKFLLRHGRRPPVGVALWTVKYLEWVKRDVHFAVKAQEATLLDYLHEVEHMAARIVRLDSAIEEAVKVAPAKMRAVIEGLQALRGIAKISAVTIVAELGEVTRFSKARELMGYAGIVASENSSGERQRRGSITKTGNAHLRRVVVEAAWAYRHRPAIGFTLRKRQGNLSEEVKEIAWKAQHRLHARYGKLLAKGKNKGVVVTAVGRELLGFIWAIGVQVEAEQKESLRQAA

SEQ ID NO: 147710 - protein, 360 aa, unidentified
MKKIVGCDFHPCWQQVAVLDPTTGEVVERKLLHADGEAERFYQQLGSPSVVGLEACGNSQWFVDLLERLGHQVVVGDAAAIRASYVRKQKTDRRDAGHILRLLVEDRFPGLWRPSVEQRDLRQLLIHRHKLVEIRSRVKNGLQHLALNRGLQKGSRLWSVRGRADLEKLSLEGWSGRRRQDLLALLRALDVQVMELDQAVEQAAVQHPQARLLMTQPGVGPITALAFVLTIGDVSRFAHSGQVASYVGLIPREYSSGGKQKLGAITKQGNRFLRQLLVEAVQTSCRLDEGFRKEYQARCHHKPKGVAKVAAARKLAVRLYWMLRQNVAYPEIARIESSSRVPLAGTNEAETLNERSRTPH

SEQ ID NO: 147711 - protein, 371 aa, unidentified
MKNTIKYVGLDVSKEKIAVAIADEGRDPARYHGAIAHTPDAVGRLIRKLKSPEVTLEVCYEAGPTGYDLYRWLTKMGISCTVIAPSRIPQRSGDAIKTDRRDAERLAQLHRAGELTAIHVPTPELEALRDLIRARENAREELHRARQHLVHFLLRHQIHTPEGMKKRWTKRYRLWLSTLTFEHTAQERVFTEMQQQLREVEERIKRLEEAMRKEAEICPYASVIQALQGLRGIALLTAMTLVVEIGNFERFRSPAQLMSYLGLVPRESSTGPKTRRGRLTKTGNASVRRALVESAWSYRYLPAVKGDLEKRLEGQSAHVQETSWKAQERLHKKYVQMVKRGKHRNLVIAAVGRELVGFIWCVAVKAEAGIA

SEQ ID NO: 147712 - protein, 313 aa, unidentified
MSFIGIDVAKAELVVSVRPSLEQWAVPNTAAGIETFLTQLSALGPQLIVLEATGGYEREVAAALAAAQWPVVVVNPRQVREFAKATGQRAKTDGIDAAMLALFGERMQPAVRPLSDEATTDLAAVLLRRRQLTEMLVAEKNRLGLARRPVRKSLKSHIAYLERELRITETDLTAQIEASPVWRVNDDLLQSAPGIGQVTSQTLLAELPELGALSHRQIAALVGVAPVAHDSGAMRGKRAIAGGRARVRAVLYMATLVATRHNPVIRAFYQRLVAAGKPKKVALVACMRKLLTMLNAMLRDQRPWSSTVIPAPQ

SEQ ID NO: 147713 - protein, 377 aa, unidentified
MLKINPLSTLYVGIDVSSKSNYVCALDFFKNKYINSSFANNQPGAEELALKILECLNQHPDLTMVVAALESTSVYSIHIANYLSSCEELMRFKPYVFVLNPKCTANYKKSYIGLGKSDPIDAFVIADYARAGNIESEPWRGSQFLALKRLTRHRIHLVECMTREKTYLISNLYLKFSELQMLEGDDQPFCDIYGATSSSVLMEYLSPEEILASSEENLIAFLAEKSRNRIKDISKTADLLKKAARDSYRLDKALYEPLNVSIASSFNCIETFKREIKVIDNAIEKEIKGLNPNAFIILQSIDGIGPVFAGGIIAEIGDITAFHSSDALAKYAGLTWKSNQSGDFYGEDTPMIKAGNRYLRYYLGEAANSMRKHNVEY

SEQ ID NO: 147714 - protein, 307 aa, unidentified
MFVGIDVSKDRLDVHVRPSGEAFVVTRDSEGIEQLVALLVERRPLLVVLKATGGFETVVAAAIGAAGLPLAVVNPRQIRAFAQACGRLAKTDPIDAEVIARFAEAVRPEPRAIPDAAARALAELVTRRGQIISMMGAERNRRRQLTQTPSVRTVERVLATLQEQLSAIDREIDDTIRGTPVWREKEELLTSAPAIGPKIARTLIAELPELGTLGRRQISALVGVAPFNRDSGRWRGRRTIAGGRWRVRSALYMAVLVAIRRHLPLAATYHRLRAAGKPAKVAIVAAMRKLLVILNAMMRDRTAWHGA

SEQ ID NO: 147715 - protein, 346 aa, unidentified
MAHYAAFDVSDKETAIHVLDEHGKLVWKGKRPSEPEALAAALRRHAPELVRVGLETGRLTPWLFHALKGLGVPVVCPDARHARAATALQRNKTDARDAETLAQLVRTGWFREARVKSWAAHAVRHLVGARAQLVGMATDLSNQIRSLLRTFGLRITGRAGGTFERKVREQITGSPEVAAVAEPLLAAWRAMRDQIAALDRKLIEAARSNATCRLLMTCPGVGVVVATSFAAAVAAPDHFRCSRAVGAYLGLTPRRHQSGESDHSAGVSKRGDKLLRSYLFEAAACLLIRVQRPSALKAWGVGLVQRLGFKRAAVAVARKLSVVLHAMWRENRPFQAWPTPAVAAAA

SEQ ID NO: 147716 - protein, 341 aa, unidentified
MEKFIRTAIDLGKNYFQVHGLESEGGRSISRKVKRSRMHEVYSRIAPCRVGMEACGSAHYWARQLTAMGHEVVLIPPAYIKPYVKRGKNDAVDAAAICEAMSRPDMRFVPIKSADQQAVLMLHKTRELLVKQRTMAVNALRGHLAEFGIVAARGIGRVDELLALAEADAALPHIAKAAVACMTRHLEGLDLSLETIEEEIAKAHRQNPTSRLLDEIPGIGTLIASVTAASVPDPGVFKSGRDFAAWLGLTPRQNSSGGKEKLGAITKQGNRYMRKMLVTGATSVLRVAGKRKGALADWINALRARKPERLVAVALANKLARICWAIMTTGEGFRTEMYVKA

SEQ ID NO: 147717 - protein, 414 aa, unidentified
MDVLHERCVGLDISKKDAKACVRTPSTKRRGSFTTETTTWGSTTNAVLALRDHLLAARVTLVVIEATSDYWKPFYYVLSEGLNVILVNARQVKNLPGRKTDVSDAAWLAQLGAHGLVRPSFVPPEPVRELRDLTRARTTATRERSRVVQRLEKLLEDTGIKLSAVASDIMGVSGRAMLEALISGEADPQVLADLAKRKLRNKIPELTEALTGRFREHHAFLTRLHLNQYDQLTSMIDQLSGRVEEAMAPFRDALDLLDTIPGINQATAEVIVAETGGDMTRFATAKHLASWAGVCPGHHESAGRTKNTKVRPGNPYLKGALGLAAFGAVRTKDTYLQARYKRLTARRGPLRALVAVEHSIITAIWHMLTDNVPYHELGGTYFTQRDPERATRRAINQLNQLGYTVTLNPRENTA

SEQ ID NO: 147718 - protein, 330 aa, unidentified
MALKIVYKICCGIDVHKNFVVACIAKTDKQGVTTYERHHFSTYTKGLKQLLKWLLDRNCKDVCMESTGKYWIPVYNVLEHDCSIVLAHPKYVKAIRGKKTDKKDAKWIADLFKHDLVAGSFMPPADIRQLRDLMRYRFKLTCFKSSEKNRYQNCLTVSNIQLGNVVSDTFGKSSQKIIAKILENPDDTSFDIGSLIHGSMKDKLPELELAIDGYITPEQAAKLKIIKEHFDNLEARKAELEELILALANPYQQEISIILTAPGFKNTFTAIGIISEIGTNMEAFPSAKHLCSWAGLTPTNNESAGKKKSVRVSKAGCYIKPLLVYCIVDI

SEQ ID NO: 147719 - protein, 427 aa, unidentified
MDLVYPICCGLDVHKKTVVASIAVTNPVTFEAKYTVKSFSTMNSDIINLHNWLQSNHCNDVCMESTGKYWIPIFNILEKDMHVVLTHPKYVKAIKGKKTDKRDAKWISNLFRFDIVRSSFIPPEDIRALRELSRYRIKLAYMKSAEKNRYQNSMTISRIRLDCVLTDPFGKTASKIMNYILTAENFSEEKCLELLHCQGHIKASPEQVLDSIRGYHLLPEQCFKMNHAKEHMDYLEQSISELETELFIRTRPYDSIIKHISTMAGLTELSAVLIISEIGVDMSVFDDEKHLASWAGLIPANNESANKKKSTRCSKAGQYLKPLLIQCALAALKSKKNPYYAIKYQRIKKRRGHKKAIIAIARMMLIAIYHIIQDDAEFKPNDYDEIVNPKPSNNVPKMTVENVLWFLQEQGANEQALQILKNQYCSI

SEQ ID NO: 147720 - protein, 443 aa, unidentified
MSKKRSSHLRGERGQAFAELIRGVAPEQILCVSLDISKYFHVAMIHNGLGEIVIQPFDVDIYQSGFDQLCQAIAQARARTQAQVVLVGMEPTSHYFENLARHLIEHSQPVKLINSFSVKQNREQQLMRREKSDQIDVAAIGDLLRRGEGTPYQPATGIYLQLQQLDRVRLGKVKIAGILKNQIIGHIDRIFPGLVLMDESAKERYTPLFSVDFWKCQTLQDLIRICPNPNELVKWSPKQLVQAFHDQQCRLGPATAAKIIAQAHNTLLPDPELAAIRCELLQHDLALLEAVQARITLLEQRLTALLAQTPYQIWIMLKGLSEVQVASLAAAMGDPTHYTEAAQVFRRSGLVSGRNDSGNRQRKGKGNHILKTGDVYLRHALMSATATLILHQPFLAHFSRKLQITKRAGVARVATARKTIGILWAVLRDQSSNSLISCKGADM

SEQ ID NO: 147721 - protein, 409 aa, unidentified
MLFVGDDWAEDHHDVEIQDESGRRLSKARLPEGVAGMARLHAMLGEHLDPDADADQVGGQVAVGIETDRGPWVHALVAAGYRVFAVNPLQSSRFRQRHSVSGAKSDAADAHTLADMVRTDSHQLRQVAGDSELAEAVKVVTRAHKTLIWERTRHVQRLRSALREFFPAALEAFEDLASPDALELLGKAADPESAARLTRSQITAALRRARRRHVTERTEQIHTALRAEQLTQPPAVAAAYAATVRSQVALLTTLNAEIDIMEAEVSTHFGQHPDAEIYLSQPGLGVILGARVLAEFGDDSHRYADAKARKNYAGTSPITRQSGKQKFVLARYVHNDRLLDALGRQAFSALTASPAARAYYDQLYNRGKDHNAALRQLANRLVGILHGCLKTNTLYDEHTAWPTFHQDVA

SEQ ID NO: 147722 - protein, 389 aa, unidentified
MKIYVGIDIAKLNHFAAAISSDGEIIIEPFKFTNDADGFQLLVSKLESFDKNSIIIGLESTAHYGDNLVRYLVTELYQVCVLNPIKTCQMRKNNVRKTKTDKVDTFVIAKTLMMQDDLRFITFFDLDMMDLKALGRFRQKTIKQRTRLKIQLTTYVDQVFPEIQYFFKSGLHQHAVYALLKEAPSPKEIASMHMTHLANLLKVNSHGHFTKELAKELRVLAQKSVGANDSAISIQITQTIQQIELLDSQLEKIEAEMTDIMKFNDSVIMTIPGIGYINGGMILGEIGDIHRFSNPNKLLAFAGLDPSVYQSGNFQAKTTRMSKRGSRVLRYALVNAAWNVVRNNATFKAYYDAKRAEGRSHYNALGHCAGKLVRVIWKMLTDEVEFNLE

SEQ ID NO: 147723 - protein, 343 aa, unidentified
MNIVRIGLDLAKYVFHLHGVDERGKVVLRKTLRRPGVAPFFANLPRCVVGMEASNGAHYWAKTLSEFGHDVRLISPQFVTPYVKSSKNDRNDAEAICEAVGRPNMRFVPVKSAEQLAIQAVHRIRSRLVASRVRLVNQIRGLLGEHGVVVAQAIGNLRRALPRIIDDEANGLNSIVRALIGELREELSNLDGRITIYDRKIINLYRMSEACQRLGEVEGIGPITATALVAAAGDGKCFKNGRQFAAWIGLVPKQRSSGGRSRLLGISKRGDRYLRTLLIHGARAALGRTRGKQDPRSLWLLKMRERRHANVVAVALANKNARIAWGLLASGMNYDQHLTVSSA

SEQ ID NO: 147724 - protein, 371 aa, unidentified
MDERIKFFVGLDVHKDSTSVAACDASREPARFVGTVGSDVRQLLKVLAKAGEPGQISVVYEAGPTGYGLYRELRRRGYHCEIAAPSLIPRRAGDRIKNDRRDCARLAELWRAGELKPIWVPDEAHEGVRDLCRAREDAVQMRLKARQQLKAFLLRHDRRYSGKTSWTKTHERWIAEQQFEHAGETIALVEYQLAVQAAEQRVQRLTTALLEVVKGWRFEPVVAALRSLRGIDSVSAIGLIAEIGDFNRFKSARDLMTYLGLVPSEHSSGNSIRRGSITKTGNGHARRLLTEAAWNYRFPARMSSALRERSVDLPESVRSHAWKAQLRLSSRFAKLVARGVQVNKVCVAVARELAGFVWAIARQAQPTSASS

SEQ ID NO: 147725 - protein, 347 aa, unidentified
MRVTTSFGVVTGKIDNDMKQLDKVIRKLISTGAELRFVYEAGPCGYSIYRYLNSNAIECVVIAPSKIPLQSGNRQKNDKRDCLSLARLHRAGELTEVYVPTEDDEALRDLVRAREDSVRALRVSKQQLGAFLLRHDIVFSGKSKWSKAYFNWLSDISISHPAQQIVLQEYIDTVTDCINRVQRLTEQVRYQSKHSQQHELIQSLQSMRGVSLIVAATIAAELGDLTRFESPGKLMAFLGLIPSEHSSGERVSKGSITKTGNRHIRKALVAAAHAYRFPARKSRAISKRQENLSKEITDISWKAQCRLCTRYSYLIAKGKNANVTKTAIAREIAGFSWAIAQELSKAA

SEQ ID NO: 147726 - protein, 366 aa, unidentified
MTNGARWFVGIDWASATHQVCLVDAEGNITGERAFPHGGAGLAELCAWLLAMTNAEPAVIAVAIEVPHGPIVETLLERGFAVYAVNPKQLDRFRDRFTVAGAKDDRRDAHVLGDAVRTDRHCFRQIGAEDAIVIELREWSRMAEDLQQERNRLANRVREQLWRSADALPILRQQPLTVAAGTTEAACAHIRAVAARLKLVNRQIKEAHRRLDTLCAQLAEGEGETPPGQQPEQRDVTILRSLPGVGRVVLATLLAEATEPLRRRSYHALRTLSGVAPVTRRSGKRCIVIMRQACHMRLRSAVYHWARVAIQHDKLSRRRYTELRKRGHSHGRALRSVADRLLAVACAMLNRRTLFDPDHDSQRIAA

SEQ ID NO: 147727 - protein, 314 aa, unidentified
MAAPTDVAVGIDVAKARLDIAVEPTGATWTVPRSRGGLRRLQGQLQARRPTRIVLEASGGYERIVVATLSAAGLPVVRVNPRQTRDFARAHGVLAKTDGLDARWLARVAAEVRPPLRPQPSAAVQDLQDLSRRRRQLVAGRAAEQQRRHHARAHLDLGFDPVAAALTAGLAQVDRQLAALVQAEPTLRARAAWLRSIPGIGPVAAATLLAELPELGACSRQQIAALVGVAPFNRDSGARRGRRSCWGGRAQVRTALYMATLTATRHNPHIRACSQRLSAAGKPAKVALVACLRKLLVLCNALCRTQTTWDPTMR

SEQ ID NO: 147728 - protein, 407 aa, unidentified
MNRLFVGIDVGSRDNAVYIMLPDGSKHSSFGVQNNLGGAQTISQRVVTSLTGKGLSAVSIGIEATSVYGDSLMCFLREDGTLGRFDRDLFILNPKQVSKFKAMYSDLPKNDPIDAFVIADSLRFGRIGSPIYMDDYRYKALQNLTRARFHAVQNLTREKQRFMNYLFMKCSGLAQEKIFSDNYGVAALAVFEEFETPDDIADMDVELLAAFIAEKGKNRSPRPNEIAREVQAAARGSYRLPKTVNDSVNQVLSISISSMRAIQGQIKALDKEIERQFVNIPNTLISVRGIGPVFSAGIIAEVSDVNRFASQARLAKYAGLAWTQHQSGQFEGQHTRLIKSGNRFLKYYLCEAAMSLVRCDTEYRRYYDLKFKEVNKYQHKRALALTARKLVRLIFRLLKDNRLYIPA

SEQ ID NO: 147729 - protein, 366 aa, unidentified
MREQDERNRITIGLDLGDRRHRFCVLDGKGEVVEEGTLSNKRESLSELSRRYRRALVVMEAGCHSPWISRHLEGAGCEVVVSNPRKTRAIYQHERKSDRRDALMLARIARMEPALLYPVQHGSAQAQHDLLRIKLRDSLVRARVGVINSLRFTLKSLGYAIANPSTERFHKVIQEQVPESVDSVIAPSVQALKELSLRIKLLDREIASLARSKYPETTWLEQIPGVGPITALYFVLKIQDPARFERVRDVGAFIGLCPRRDQSGENDPQLRISKRGDAYLRRLLVSAAQYILGPFGPPSALRQYGLALASGGTPRAKKRAVVAIARKLAVLLLTLWKNKSVYQAFPLSRDGEKMRTSDLERLRCIA

SEQ ID NO: 147730 - protein, 344 aa, unidentified
MKEVITIGLDLAKNVFQVHGVDGSGDTVMRRQLRRSQLLPFFKKQRPCLVGMEACATSHHWARQLIELGHGVKLMPARYVKPYVKRNKNDAVDAAAICEAVTRPTMRFVAVKSAQQQSVLMLHRTRELLVRQRTMLVNAIRAHMAEFGIVAPVGIPRVKELLAVIADADDARLPPLARTCLEALAKQFMSLHDEIYAAEMRIHAWHRSNEVSRRLETIPGIGPITASALAASITDPEVFRSGRELAAWIGLVPRQNSTGGKERMGRISKQGDQYLRWLLVAGAMSVIRHAKRRGTTSLPWLADLIARRPTKVAAVALANKMARMAWVLLRHGGTYRKPATVPAA

SEQ ID NO: 147731 - protein, 412 aa, unidentified
MLKIVYPVCCGMDVHKSFVVACIAATNDQGVTTYRSKRFSTFTGDLHRLAAWLRAHSCTDVCMESTGKYWIPVYNILESSSKITLAHPKYVKAIRGKKTDKKDAKWIADIFKHGLVSGSFIPPADIRQLRDLMRYRSKLTGFSSGEKNRAQNCLTVSNIKLDDVFSDVFGKTASAITTRLLEANTPFDVRPFLSKKLKASAEEIQAAVDGSICTHQAGKLRVIRSHMENLAACKKSLESLIFGLAENYLPTLDLILTVPGIHVFAAVGILSEIGADMSVFPSSKHLCSWAGLTPQNNESAGKKKTTRISRAGAYIKPLLVQCALAAIRKKSNPEIRSRYLNLKKRRGHKKAIIAIARMLLTAIYNMIKRNEKYNAALYRKADVPPRNREVSVNEAIYILQRQGYLVTAPQSA

SEQ ID NO: 147732 - protein, 363 aa, unidentified
MSESMTVTVGLDVHARSIRLAALRADELLEERTLPYDEQAVERLLRRWPMVRCCYEAGPTGFGLYRHLVGRGIDCAVVAPGLVPQRPGDRVKTDPRDARQLARLLAGGLLEPIHVPSREQEAARDLVRAREDARLDRMRDRQRLSKFCLRHGRLLPTSAWTVTRRKWLSEQRFAHAAEQITFDTYLHAVDLVDARIEQLERAIRETAEQEPWRELVGRLRCLRGIDTLTALGLVAEIGDFARFRTAEEFMAFVGLVPSEHSSGERRRQGSITKVGNSHVRRLLVESAWHARRRPTVGYELARRQRGQDAVVVERAWRCQQRLYQRWQRMAGRGKPQQKTVVACARELAGFIWAIATEQPLRST

SEQ ID NO: 147733 - protein, 397 aa, unidentified
MNSVGIDISKGRSTIAVMRPFGEVVISPFEVRHTGSELSKLARQLKSLDGETRVVMEATGNYHASVAKLLHNAGLYVSVINAKLVHGYGNNELRRVKTDRKDAVKLANYGLDRWLTLPRYIPEEDTRLLLKNCYRQYRQYSKVQTVLKNNLISLLDTVFPNANRLFSSPIRGDGSEKWVDFVAEFWHCRCVSEKSERAFTSKYLRWCRKHGYNFREAKAHTIYAEASGHIGVMPKSETTKLLVEQAVAQLRATSTALAALKLEMQTLASQLPEYPVVMDLFGVGPTLGPQLIAEIGDVRRFYSKKALVAYAGLDAPPNDSGDVTGRHKSMSKIGASSLRRTLFLVMSVYLQTAPLDEPVYQFMDRKRAEGKPYRVYMMASANKFLRIYYARAMELYK

SEQ ID NO: 147734 - protein, 338 aa, unidentified
MDKYAMCGIDVSAKELVVVLQREGKNEAARSFANTVPGHQELKRYLTGASSRVRVCLESTGLYGLDVALFLHADTRFEVMVANPRAVKNFAQALLERSKCDPLDARVLAEYAARMPFQAWQPPSPTALSVTALTRRLHALTESATREKNRLHALSATATTVKVLVADLKRSLQSIARGQARLAREARKIIAADALLERRFRLLLSLPGVGETSALQLLGELALVPADAEVRQWVAYAGLDPCQCKSGSSLAKRPHISKVGNRHLRRALYMPALTAAHHDPAFGSYYRALQERGKCKMVALVAVMRKLLHAVFGMFKHDALFDGARVCPSLAVPTSVAA

SEQ ID NO: 147735 - protein, 311 aa, unidentified
MKLNTVHVGIDVSKEHLDIDPFDTMSPRIKNTSAGINALIKRIKVHPDKIIICCEASGGYEKLLNSMLSAEGIAVACVNARQVRDFARSRGILAKTDAIDAQVLSAFGQANQPRVLEALPVWQELAKALLIRREEMMAIRKAELSRLDPAPHPEVALLIRQHVEVLSKHIRSVEDPLRELIREHADLAVRFERLVAVNSFGLITALSLLAYIPELGTVSDNQAAALAGLAPYNRDSGTMKGKRVIHGGRARIRRVLYMPAVGASHRNPVFKEVYQRLVANGKPGKVAITAIMRKMVVLANRLMADPTFQIS

SEQ ID NO: 147736 - protein, 338 aa, unidentified
MQFKRIAIDTSKHVFTLHGVDEQDRPVLRRELRRSQVEPFFGKFEATEVVLEACGGAHHWARRLMALGHTVRLIPPQYVKPFVKRAKNDRNDAEAISEAASRPIMPAVPVKSAEQQAGTIILKHREMLVASRTQAINALRGHAAEFGVVVGKGTAQVAALLARLAADEAIPATAKTMFAQMGEHIETLAQRIQALDEELALLHKANPLSQRLAAIPGIGPLAAITLALMITAEDFASARHFAAWLGLTPREHSTGGKHRLGRISKAGNERLRQLLVVGAMAVIRHARPDNKATPAWLLQLLARKPRKLAAVALANKTARIVWAMMARGTSYRRQPAAA

SEQ ID NO: 147737 - protein, 343 aa, unidentified
MDHFAGLDVSVKETSVCIVDDTGRIVREVKIASEPEALLQVLGNPAYRFKRIGLEAGPLSQWLYSALAEAGLPVICVETRHMRAVLKAQINKTDRNDARGIAQMMRVGLYRPVHVKTLRSQKLRMLLTHRKLLQSKAIAIDNDLRGTLRNFGLKVGMVGTVKFEARIKELVVNLPDLALLVEPLLVVRRVLREQLGILHRRLLAIVRDDEVCRRLMTVPGVGPVVALTYRATVDVPARFRHSKSVGAVFGLTPSKHQSGESSRTGAISKCGDEMMRMMLYEAAHIMLTRTTKWSWLKAWAMKIARHRGLKKAIVALARRLAVIMHRIWVDGTEFRWTREVAAA

SEQ ID NO: 147738 - protein, 399 aa, unidentified
MNFDSTDEPRFAAYVAIDWGDSKHVWSLQSADSDRRERGEIEHSPEAVAAWAAMLSTRFDGQPVALAVEQSRGPLVFMLGKYEQLHVYPIHPRAAAQFRAALFPSGAKDDPSDAELLLDLLTHHRARLRRLKPDTEQTRLVQHLVEGRRKLVNERTRQTNRLTAQLKLYFPQILDWFDAVDSPLVGALLKRWPTLEALQKARPDTVRSFFTAHNCRSQELIERRLDQIRQTVPAVRDKALIEAAQAMTKVLVELIATLREGIASFDRQIAQAVAAHPDFAIFDSFPGAGPALAPRLLAAFGSQRERYQSAADLQTFSGIAPVTERSGKSQWVHVRWACPRFLRQTFHEWAAHSIGFCDWARAYYQQQRGRERPPRRRPCARLQVDPDRLSLLEARGPLR

SEQ ID NO: 147739 - protein, 355 aa, unidentified
MPQRNPPRLAERVEYVIGVDTHKATHTLAVVDRNGGEMHHATEQATPFGYRRMLTIAREHAPTSRCWAIESTGSYGRGLTSYLLEQGEFVAELDRPARRGRRNGAKSDQIDATRAAREALARPHLTQPRQRGEREALRVLIRTRKGAVRAKRVAICHLKALIVTAPALLRQQLERQPTDELLGRCARLRTLQHASHEHRATLKALRSTARRALALTHEADDLESDIELLVERMAPQLLAEPGIGTLTAAEILITWSHPGRIRNDSAFAMMGGAAPIPASSGQVTRHRLNRRGDRHLNCALHTIALNRMRYHEETKAYTERRRAEGKSDREIRRCLKRFLARRIFKLLEGTPPTQA

SEQ ID NO: 147740 - protein, 360 aa, unidentified
MAKAKTLVGLDVHATKIVAAVLDAETAELQLFSMDGDAAGVAGFCAGLPRPVRVAYEAGPTGYGLARELARRGIECIVAAPSKIPRAPGDRVKTDRRDAEHLVRLLLAGKLHPVRVPGDEEEALRDLVRARDAVRVDLMRCRHRLSKLLLRHGIRFDDGRAWTDRHRDWLATVTLDWPAAQATLLDARGAVDALCHRRDAVEREIVAMLPACPWALQVGRLRCLRGVDTLTAVGLCAEIGDFERFARAEQLMSYVGLVPSEATTGQQRRLGSITKTGSGHARRLLVEAAWHYRARPSLGKALTDRQADQPPEAIAVAWSAQRRLHRTWTRLEQRAKRRTIIAVAAARELAGFTWAICQIE

SEQ ID NO: 147741 - protein, 395 aa, unidentified
MIFVGIDIGKNSHYFAAVRKEDGEVIREPAKISNNLKGFEQLVSCIRKHRKQNILIGMEDTGHYHFPLLKFLLDKGYTIALINPVTTDLTRKASGSISKTDKLDTLTICDVLSSNKKDKKPYRIFKVNRFDLYEQRCLTRHHHNLKEELNVYTNRLQKCVDIVFPEYNSLFNSKYGIVYMNVLKTYGSAESIAKADIRSLRKCFETNHRGRRITLTAEELKEAARNSIGISSVSEVIQIRHLISQIELINEQLEEVDKKIEEFSRQNNSPILSIPGISHFSGTSILSELGEINNFTDHRQIIKYAGVAPLTHESSQFKAQHTKITKKGSRYLRKTLYQIILPVINSNKVFKEYYDLKISQGKSHRCAQGHCVRKLLRVIFHLLKTGQNFDPALLT

SEQ ID NO: 147742 - protein, 366 aa, unidentified
MEQGTTHVGLDAHKVSILVASFYPGTASAVEMECGNEAGAVRRMVRKVVAQARGRVVFCYEAGPCGYALQRWIRGLGVECMVVAPSLIPRKPGQRVKTDRRDARKLGELLRAGLLTEVHPPTEEDEAVRDLCRAREDAHQDLVRCRHRLSKLVLRRGLRWEAGRWAWSQKNRDWLRSLNLEHVADQVVRDEYLLAIDQVEARLRALDERIQVASQEPRYVKAVGALRCFRGVDTVTGMGLVSELHDFRRFESPRGLMAFVGLIPSEHSSGEREKRGGITKAGNSHARRLLIEAAWHYRHRPGIRTLTIRRRGQPARVIAIADKAMIRLHRRFHRLVEKGKPSPKAVVAIARELVGFIWAALRPMAA

SEQ ID NO: 147743 - protein, 389 aa, unidentified
MLCIGIDVAKRKHDCCIIDSDALKTVESFTFPNSREGFDMLLSKISELGIPKDKIRVGLEATGHYSSNLAHFISEHDLPLLTFNPLLTNRYKQGFSLRKTKTDKVDACAIAQMIVSGKGSQTYSSSLYHNEEMKSLSRYRSQTMQKCSKLKISVSRLVTILFPELEGLTSSIHLASIYALLKAYPGHEQIAHCSMKRLTHLLSDASQGRFDKSKALEIHQAACRSIGKVSLSASMELVHTITDIEVLKQHIVEIDEKLKEMVDQEESSIIDIPGIGYTLCASILGEVGDFKRFPDVDKLLAYAGMSPSKHDSGDYHSKHNKMEKRGSPYLRKTLYLAARLVAQNVPKFKEYLEKKLSEHKPYKIALSHVAKKLIRLIYRLGISGCPYLA

SEQ ID NO: 147744 - protein, 428 aa, unidentified
MMSYRVAAVDVHKKMLAVVVTDIAGEGEYQFERRKFGATPAELHVLAQWLDRQEVEEVVMESTAQYWKPVWGTLERYWRPARQKREGSGNKCGTLHLCQAKSNHGPRGRKNDFADGERMIKRLVAQELVLSFVPDPEQRLWRTVTRRKHQLTRAKVGFKNQLESLLEQAHIKLSSLVSDLLGVSARRILKALAEGETDPAILAALADHRLQATPEQLQDALGACAQLNGVYRRLLKMALEELQLIEVHIEKLEREAMDLLQEHQVVVQRVAEVPGFGVDSVLQMIAEVGPTAAAFRSEKALSSWVGVCPGNEESAGESHSTRSPKGNRQMRRLLNQAAHAAVKVKGSIFEVTFRRLLPRLGYKQAIWAIAHRLCRLLWLILHKGVRYQERGLEVGARSIRMRAARMIKELQKLGYRVDGGPLPALTRA

SEQ ID NO: 147745 - protein, 337 aa, unidentified
MDRRYVGIDLHRRRSVIYAMDADGEKLFCERIDNDALRLLEVVSAAGEGAEVVIEATYGWYWAVDLLRDAGFNVHLAHPSGNDWGKRRVKNDERDARDLADLLRLGRLAEAWIAPPAVREARESVRYRARLVQLRSGLKAQVHAVMAKEGVLPETSDMFGPKGRQLLDAMELGDAYGVRVESLRDLIDGYDREVAMLERRIHELLRDDRGYQAIQALDGVGRTLGAIFVTEIGDITRFRSPEALCSWAGLTPRHRESDTKVVRGKITKQGSKLVRWAALEAIVRYHGGPPLRDGFHRIAERRGTNKARIATARRLMTLIYYGLRDGEIRCLQQRAVA

SEQ ID NO: 147746 - protein, 354 aa, unidentified
MIAIGVDVHKRQCTVAIQQEDGKLGCFGPMENTREGWRELLEQLPPEAEIALEVSTSGYFAMSVLEEAGWRERAHWVHTAGIDSLRKQKYDRLDAKRLARKLSVADRDPLPEAWFPPPAIRALRLRARQRCWLAVLRTQVKNRLQSLLQMHGLRPTVTDVFGVAGRAWLAAQALPEATRESVEQLLRVHDFLCQELAKAEGYLHAVDRQFPELARLRTLPGIGEILAPVIWSEMGTLERFRSAEAWVNYTGLVPSLYESGEVSIRGGITHQGSAWVRWALVQAANSVIQGVSPLARRYRRLRRRKPANVAKTAVARSLARCVYGVLKSGGNYQEARWGRRPTGVVSSLEQASLR

SEQ ID NO: 147747 - protein, 400 aa, unidentified
MRVVFGIDVSKVSSEVAILVNCEKVHNYTMSNDAIGFSRLLGDLKTVHKPEIIFEATGVYSRRLQAFLDEHGYAYTRLNPLEAKKQLDSLRVRKTDQIDAEKLAQSQFVLNRKPTYVQEEVYQNLRDLSRFYQNLTEDIVRAKNRMHKVLQVTFPELENILSTPSGEQYWNLVIAFPCKDFVLDLSKDELSESIHQSTSKRISDKRVVYLAEKLIALANQSYCAVKKTSPMLEEVRYYAKELLRLYEQRQAVLDEMVELAQPLPEYDILLSIPGIAETTATSIIGELGDIRRFQSANQINAFIGIDLRHYESGNFLAKEHITKRGNPYARKILFKCIHNIASASHTNPCHIADFYEKRKRQSQTTSTKPHTIASIHRLIRTMYYLIMHNKLYDYASTQNR

SEQ ID NO: 147748 - protein, 420 aa, unidentified
MGDREVRLAITCGIDWAETHHDVALVDEVGKLVAKRRISDDAQGYRRLLEMLVEAGDTAQDPIPVAVETARGLLVSCLRATGRSVYSINPMAVARYRERHRVARAKSDHADAMALANILRTDAEMHRPLPADSELVQAIAVLARAQQDAVWNRGQLSNQLRSHLKQYFPAALAAFQVRGIGLDSREARAVLALAPDPGTAAALTPARLRAVLRKSGRQRNIDAWANRLRGIFTAEWLHQLPLIEAAMGRQTQALVLQLDAACRAADDLAAAAGEAFAQHPDAAIVTSFPGIGPLTGARVLGEIGDDRSRFRDARGLKSYAGSAPITVASGKSLVVHHRKVKNQRLAAAGYVWIFGALPCPQVKQHYDRRRAAGDKHAAAMRNLFNRLLGCLHHCLQTGQLFDPAKAFPSTATPRSAPAAA

SEQ ID NO: 147749 - protein, 416 aa, unidentified
MELIHRRCAGMDISKKDAKVCVRIQGGTHRKTSSIVTTWGAMTSQILALRDHLVEQKVTVVVMESTSNYWRPFYYLLEQDFEVVLVNARDARNVPGRKTDVSDAAWLADLGAHGLVRASFVPPPPIRELRDLTRARTHITQERTREVQRVEKLLESACIKLSSVAADIMGVSGRLMLQALIDQQGTADPAAIADLAKRRMRSKIPELTEALTGHFTAHHAFMTRMFLDRIDAQSKDIAVLSERIETLMEPFLPVRDLLESIPGVNQIVAEIVIAETGGDMTQFPTPEQLASWAGVSPGSHESAGKVKSSKTRPGNRYLKGALGIAALTALRSTTHTYFAAKYRRLAPTRGPMKALVAVEHSMLTAAWHMLQNGDYYRDLGADYYTRREPTKAKARAIKQLEALGYQVTIEPQQQAS

SEQ ID NO: 147750 - protein, 350 aa, unidentified
MFCAGIDTHKDFHVLVIADELGREIYHESFSADEQGICSLTSALSNAGECIVCGIEGTGSYGATLAEHLLAEGFPIVEVSRPKRSRIKGARDKSDHRDAHRAALRALAGEGVSVKPRGGDAQAVQCLLAAYKRLRDTCTSLSNCICALIVSAPEPYRAQFTGLKGTKLMDAIARTRAGAGGKSEAQQATLTSLKTLERTWRTAHEQAEKILSQMETIIVDHAPALLDIFGVATVTAAEFIALGGENPSRIKSESAFARAAGAAPIEASSGRVVRHRLDRGGARSANAALHTVVLCRMARDERTHAYVERRTKEGLSKREIMRCLKRYVCREIYRVLCAEERRRNQQKEAS

SEQ ID NO: 147751 - protein, 293 aa, unidentified
MGNDEDGFAVITDKLKHTKINLILMEATGGLEAAIACKLQSEGYDVVVINPRQARDFARSMGYLAKTDKLDAAMLAQLALVIDRHPDRSRYIRHLPDEARAVLAAMVVRRRQLNHMLVAERNRLYPSHPQSRKSIDNIIDALQNELDRINEQMKQHMTAFFQEQARLIGSVKGVGDITVASLIAELPEQGKLNRREISALTGVAPLNRDSGKMRGKRTTFGGRAGVRATLNMAALVATQFNPAIKLFYQRLLAAGKPKKLALVACMRKLITILNTMLRKGEEWNASFQSQVIS

SEQ ID NO: 147752 - protein, 354 aa, unidentified
MKRTTKHVALDVHQATTVASVREDSGRVIARAILPTEEAALVEFFRGMRGTIHVACEEGTQAQWVHDLLVPLVDRVVVCDRRGESRSGNKADQVDADQLSEQLRWGNLRAVYHASAERTTLKELTRSYTNLVEDSTRVMLRLKALFRARGIPAPGQRVYHPRERAEWLAQLADRGAQLRAEVLYAELDMLRQLRPQAKTVMVAEARRDPAWAVLQTIPFFGPVRVALLLATMQTPWRFRTKRNLWAYAGLAVVTRSSADYVLRAGQPVRRRRAPLTRGLNRNHNRVLKDVFKGAATAASARPGPLQDWYQERLAGGMRAELARVTLTRKLAALTLRLWKKGERFDPTQLTRQAR

SEQ ID NO: 147753 - protein, 356 aa, unidentified
MNKSNKLDFTGQPIYVGLDVHKKSWSVSILSQQCEHKTFTQPPEVDKLVYYLRRNFPGAQYHSVYEAGFSGFWIHDQLRERGIDCIVVNPADVPTKDKEQTKKRDPVDCRKLARSLRNGEIEGIYVLCRSKLEDRTLIRTRQSMVRKQTRCKNQIKAILFFYGVVIPEEREMGHWSRRFIQWIEQIRMERASGDIALKVHLEELNHLRQLIASLNRAILRLARTEEYRPAVNLLKSVPGISTLTAMILLSELGEVTRFPSLDELSCYVGLIPDTQESGEKENVGGMTQRRHSQLRWLLIEASWVAVRKDPALLMAFQEYCKRMRKTKAIVKIARKVLNRIRYVLKNQAEYVPCVIQ

SEQ ID NO: 147754 - protein, 467 aa, unidentified
MERTGAIGIDPDAQGFVCALVNGQEPKVLRRTFLVTDRDLGEFLQWLKGQPDTIVAIEGSGGLSRPIERLLRDAGRIFYSFKPADTDKFRKAVLGQNKNNQRDAESVARYALALQAQGKLDRYRRVWFADPQLQPLTRSYERLSQQMTAEINRLWKLLRQAAPELYLALGDSHPEVKLGANVLKNSGFLTLLATTPDPGQWKTLSEVELLETMGGLSSSSRRQLVQGLHLLSERLPSCSASLAMLIQTSAQRLSMFKAHLAAMTAMLDTITQDNRAVAALRKTRGIATVTASTLVAEIIDIRRFASEDSLACYAGLGRREHSTGQNSRMVSSSLFNHRLKDAFMTAARNLVRFNPDSHLAGYCRNLIKAGMSPLEAYKRVARAWVRVLYRTLNGLLPHDTREDANSDEAGSDMASGQARSDECHQSNMPLPARRHGTTPGVEKIKRDSAKARVSRRPRKVALAHRRT

SEQ ID NO: 147755 - protein, 333 aa, unidentified
MQNFYFIGIDVSKKKLDICVMSNSKVLKEEQVSNHPQAIATVIAGIKEELSMSNDCFIICAEHTGQYTYPLICACKSVGSKLWLENASQIKYCSGVTRGKNDKVDARRIAEYAMRFFDKAKPYQRPIEELMRLKQLEAERSLYLTDLAKYKAQLSDQEGFMEDKIFKRKAKRLKEMIKSLEKTLKEIAQEMADVIYSSEELSRQMRLLKSVEGVGPVVAMNMIIATEAFTRFDNPRQFNCYVGVAPFAYTSGSSQRSRNRVSQRAVKYIKCLLHMAAVAIAHKKTGDLKTYFERKVAEGKNKMTVLNAVRAKLVARMFAVIRNNRVYQPILSV

SEQ ID NO: 147756 - protein, 330 aa, unidentified
MSNIIGIDVSKLSLDCAYLRDVDQHKAKRKRVTNNPEGFAALLSWAQTDSGLCVNEIRFIIEPSSIYHELLVQFLDQHHATICLVNPGRVRKFAQGMGILSKNDLIDADMLTRYGLLNRKLMAYQAEAQERGDLRSLLNRLDSLERDLRRELNRQEKIGRSSVLHRFEKQSMQRCVKRLKAEIVLFKKHIRKMICFSTLLKKDYDLLLSIPGVGAKTAWVMIVVLGSRQFDSAVQVAAFLGLNPIEKQSGTTRYRRPRLSKAGSGRFRQALFFPAMVATRKNPDIKAQYERLLEAGKTKMCALGAAMRKLVHICYGVLKHQRPYENRAQA

SEQ ID NO: 147757 - protein, 365 aa, unidentified
MNATAGLPVVGVDLAKSVFQLAVADGAWRIVEQHRLTRTQLERWFANRAVGLVVMEACGSAHHWARWLNGLGIEVRLLPAAYVRAYVKRNKTDAADAGALLEAARCADIAPVRVKTLEQQALQGLHRTRSLWMGTRTSRINALRGFCREFGILIAQGSRLGVEQIGRVLADPHSAVPALIRETMKLLVEEIRLLEARISQLERELTLLARQSGACTTLLSIPGVGLLTATAMVAATSGNVSHFRDARHFASWFGLTPKEYSSGNSRHLGRISKRGDRYLRMLLTHGARSVLRAASAAAQAGRTVDDLRSWALAVQGRSNHNKATCALANKLARICYATLRDGQRYGKPAPRPNKKLERTAFALPA

SEQ ID NO: 147758 - protein, 417 aa, unidentified
MEKGENASGCRYIALDIHKYYSVVAGVDREGKEILAACRVEHLDLENWLPKHLLQTDRVVIESTTNAWHVYDLLEPQVAEVLVANPIKVKQIACARVKTDKKDTFILARLLAANLVPTVWVPPKHVRELRQLVSHRRRMAGMHTQVVNRMHSVAHRHHLNHPKGKDFQAKNTGWQKDESLSRLEKMQLELDMETREHLEKQIERMTRELGRMSHEEPWASDMLYLMQVAGCGVVTGMTILAAIGDITRFETPKALASYSGLVPGLEQSGVKLRGKGITKEGRRELRWVMVEVAWRAVKADPHWKKYFEELKRRMHKNQAIVAIARHLLTMVWYLLTRREPYSRYSPERIAYKYLTWSWALGDEQRQGMTGPQFARYYLMRLGIGNELKRVALNPNFPYKLASVEEVLALWPELRPPE

SEQ ID NO: 147759 - protein, 403 aa, unidentified
MRIIGMDIHRVAAEVVVLFEGKLKKLGRVPMLREHLEAFARRELTHDDHVVIEATGNAASVVELLAPFVERVIVANPKQVRMIAHAKIKTDAINAAVLAKLYATGFLPEVWVPDARTQALRRQFARRTQLVRQRVRLKNIIQSILHAHLVPPCPHGNLVGISGRKWLAKQIVPPDERAAIERHLGQIDVIEAALKVVEAEIAGEVLADPVIRRIMTLPGVDMMVATGVAAAIGDVRRFPDPQRLVGYLGLNPSVRQSGEGPAYHGRITKQGRGQARGILVEAAWAAARSPGPLRAFYQRIAARRGKHIAAVATARKLSMILWHMLTKETNYIWVRPALLARKLRNVELKAGMPAEHAKRGDAYNYNIPERRAAERAQVEQAEQDYTRSISRWRSRPRGEAGPA

SEQ ID NO: 147760 - protein, 373 aa, unidentified
MNNSITYVAMDTHKKQHRVAIAYPNEEVIVEFSVKNTAPEIRKMVRKIKRNFPGEVKFCYEAGVCGFTLQRRIEALKCKCSVIAPSLTPRKPGERKKTDRRDAKKLLGWFMSDMLTEVYPPDEQQEAARELTRCREAAQENLKRIRHQLQKMLVRHGYVFTDGQHWTQKHYRWLEAIQFDQPLLQDVFECYFTEMRHCLQRVQTLDKELEKLAQSEDYRETVGILCCFYGIKTLTAISIIAEVFDFGRFASPRDLMSYLGLTPSESSSGEKEHKGPITKTGNRRVRRLLTEVAWHHRHAYGVSKVLRKRREGQPQWAIDIADRAGIRLRRRYRRLVHKGKLPCKAVTAVARELAGFIWSAMIEYEARKKRKAA

SEQ ID NO: 147761 - protein, 488 aa, unidentified
MKMLYDRCAGLDVHKKSVSACIRISKGKETSQETRTFGTFTADLEDLRDWLLKHKVTHVAMESTGVFWIPVWNVLEQCEANFVLTLINPQHVHALPGRKTDRKDGERIAELMQYGLLKGSFIPPPAIRELRDLSRRRTHLQGERNRVINRIRRLLETANIKLGSVVSDITGKTARLILGEICRGNCTPEELAKLAQASLKNKRAELIGSLKGFYSEHFRWLLTEAVQDLAYLDRKLEPLDQQLAKRLLPHGDLIRRLCTIPGVDFTTAAVIIAEIGLDMSRFPDAAHLVSWAGVCPGNNESAGKRFSGRVRKGNRYLRRVLTQSAWSITHKKECFLTSLFWRVAARGGRTKAAIAVAHRVLAIAWHIIKNEGEVYREVGGSHQDRLRPQRSARRLVHRLEQLGFEVNLKAKAREAAPAPESVTLPPSPVNRRSHRSLSSTPASHQKPEAVAADPSICRRCARWGIACIHLRNANRRPSVVVSPDESIT

SEQ ID NO: 147762 - protein, 470 aa, unidentified
MNHRRLVGIDLGIASAHTVRVLDGEGTVVAKRKAWPTVESLSAAEAAALAGCPAVTRLEVVIEPTGPAWLPIAVFFCARGHQVFRVSSQKAADLRRFLSRHAKSNGIDADTLARLPLFDPAGLRPLQLPGAERAALDRRVRATDRLTRAGAEHKRRIKDLTRQLLPMSPLSSDLGAADLAVLERYADPRALARAGQARLATLITEASRNHQGAGRARQWLDAAQASLQLYAGHPAIDFTGLAAEIATEVRLLRAIQAELAVHAAERETRYRQADPAGLARTLPGLAEVGGPALVACMGDPARFRTGKRFRSFTGLTPKASETGETDRKGQPMSKAGSSLLRTTLVRAADTARKQDPQLARLYHQQMTQRGKDHLGALCVVAASLAERAWTVMRRGTPYVICDTDGRPVTAQQAKAIIAEHWTVPAEVRARRRSKKTGKAPQKVLAGQYARGGLPRSTTPPRRDQSVKPSP

SEQ ID NO: 147763 - protein, 389 aa, unidentified
MVAMMIIGVDPHKSTHTATAVDPQTNRAVASVRIEASPVDYRRLLRWARQFDHRRWAIENAEGLGRHLSSWLLARGEDVVDVPSTATARVRQLSRGGGRKNDQIDAAAAACAAALQGDGRPLQPEDLTDALALLDQSRMNLAQSRVRLVNQLHALLRDLLAGGAPTDLSATTAAALLRQVRPSGDAERVRKQIATGLVSQIRSVDSLLRANAKQITELLAASGSTLTSTVGIGAITAGRLIGRTGRAARFPTAAAFANYAGAAPVEVASADKARHRLSRSGDRQLNAALHTVAITQIRTPGSRGHTYYNAKLAEGKTPREARRCLKRRLANHIWRTMITDEQQQAASPGGHLGTTLKSSAAGSTPTTSSSDKSLPGLTNHDSTTTRPAA

SEQ ID NO: 147764 - protein, 319 aa, unidentified
MGKRTIEFEQVIERGCGLDVHRDTVVATVMGKGVQTETRTYGTTTGSLKELGEWLESLQVTDGAMESTGIYWKPVLHVLREYPINLIVVNARHIKNVPGRKTDKADSQWICKLLISGLLKGSFIPPENIQELRDFHRYKKKLIGTIASEKNRIIRVLEDANVKLSSVVSDTSGVTASYLINGLIEGRKDLDKLVSECYHRKLQSSPEQIKEAINGRLTPHHAFILKSMQKHIASVQAQIAEIDEEIEKYIKDFEKEIELLQTIPGVGKEGAIGIVAEIGVDMSVFPSEHHLASHSGMCPSNNESAGKKKVQEHGRGTNI

SEQ ID NO: 147765 - protein, 345 aa, unidentified
MGEISRIGMDTSKHFFRLHGVNANEKAVLRKKLRRKEMVAFFRTLAPTIIGIEACGASHHWARLLQSFGHEVKLIAPQLAKPYVKRGKNDAADAAALCEAMSRPTMRFVPVKTAEQQAALMMVGLRDRLIRNCTQLSNAIRGYAAEFGVTAAKGMAHLDPLLERIQADESVPNLARELFALQAKEYAQLQAQIDDVDAKLMAWHKADECSRRLAKIPGVGPIGAALLTMKTPAPQLFKSGRQFAAWIGLTPRDHSTAGKVRLGVITRAGDETLRSVLVVGATAVIQHVRRGGRGSPWIADLLKRKPPKLAAVALANKMARIAWKFMVTGESYAAKSAPAALASAA

SEQ ID NO: 147766 - protein, 391 aa, unidentified
MDKAWAGLDVGKEFHWAHVLDASGRELLSRKVENDEAGILKLIDEALCLAEEVIWAVDQPGGSAALLLALLWERDQRVLYVPGLSVDRARDAYRGESKTDARDAHLIADHARMRSDLGELRAGEQELSELQLLLARRRDLITDQSRTIARLREALLSLFPALERALDLNSKGPLTFLTHYQTPTQLRRAGHKRIATYLRNRGVKGSNKVANKALAAAKAQSVTLPAQGVAASIVAELARDVLGLKERLKSIDEEIGQRFFARPEARILTSLPGMGPILGAEFLVAVGEITAFESADRLAAYAGLVPAARDSGKRVGNNKRMRGGNKVLKRVFYQSAFASLRSAPESRTFYERKRAEGKRHTQALIALARRRVNVVWAMLRDGTTFESRSAA

SEQ ID NO: 147767 - protein, 443 aa, unidentified
MMAHRGSTARGMDIVLEGAVMTKKCEVWIAGFDCAEEKHRVVLLDAKGKVEKELDITNRRDLVQEGLAKLLLVLPEGTKLVVVVESRRSHGRIVSEVADQLGCEVWVVNSVALNHYRPVEGQPHKTDPWDAFLAARMAYDEKLGCRVAAERTQEERVLSRLTRLHGQVTKTRTQHVARLRANLLELAPEILHSSWKGPKPKSKAIVYLLERWPAFEGMERARLGTIEKVLHKCRYGKKATDIARSLRDMAQRIEIAGAERAVVAMEINHLIEQITACDRLLHDLQAQIGERVEDHEIGLKLLEMPGIGVITAGVIIGELLPVARLADEGQCATYAGLTPLSRQTGKGKNRRRIAKGVNKRVLRALYTSAVAAIGGSAMDRAYFEKKVRDYSGHPKPTVAAFIALARKRHQVIYRLMTTNERYDKEKLISSHLARLDQARLAAA

SEQ ID NO: 147768 - protein, 352 aa, unidentified
MMIIGCDFHPRFQQISFLWEETGECGQRRLMHTVEAEQYYRSLGGTKVRVGIEATGSYGWFRRLLSELGHELLVGDATQIRASNPRRQKTDKRDAEHILGLLIQDRFPAIWQPPAENEQLRQLLLHRSRLVRLRTRVTNQLDGIAKNEGLLVPGGWSGKRRMAIEALPLPGWYGERRKDLLGLLDRIEERIAPLNKAVSQAAANNAEACLLMTHPGVGPVVSLAFVLAIGNWQRFPRGKQVGSYFGLIPAEESSGDKRRLGHISKQGNTLVRWLLVEAASTAQRYDASWHRQYVRLSMTKHHGVAKVAIAHKLAVRLYWMLRSGEDYQHVRERGSHARQSECPGGRSRRPIE

SEQ ID NO: 147769 - protein, 389 aa, unidentified
MKIFVGIDIAKLNHFAAAISSDGEILIEPFKFTNDADGFQLLVSKLESFDKNSIIIGLESTAHYGDNLVRYLVAEFYQVCVLNPIKTCQMRKNNVRKTKTDKVDTFVIAKTLMMQDDLRFITFFDLDMMDLKALGRFRQKTIKQRTRLKIQLTTYVDQVFPEIQYFFKSGLHQNAVYALLKEAPSPKEIASMHMTHLANLLKVNSHGHFTKEQAKELRILAQKSVGANDSAISIQITQTIQQIELLDSQLEKIEAEMTDIMKFNDSVIMTIPGIGYINGGMILGEIGDIHRFSNPNKLLAFAGLDPTVYQSGNFQAKTTRMSKRGSRVLRYALVNAAWNVVRNNATFKAYYDAKRAEGRSHYNALGHCAGKLVRVIWKMLTDEVEFNLE

SEQ ID NO: 147770 - protein, 338 aa, unidentified
MSEYYLGIDLHKRRSYVVLMDAKGNVMNEQGITNDAMGDYLKERVLHDTMAVLEATWNWQFMYDLLSDHCAKVLLAHPQKVKMIAEATVKTDKIDAHTLAHLARTGYLPTAYAAPREIRELRQVTRHRSSLVADRTRNKNRIHAVLARRNINSPFSDLFGRKGRAFLTEMTANKLSQIDQQVVEDNLAAIDLLDRLVDSVESIMVEHTAHDPKVSLLKTIPGVGLITAVTIRAELGEVERFGSADRAARWAGLTPKVHVSDETVQHGPISRQGSPYLREAMVGAALRAIRYSPRLRSIYQRIAKHRGSGMARVALGRKMLIIAWTMLMRGEPYREDYR

SEQ ID NO: 147771 - protein, 401 aa, unidentified
MTSVGIDVSKGKSTVCILRPYGEVVASPYEIQHTEPELRALVSHIQSIEGEVRIVMEATGAYHLPLLSSFKDAGMFVSVINPLAMKKYASTAIRKGKTDKLDSVRIANYGIDHWFKLADYTLPDELYAQLRLLGRQYAHYITIRIECKLALTDLLDRTMPGIKTLLSGKRSEEPTKDKLSDFVAEYWHFDNITKKSEVQFIHSYCAWAKKKGYHASEPKAKAIYALACNGIPTLPSSAASTKMLTLEAVRVLKEVNKTLETILTQMQALAITLPEYDIVRAMNGVGDVLAPRLIAEIGDVRCFHSGSALIAFAGIDSPPFQSGSFTGTRRKISKRGSSLLRKTGYEVMKCLKTVKPAQDNAVYLYMLKKEAEGKPKKVAKIAALNKFLRIYYARVSEVYAS

SEQ ID NO: 147772 - protein, 307 aa, unidentified
MSAQHFIALDTHCEFCVMVAVSKTGRIVKQQRCATTVPAIVAAMEGIRGSRWLTFEEGPLADWLARNLRPHVDRLLVCDPRRNALIAKENDKDDPIDAERLAQLLRGGYLKEVHQAQSLDRTILKQHVGFYHDRVRERVRQGHQLVAQLRRHGIFATIREVSDAEERRQLWKRLPARKVLRQDLDFVWEVYEILCVQEAQLRAELVRLARREEPVRRFEKLPGFGWIRSLTFYVCIDTPARFPSKSALWRYCGIGLERRHSGSGPQKTRLAHSGNRRLKNLLLGAAKSATAHGDNPHFPDDLSIFGT

SEQ ID NO: 147773 - protein, 310 aa, unidentified
MSTEYLVGIDVSKDTLDVCAYPTQDTFRVPNSPDGLDELIKRLKPIEPRLIVFEATGGYETLAVSSLAAAGLPVVVVNPRQIRDFAKSIGRLAKTDVIDAGVIARFASAVRPELRPLKDGPSQELTGLVTRRRQIVDMIVAETNRLNAATRRNRRDIQTHIRWLQKRQDQIDDEIKRDIKNGPLWRTTDQILQSAPGVGPATSAMLISCVPELGQLNRKKIACLIGVAPLNRDSGRFKGRRMIWGGRAQVRAVLYMSTLSAIRFNPIIRQFYQRLREAGKCFKVAMVACMRKLLIILNAMVRNQTKWRHC

SEQ ID NO: 147774 - protein, 328 aa, unidentified
MKILAIDLGKYKSVACNYVTATGTARFATVVTHANEFDRLLSQESPDLVVIETCSIAGWVHDLCCQRGVKCQVANPSSEAWKWKNVKRKTDRDDALKLAQLAALEQLPTVYVPAPETRQRRALLKYRQSLITRRVAIQNHLRAIAQRQGILLDRGSRAWTVAGLEAIQHLAKPLEECSAEELWRGEAALELQALRAVVKLLREVEHKLEAFAASNGSVKLLRSIPGVGRCTAEVVVAYLDNPQRFENGRQVSAYAGLVPKQFQSGETNRQGRISRRGPSLLRKMLVEAGWILLRYNPWAQRLMLRLSRGQKTRRKQAIVALARKLLVR

SEQ ID NO: 147775 - protein, 337 aa, unidentified
MQITTIGLDLAKHVFQVHGVDATGNVVVKKRLRRSQVIAFFARLPPCLVGMEACATAHFWARELRALGHEVRLMPPQYVKAYLKRGKNDAADAAAICEAVTRPSMRFVAVKSEEQQAALTIHRARELLVRQRTQLSNALRGHLAEFGLIEAQGPWHVTRLLVRLAEDGAGVPELARRVIELLAAQLAEVGRRIAALEAEIAARHKADAVSRRLATIPGIGPLIATALAATVVDPAAFRSGREFAAWLGLVPRQHSTGGKQRLGRISRQGDSYLRRLLIIGAQSVLRGAKAARSDPWLQGLLARRPRLVVAVALANKTARIAWAVMARQQSYRQAAPA

SEQ ID NO: 147776 - protein, 455 aa, unidentified
MSKAKRSSRKRAISPVHPHAAAIDIGATSHVAAVGPDRDPEPVRSFGTFTADLHRLADWFERCGVRTVAMESTGVYWIPVYEVLEQRGFTVVLVNARDAKHVPGRKTDVSDAEWLRRLHEYGLLRASFHPEAGIAALRDYLRQRERLLDYAASHIQHMQKALTQMNLQLHHVVADITGASGLRIIRAIVGGERDPAVLAALRDHRCKASVETIRQALVGNYREEHVFALAQALERYDVYLAKVAACDARIAAVLDRLQAERPVPTAPLPAPRHRTPNAFAFPARAALHRILGVDLTRIHGLGPYLALKLVAECGTSLTAWPSAEHFTSWLCLAPSNKISGGKVLSSKTRRSNNRAAALLRLAAVAVGRTETALGAFYRRLSGRVGKAKAVTATARKIAVLFYNTVRHGMTYADPGASYYEERYRQRVLTNLRRRAKSLGYVLQVADPTAPVAEVS

SEQ ID NO: 147777 - protein, 364 aa, unidentified
MEITTIGIDLAKSVFAVSGADRSGRVVVRRQLRRAQVLSFMRGLPRCTVGMEASGGAQYWARQLTALGHEVRLMSPALVMPYRKGNKTDRNDADAILEAVTRPSMRFVTVKSVAQQDLLALHRVRAQLVKSRTALCNQLRGLLRERGVVVRVGVAGLKRGLPAALADESSELSGELRELLGEMGQWLRTLEQRIASCEAQITRKFKHDERCARLAEVPGVGPLTATALVAAVGNAQRFKNGRELSAYLGLVPRQHSSGGKTVLLGITKRGDRYLRTLLIHGARSALRQCKDDARSGWARRIRAERGPNVAAVALANKNARVLWALLTRGDRYRSTRVATPAALHSSAPPAVKRARATRLRVLKD

SEQ ID NO: 147778 - protein, 345 aa, unidentified
MAEVSTIGLDIAKAVFHAHGADARGQMVFSRRLTRAKLLEFFAAQPRCVVALEACGGAHHWAREIASLGHEVKLIPPAYVKPFVKRNKNDAVDAEAICEAAQRPSMRYAATKTEAQQAAGMVFRTRDLLVRQRTQLINAIRGHLTEFGWVAPKGPSHISVLASLLEEGEEIGASLPKAARAMFLVMTGQLEQLNEQIKLLDKEIARRAREDEAARRLMTIPGIGPIAATALLALAPPVEGFARGRDFAAWLGLTPRQHSTGGKERLGAISRMGERTLRRLLIIGSSAVVLQASRRGAPRGSWLEQMLARKPRMLVTVALANKTARIIWAVLMKGEDYKAPVAAAA

SEQ ID NO: 147779 - protein, 390 aa, unidentified
MDVLYQSCAGIDVHQANIVVCILHGPLTSTRPKREMATFDTTTKGLRACHDFLSQFHVETVGMESTGVYWRPVWHALCDDFELILAQPAHMKAIPGQKTDKKDTHWIAKLTRIGLLPRSFVPDETIQELRELTRQRKHYVESRNRETNRIHKILQSGGIKLTTYIEDIMGLSGRNLLQLLVDGTPITARIVHQSVYTSLKKKVPQLLEALDGYFSDHHRFMLTQSLEFYDFYQKQIEILENRINYHLMQYEDQVEILDSIPGIDWITASVIISEVGVDMSQFPTAGHLASWAGLCPGNNESAGKKRSTKIRHGNSYLKKCLCQAAFAARNQKGSTLADRFYQIQSRRGSQKATIALAHQLLKIAYILLKEQITYPEFLAQKKTTRDKLVA

SEQ ID NO: 147780 - protein, 415 aa, unidentified
MAKVRSWAGLDVHARSVLAVTLDAQSGELRSRRLPGETAKVVEFLATLPGPTRAAYEAGPTGCGLARALQAAGIGCLVAAPGKIERPAQDKVKTDQRDAERVLRLLMIDALHPVRVPTVEEEALRDLVRAREDVRGDLMRARQRLSKLLLRHDILYEDTSSTWTQRHRAWLRAQDLGGGAQATLLDYLGAIDTLELRRGALEKTIAELVPASPCAQTVARLRCLRGVDTLSAVGLCAEIGDFGRFQRPGKLMSYIGLVPRRTAQARPAGKVPSPRPARGTPAGCRGQLALPQDPRPRHHPPTPPRRAARPHHRDQLASPTTAAPRLAPPGRGPRQAPHDRRGRRRPRTRRVLLGTRPRRLTPRRLNTTSVEKGGGNPPTRESISDLSMSSPAATPDLRQHWLSRRNPVLRQLNRV

SEQ ID NO: 147781 - protein, 422 aa, unidentified
MSYCPVAGIDVSKRFSDMCILSPDNKIFAQEKIYHDETSINRANALLQKAERLFFSKPVIVMESTSHYHLILFQFFSEHGYDVIVVNPLQSNSMKDFSIRKRKTDRVDAFKLAMMYRTKTLRPSQIPQTATRALRQLCRHRAELLNDVSSYKNRLTALLDQTFPGYDKVFSDVGGVTSCAVLVRFPTPTILLVEEESELVEVIAAASKSGYSFAKKKAGLLISAAQKAQTLGIHSCADETLIVCTIQMLRTLSESVLQIEAAIDHLLAQIKEMRSNVSLLQSIPGIGSHSAALLLGEIGDISLFKKPKQLAAYFGLDPTERQSGSFRGTKNKLSKRGSSYARAALHMGVVNAICKHGKDSAANPVLLSYYEKKCKNKPAKVAQAASMHKLVFIIFAVLRDQKSFELKTPEQHAVEQGFVKAA

SEQ ID NO: 147782 - protein, 346 aa, unidentified
MTIVEATRIVTGGIDTHGEVHVAAVLDEVGGLLGTESFRADPEGYSALLAWFEAFGVLTKVGVEGTGSYGAGIARFLARSGVHVVEVDRQNRQARRQAGKSDPLDAVEAARAAQSGRAHGTAKSRDGSVEAIRVLVVAKRSARGARIKALTQMRQLTFSAPDQLQSRLKGLPIAQFVAAAQGLRPTRSPDAVTAATKASLSSLAHRVADLEDEIADLDATITPLLQETAPELLGVYGVGIDTAAALLVAAGDNPERLHSEAAWAHLCGVSPLEASSGKVTRHRLNRGGDRQANRALWHIVITRLASDPRTQAYMERRVKDGRSKREAIRMLKRYVAREVYRSLPRV

SEQ ID NO: 147783 - protein, 351 aa, unidentified
MTSLAEPSCVVTVGVDTHRDFNVAAALEARGGVLDTATFASTPAGHEALLVWAREFGPIDAAGVEGTSSWGAGLARHLTAAGVRVLEVNRPNRAERRRAGKSDALDAIAAARAVQSGQATAVAKSKNGPVEAIRALRVARNSAIKARTQAANQLHGLVATAPDELRAQLRDLSAHQLAGRCARSRPTDPAGALGGTRTALRSIARRYQNLTAEIAELDVTLKPLVANAAPGLVAMIGIGTDIAGQLLVTAGDNPDRIGSEAAFARLCGVAPIPASSGLTTKHRLHRGGDRQANAALHRAIIVRLHCHPPTRDYVQKRMAEGRTKKDAIRSLKRYLARQVHAELTRPQLDAI

SEQ ID NO: 147784 - protein, 316 aa, unidentified
MTTTAVVVGVDVAKDRLDVAVRPSGEVWSEANDETGITTLVERLRPLRPALIVCEATGGFERAAIAALAAAGFPVVVANPRQVRDFARATGQLAKTDQLDAAILALFAERVRPTPRPLPDAAVQLLDAVLTRRRQLLEMLVAEKNRLGFAPKPLHRGIQAHIRWLERQLDDVTKELAGLIEASPVWRAKDDLLQSVPGVGPIVSSTLLGELPELGTLSHKQIAALVGVAPLARDSGTLRGKRQVWGGRASVRTALFMAAMCGRRWNPTLKVFYERLKAAGKPTKVALIACARKLLTILNAMVRDQSRWMSNVQYSC

SEQ ID NO: 147785 - protein, 407 aa, unidentified
MDVIYPRCAGLDVHKQTVVACARVAGNGPLLQEVRTFATTTSGLLALADWLESLGVEHVAMEATGVYWKPVWHVLEGHFELVLANAAHVKNVPGRKTDVNDSMWLADLLAHGLIRASFVPPAAVQELRTLTRTRKQFVRERSAHVQRIEKVLEDANLKLSVVISDILGKSGRAVLQAVIDGQIDPERLASCISTRVKASRAELLEALRGHIKAHHRFMLKLHLGHIDALDQAVAAIEKEVGLGLEPFRQAAKLLSTMPGLSDVSAHVIVAEIGIDMSRFATPAHLLSWACLCPRNDESAGKRRSTRVRKGGKWLKTTLVQAAWAAVKVKGGYLQAQFHRLRARRGAKKAIMGVAASMLTAAWHMLRNQTEWHDLGAAHFDRADATKTANRLIRRLQQIGFAVQVTPA

SEQ ID NO: 147786 - protein, 446 aa, unidentified
MGRRHRALTLKHPNAAGIDVGAESHFVAVPPDRDDEPVREFRSFTEDLHRIAQWLSYCGVDTVAMESTGVYWIALYEFLESKGFTVYLVNARHVKNVSGRKSDVLDCQWIQQLMSYGLLSGAFRPADEVCALRAVSRQREMLLKYQSQHVQHMQKALAQMNIQIVNVIADIVGETGQKIVRAIIAGERDPYKLASLRNYRIKASEEEIAKSLQGNWRQEHLFALKQAVALFDAYSEQLRQCDCQLQKMLQELKRYDGEPIYSKARSRKKNEPQFDLRSYLVGMCGVDLTRIDGIEVTTALKIMSEVGPDLSRFPSVKHFTSWLGLCPGTKISGGKKLSGKSRAGANRAAQALRLAAHALRASKSALGAYYRRLCSRLDKAKAITAAAHKLARLVYTMLTKGTEYVDKGQEYYEERYRQRVVYNLNKKPAAMGFVLMPAPEKASEMP

SEQ ID NO: 147787 - protein, 317 aa, unidentified
MDYNHYIGIDMAKATFSACLAEGQEAEKWPNNKKSINRFFKHLAGNNYLNDNTMLGVESTGKYHYPLCIASRQAGYAIKVINPLIVKKQNLTTMRRVKNDNKDAQLIRYCLIQGHGYKYQETSEQFILKTLVRQRNAISNNKNRSKRQKEDIAYKEKAVQAKINDVYQELYLLLDQKQKQIEKELKKYNQPIQKLLQSIPGIGPVTAASFVSEVGDIRKFECPKRLVAYCGIDPRVHESGTSIKGKGYITKRGSKILRTILFNAASVAVLHDNMFRYYFQKKISEGKPYRVALIATMRKMLHVIHAVWSRGAPFVNK

SEQ ID NO: 147788 - protein, 338 aa, unidentified
MAIVTIGIDLAKNVFAVHGINEAGKPMLVKPTVARSKLLELIASLPPCTIGMEACSGAHHWARLFMAHGHTVRLMAPKFVAPYRLSGKQGKNDAADAAAICEAVQRPHMRFVPIKTVEQQGQLCIHRVRQGFIEQRTATINRIRGLLSEFGIVLPLKAATIRREAMVHLEDLPGWANTVIGDLLSEVSHLDERVEQYDQHIEQIAREDTRTQQLMRLPGVGPTTATAILALIGNGHEFKCGRQFAAWLGLVPGQYSSGGKARLGHITKAGDAYMRSLLVLGARAVLNAAKKKSDSTSRWAVALAERRGYWRAIVAIAAKNARMAWASLTLGERFAMPA

SEQ ID NO: 147789 - protein, 346 aa, unidentified
MKIKTIGIDLAKNVFQIHGIDANGKSVLKKQLRRNQMATYFVKIEPCLIGMEACASAHFWARKLTAMGHTVKLMPPQYVKPYVKTNKNDAADAEAICEAVTRANMRFVPIKNLEQQTVLSFHRVRQGFVKARTAMANQIRGLMAEFGIDIPVGIGYITSRVPDLIEDASNELTGSFRLLIQGLLDNFRALGQQVAKIEEQIVLWHKQNTDSKKLAEIPGIGPLTASALVASIGDVKTFKSGRQVASWLGLVPRQHSSGGKQTLLGISKRGDSYLRTLLIHGARVVIYHMQKKLKTDQTGRWVNELVQRRNKNVAAVALANKNARIVWALLAHNRQYESDRPAIAVA

SEQ ID NO: 147790 - protein, 342 aa, unidentified
MHVTTIGLDLAKNIFQVHGITADGTVAFNRPVRRVQLLKFFEKQPACLVGIEACGSAHHWARELTRLGHDVRLIAPNYVKPYVKRGKSDAADAEAICEAVTRPTMRFVPIKSVDQQRVLSQHRVRELLIRQRTQLSNVIRGLLNEFGYIVSKGLRYIRAFAEKMRAGEAPELPSTAQHVISELCDQIMELDQRLKSIEKQIFKEARKDERVQLLETIPGIGPVNASAIVATIGSGEQFKNGRDFAAWIGLTPLNKSSGGKESLGRISKMGNQYLRKLLVAGMTARVSAAKAYPDRVDPWTKALLERKPVRLATVAMANKAARIAWAVLSQKEPFRQPVAQAA

SEQ ID NO: 147791 - protein, 351 aa, unidentified
MVMLGVDVHKDTHTTVGVDEAGRELGQRLVRATDAGHRQLVAWARRCWPNERTWAVEDCRHVSTRLERALLAAGERVLRVPPKLMAGARASARTRGKSDPIDALAVARAALRETDLPVAQHDQPSRELKLLVDHREDLVGERTRMQNRLRWHLHELDPELDVPARKLDRLVVLDRLAGWLTTRGAGSLVERLAAELIEDIRADTVRINALEGEITERARTVAPALLGLLGAGGLTAAKIVGETANITRFRSEACFAMHAGVAPIPASSGRTQRHRLARGGNRQLNAALHRIAVTQIGRPGSLGHAYYQRRITQGNSKMEALRALKRRLARVVYNLLQPIDTNATGHLPAAA

SEQ ID NO: 147792 - protein, 327 aa, unidentified
MGQEKMSHHVASSGEPVTIGIDVSKSHLDAHSLPAGSSQRFSNDEAGIEGLIRWAKPHQPARILFEATGAYHRRLEGALGKAGLPAVKLNPWQARRFAEATGRRAKTDTVDAAMLARFGATLRPDLTPARDEAIDQLKELVSARRALIKDRTAASNRAKTRTLALLVAQCAERRQQISEQIKAIDRACKAILTQNPALKERYAILTSIRGIGPVAAFALLADMAELGTIDAKHAASLAGLAPVTRQSGAWQGKSFIQGGRKPPRDALYMPAVAAIRFNPQLKAKYQAMIAAGKPAKVALVAIMRKLLIIANALLRDNRKWTAEVVRP

SEQ ID NO: 147793 - protein, 421 aa, unidentified
MESDYRIYVGIDWASEAHQACVLNHERGIVAERSFAHAGNAIVEFAQWLSGLTDDPGQIAIAIEIPRGAVVETLVERGFHVYAINPKQLDRFRDRYSMGGAKDDRRDAFVLADSLRTDQPCFRRVRLDDPQVIQLRELSRVDEDLQREGNQLANRLRDQLHRFHVHALKLCPAADEPWLWTLLELAPSPSVAQRLRPKRVELLLRAHRIRRLKADDVVSALRAPALQVAPGVVEAATEHIALLLPRLRLVHSQRQRCGARIEALLDELQAAGEEDDNAREYSDVAILRSLPGVGRIVAATIIAEACAALTERNYDALRAHAGIAPITKQSGKHRTVLMRYACNGRLRHALYHCARVAVMGDLPSKTYYTAQRQRGHTHGRALRAVADRLLRILVAMLTTRTLFDCTIARPPQLSSPSEKVA

SEQ ID NO: 147794 - protein, 438 aa, unidentified
MSNKVIFNLDDLFISVGIDVGADFSWMSIALPNQQFVGKPYKILHSSIDSLTIVVSKIKEAEELYSLESRIFLESTGIYHYPLFCYLRDKGFNCSVINPIITKNSTNINIRKVHNERFDSKKAALVGLKPDLKVSLMPSDLALNCRNLCREYYDLMDNRSAYVNKLQGELRMAFPQYLGIFSKVTINTSLTLLETYTSPSAFLEADKQEIINIIKSTARFGLTYAQNKYNAIIQAATDANQFGYIIDSNIKRIRLYISFIRKYDEEINNILESLHELVDANEDADFVKQIHLIETFKGAGFLSAVSIMGEIGDFSAFSKPKQLFAYFGLDPAVKQSGKFEGTKVQMSKRGSAIARRVIHTLTLQCISISRNGEAKNPVLREYYLKKCDSKPKLVAMGAVSHKVCNMIFAILRDNKPFKIIAPQEHIKQYNAAKCDMAA

SEQ ID NO: 147795 - protein, 367 aa, unidentified
MSSVASQAGLIHLGMDTSKNVIVVATLWPGQESPVTDRIANEEAAVRRLVGRFADRSVLRAWYEAGPGGYELYRLLASMGVACQVVAPSLIPKGSSDKVKTDRRDSRRLARLGRAGELTPVRVPSEAEEAVRDLVRARDAMLADRKRAQQRLTAVLMRHGRIWRGASYWTAAHRSWIAAQRYGEPALAAAVGYYRAALAVREAELAALEAELAPWAAREPLAGPVARLGCYRGIAELGALVLAAEVVDWRRFPAARAFMGWTGLVPAEYSSGERTRRGHITKAGSEPVRTALIEAAWAYRHAPAIGAGLRRRQAGACPDTLARSWKAQRRLHDRYVHLVHAGGKAAPEAAVAVARELAGFAWAEMTA

SEQ ID NO: 147796 - protein, 385 aa, unidentified
MTQVVRPAPAVLDYNSTIIGALELSEKKWVLAVQLPGVNRHSRHVLEARGDELAAFVERLKARCAAAGHKIARVILTHEAGRDGFWLARFLVRRGVEVHVIQPSSLPVDRRARRAKTDIIDVEMLLRTLMAWLRGEPRVCSMAPIPSEADEEARRAYREREDLTGERRSTVNKIDGILATLGVKGFKALRRDRRKQLTSLRQPDGDPVPQRALARIERLLDRLELVLKLIEQVETARDAVLKKVAPADEAERMIRSLTDLRSIGPDFATLLVREAFVREFRNRRALGGYVGLGGTPFSSGGSEREQGIGKDGNRRLRAAMVELAWMWLRWQPDSALSIWFRARVGQIRGRIKKIMIVALARKLLVALWRYVKDGVIPDGAKMKTA

SEQ ID NO: 147797 - protein, 343 aa, unidentified
MEAYAGRQFVGIDLHRRRTVIVRTTEGGEVLETVRIVNDVERLASVMARAGEGPEVVLEATYGWYWAVDALQAGGASVHLAHPLGVKAFEYRRVKNDVRDAADLADLLRMGRLPEAWIAPPATRELRELVRHRAKLVGLRSHCKAEVHAVLAKCGVQVLMSDLFGLAGTELLDRLDLPAPYAARIASLRRLMDDLDFEIDLFAGMVRGRMVREPGYTAVQNIPGIGPTLAAVFVAEIGDITRFASAPKLTCWAGLTPKHHESDTHVHRGRITKQGSRLVRWAAIESVKTITAGTPAGALRERVADRRSRNIGSVAAARRQLEFVFYALRDGHVRALEHLPRVA

SEQ ID NO: 147798 - protein, 417 aa, unidentified
MMDEIAWFVGFDWASEKHRACLLDRQGGVIGERDVAHGGAGLTELCDWLIGSAGAPPGAIAVAIEMPHGPVVEMLMERGFPLFAINPKQLDRFRDRFTVAGAKDDSRDARVLGDSLRTDRHAFRRLAVDDPVIIELREWSRMAEDLQQERTRLANRVREQLWRYYPQALQLTDDLAAAWFLALWHQAPTPAKAAKLRTTTIARVLQAHRIRRLGADEVLQILRQKPLAVAPGATAAATAHIRTVAARIRLVNEQLKTAHRRLDELTAKLAPSAESAPGQTSEQRDVAILRSLPGVGRINLATLLAEAWQPLRRRDYHALRALSGVAPVTRRSGKSCIVVRRLACNKRLEGAVYHWARVAMQHDPASRRRYAELRRRGHSHGRALRTVGDRLLSVACTLLQRQVVFDPGYTTERTTAA

SEQ ID NO: 147799 - protein, 334 aa, unidentified
MLYAAIDIHKHAFQAAVLDPESGEVVEERFAADRESLARWAEPWRGRVVAVAIEATTGWRWVWRELVANGFEVRLAEPVQTRALLGRRRSAKTDRLDARWLARLLAKEMLPESWIPPAEIQELRDRTRLRKALAEDRRRWGQRLHAYLLHEGWPCSRSNLLRPPGLRWAAALQLPEHARLQVDSLLAVMAALEAQLEAVDAELRRFARADERCQALQSIYGIGPILACHLLAEIGEARRFQRAEQITRLAGLDPVVDESGETRRRGHLAKAGSPHLRWALVEAAVHAHRTTAPDLALYRATRERRDTTVARLTVARKIGKRAFHALRELELATA

SEQ ID NO: 147800 - protein, 410 aa, unidentified
MPEPTYALYVGVDWGNQTHQVAVLDTARGLRGERGVAHDGPGLHALASWLAELAAPGTVAVAIEVPHGAVVDTLRERGFAVYALNPRPMDRFRDRDTVAGAKDDRRDAQVLAAALLTDRPAFRRLHVDDPQVVQLRELTRIEAELSEALRRLANRRREQLLRFYPQALELCPAADEPWFWALLTQLPTPPAAARRRRGPVAALLREYRIRRRTADEVLTVLRRTPLTVAPGTLEAATEHIALVLPRLELIATQRRACAPRVETMLAVLAAAGQQQGHRDVTILRSFPGVGRVVAATMLAEASQLLAARAYHRLRASGGAAPVTRQSGKQRGVPMRYAWNPRLRNALYYWAFIAARHDPATRQHYEGLRARGHSQGRALRGVADRLLAVLIVMLKTQTLYDPSRREAKFAV

SEQ ID NO: 147801 - protein, 409 aa, unidentified
MEVLYARCAGLDVHQKTVVACVRIHGPDGRAQTETRTFATDTAALLELSAWLEQSGCTHAVMEATGVYWKPVWHILEEACALVLANAHYVRNVPGRKTDVSDAAWLADLLAHGLVRSSFVPERPTQELRDLTRTRKQLVRQRAQHVNRLHKVLEDANLKIGSYVTDITGVTGRAILAAIIAGETDPAKLASLRNPRLKTPPDELAKALRGKITQHHRFLLQMHLDQIEAADRSVALLDSQIEEQTRPLAEEVRLLEDMPGMSRTSACVVLAEIGADMSRFPSQRHLVSFAGLCPGLNQSAGKSRSSKLKKGSNWLKTVMVNCAWAAARSKSTYARAQFHRLKARRGSKKAVVAVAASMLTAIYFVLRDRTPYRDLGVSYFDRRDQTKIANRLRRRLESLGFSVQMQPAA

SEQ ID NO: 147802 - protein, 351 aa, unidentified
MLIVGCDYHPSVQQIAWLDTESGECGERRLLHSNGEAETFYRKLKEQGVSVRVGIEATGHARWFERLLAELEYELWVGDPAQIKAKRVRKQKYDQEDARLLLKLMMEDRFPRVWVPGVENRDLRQLLWHRHRLVQMRTRVMNQLQAVALNEGVRRKKALWSDAGRSQLESFRLGPWATRRRQDLLQLLDQLNSNIAPLTASVEQQVGQHLEAQRLMTHPGVGALTALAYVLIIGSPERFRCGKQIGSYLGLIPCEDSSAGRQRLGHISKQGNSLLRFLLVEAAQAAVRSNADWRREFLHLAMRRQRQIAKVAMARKLGVRLYWMWRKGWDYETFLQFGSHVGQPEVGYGVK

SEQ ID NO: 147803 - protein, 377 aa, unidentified
MSKLRFVGLDVHAETIAVAVAEAGGEVRSLGVIPNRLESVRKMIGKLAPIGTLKCCYEAGPTGYVLYWQLAQMGVACEVIAPSLIPTKAGDRVKTDRRDAEKLARCYRAGELTPVWVPDADHEALRDLVRAREAAKKDQLRHRHRLGKFLLRHGKRPTDAGKAWTQKYLNWIRIHVHFDQPALQATVQYYREEVEHIAERITKLEQAIDEAVQQEPSEIRAVIEALQALRGVAQTTAATVVSELGSLSRFPNPSQLMGYSGLVSSEYTSGNRVQRGRITKSGNAHLRRVLLEAAWTYQHRPNVQGRVLRRQKSLALSEEARQIAWKAQQRLHKRFGALAARGKERNVAATAIARELLGFMWAIAVHTEAQQKQAKAA

SEQ ID NO: 147804 - protein, 350 aa, unidentified
MSQNLNSAVAVIGIDIGKNSFHVVGLDDRGAIVLRQKWSRGQIEARLANMPPCLIGMEACVGAHHLSRKLKALGHDARLMPAKYVRPYSKGQKNDFRDAEAIAEAVQRPTMKFVATKTADQLDLQALHRVRERLVSQRTGIINQIRAFLLERGIAVRQGQRFLRAELPRILATPPEVLSARMVRVISDLAEDWRRLDQRIDCLSSEIAVLARQDAGCERLMSVPGIGPIISSAMVAAIGTGDAFAKGRDFAAWLGLVPKQISTGDRTILGKISKRGNRYLRVLFVQAAWVVLIKPMSWERHGLKHWIEAARKRLHRNVLAIALANKLARIAWGVLAGSGRTFEASKLQAA

SEQ ID NO: 147805 - protein, 421 aa, unidentified
MQVLYERCAAVDVGKDTIAVAIRLPGGGPDHRQTVKRTFKTFYGVLKHAAQWLTEQHVTHVAMEATGIYSMPVFHALVEHGDFEKVLVCNAGHVRNVPGRKTDLSDAEWLVHLLECGLLRGSFIPPAQIKAARDVIRYRTKLTQSRTSELQRLGNVLQDAGIKIDSVASTLSTLSARAMVAALIDGERRPKILADLAKGKMRAKIPDLERALEGRFDDHHALMCRLHLEHIDHLEEMIAKLETQVEEMMAPFRAQRELLITIPGIGPLASAAIISETGADVPGYFPTAEQLASWTGLCPGNHESAGKRYRGTRRKGNQHLQPVLVECAWAAVRSQGYFQSLYRWHVRKFGGFRSPQAKNKAIIVVAHKLIVVIWHVLATARPYEELGADYFTTRIDPEKETRRLVAKLQTLGHTVTLEPAV

SEQ ID NO: 147806 - protein, 401 aa, unidentified
MQDTQQHGTVDVFVGVDVGKGQHHAVALDRNGKRLYNKALPNDEAKLRALIAELKTHGRLLFVVDQPSTIGALPVAVARDEGVLVAYLPGLAMRRIADLHAGEAKTDARDAAIIAEAARSMPHTLRSLRLADEQLAELTMLCGFDDDLADQVTQTSNRIRGLLTQIHPALERVLGPRLDHPAVLDLLERYPSPAALAATSEKTLANRLTKLAPRMGKGLAAEIVQALSEQAVTVPGTQAATIVMPRLAQQLAALRKQRDEVAAEVERLVLAHPLWPVLTSMPGVGVRTAARLLTEVAHKAFASAAHLAAYAGLAPVTRRSGSSIRGEHPSRRGNKVLKRALFLSAFAALRDPVSRAYYTRKIQQGKRHNQALIALARRRCDVLFAMLRDGTIYQPKSAPNA

SEQ ID NO: 147807 - protein, 333 aa, unidentified
MSSDGSIAEETKYNNTLSEAEIFACSMVKKYGKCVAVCESTANLWLKTYQAFEKYNIGVKLANPLKTKAIAEAKIKTDTLDARTLAHLLRSDLVAECYIASREIRQDRSLLRLRTNLVQDRTRVMNRVHSVLDKYDLKCDYDNIFGVKGTRWLKSPKLSDNDEILLHEYVMQIEFLNTEIKNIESKITCEASKNESVKILMSMTGIDYFSAMLIASEIGDITRFSTPEKLVSWSGLCPSIHQSGNSLYMGRMKDGNKKIRWILIQAANTAARKDYRLRKFYLRIAKRHGHHVAITHVANKMITIIWHMLVNKKLYNERKQSLYETKLKRIQKT

SEQ ID NO: 147808 - protein, 339 aa, unidentified
MYPFYLGIDLHLKRTFMVLMDAKGEVIDKQRISNDDISRYLQEKVPQETYAVLEATRNWPFMYDLLNEHVQKVDLVHAKGVRAIANAAVKTDQIDASTLAHLARMNYIPKAYAASKEMRDLRQLLRHREWMLNQRTKAKNRIHAALAGYNLVSPVTYLFGVAGRAYLDEVMEKELRPAARQVVEDHLAMIDHLGERIHALEKSISLNERQNHIVKLLMSMPGVGRLIALTILAEIGDISRFHSPKSLCSWAGLTPRVHNSDAVVQHGHITKEGSRYLRTAMVRAATVACRVSSKWCVIHSHLALRCGRRAARVAVARRLLTVIYYMWKRDQPYQENYGQ

SEQ ID NO: 147809 - protein, 400 aa, unidentified
MDKDRIVAGLDVHKDTIYLCVMDNTEAVIFAKVYGTLTPDLELVCSEMVSHGVTEAAMESTSTYWVPVWNALCESMSLKLVNPYFIKQLPGRKSDVKDAQWIAECLLKNLIRGSFVPDKTVQDMRKYNRRIFDLNEDLTYNSNKQDAALQRCGFRLSNYVSRVNGKSYQKCVRAIITGITDPEELVKLIHGKTLRKYGRNIIKDAVTGDFHQADICLLKQYAELLGVIERQIEECRNALISMCQEHFPKQFKRLQSIPGVKERAASAIIAETGADMKPFEKATNLVGWCGLKPRNDISNNKVKSNRTTHGNRFLRQILIEISWVASRTRNCFFSNFSYVQCTQRHKNKMKIQVAIARKLLVAVWHMLTKDEDFIDVYLKRLEKQAEWQNDLQALESLLVG

SEQ ID NO: 147810 - protein, 410 aa, unidentified
MDVVYERCCGLDIHKQLVVACLLTPGAGAQPAKAVRSFGTMTADLLELADWLTAAGCTHVAMESTGVYWKPIYNLLEDQFTLLLVNPKHFRAVPGRKTDVRDAEWLADLLRHGLLRGSYVPARPERELRELTRYRTALVHERSDEINRLHKTLEGANIKLGSVASDLMGRSGRRMLAALAAGTTDAGELADLAKDKLRKKLPELQRALAGRMGAHQRFLLQQQLAHIEFLERTIEQVSAEIQERLRPFEAELEGLQTIPGMGRRVAELLVAEIGTDMNRFPTAGHLASWAGMCPGQNESAGKRKSGRTRRGSPWLRSALVEAAHGAARSKGTYLGAQARRLKPRLGWKKTMVAVGHSILVRAYYVLQRGTRYEEPGAAYFIERDRQALERRHVRALERLGYHVTLEAPAA

SEQ ID NO: 147811 - protein, 298 aa, unidentified
MWYSGIDQHKAFCLITTYGPEGPRVKPARVACTPLALQQYFAEFPGPHQAVVESTGGWYWLADALAALGVELVLAHATRVKAIAAAKVKTDKVDSDTLALLLRAGLMPRAHLIRPDARDPRDLMRTRLRLVEKVVSAQNSIDRLLEKFNRESVADLDELYQLQAACHAAQIHRFQEQISTLERALYSYLIPTADVQRLLWVPGLGKVTAFTIYTEIDDISRFPAERQFFSYCRLVPGAKNSASHTRPRSGSKAGNRYLKLAFRHAGIRAAQYYPESRAFFQAQARKKPIRIERRSPRG

SEQ ID NO: 147812 - protein, 382 aa, unidentified
MQPINTVNPTIYLAIELSASTWLIAARLPGSEKPHLHRIEGGDTAALFALISSLRARVARRLDAAIDVVCCFEAGRDGFWLHRLLTAHGIANYVLEPTSILINRRARRAKTDRLDAIGMLRVLAAYLRGDRQSCSMVRVPTPEDEDAKRIHRERENLVQEKLRIENRIEALLFTQGIRKRPSLRSWERDLAVLRTGDGREMPRHLRAELDRLRRRLVTILELIREVEAERDEVVTTNPEHQTSRKIVALCRIRGLGENFAGVLTREVFYRSFDNRRQIASYVGITPMPYQSGSMDRDRRISRAGNPRARTTMIQLAWLWLRYQPGSELAEWFRKRVGTLAGRTRRIAIVAMARKLLIALWRYVETGVLPAGAEIRLESVAAA

SEQ ID NO: 147813 - protein, 345 aa, unidentified
MSTVYVGMDVGSKVTAVAARSESGEVVERLSFKTSKENLISHISRYGMDAEVLLEEGELAGWVYRTLLAYTGEVIVCDPKRNAWIAKGKDKSDKVDADKLSELLRINSFATIYHTPDEHIAAFKVAVKHYEEATERAARQMVQIKAMFRTNGVFPEGKRVYGIQGRCEYLRMTENPTIRNILVQEYDMLDYLSKAKVEAGGLVVKMSLNFPVIEHFKRIPGVGPVLAARFVAYVLDPNRFNKRGLWKFSCLGIVNRSSDGVSLGRQHLDRAGVSAMKDLSRKVFDGAMRTKETNGVQVFFQRSYRNCGDRDHARLSTQRKVLSMMNAMWRDGTDYSDEMFLGPRA

SEQ ID NO: 147814 - protein, 391 aa, unidentified
MVCVGIDVAKDKHDCCILDSDGMVRADCFTIPNNMDGFKQLLQTIRNCTKKSDKIKVGLEATGHYSYNILGFLLDNGLPTYVINPLHTNLYRKSLSLRKTKTDRVDARTIATMLLSDVDLKPYTDIAYHNEELKSLTRYRFDKVQERAKLKQSVSRLATILFPELEGLVSSIHGTSIYALLSEYPGAKQISEVHLTKLTNLLTTASKGRYGKEKAIQIREAARASIGSVMPAKSLELKHTIKLIQELASEINEIEDSIQKIIDELNPPILSIPGMGVNSAAVILAEIGDFSNFSSPDKILAYAGCSPSTYQSGKLTNCYAHMEKRGSRYLRHALYNATKYVCYWNPVFAEYLAKKRAEGKHYNVALSHAMKKLVRLIYALQKSGKAYLAAA

SEQ ID NO: 147815 - protein, 326 aa, unidentified
MEPELHSIVIDTAKEKLDGDVLRPDGRHRTKKFANTTKGHDELVSWLKGHKIDHAHICIEATGTYMEPVAECLYDAGYIVSVINPALGKAFAQSEGLRNKTDTVDARMLAEFCRQKRPAAWEAPHPLERALRALVVRHQALTDMHTQELNRTETAREVQRPSIDAHLLWLEAELKRLEKQIKDLTDDDPDMKHRRKLLESIPGIGEKTSAVLLAYIGLKDRFAHARQFAAFAGLTPRRYESGSSVRGASRMSKAGHVSLRRALYMPAMVATSKTEWVRAFRDRLAANGKKGKVILGAMMRKLAQVAYGVLKSGVPFDASRHNPVAA

SEQ ID NO: 147816 - protein, 285 aa, unidentified
MNYMGIDHHMQYSHITLLDEKGEKLKSGRVANLRSELENFLLGIEEVKAVVEAGRSSYTMVDVLDSMGIDVTIAHPKEVKAIAKAKIKTDKRDSKILAHLLRTDLIPEVYKRSRENRSYQRILRQRVFYVGSMTRVKNRIKALLSQQSEDIRGEISRVKNIFGREGLAVLKGLDLPEGEKKLINALLITFRHMEERIKESSALVEELYEMLPFVRLIHTVPGFGKFLSVLVAVEVADVNRFEDLGKFHSYAGVIPSTHSSGGRTYHGKIVKEGNRGLRWAAVEAV

SEQ ID NO: 147817 - protein, 335 aa, unidentified
MEKVSKIFEGKTIGLDVSDRSSVVCVLDEDGEVIEESTIRTTPSSIRSRFGSRERMRVVLETGVHANWLHDELESLGHDVVVANARRVRAICEADHKNDRSDAEQLARLGRADVRLLSPVDPRSVETRKDLEVMRARSLLVEVRTRLVNHVRGAVKPMGTQLPKCSTECFHRLELPTELGAELKPMMEMIRSTSAAIEAYDEQITALAAKYPQAGVLRQVKGVGPVTSVCYVLTIGDPGRFKDSRQVAAYLPDPGAAPVGRQRSQAADHQEWRSDAAHSAGAERTVHPAPLESGHGLEALRHPPCTARRQGLQAARRRSDGAQAQRAAPRPVEER

SEQ ID NO: 147818 - protein, 345 aa, unidentified
MKKNLFFIGLDISEANFVASIYKTPGQPIVTKEAIPNDRKGFKMLLLWLNDYHIDKKNCRICMEATGVYSQAIAYYLLFQGFPVSVEPPLKVKRAFDPVGHKTDPVDSKQIAEYAYRFQDELTSWKPRDEILEKIRQLLSVREQFTKQKVALDNSIQAYSKQRVQVALIRKAQKETLNQLKKQIARIDKELEKLIKQDPEIFQRTNNLDSIPGCGMLLAAHLLVITENFTKIQNSKRLAAFIGIVPYQHQSGSSVSKRAKIRYFGPGPSRKLLRLAAQSVATHNVTFRRYYLRKLDQGKAKPLVLNNIANKLLKIACTIIRNNTRYIKDYRSINPMYLKNAVKSA

SEQ ID NO: 147819 - protein, 339 aa, unidentified
MPGALQPVSCQAGPLGGCLSSQVFVGIDVAKAQLDMALRPTGERWAVTNDDAGIAALVTRLQEITPQLIGLEATGSYQRAVVAALAAADLPLVVVNPRQARDFATATGPLAKTDVLAARPLAHVAEAVRPARRPLPGAQAEELRALLARRRPLIARRTAAQNRLGSAPCRLQADIQAHITWLHRRLAALDDDLDTRLRASPVWREREELRRSVPGMGPVCARTLVLDLPELGTLSRQRIAALVGVAPWQRDSGTLRGTRTVWGGRAHVRATLYLSTLVAVRYHPRLRAFYERLRAAGKAAKVALTACMRKLLTILNAMVKHHTPWQSQEVSIASHTRTP

SEQ ID NO: 147820 - protein, 349 aa, unidentified
MASLPGVARQVTVGVDSHKDVHVAAAVDQVGRVLGTTWVPTTTRGAAQLLRWATRLGAVQRFGIEGTGSFGAGLSRWLQEQGHEVVEVNRPNRQARRRRGKSDPVDAEAAARAVLAGEATTTPKTANGTVEMLRVLRVARRSAIKARGQAANQLDSLLVTAPDQLRHQLRGLPLAQVVQVAAAFRPGPLTDPLAATKFALRELARRYQLLTAELDQLDAQLAALAPKAAPRLLTRRGVGPQVAGALLVVAGDNPGRLHSEAAFSMLCGSSPLEASSGKTVRHRLNRGGDRDANNALWTIAMTRLSCDERTQRYLARRTAEGKSKREIIRCLKRYIAREVYRDIKAAIVT

SEQ ID NO: 147821 - protein, 402 aa, unidentified
MNSVGIDISKGRSTIAVMRPFGEVAISPFEVRHTDSELSELARRLKSLNGETRVVMEATGNYHAPVAKQLHDAGLYVSVVNAKLVHGYGNNDLRRVKTDRKDAIKLANYGLDRWLTLPRYIPEENTRLLLKNCYRQYRQYSKVQTVLKNNLISLLDMTFPNANRLFNSPARADGSEKWVDFVAEFWHCECVSERPLKSFVNKYWRGCRKHGYNFSEEKAHAIYDEASGHIGVMPKSETTKLLVEQAVSQLSATSAALAVLKQEMQSLSSQLPEYPVVMDMFGVGPTLGPQLIAEIGDVRRFYSKKALVAYAGIDAPPNDSGDVIGRHKSMSKVGASSLRRTLFLVMSVYLQNSPPNEPIYQFMNRKRAEGKPYRVYMMASANKFLRIYYATVKAYLEILEQI

SEQ ID NO: 147822 - protein, 339 aa, unidentified
MDATTYGLDVAKRVFQMYWVEAETGEIVNRRFGRDELIRFLAQRPPGQVALEACGSAHWWARKIKALGHEVVLLHAKFIRPFVQTNKTDAADARAIWTAVQQPGMRTVATKTEDQQAMLSLHRIRALLVKFRTVQVNQLRGLYEFGATFRAGRAAGLAEIRARTAELEDALPGTMMCCLQDQLRRIEELQRDIDLLEKRIGAWQKQDAACHAITAVPGIGRLTATALVATMGDAKSFRSGREFAAFLGLVPRQSGTGGKVRLGPMSKRGDPYLRTLLIHGARSVMYHAKVPTPWQKDIQARRPANVAAVALASKIARTAWAILARGQEYQPNYVSMRPA

SEQ ID NO: 147823 - protein, 354 aa, unidentified
MKILALDIGKFKTVFVVYQATGGKPQYGKLCTAPDVVHDLLVKHQPDRLVLEVGAAAGWVCDIAGVLGIPTQVANTNDERWQWKRAKAKTDRRDALKLAQMSAMDCLPTVHMPASRVRQWRCLIQYRHALVVRRTAVKNSIRAIHDRQGMAMALGRAQWTEAGMGQLAKVARRLDRCGPEELWRGQLRMEVQLLLAIQKQIDASERKLTKLAESDRRVQLLQTAPCVGPRLSEAVVALLDDPARFANSKQVGAYVGLTPRQWQSGQSVRSGHISHWGNPLLRALLVEISWIGVRHKTWMLEVYEQVRRGSPKRKKIAIVAVARRLLVRLWAMMRKGQEWKEAVTAELTAATAPA

SEQ ID NO: 147824 - protein, 345 aa, unidentified
MKITTVGIDLAKNVFQVHGVDERGQAVLRKQLKRKDVLSFFANLECCLIGMEACGGAHYWARKLSTQGHSVRLMAPQFVKPYVKTNKSDRNDAEAICEAVGRPNMRFVPVKTAEMQAVLALHRARQGFVKARTAQANQIRGLLAEFGIVIPKGIAHIAKRLPEILEDGENGLPGMMRQLLERLGEALKALGQQVGEMERQITLWHRDNEQSRELEAIAGMGPISASAYVATVGDAKSFKNARQVSAWLGMVPRHEGTGGKATLGRISKRGDVYLRTLLIHGARSMITAFERKPVQPDGWLKRLLARRNKNVAAVALAAKNARIAWALLAHERSYQPDYISKGAGA

SEQ ID NO: 147825 - protein, 345 aa, unidentified
MKYYAGLDVSGKETSMCIVDQTGKICREVKVTSHPDDLIVVLKDPAWNMERIGLEAGPLSQWLFEGLARAGLPVICIETRHTKAFLKAQPNKSDRNDARGIAQMMRVHLYRAVHVKTLTSQKRRALLTARKLLQDKAIAIENDLRGLLRNFGLKVGVVGSAKFEARIRELVEGTLDLVEIVEPLLDARRKLREHFATLHRKLLMIARDDEVCRLLMTIPGVGPVVAVAYTATIDIPQRFKNSKAVGPILGLTPVLNQSGESHRVGRVSLCGDGMMRTLLYDAAQVLLNPVAKWSWLKAWAMSVAKRRGLQKAMVALARRLAVIMHRMWSDGTEFCWSREKLPASA

SEQ ID NO: 147826 - protein, 345 aa, unidentified
MLRFRLMVDVVCVEQPQASWEERSMKHYAGLDVSVKETSICIVDEVGRICREMKVVSHPEDLLAVLCDPAWRLERVGLEAGPLSQWLFSGLAEAGVPAICIETRHAKAFLKAQVNKSDRNDARGIAQMMRVGLFQPVHVKTLASQKRRALLAARKILQEKALAIENDIRGLLRNFGLKVGIVGVVGFEQRIHDLVEGVPELADIMEPLLAARRVLREKFAKLHRKVLLLARDNEVCQRLMTIPGVGPVVSLAFISTVDVPARFRNSKAVGPSLGLTPVLNQSGESHRVGRISLCGDEAMRALLYEAAQVMLTRGQKWSWLKAWAMNIAKRRGQKKAIVALARRPP

SEQ ID NO: 147827 - protein, 467 aa, unidentified
MKNYDYNLFVGIDVSKGKADAAVLAVPELRSVKPRFLRKKLSFKFIKSDVVEFLNTVRKYSSDPHCLHTYFALEVTGIYSTNVYSFIKQNCNSDEEIHQLNTDFVNKWRESHNISKSDPLDAQTISTIIGTDDDVRYVSDSVFENKNGYQDLKALVHRHYQIKKLHSQETNRLIALCDCYFPELQYVFEPKSAAFLAVLSQYPTSHDIINASKNEVFSLVYEATKHRCSLDKIDKLFNYAQDTLVPHVSDHIRCVISNTVESIVNIRTQLKLIEKDIRKLAATFNVYSLLMSITGCGPLTAAVIIAETGDIFRFKNADHYVSYSGSSPRNKRSGKSVEIMGKISKKGSKYLRHALYMIAEFARRHNPVLKHLFERVKNGNKKRHKLAVIAVANRIARYIYSIMKNESSFVIMHENIMRLPEETRNTFFNSISLDFPKNTRKQIYQYSDVNGEIHRFVYKNETTESIA

SEQ ID NO: 147828 - protein, 391 aa, unidentified
MAGVRNQTGEPDTMPSENTVHIAIELSFSSWLVAARLTGAKKSRLHRIEGGDTGALLALIAELRSRALIQLGGAAEVACCFEAGRDGFWLHRLLTAHGILVYVLEPTSILVNRRSRRAKTDRLDAEGMLRVLAAWLGGDRQVCSMVRVPTPEEEDGKRPHRERERLVQEKLRIENRIEALLFTQGIRARPSLRSWERELTELRTGDGRTLPPLLRAELDRLRRRLVLILELIRELEAERAAALAAAPDEAMAQKITSLQRVRGIGANFSAVLVREVLYRSFANRRQLASYVGVAPMPYQSGGMDRDRSISRAGNPRARTTLIQLAWLWLRYQPGSALATWFRERVGTLQGRTRRIAIVALARKLLIALWRYVEAGVLPAGVEIRTGTVPAA

SEQ ID NO: 147829 - protein, 349 aa, unidentified
MHYMGIDHHKQYSHITVLDERGEVIKADRVGNTRREVRVFLLDLGGKVEGVIGAGYSHYTMMDLMESEGVSMKIAHPEQVKAIAKAKIKTDKRDSKILAHLLRSNLILEVYCRDKENREAQRILRHRVTYVRMQTQVKNRIRAMLAKQREEVRQIVELEENLFTGSGLKLLRNLELVGRDQQMLKSLLETLDHFHGKIKLSDALVREILSTSEEARLISTLPGFGKFFSVLVSVEIADIHRFDTPEKLHSYAGLVPSTHASGDKLYHGKLVRRGNKWLRWAAVEAVWPAVKSDFDIRLYYQRRKKRKGANSAQVATAWRLLTIIYRVLKEKRAYIPYKRKKYTAAFAHI

SEQ ID NO: 147830 - protein, 389 aa, unidentified
MLLDHPSDGPAAIRSHIAAIFVSLELSRKNWLVTSLSPGKGEKMSRHSVTAGDVAGLMKQFADLRRKAEVRTGESYPIITIQEAGLDGFWLHRVLQQNGVESHVVDPASIAVPRRRKRAKTDKIDGETLLRALLAYKRGEPRVCAMVVAPSPEEEDRRRLCRERRTLIAERIEHVNRIKGLLFAQGISDYKPLRRDRRARLEALRTGDGRELPPHLTAQIGRELDRLELLLEQIKSVEAAQDALLVAARTPASEQAAPGPVTLLLALKGIGANFAAVLWSEAFYRQFANRRQVAAYAGLAATPWQSGGIRHEQGVSKAGNSRLRTTMIQVAWLWIGHQPQSALTRWFKERSPQGRKRAIVALARKLLVALWKYVTQGVVIEGAIMKPAA

SEQ ID NO: 147831 - protein, 368 aa, unidentified
MHHFTCARGKVTIGLDLGDKHSHYHALDANGRSVGRGRLETTPEVFRAHFSAMKSARIVVEAGTHSPWVSRLLTELEHEVLVANPRQLPLIYRNTKKSDQTDPENLARVGRLDPNLLKPLEHRSKRTQVDLATLRARDSLVAARTKLINHVRGSVKPLGAKVPSCSAPHFHHKAPAFIPVELQAVLAPVVKMIEELTRQIRHYDKVIERELCVKHSATIVLQQIDGVGPLTALAYVLILADPRRFRDSRTVGAYLGLTPRKDDSGEQQPQLRITKAGDPFLRRLLVSSAQYILGPFGPDTDLKRFGEALARRGGKNARKRAVVAIARKLAVLLHRLWLTGEVYEPLRKRPQPERNLGASRDCSSVTTD

SEQ ID NO: 147832 - protein, 349 aa, unidentified
MLEITRVGVDLAKNLIQVHAVDQGGQPQVRRAIARGRFVDWCAKLPAGCLVVMEACSGAHHWARRLGQLGLQVRLIAPHLVLPYRPQGKRGKNDANDAAAVCEAATRPQMHFVPIKTTEQQAILGVHTVRQGWEKDRTACINRIRALLAEFGLVAPEGAAKLRGQLALLLEDASNEMPGLVRLSIERLQLQWRQLDEEIAWCEQRIAQHAKDDLRVRQAQQLLGVGPLGASALLASVADFSQFRTGAQFAAWLGLTPSQHSSGGKTRLGGITKQGDAYLRMLLVQGAKAAIHRSKPRQERVWLWVQQLSERVGWQKAAVALAAKNARILWAMFTRGQPYAANHVSIKPA

SEQ ID NO: 147833 - protein, 354 aa, unidentified
MSQKLNSAIAVIGIDIGKNSFHLVGQDRRGNLVLRQKWSRCQVEARLANLQPCLIGMEACVGSHHLSRKLQALGHDARLMPAKYVRPYSKGEKNDYRDAEAIAEAVQRPTMKFVATKTADQLDLQALHRVRERLVGQRTGIINQIRAFLLERGIAVRQGLHFLRAELPAILAKRTDVLSPRMLRIIEDLASDWRRLDERIDSLSEEIAALARQDKGCERLMTVPGIGPIISSAIVAAIGTGDAFSKGRDFGAWLGLVPKQMSTGDRTILGSISKRGNRYLRWLFVQAAWVVLVKLGPEGWERYGLASWIEAAKKRLHRNVLAIALANKLARIAWAVLHKGRAFECVKTNAPRSA

SEQ ID NO: 147834 - protein, 370 aa, unidentified
MTFIGIDLHTNRFTCCYRDEHPPVEGKDGKRTETFALSAQGLADFYRTLTSETYVLLEATITTFSFARLIQPLVKEVIVANTYELKQISLGRNKTDKIDADKLCRILKMQVLSGESTISPVTIPPAEIQDLRSLFSSYRFLKKQTTQQKNRIHSLLKEKLHGFTAEQIFGKGSRKALRAIEGDEVLSLQINELFDILEYQEAKIEVFEGKIKVLAEPFIREIDILTSMKGISVFIAIAIIADIIAVDRFKDSKSFTSYLRSAPRVESSNTTKGNRGTNKMGRKLAATLLTQILNHALDASPKLEKWYNRLSRYKKAGLVRTGLRRRVFAEIYQMLKKGEYHYGRDTKKHEEKMGQYKRFLEKRKNILKSA

SEQ ID NO: 147835 - protein, 346 aa, unidentified
MYYMGIDHHMQYSQITVLEESGKKIKADKVWNNQKQVKEFLSGLEGEMEGVVEAGRSHYTMVDLMESFGVKMKIAHPLLVKAIAKAKIKTDKRDSLTLAHLLRLDYIPEVYRRSNENRQAQRVLRHRTSYVQMRTKIKNRIRALLAQQREDVRQMVTMENNLFNTKGMKMLYQLDLPGKDQQMLESMLETIQHTEGKIKLSDALVKQVYNSSEQARLISTVPGFGDFFSVLVATEIADIERFSSAAKLHSYAGVIPTTHASGGKVYHGKLVQQGNKWLRWAAVEAVWPAVKADFDISLYYQRIAKRKGPNPAKVAAARRLLTIIYRILKEKKVYIPYKRKKQKAAF

SEQ ID NO: 147836 - protein, 429 aa, unidentified
MTKTYILKTQTVPADRSAVETYLAPPPPSKGKIIGLDCHPDTFTAAFFVGQTPHDARKIGSRENLSLDALLKWAAAELTPQDIILMEAGSNSFELCKRLGNLGLKACVLESCHVGKHAKTYADNDKMAAARIALVYLAGNAPCVWVPDEQSRERRELLHAYRKAVDEHTAATNSIKSYLNGRGLRLGKHSLDEKTTSQWILDQADWSGLQKNILTEHLANITESKERRKRLYRLIAAEMAADPKMMRCMKVLGVGIVSAFALLAVIGDIGRFHSPEKLVAYIGLNPGQRQSGKGKDIRLGVGRRGRGDIRNLLIQGAHAIMRSGRNTPLGQWGWKLFTRKGNRNVAVAAIARKLLVQVWHLLHGNPPLALESDTSFRIKLQKLAVALGSTLRTGIGLGKTLEDSVKTLISRCQTHAEPSASPCETPQPA

SEQ ID NO: 147837 - protein, 351 aa, unidentified
MKRVNKQIHGEALFVGIDLHKRRWHVTIRTVDVELFSNSISGRWEELRRILTRYKGCRIHAVYEAGYFGFWLFDHMTQYGVDCIVTPPSLIPQEYGNRVKTDRRDSRKLARLLAKGLLKSVWVPSAEERFHRQVIRRRRQLVGDRVRTQNRIKSELCFYGIDLPAPRGPWTQVYFANLQRIKFNNRWMQQSFNRLLEQYEFLSAQIDKQTQLLKQLSQLPLYRDRVKILCSIPGIGLLTAMEILLELQDFSRFRRAQQLAAYVGLTPSQYSSADKIRMGRITAAGKNTVRSALVESCWHLIRKDKAMRKKYEQIKARAGGKRAIVAVSRKLILCIRRLLLDNRPYEYEPVN

SEQ ID NO: 147838 - protein, 354 aa, unidentified
MPATIIGVDPHKRSHTAVVLDDCEQVASEIRVTASGGQVEELLAWAPAGERVWAIENANGLGRLLAQQLVAKGEVVVDVPAALACRARKLSGNSGRKTDEFDARAVAIAATYNRGLRRVQPDNVSAVLGLLVDRRWQLVSQRQRTICQLHALLTDMVAAGAKGHLTSKKAAEVLRTIPAGDVVTLERKLLARELIDDVRRLDRRIPPARRRLTEALGAYGTTLTDIHGIGDVGAATIIGIVDDPTRFPTSGHFAAFTGTAPLQASSGDVERHRLSRRGNRQLNKVLHTAAKTQIRRGGPGRTYYQRKLAEGKSPMEALRALKRQLSDVVYRRLLADHQKRAARGGQMRTSPKAA

SEQ ID NO: 147839 - protein, 342 aa, unidentified
METKRHIGIDLHRNCFTACVRLENGRNYLSEWKLEDLPRFTKKLRAGDEIAVEMTGNTRFFHEAVAPHVARLVTVDPNQFKVISQSVKKTDPNDARNLALYLAKDLLPEVRMKEKTEAQIASLTQTRDTLVKLRTALKNKVNNILAAHGINLAKEALSSEKALNGVLEMHFDEMVEVELQVIVEQIRGLNQSIGKLEQTIRDRGQKLKGHRNLTSIKGIGNLGASILLSVIGDIEDFADEGKLAAYFGIVPRVQNSNQTERSGRITKRGTKLGRTTLVQCALVAKRYSPYLAQYYEKIKSRRGGGKAIIALARKFLGIIYRTLKNNWVYEDFPNFVLAEAAS

SEQ ID NO: 147840 - protein, 366 aa, unidentified
MSNYIMVGADVHDKDILIKAAYNRENPIQKSFNNTPGGTDRMIAALKKQAREHGNASIIFVYEASFLGFGLYDKLTDAGIECRVLAPTKIARSSKHRKRKTDARDANRLLEVIRGHILAGNDLPDIWIPDLETRDDRELVRMRLETGDKIIAVKNQTLVLLKRNSFRKPGKIGKNWTKSHRLWLGESAKPGSDLPSGARCALNSLGRQLWALEQEIAYLDKQIQKLSQTPRYAGPVQELVKLKGVGTLTAMVYLTEMGDLSRFNNRRKIGAYLGLVPSSKESGGKSDRKGHITHQGSSRVRKILCQASWARVRTDLNEKKVYERIVKRNPKHKNIAVVASMRRLSIKMWHEGLKAQGRAGSFEAVV

SEQ ID NO: 147841 - protein, 399 aa, unidentified
MTLSAPVINKRSRPMPKPNDLSRSFTAFEQDSTLIAVIEMSLTSWLIAGILPGIERHPLKKLDVDEEGLLQLLHRWRDEAINAGREISRIVLAFEAGRDGFWLARWLRARNIEAYVIHPNSVAVSREHRRAKTDRLDTELLKRAFLGWLRGESDHCSMAAIPTLEEEDARRPNRERENLLGERTRIVNRMKACLVRFGVRNFKPTLRKAPERLKTLRTPEGGPLPPNSFAELRRDMARLRFVMDQIREIEEARLQRLEHSPNEGLHPMVRLLARVIGVGIETADMLVHEILSRNLRDQRAVARYAGLTGSADESGKRRREKGLARAGNARVRRGMIQLAWRFLMFQKESALVQWYRSVTNEVRGARKIMIVALARKLLIALWRLVRTGEVPQGVALRTA

SEQ ID NO: 147842 - protein, 350 aa, unidentified
MKQDIKTEKQMDVETIGIDLGDKMSRYCIVNREGEVVEEGSFRNQVSSIEAHFSGERQRIGLEAGAQSAWISRELKRLGHEVIVANVRQLKWITASDRKNDPVDARKLALLARADVRLLAPVEHRTSEQQGELAVIRARDAILRARTLLINSARGIAKGFGHRLPKSITATFGKRALVDLPAMLRTTLGGLLEQIDALSRHIAGYDQQVGELAARHPEVERLSSIPGVGKLTAVTFVLTLGRPERFTHSRDVAGFLGLRPKQRQSGARDPQLGISKSGDPYLRKLLVQCAHYILGHWGKDSALRRWGLAKSEGGHKATMRAIVGVARKLSVLLHCLWVRGEFYKPFPKTV

SEQ ID NO: 147843 - protein, 418 aa, unidentified
MTQKKDSTLIQIMHPICCGLDVHKDKISACLITEDENGAQQHEIKEFSTFTKDLQKMKKWLVENNCPVIAMESTGVYWHPVHNTIEDAMDIFLVNARHIKNVPGRKTDICDSKWLAGLLRHGLVRGSFIPPENVREWRELSRLRKTYTESQADYKRRVHKLFITANIKIDSVVSDLFGLTGTNLIDLLCGGSEITFEKVEKCCKGGLKKKVAQLHESLNGYFKDHHRFQLITMMESINVFKKQIDQINARLDSLTREHEDLLDRLDEIPGIDKKSAQSIIGEVGITLDEFQSMAAFISWAGLCPGNNESAGKRKSGRSAVRNHPFKTILIQVAWAAIKTKGSYYKTKYYKLKARRGARKAIVAIAHKIGKAIYNIIKKGDTYNDLGEFYLDNFNKQRTLKNLAKRADELGMKLVVCEN

SEQ ID NO: 147844 - protein, 338 aa, unidentified
MKLYGAIDLHSTNNVTVLIDEQDEIVYQKRLPNDLPLILQQLSPYASSIQGIVVESTYNWYWLVDGLMGKEHVVHLANTAAIQQYEGLKYTDDHSDARWLAHMLRLGVLPVGYIYPKEERAVRDLLRKRGQLVRQKTANLLSIQNLITRNTGSSLSANRVKRLGAEEVEGILTDADVALAAKANLSVMRSLEAEIATLERVVKERVKLRPAFRYLLTVSGIGPILALTIMLETGDIRRFSTVGNFASYCRCVGSEKISNGKRKGSGNTKNGNKYLAWAFVEAANFAVRYEPQIRSFYQRKKAKAHRVVALKAVAHKLARACYHILRDEVPFDVARAFA

SEQ ID NO: 147845 - protein, 324 aa, unidentified
MSSHEIVGIDVAARKLVVIGERLALAEYENTAAGRSKLVNALSRSPQPVRVVLEATGMYFLDLACELAAAGIAVMVVNPKATHHFAEAILQRRKNDPVDAAMLREYGRRMDFVSWQPPRHELFGFGALTREVQALSKTVAAARNRLHAITATQLAPAVLIGALERQIAHNQALINELVAAAVAQTESDPELARLLARTDSVPGFAAKAAVLVIGELSVLPPMTARQWVAQAGLDVREETSGSSLARRPRLSKRGNKRLREALFYPALTAARCCPAAAAFVDRLVAHGKTRLQAIVALMRKLLHGLHAMWRNDEDFDAEKLFAQA

SEQ ID NO: 147846 - protein, 341 aa, unidentified
MKNISIIGIDLAKRSFQLHGAAPDGSVVFRKKLSRPQLTAFLGELPECIVAMEACATSHYWGREIAKLGHETRLIPPVYVKPFVKRQKNDANDAEAIAEAASRPTMRYVSVKSAEQQAQGMVFRTRDLFVRQRTQLINALRGHLAEYGVVVAQGMVQFRRMIAGFEGIAPDLPAPVQDLCQTYIDQIVQFDERIAVLDKEIKHRAKTDERTSRLMTIPGVGPMCATTIQAFAPPMEEFSNGRDFAAWCGLVPRQKSTGGRQILGRTSKMGQRDIRRLLVTGAMAVIRWAIRKGPPAGSWLAKMLARKPRMLVAMALANKLARTVWALTTKKEEYRIPPLAA

SEQ ID NO: 147847 - protein, 399 aa, unidentified
MTESTLLVAGADTHADTIHIAAISMTGAAIGDREFPTTGAGYAAAIRFLMSMGQVQRIGVEGTASYGAGIARALTSAGIEVVEVTRAVKSTRRLRGKSDPLDAYSAARTALAGDGLATPKDDATSGLRALHIARRSAVKHRTAVINQLKAMLVSTPDAVREKYRGLTTLRLIEAIARCRPEAQPDPWAQSVLIAAKMLAQRVQFLEVQAEALQAQIEVFVADANPGLRAAYGVGADTAAQLLITAGANPHRLHSEAAFAALCGVAPVPASSGKTNRHRLSRGGDRAANNALFRIALVRMSHHQPTKDYVQRQIALGHTRMEILRKLKRAIAREVFKLLTRQIAVPEYTDLRSARQAKNITVTSAAKHFGVWPTVISRIERGLQRDDAFADTYRNWLKAA

SEQ ID NO: 147848 - protein, 415 aa, unidentified
MALKIVYKICCGIDVHKTFVVACIASTNDKGITSYESHRFSTYTSGLKTLLQWLLDRNCKDVCMESTGKYWIPVYNILEKDCSIVLAHPKYVKAIRGKKTDKKDAKWIADLFKHDLVAGSFMPPADIRQLRDLMRYRFKLTCFKSSEKNRLQNCLTVSNIQLGNVVSDTFGKSAQAILDKLLENPADTSFDLEPLVYKSLKKKLPELRDAIDGYITPEQAGKLKVIKAHYENLESRKAELEELILALAAPYQQELTILQTAPGISSPFTAIGIISEIGTNMEAFPSAKHLCSWAGLTPTNNESAGKKKSVRVSKAGCYIKPLLVQCANAVVKSTKHPEMRNRYLRLKKRRGHKKAIIAIARMLLTALYHMLKNGENYNAELYQKSDLLPVDREITVEQALMIARNQGYKIKSATA

SEQ ID NO: 147849 - protein, 343 aa, unidentified
MEKILLVLGVDISKDEFHVCAKVRTTDGKVKIVGTRSFSNNTSGFVELVSWVSKRSKENCSIRYVMEATGSYYEDFAYFLYGTFSRVSVVLPNKIKHFAKSLNLKTKTDKVDAVMIAQIGIERELEVWKPMLPQYKMMRDLSRELLSIKKEKSRAMCQLHAMKHSHEKMDSVMQIKQKQIEFYEQSLLLIESEIEKIVEADTDLKQRVEKIRKVKGLGLITIIIVLCETNGFLLFSNIRQVVSYAGMDIEMKESGNFKGKTKISKKGNARIRQCLFMPALSATVHNEKIKELYERINERNPKIKKKGVVAAMRKLLILIFILWKKNEEYNPNHQWQRKDILTE

SEQ ID NO: 147850 - protein, 461 aa, unidentified
MQIIHRCCCGLDVHKKLIVACLISLNEAGEFQKEIRHFPTMTKDILALADWLTSAGCTHVAMESTGVYWRPIWNLLEGQFELLLVNAQHIKAVPGRKTDIKDAEWIADLLQHGLLRPSFVPPAPQRHLRELTRYRSTLLAERARLVNRLHKVLEDTNLKLTAVVTNIMGLSARDMLDALLQGETNPEVLAKLARGKLRKKREDLEQALVGRVDDHHRFLLTSLLTHIDFLDEQVADCNGKIEQFLSAPSDEKAELVSCASDDQRQEQALVSSTPVGTGSMLAQDQVPEEGPKVPLSYQQAIALLDSIPGVNQRIAEIFLAEVGTDMQRFPTAGHLASWVGICPGNHQSAGKQIRGTTRKGDRWLRHALIEAAQGAMRTKGTYLSAQGRRLTHRRGKKRAVVAVAHSILIIAYHVLQRQQPYQDLGSNYFDERERSAVARQSVHRLEQLGFKVTLEAAGEAA

SEQ ID NO: 147851 - protein, 343 aa, unidentified
MEYYVGLDVSLKQTSICVVDQSGSVVREGVVDSDPEAISVYVRSKAPGAVRIGLETGPTSTWLWTELKRLGLPVICIDARHAKAVLKMQINKSDRNDAIGIARIMQTGWFKEVHVKDIDSHTVRALLASRALLVKIKRDLENHVRGLLKNLGLVIGRAKFNVFAVRVEELIEGRPELIAAIRPLLEARNAVEQQVSELDRKVMKLARHDAQVRRFMTVPGVGPITGLAFKATIDDPARFARSRSVGAYVGLTCRRHASGEVDWSGRISKCGDAMLRSYLFEAAGVLLTRVPKWSAVKAWGVKLVKRNGLRKAKVAVARKLAVILHRMWVDGTEFNWSKKEIAT

SEQ ID NO: 147852 - protein, 438 aa, unidentified
MSNKIIFNLDELFISVGIDVGADFSWMSIVLPNQQIVGKPYKILHSSMDSLTTAVSKIKEAEELYSLESRIFLESTGIYHYPLFCYLRDKGFNCSVINPIITKNSTNMNIRKVHNDRFDSKKASLVGLKPDLKVSLMPSDLALNCRNLCREYYDLMDNRSAYVNKLQGELRMAFPQYLGIFSKITINTSLSLLETYTSPNAFIEADKQEIIDVIKSTARFGLTYAEKKYNAIIQAAHDANEFGYIIDSNIKRIRLCISFIRKYDEEIASIMDALHELVDSNEDTDFVKQIHLIETFKGAGFLSAISLMGEIGDFSAFSKPKQLFAYFGLDPAVKQSGKFEGTKVQMSKRGSAIARRVIHILTLQSISTSRNGEAKNPVLRDYYLKKCEAKPKLVAMGAVSHKVCNMLFAILRDNKPFEIITPQEHIKQYNAAKCDVAA

SEQ ID NO: 147853 - protein, 421 aa, unidentified
MNTNWNKITHFASLDWSSDHHDICVVEQSGAIACEFRFAHTAQGWNEFRDKMKAYPANTPITLETSSGPAVDQLLNGNWPLYPLAPTAAALYRQRKAPSGTKTDRHDAWSMADALRTDGHAWRVLLPQDEATAVLRLLCRDEMALIEQRTALVNQLQATLRDYYPAALEAFEDWTQRYTWAFIQRFPTPGLLQSAGKRKWESFLHAQHLWRPDTRQRRMDIFGKGNAMPARPATVEAKQLLAVSLANVLTTLQKQIDEYRRRIEDAFKAHPDHGIFGSLPGAKQVLGPRLLAEIGSVREQFPDAESLMCMAGASPVSYQSGQINKCRLRRACNKVLRATVHLWANASRFTSEWAQAYYERKRYEGQSHASALRCLGKRWLKILWTLWQEGQTYEEAKHLANLRQRNSLTIAVISAKKIPTA

SEQ ID NO: 147854 - protein, 404 aa, unidentified
MRLTLTEASYGLSKVLDLSSDSILCQFFEQVSNRNLGSRPIIKELSYVQNVNSVIKTSSILKTVSTMKQFNFFVGIDVSKDTLDFSLVTDGREVFLFQIENSTKAVKAAVAKLKAVQDFDLAQAIFCMEYTGLYNNHVTGQLHAINANIWIEKAIEIKRSSGLQRGKSDRIDAQRIAFFAYRNQDKARLWNAPRTVVQQLKRLTGVRERLLLIIAQLNKPLQESKRFDSKEVYKTIQHSCRASLKAIKEDLKKVNKKILETIKSDVSLNYLFDLVTSVDGIGSVIACEMIITSNEFKNINDPKRYACYSGVVPFEHTSGSSVHGKARVSHFANKNVKRLLHLASLSMIRYEGEIKSYWLRKVEEGKHKMVILNAIRNKLIQRVFAVVRRGTRFEKIYSNALQGS

SEQ ID NO: 147855 - protein, 391 aa, unidentified
MIIVGIDIGKFNHEATLIDIQGNIIGKSIRFSNSHQGTNKLLKYIKENNPSNKEIIFGLEATGHYWLALYSRLLIEGYKINVINPIQSDSFRNLYIRKTKNDSKDSFIIAEVIRFGRFTSTKLSDEKILALRQLCRYRTYMVDQISDLKRKVISILDQIFPEYSKLFSDVFGKTSKELLLNHTTPEEIANLDTNYLTELLSKLSKGRLGFEKATQIKEAAENSFGIKIATNAFTFQIKQLLEQIKFIETQLKELEENIAINFQTFNSPLTSIPGIGPVLGAIILSEIGDFSRFSNGAKLVAYAGIDPSVKQSGQLNSVHNRMSKRGSPYLRRAIWMAATVAAFNDPVLNNYYNKKRSEGKHHLTAIGAVARKLTYIIYAVMRDNKEYTPMA

SEQ ID NO: 147856 - protein, 314 aa, unidentified
MSKSLYFIGIDVSKDHLDVAIRPSDQQMQFGNDDEGIDKVIEALNPVSPTLIVLEATGSYHRLVLSRLIAAGLPAIAINPRQARDFARAIGRLAKSDAIDADVLAAFGEKIRPELRAVADEATQQLEAICTRRRQLVGMLTAEKNRFHSSPSSMRSLIKKHIQWLEKHIAELENDLDDQIRSSPAWRDKDDLLRSCKGIGPTTSHTMLACLPELGQLNRHQIAALVGVAPFNRDTGLYRGRRHIQAGRTDVRCVLYMATLAAIRSNAVIRRFHQRLIAAGKLKKVAITACMRKLLTILNAMLRSNKPWNVEFVC

SEQ ID NO: 147857 - protein, 362 aa, unidentified
MLQHTTTHVGLDVSKASISVALLRPDGRLDEESIANTPEAVRRLVRRWPEPTRVRACYEAGPTGYDLYRQLTALGIETTVIAPSLTPRRPGDRIKTDRRDARKLAGLFRADELTAVRVPTPEEEAVRDLLRARQDEREDILRARHRLSKFLLRHGRVYTDGSAWTGRHTAWLAKQHFDEPAAERTLGHYRAELDMRLASLKLLDAELLAIAQHPPFAPTVARLCALRGIAKLSALTIAVEVGDFRRFGSAPAFMAFVGLVPSEHSSGERRSQGPITKAGNAHLRRVLVEAAWHARRRPNVGPALAKRLTGQPPEVLAIAATAQRRLHDRYWRLVERRKPSNVAVVAVARELSGFCWALGRAA

SEQ ID NO: 147858 - protein, 311 aa, unidentified
MSIYRSYIGIDISKLTLDLFDDRTGEHYCFSSKSHSIEETLDRLAPSPDTLFVLEAMGSYGQRLEDILHQRGHAFARVNPGRARDFAKASGLLAKTDKIDAQMLADMGKRMELLPTPRDDPARRRLNCLMRRRDQLVTMRKQERTRLSEVIETCMQQSLESHITWLGETICEHEDLIAELISKQDDLKQDRALLLSVPGVGQVTAIVLLSLLPELGALSPKTVASLTGLAPMNVDSGLKRGQRRIRAGRKRIRNALYMASLSASRNEPVLAVFYNKLVDAGKPKKLALVAVARKLVVMLNAIIRDQKPYVV

SEQ ID NO: 147859 - protein, 340 aa, unidentified
MKITTIGIDLAKSVFQIHGVDGNGKPQLKKQIKRSEMATFFSNMPPCLIGMEACGGAHYWARKLVDQGHTVKLMAPQFVKPYVKTNKNDAADAEAICEAVARPTMRFVPIKNVHQQAVLAMHRARQGMVKSRTAQANQIRGLFAEFGLVMPQGIANLYKQVPALLEEAKDELPGMFRELVLRLLTHLKELDRQVGEMEVQIQAWHRSNALSRKLEKIPGIGPLTASALVASIGDAKSFENGRQLAAWLGLVPKQHSSGGKQTLLGISKRGDCYLRTLLIHGARAVIYAAQRKLASTGWLASLLARRDKNVVAVALANKNARIVWALLAHDREFRSDYARA

SEQ ID NO: 147860 - protein, 345 aa, unidentified
MVQQATNTDYQLFVGIDVAATSATGAWMTATGQPTRASTITQTPAGAADLQRRLRATGHAPATILVVMEATGTYWMALATPLAHAGFAVAVINPAQAHAFAKALLKRSKTAAIDAQTLAELAARLQPARWSPPPAVFTELQQRLVHREALLDARTQFRNQRHARIQQPVVVARVRERLDDLIATLTTEIAAVEQEIADALQQDETWAAAAQRLQSIKGIGMLTAAWLLTTTVKFTLCATPEAAANYAGLALQLRQSGTSVRGRPAIGHGGNARLRRALYLAVLSGVRYNPILKAFYQRLITEGKPPKVALCAAARKLVRIAWAVVIKDQDFDPAYAERPQAQQRG

SEQ ID NO: 147861 - protein, 487 aa, unidentified
MHSPRVESTSATWASCSERRTAISKNKQQDTRVGHRDGESEPDGIPVLRGNVAGLDVGSKSHWVCAPMVDGSTREVEEFGATTPELERLARWLQERKVASVAMESTGVYWIPVHEILEQQGLEVLLVCTRDLAQVPGRKKTDRIDCKWIQRLHSCGLLKGSFRPTEQICMLRTLVRDKNNLLAERADWIRRMQKSLDQMNVRVHRAVSDIQGTTGMAIIRAIVSGQRDPAQLAQLRDPGCRMSAEQIAEQLRGNWRADHLFSLEQSLRMYEAITERIQAYEEEILRRLADMEPPDHHGKTAPALANTNKAKMIRQRGEEVFRQAFYRMSGTDLTAIDAVGVGVAQLVLSEYGPDLSRFPTEKHFISHVTLAPKASVSGGKPLKKKKRGSASSRVSAALRSAALSLRHSHTALGAYFRHTAHRLGADVAAFATARKLATWIYRCLRWGQHYLDEGAAAYEQRYQAARLNRLRTTAAQLGYSLVEVVSE

SEQ ID NO: 147862 - protein, 410 aa, unidentified
MRYYLGVDWADQTHAVWVVDEQGAKVASRAVPHTAAGLSEWGRELDEWRAQGIELWAAIERPEGRVVDFLLDHGVVVYPVNPKALDRARDRFRPSAAKSDPFDARVLAEFLRTDHGHLQALQPSSEAAQELKYLTEDYRRHVRQQTRLVNQLTATLKAYYPRALEVSELTTALARQFLQAYPTPGAVAALTKKRWQRWARAHRLSDARAQELWGFLQRPQLPVPDHVVRAKARLMLTLVEELTAVVAAVGQYREAIDAFFAGLPEAQWIRTLPIGDHGVTAPTLWALLGDAPRRWESWQHLQGHAGAVPVTIRSGQQRVVRFRFACDKALRYVVDQVAFLSLGKSEWARAYYDQQRARGHDHRPALRALGAKWLKIIFVMWDRQIPYDEQHHLATMTRQQLRQRGQKKVA

SEQ ID NO: 147863 - protein, 449 aa, unidentified
MARKSNKLKMKKVQPLHTLQPNAAGIDVGATEIYVAVPQDRDMEHVRCFTTFTEDLHNASKWLKECGIKSVAMESTGVYWIPVFQILEAYGFDVFLVNAHHVKNVPGRKTDVEDCQWIQYLHSVGLLRGSFRPSQDICSVRSLLRHRDNLIKIASAHVQHMQKSLTQMNIQIHNVIADITGVTGLAIIDAIIAGQRDLEQLADLKDPRIKASKETIKKSLEGDYRSEHIFTLKQALQTYRHYRQMISECDIEIEKHLNEFDSRIEPDQSIKPSGKKKPRGNAPDFDLRHHMHRLLGADLTLIDGIDVNTAHTIFTEVGPDLSCFPTPQHFCSWLGLCPNNKISGGKILSSKTKPGSNRVAQGLRMAAQSLLRSRSYLGGFYRRMRTKFGAPKAITATAHKLARIVYHLIKYQKSFDQSVFAKEQELHKIRLEKNLIKQAKYLGYQIVPT

SEQ ID NO: 147864 - protein, 343 aa, unidentified
MMNETMIGVDLAKAVFQVHGASMTGEPRFRKKLSRQSFSEFMAKQPPALVVMEACGSAHHWAREMTRLGHEVKLIAPRYVKPFVKRQKNDAADAEAIVIAARQPEMRFVEPKGAEQQSRAILFRARERLVHQRTELINALRAALYEYGHVVPQGIRQIGRIEEILEAPRSDLPDLMRDECRDLLEQIAEQTVRINARTEKIKALAAEDDTARRLQTIPGVGPMTALAVEAFAPSMDSFNCGRAFAAWLGLVPRQFSSGGKERLGRTSKAGQADIRRLLIIGAMSRLNWMGRKSVPEDSWLARITSRKPRMLVAIALANKMARTMWAMLTKNEDYRVPAQAGAA

SEQ ID NO: 147865 - protein, 358 aa, unidentified
MRNTIKQLDYSGQNIYIGLDTHLRSWKTTIRVGDTYFKTFSQDPSAKILFEYLKRNFPMANYFSAYEASFSGFSAHRELTKLGIKNIVVNPADIPTTDKDRKQKEDARDSRKIAEHLSSSSLQGIYVPSIEVEGDRALQRFRKVLSKEIGRNKNRVKSFLYYHGISIPPQFTDKSYWSKRFTVWLQEVALPTKSARTTLSSIIEIVTFLRQKQYQTLKSIKELSQTKGYKENVDLLLSVPGIGLITAMTILTEIQDISRFKTLDKLCSFIGLVPMTNSSGEKESVGGITHRQNKALRSLIVESSWVAIRNDPALMLAYQELIKRMKPTRAIIKISKKLVNRIRYVLKNKKLYVSAVVQ

SEQ ID NO: 147866 - protein, 349 aa, unidentified
MAEQRISSTGERIDVGIDVHKETYTVTCLCQRQMVKTATVPADPVRLAASLPRWFPGARIFSAYEAGFSGFVLHRVLTTAGITNIVVNPASVAVAANDKVKTDRRDAKKLARDLTDGRLRGIYVPTTAEELARLLPRTRAQLVAHRATLTRQIKAKLHQFGLIPPGSRRLMSSRYLREIAAWALPPELHVSLTLLADQWRFATRQLLEIRRLLREQAKAQAALETVYRSVPGIGEVVARTLATELGDMTRFANERALLSYTGLTPSEDSSGASMRRGHISRQGVSRLRHVLVETAWRALPGDPLLHAMFERIAATRGKQRAIVAIARRLIGRIRACFRHGTTYAVGTAG

SEQ ID NO: 147867 - protein, 408 aa, unidentified
MNPLFVGIDVSSKSNVAYLMKPDGSKHSSFSVQNNLGGAKLLSERIVSALSSMRLSDVVIGLEATSIYGDSLVYALREDGRLGRFQRKIHVLNPKQVRKFKEAYSDLPKNDWVDAFVIADHLRFGRINREVYMDDYRYKALQTLTRARFDVIQNLTREKQRFANYLFLKCSGMAQDKDIQNTSATTIALMEHFETVDDLANADLEELTAFITETGRGKFADPDATAKAVRAAAKGSYRLPKTVNDTVNQAMAVSIASMRALKGQVKVLDKAIEQQFEIIPNTLTSIPGIGKVYSAGIIAEIGDIHRFDSQASVAKYAGLVWNRSQSGDFEAEHSRMIKSGNRYLRYYLLEAANSVRRCDSEFRRYYDLKFKEVNKYQHKRALALTARKLVRLVFRLLKDNRLYIPSEG

SEQ ID NO: 147868 - protein, 341 aa, unidentified
MGRFIGVDLHKNSFTSCGYKSEDDYKLKNHSVSAKGLAAFKASLTRSEEVAVESTGNTAFFVREIESKVKRVRIVNPIQFKVISSSVKKTDEADALTIAKFLSKDMIPEVRMRTKEQSQIASLIGTRDKFVKLRTALKNKIHNILNANGIVSKPEMFSSEKGLAKVTAIELEPSYRFEVDLLVTEIRNLNQAIDKINEELKSRGENIEGHKNLTSIKGISDIGATIFLNTIGDINDFKSDKQLAAYFGIVPRVYVSNDSAHYGRITKMGNKIARTALVQSTLVAIRYSPYLRRFYEKLKAKKGAGKAIIATSRKMLGIIYNTLKNNWVFEDFTQFKLAECA

SEQ ID NO: 147869 - protein, 368 aa, unidentified
MTIPATPVSITVIGGVDTHKHTHYAAAIDDQGRLLGHHEFPATDHGYQALLAWMRGHGQIQAIGVESTGSFGATLTRALTRAGEQVVEVNRPNRLARRMDGKSDRLDAEQIARAVLGRTSTAVPKTKSGTVEVIRTLRVTRASAVKARTQAFNTLFGVMIGAPSPLRDELVVLTKRTLVNRCLRLRPETEDLLTLTTDPDRQLMAAIKTSLRDLARRWKALDHEIKTLNQQLDALVTAAAPQLLELHGVGVEIAGQFLVTAGDNPERIRNEAAFAKLCGVAPQPASSGRTTGRHRLSRSGDRAANSALYIVTIVRMRHHEPTRAYVERRTAEGLSKREIIRCLKRYIAREIYANLPRPETPAQPLLAA

SEQ ID NO: 147870 - protein, 312 aa, unidentified
MPAKLPPTYVGLDISSDQLDYSRSENDEGRCAYTAEGIAELIKKIQVLLHARVICEASGGYEKRIVAELLQAGIEVCVVQPGRVRAFAYAEGLMAKTDRLDARLLRRFGEKIEVRLAVPTDPALTTLRELLEHRRQLTRQLIEVIGRLSLAGATLRKLLEKQRLFLEKQIAAVEGMIKDHIDQNPDLKQKSARLQQINGVGPVLSATILAYVPELGKIESNQLSALIGVAPHPDDSGLRNGPRHVRGGRAQVRRVLYMAAVCAARTNPILRAFYERLRANGKPAKVCLVAVMRKLVHLMNKLILNPDFSLVR

SEQ ID NO: 147871 - protein, 353 aa, unidentified
MEQFIGCDAHKKFSIFASIDEKGEYGRSIRVEHAREVFRAFLKDLPAGSKIALETSGCYYWMVDEMEQAGHIPLLAHALTAKRRMEGRHKTNERDARGLAMLLRNGTLPVVWIPPAELRDQREMLRWRMCLSRMRTRVKNRIHGVLQRYNIDIAVSDLFGDGGRVKLLERVDELPPYSRLSLLEQLQMVDTVETEISECEQVLQEMLYPSAERDLLDSLPCVGKILSAVLALEIGDVRRFGGPDRLVSYAGLVPVARESADWKRKDRCPRDCNMYLKWAYVEAANLISIHRGHWPERHVAQLYERVKQSTKMHGKATMAVARHLAEASYWMLRKQEVYQEPNSKRKVLSSTHG

SEQ ID NO: 147872 - protein, 364 aa, unidentified
MTVIHYIGLDVHKKTISYCIKTADGRIVREGILQATRAAVRSWAEGLQMPWHGAMEATLFSAWIYDTLKPYAEKLVMGHPAKMKAISAGKKKSDSIDARTIADLLRCDLLPTCYVLPPELRDLRRLLRYRNMVVQQSVRMQNKMAGLLMESGTAFNKEKLHGKKYFTELLKSLEEVPESVKDLLRMSRSSMEMFQSTQKQLVERLLSEPALEQRVERLMSIRAVGPITALTWALEVADPHRFRSIADAVSYCGLTAAFRSSAGKQQRGPISKQRNGWLQSVLIEAAKLAPRWNPQLAALHAHELERGHANRATLQVARKLVAYLLAVDKGGQPFQVHTPPPPASTKAKTKTRGKNKKAAALAAA

SEQ ID NO: 147873 - protein, 370 aa, unidentified
MNECTILYVGLDVHKDSISVAYAAPGRTESPQFVGPIGTRQSDIDKLIRRLHSKAPDLVFAYEAGPCGYGLYRHLTAKGFDCRVVAPSLMPKRPGDRVKNDRRDAMEIARLLRSGDLTPVYVPTVEDEAVRDLCRARDATRVTLRSAKLRLKSFLLRLGLHYTGKANWSAAHRRYLAKVVCPTPTQQVVFQESILAVDEQVERLGRIEQELLDLAPSWRLYPVVEALQAMRGVQWVVAITVVAELGDLTRFDNPRQLAAFVGLIPSEHSSGTKRRLGAITKTGNSRARRVLIEGAWAYRYPAKVSAHIQARIEGLPKTVQDIGWKAQVRLCKRFRRLSSRGKNANVVVTAIAREMLAFMWAIAREVPITV

SEQ ID NO: 147874 - protein, 433 aa, unidentified
MPTTHPYDLVIGLDRSDRKADLHLIDTRTGTVQKQTVATSPEALHDWLVQLRRDHPQARVAICLEQPAANLIVFLETYSWITLYPINPISLQKFREAFVTSRAKDDGKDAQYLAELLLSHPDKLKAWQPDDSQTRQLQQLVLHRRAVVDQRTGLTNRLKALLKQYFPQALDLCGEDLWRPLATAFLLKWPTLQSLKKARKESLKQFYYLQGSRSQTLIEQRLERIDKAVPLTDELALLQSYTLRVQLLCKELQLLLKTLQQFDQQIAKVFQQHTDRPIFEAFPGAGPVLAPRLLASMGSERERFAQPENLQSFSGLAPVTKQSGGKCSIHRRYLCPKFLKQSFHEYAKESILHSRWAAAYYGQQPNKGCGHHTAVRALAYKWQRIIWKCWQTRTIYKEAIYEAALKKNKSPLIGRLDQIELGKSPVKSRAKKS

SEQ ID NO: 147875 - protein, 422 aa, unidentified
MQVIYERCAAVDVGKDVIAVAVRLPGDGPDGRQVIKRTFKTFYGVLGETARWLVSLGVTHVAMEATGIYSMPVYHALVEHGDFEKVLVCNAGHVKNVPGRKTDFSDAEWLVHLLECGLLAGSFIPPAEVKAARDVIRYRTKVTQQRVSEIARLGNVLQDAGIKIDSVACSIATKSGRAMIEALIDGERRGPVLADLAKGRMRAKIPDLAMALEGRFGGHHALMCRLHLDHIDHLEAMLTRLDAQVEAMMIPFRAARQLLTTAPGIGPLSAAAVISEIGAEVRSYFPDAAHLASWAGLCPGNHESAGRRRGGKRRKGNEHLQSVLVECAWSAVRHGGYLRSLYHRHVMKWGGYRSQIAKNKAIIVVAHALIVIIWHILATGKPYEELGADYFTRRLDPERETRRLIARLQALGHRVTLQDAAA

SEQ ID NO: 147876 - protein, 350 aa, unidentified
MEHHAGLDVSLEETSVCIVDGAGKIIRETQVASEPEALVGYFSALEITVVRIGLEAGPLSQWLHAALTEAGFEVVLLETRHVKAALSAMTVKTDRRDARGIAQLLRMGWYRPVHCKTLPSQEVRAIITARKTLLGKLIDIELSMRGILRGFGLKVGAVTRKSFEIRVRELMEGQLTLTAIMEGMLNSRATLITEVSKLHKAILRIARADGVCVRLMTAPGVGALTALIFKTAIDDPTRIAKSRDVGPLFGLTPGRYQSGETDIVGRITKVGDVMVRTALFEAATVMLTRSTKKSRLKAWALDVAKRRGTKRAIVALARKLGVVLHRMWVDLTEFRFAKEEAAVPALITAK

SEQ ID NO: 147877 - protein, 403 aa, unidentified
MRKRSKRAQSIRPAGREKAAAGIDPARYGFQMALLTPSQTYYNHSFPLSARTAQDLATILPPSTPFIAEGFGTSGRLFFMELARLNYPCKELNPKLGRHLRLLEQEGHTDAGDAAAIAKAEFLFPNRLAPITLSESREALATLTKSRRRLVKGKTADKNRLHVLLSESYGALYKTLKAKISINTKHGRRFFHRFPSINALLASPEGEGELAFFFQKDAHALIRAEKPWTSTIYLEALEEEARLLLDHIEATEKMTEELKKKITTVLPSQKDAHLLLSIPGVGPISAATILSEMKTIDRFPSEAKFAGYCGLGQLVFQSGEQSSGFKKRTMYNRALKGAFFDVAFSAISKSGLARTYYCKKRQEGKTHRQALLRLARYYARIVYSVLKKQKTYQDIFPEQEVAL

SEQ ID NO: 147878 - protein, 366 aa, unidentified
MYSWFVIGRTKDLTLVLSSSLKNTQRLTMNNCTLLDISKSTINVHIPNGSLDLEIENSKKAISALFSKLKKIYKKEASNLVFIYEPTGSYSFALTQFCALKGVKAFIINPKQSHNFSKAIGQRGKCDKVDAKMLSRCISIAREGEVRIPCVNSVEQEVRELIGYYKFTTKQRVQTSNHLEAIKIKEGSLYVAKELQKEIKALAIKEKEIITKIKELIEKDDNLSSRFTNIKSIVGIGDIGAVALIHLFIKYPHASQREIVSLSGLDPVERTSGSSVRGKSAISKAGSKLYRGSLFMSAMSAVRHNDELKEFYDRLKANGKHTTVAQVAVIKKMIVIAHALYVNNCAYDAVFYRKQCGVNREIGVCA

SEQ ID NO: 147879 - protein, 434 aa, unidentified
MSLNTINPHCAGIDIGSDSIFIGLEEKEVAFFGTFTDDYLKAIAYLKGHNITSVAMEATGVYWITLFDMLEGAGITVTLVNGKQVKYLPGRKSDVADCQWLQQLHSFGLLRPCFIPDEITRQLRSYTRLRADHLSMASSHIQHMHKALTLMNIKVQNVISQVHGVSGMRIITAIVMGERNPERLADLCESSILKTKREKVIASLKGNFKAEHIFALKQALSAYDFYQKQITECDQQIESLLKQHTDDLPTPSKTTPPKNARHNAPKIDELHTKLMKMTGGNDPSQITGLTDKTLLELLAETGTNLEAHWKTEKHFSSWAALSPTMHQSGKTNKRRKIKKNSRAGQIFRQAALSIANSKHSAFSAFYKRLKARKGFRHALKATARKLAVIYYRIMTKGFPFVEQGIVRYQQHFKEQQLRLLQKKAKSLGFQLLQT

SEQ ID NO: 147880 - protein, 455 aa, unidentified
MRLWCGIDWAENHHDVSVVDETGRQRVRLRIEDTAGGFGQLMSLLAEQNVISEEPVTVAIETAKGLLPAALRAAGVPLIAINPLAVSRYRDRHSPSRAKSDTGDAFVLANILRTDPHAHRPLPVDSELAQSIHVLARAHQDAVWDRMQVANKLRSVLREYYPTFLAAFAELATREARAVLHLAPAPAQGQLVRRASLTAALRRAGRTRGISATVEQIHTGLHQDQLRQPPRVEAAMAAHASALLHALDTAVANVARLEAALAEVFEQHPDAEIITSFPGLSTVLGARILAEIGDDRTRFASARGLKAFAGTAPVTRASGMKTLVTRRVVRNKRLGQAAYLWALPMIAHSPGAHAHFATRRERGDSYSAAARNLTNRALGMLHHCLQTRQHYDENKAFPNRHHQPVTSGKPLAGQVYQETEAQHAPTTTTTNAKRSVTSIAPPANKARLKTEAQPA

SEQ ID NO: 147881 - protein, 353 aa, unidentified
MDCHSPRRRRRPLVDEYDGRRYVGIDLHRRRSVIVQMTPAGERLGPAVRIDNDPFTLAREIAKWGEAPEVVLEATYGWYWAADVLAEAGARVHLAHPLGVKGFAYRRVKNDERDAADLADLLRMGRLPEAWVAPPAARGLRELVRHRCKLVALRSGLKAQVHAVLAKQGVHVPVTDLFGAAGSTLLRELELDGPYHGRVHSLRRLVEAFSFEIDLWTKSIAAALVGHRGYTAIQAIPGVGPVLAAVFVAEIGEVSRFARPQQLCSWAGMTPRHRESDTKIHRGRITKQGNQLVRWAAVEAVQRVYGGAIGATRARLAARRGANIAKVAAARKLLTLVYYGLRDGHVRCLARPV

SEQ ID NO: 147882 - protein, 419 aa, unidentified
MRENGPDAQAGTATTSGGTVIDTEDVGVFLGLDVGKSAHHGHGLTPAGKKVFDKQLPNNEPRLRAVFDKLAAKFGTVLVIVDQPASIGALPLTVARDTGCKVAYLPGLAMRRIADLYPGEAKTDAKDAAVIADAARTMAHTLRSLELTDEVTAELTVLVGFDQDLAAEATRTSNRIRGLLTQFHPSLERVLGPRLDHQAVTWLLERYGSPQALRKAGRRRLVELVRPKAPRMAERLINEVFDALDEQTVVVPGTGTLDVVLPSLARSLAAVHEQRRALEAQISTLLEAHPLSKVLTSMPGIAVRTAATLLVTVGDGTSFPTAAHLASYAGLAPATKQSGTSIHGEHAPRGGNRQLKRAMFLSAFAALHDHSSRTYYDKCRARGKTHTQALLRLARHRISVLFAMLRDGTFYEPRTPRLA

SEQ ID NO: 147883 - protein, 372 aa, unidentified
MHQDTTTWVGMDAHKNSIKVAALLPGRPEPEEWQEQTTPEAIRRLSRKLLRQAPGEVRCCYEAGPTGYALQRQLSAGGVSCMVIAPSLTPVKPGARIKTDRRDARKLAELLRAGLLTEVHPPSESDEALRDLCRCRDDVRVDLMRARHRLGKFLLRRHCIYRETKHHWGTRHWAWLEQLRFDDPMSQATFDSYMLAVQQLEERLLQLDAQLEEFGGLEPYREPVSWLRCFKGIDTVTAVCLVAELHDFRRFRTARELMSYVGLVPSERSSGERERRGGITKAGNGHVRRLLVEAAWHHRHRPALSAPLRRRREGQPARVLAIADRAQERLAARYRRMTGRGIPAPKTIVAMARELTGYLWAVLQPAADIPRS

SEQ ID NO: 147884 - protein, 283 aa, unidentified
MFLGLDVGQGEHHAVGLAPTGKRLHDATLPNTEPKLRALFDKLAQHGPPLVVVDQPAAIGALPVAVVRAAGHQVAYLPGPAMRRIADLYPGRAKPDARDAFVIADAARTLPHTLRTVDVGDDALAELDVLVGFDDDLASEAEGILDAHPLAGVLISMPGIGVRTAARTPLEIGDASGFASSGHLAAYAGIAPVTRSSGTSIKGEHPARTGNRKLKRAFFLAAFAALHDPTSRAYYDRKRAEGKKHNATLIRLARRRCDVLYAMLRNRTHYLHSAEAVPASVAA

SEQ ID NO: 147885 - protein, 341 aa, unidentified
MNNSSTISIDLAKTVFQVALFNKFGVLKSNNKMSQAKMVQLIAQHPEALICMEACGTAHYWGRRFQKNGHRVLLVPAHIAAKYRTGNKNDANDALAIYEAIKRPKTYFVQVKNLDQQDLASLLKLRQGYVKQRTQTVNRIRGLGMEYGVKIPKGIAKVRKHLPRFLEDAENELTTSSRFILRNLLDQLLLLDSQVDNATNTLVVRAKETPVCRRLTALPGVAWIIASALYARLGDGSAYKCGRDASASVGLVPAHSGTGGNNRLLGITKRGDRCLRSLLVHGARSIVSRIKDKQDGLSCWIREQLSKNHLNKTTVALANKLVRMAWAILKSGEDYRAPLAQ

SEQ ID NO: 147886 - protein, 338 aa, unidentified
MSAIKVIGIDLGKSTFHLVGHDYSGREQYRHKLSRSKLLQFISVHEPTLIAMEACCGAHWLARKCQEYGHQVKLIPPQYVKPYVKSHKNDFIDADAIAEAATRPRMRFVSPKTEQAQLGVVIRRIRTGYIRERTATMNRIGSILTEFGFSFPRGHANMKRLFQWLADTGQPVPSLLVFELRDQLSHYNDLNDKIKEQDKKLETLNCDNELFTILQTVPGIGPMTASCCLSSVSDPKDFSNGRNFAAWLGLVPFQYSTGGKPRMLGISKRGNKELRELFIHAARAVLWRDETAQRYFGSWLTDLKLRKPFNVALVALANKLARIAWSVMATKKPFEIRV

SEQ ID NO: 147887 - protein, 365 aa, unidentified
MDDEHYTTIGMDVSDRKTHVCVMARAGANPKIVMETTIPTTREGLAKFLSAQDRAAPVAFETGTHCRWMNAVAEGMGFKVYVANPCRLRMMTESKTKNDVNDARMLARLALSDPWLLHPVKLRGPEHQKMLNLHEMRNLLIKQRTGIIVQMRGIAKSMGFRIAKCSTSSFHKLETKAWPKELRDIVWPMLKNLEQLAVTIKTYEKQISELAETPTFKAQVERLMEIRYVGLHVATGFVAVTGGDMERFERPRDVGPWLGLTPRQDQSGDIDRQCHITKAGSPFMRRLLVESAQMILREGSAGTDLKVKGMRICARGAKIAKRKAIAAVARSLAVLMVAMLKKPDAPYVPLSERCEKELLAMRAMA

SEQ ID NO: 147888 - protein, 369 aa, unidentified
MKIAIGMDVHARTTSAYAVYAGTGEAPDRHEKFLGDFNREFGKFPSTAEGMEKMAAFLSKHECHALIENSTKSHEVYWMLKNLGVDVTMAQAADLHRITMSVKKTDRNDSIELAGYMRRRLNGENEFSECFVPSPEWMTKREMCRGVAAERVYLADTKRKIRAHLLLHGIHLSKEYGNITSDKALAELASFKDPYLMMQIKFAQDAKKRIDMIEKTITQMFSGIRMYELIFSVTGFGVLSAAYLTSLIIDAERFPSSSKFAAAFGVVPRMRASADSNPRCSTTHRGDDLARELLMFCTLAHIKHSPDSVVTEMYDRLVKNGKPKREAPVAASRKLLTVVWSVLKSGKPYTNDEGTLRLARETEGSEKER

SEQ ID NO: 147889 - protein, 415 aa, unidentified
MALKIVYKICCGIDVHKTFVVACIASTNDKGVTSYESHRFSTYTSGLKTLLQWLLDRNCKDVCMESTGKYWIPVYNILEKDCSIVLAHPKYVKAIRGKKTDKKDAKWIADLFKHDLVAGSFMPPADIRQLRDLMRYRFKLTCFKSSEKNRLQNCLTVSNIQLGNVVSDTFGKSAQAILDKILEDPADTSFDLEPLVFKSLKKKLPELRDAIDGYITPEQAGKLKVIKAHYENLEARKAELEELILALAAPYQQELAILQTAPGISSDFTAIGIISEIGTNMEAFPSAKHLCSWAGLTPTNNESAGKKKSVRVSKAGCYIKPLLVQCANAVVKSNKHPEIRNRYLRIKKRRGHKKAIIAIARMLLTALYHMLKNGENYNAELYRKSDLLPVDREITVEQALMIARNQGYKIKSATA

SEQ ID NO: 147890 - protein, 344 aa, unidentified
MDTIGVDLHKRETQLCIGQVDGTITEQRIVTSRERFTAVLGHRPPARILVEASTESEWVACHLESLGHEVIVADPNYAPMYATRSRRVKTDKRDARTLMEACRAGTYRPAHRLSAARRHVRAVRDAVVRTRTRYVALAKALVRRDGLRVPSSAAERVGAHLEGLAVSPALAAELAPLLTLLPPLNASIAAADQRLAELEHTDPSVALLMTAPGIGAVTASALVATIDDVQRFASAHQFEAYLGLVPGERSSGELRRIGPITKAGNSRARWLLVEAAWRILRSKDAAGAPLRGWARPIVARRGSRIAVVAVARRLAGILYAMWRDGAPYDAGKIRRPRARQSPAA

SEQ ID NO: 147891 - protein, 399 aa, unidentified
MEQVVIGVDPHKLSATIEVVDQHEKLIGSGRFSTDQAGYCAMRNYAKTWPDRVWAVEGANGAGRPLAQRLLEAGEQVVDVPAKLAARVRLFDTGHNRKTDALDAHSVAVVAVRTSTLRVLKVDGELEALRMLADRREALTRRRVQTVCRLQALLAELLPGQGKRDITTGQAKAMLATVRPRDIAGKTRRRIAAEELAELIAVETKIKKATAELKAMVLARGSRLMDIHGVGAVVAARILADVGDVARFADRNRFASWTGTAPLDASSGEQNRHRLSRAGNRRVNHMIHIAAVTQLRLDTEGRAYYRRKRAAGKKPQEALRCLKRRISDAIYKQLVKDAARVGGADPGGHCGASQESSAVDLPPRIDTSDQPLPDPQTRRYAAPAATRKSPAAGPLASTG

SEQ ID NO: 147892 - protein, 345 aa, unidentified
MSGAKLVEEGSICNERDSLRKLAGRYHGALGVMEAGAHSPWISRFLEALGWRVVVSNPRKVRAIYQHERKSDQRDALMLARIGRMDLALLYPVRHGTAEAQQDLLRIKLRDSLVRARVAVINSVRFTLKSLGYTVRNPSSARFHKVVMEEVPESVREMITPSVQALAELTARIKMLELEINTLAQMKYPQSAQLQQIPGVGPITALYFVLKIEDPNRFAHVRDVGAYAGLCPRRDQSGESDPQLRISKRGDAYLRRLLVSAAHYILGPFGPQSALRAYGLMLAADGTAQAKKRATVAVARKLAVLLLSLWKSQQPYQPFPGARLNGQQEDRRSGTIALHRMEATD

SEQ ID NO: 147893 - protein, 349 aa, unidentified
MVIIGADLHKRSHTVVVVHEHGRRLAERTVAATPAGHLTLMRWPEGLGERRWALEDSRQLSRRLERDLLTAGETVVRVPPKLMAGARRSGREPGKSDPIDALAVARAALREPDLPVARLDGIERDLRLLVDHRESLVRQRTAEQNRLRWHLHELLRGEEPSPRSLTRRHVLDALEARLVEFEGTVARIAADQLTRICELTSMIDRLEREIADLVVDRAPTLLALHGCGPLMAAKLIGESAGASRFRSAAAFARHNGSAPVPVWSGNTTRHRLSRGGNRQLNAALHRIAVTQLQRPGRSRDYVAKRMAAGNTKTEAIRALRRRISDEVFRRMLRDEDLQTASQAPLMIAA

SEQ ID NO: 147894 - protein, 389 aa, unidentified
MDEAGKVLVKRRLPEGAAGMTQLHALIGRFLPEDADDAEVVIGIETDRGPWVTALVAAGYVVFPVNPLQASRYRERHGVSGAKSDGGDAHMLADMVRTDSHQLRPAAGDSPEGQGIKVVARAHKTMIWDRTRATQRLRSQLREYVPAALAAFEDLDAPDVLELLGKAPDPDRARRLTRAQVAAALKRARRRDIAGKTDAILAALRGEHLGQPAALTAAYAATARSLIAVITTLNAQVKILEDQVRDHFGRHPDAEIYLSQPGIGAILGARVPGEFGDDPCRYVSAKARKNYGGTSPITRASGKKKVVAARFIHNDRLIDALMSWAFASLNASPGARAFYDEQRAKGLDHNDALRRLANRLVGILHGCLKTRTPYDEATAWSHRGSSLAA

SEQ ID NO: 147895 - protein, 347 aa, unidentified
MRFYTRTHKHYCGIDLHARTMYVCVLGKEGEILLHRNLPCEPGQFLRTIGPFRDDLVVAVECIFTWYWIADLCAREGISFVLGHALYMRAIHGAKAKNDRIDSRKTAGLLRGGLMPQAYVYPAEMRATRDLMRRRLHFVRHRGELLAHIQNTHHQYNRPTPGKRISYRSNRDGIGEGFEDGSIRESLAADLALVDHYEVVIQDLEASVVRRARVHDPQAFQRLRSVPGIGKVLALTILYEIHDIRRFERVGNFASYSRLVKCQKSSAGKVQGSSGAKIGNAHLKWAFSEAAVLFLAKCPEGKKVFARIERKHGRGKALSILAHKLGRAVYFMLAREQAFDLERFLKS

SEQ ID NO: 147896 - protein, 349 aa, unidentified
MTVYCGVDFHARVQTVSWLDTNDGEIHQKELHHQKDNVRGFYQQFTGEVIVGIEASGYSSWFEDMLEGLGHQVWIGDAGEIRRLARRRQKNDKRDANHILDLMSKGEFPRVHRLSRESREVLGQLRYRHRLVKMRTMATNCVKAIAIGAGLSDKRRLITGKGRSKLESVGLPSVFSEQCKRWLEVTDDLTTKIKAVEQWLEEQAQGDQRVGRLRTHPGIGLLTGLALVHTLEPVERFCSTRKIAAYFGLDPMEDSSAERKQYGGVSKAGSRLVRFLLVEAGQTAAKRDPELKVFYQRLRDKRKTAKAKVAVARKLAVRSFIMLRDQIDYSEFLRRGVEARSSRTTGAAK

SEQ ID NO: 147897 - protein, 356 aa, unidentified
MKIMVGIDLHSNNALCGLMDESGRRLHHKQLPCDLAAILQLLKPYQERIDTIAIESTYNWYWLVDGLEDHGYHVVLANPAAMQPYGGKKHTDDVSDAYFLAELLRLNLLPTGHIYDRKLRPVRDLLRRRMLLVHQRTTLILSFKSLNERTLGQRVPLARVKAMSAADAQARFTAQADQLLAGEQITLMEHYTDTIAKIEKHIMEVAEKTASYQRLQEMPGIGKILGLTIALETGDAKRFADAGHFASYSRCVKSVRQSNHKKKGENNRKCGNKYLAWAFVEAAHFACRHDDQCRRFYDRKKQQSNPAIATKSLACKLAKAAWHVMVADVPYDATRVFGPGKTDLGETSREPAKGSG

SEQ ID NO: 147898 - protein, 366 aa, unidentified
MREQDERNRITIGLDLGDRRHRFCALDGKGEVVEEGTLSNKRESLSELSRRYRRALVVMEAGCHSPWISRHLEGAGCEVVVSNPRKTRAIYQHERKSDRRDALMLARIARMEPALLYPVQHGSAQAQHDLLRIKLRDSLVRARVGVINSLRFTLKSLGYAIANPSTERFHKVIQEQVPESVDSVIAPSVQALKELSLRIKLLDREIATLARSKYPETTWLEQIPGVGPITALYFVLKIQDPARFERVRDVGAFIGLCPRRDQSGENDPQLRISKRGDAYLRRLLVSAAQYILGPFGPPSALRQYGLALASGGTPRAKKRAVVAVARKLAVLLLTLWKNKSVYQAFPLSRDGEKMRTSDLERLRCIA

SEQ ID NO: 147899 - protein, 331 aa, unidentified
MYFSQFIGVDISKDTLDAAVYPAKDKKMDFLHFDNTQKGLMLMMSWLKRRGIKATEMVICAEHTGVYTNTLIEFADKKGLALSLNSPLDIKRSMGIARGKNDAVDAGRIAEYAHSHKDKLRLYEKPSDNIRKLQYLLTERRQYMRQRTALINLDCAMGKYGTNETRSRSESARHHCEKLVKKVEDQMLAIIYSDPDVKRNYDLISSVKGIGLINAINTIVYTNNFKAFETPRRYACYIGVAPFDHISGKSVKGRTQVSKICRTQQKAELSMAARSAIVSDPGLRKYYLRKMKEKGGGKDAYGVVLNAVKFKIILRMFAVVRSGEPYKVLNY

SEQ ID NO: 147900 - protein, 322 aa, unidentified
MSSNFHEGHRTNIIAFEVSKASLTVHSLPDDRQVTIPNTAPAIRRLLKAKTKGSNPFVICEASGGYERHVLNCAVEVGLSAHRAHGTRTRNFAKFLGLSAKTDAVDARMLALFAAKSVDLRLWQPPAPETVELRGLRRRRDDLAQMIRIEQNRLEHPQIKHVERSLKRHVRAMSNEIKELDTQIAALVAATPEFRQKSGLLTSVIGVGLKTAAACLAYLPELGSLTKGEAASIVGLAPHAQDSGTLKGRRRISGGRREVRSSLYMAALTALRLDPAMQAFAHRLKERGKPAKVVITAIMRKLAVILNAVLKTGEPARRTHSA

SEQ ID NO: 147901 - protein, 346 aa, unidentified
MNITTIGIDLAKNVFQVHGVDERAKAGLKKQLKRAQVLPFFANLPPCLIGMEACGGAHYWARKLNELGHTVKLMAPQFVKPYVKTNKNDAADAEAICEAVSRPSMRFVPVKTGEQQAVLSLHRAREGFVKARTAQANQIRGLLAEYGIVIPVGIDNIVRRLPDILEDGENNLPGVFRQLLQRLSEHLKELDRQVDELNEQIQLWHRENAASRKLADIPGIGPITASALVASIGDAKDFESGRQLAAWLGLVPRQHSTGGKQTLLGISKRGDCYLRTLLIHGARAVIRVSERKVEQADSWLTRIVDRRNKNIATVALANKNARIVWALLAHNREYQSDYVTVVATGV

SEQ ID NO: 147902 - protein, 341 aa, unidentified
MQEVCTIGLDLAKNVFQLHGVDADGNVALRKKLRRGAVLGFLRSLPPCLVGMEACATAHYWAREIQSLGHEVRLMPPSYVKAYVKRGKNDAADAEAICEAVTRPSMRFVPMKSAEQQGVLTVHRSRDLLVRQRTMLLNAIRGHLGEFGIIAAQGPARVIHLIAKLYAGEDAGLPDAARSAVLCLARQLEALTEQIRVLDRRLLAWHRQDLASQRLASIPGVGILTATALSASVPDPSVFRSGRQFAAFLGLVPRQNSSGGKERLGRISKMGDRYLRKLLVVGATSVLRRAGSNPSVTGAWVRSLRQRKPARVTTVAIANKTARIAWAILARGEVYRTATPT

SEQ ID NO: 147903 - protein, 423 aa, unidentified
MKFKQKQIQNQRIEHISPDHLIVGIDIAKEIHVARAVNFRGIELGKSLKFSNDMAGFERLMFWVKSLQKKSQKTQLIIGMEPTGHYWLLLAYWLTEKGIEVVTVNPYLVKKNKENRDNSPTKHDVKDALVIADMIKNGYYSVLHLPQGPYKDLRELMSLHEFVTKQHVSVQNQIHRWLDKWFPEYSKVFKDWTGKMSISTLKRFPSPNEIREMSEEDILKAWKKDVKRISKAHAKELIKQAKCSIASEDGMDKATWMLKLLLEQYEQLTKQIEEIKEKAIGLIADLSIYEPLIDIKGLSPLLVTSLVAEIGHIPNFQHGNQILRLAGLHLGENSSGKHKGEITITKRGRSGLRKQLFLAVLSLVRNNKEFRELHRRNVKEKGMKKINSIMKLCGKLARMMVGMMKHKTFYSPRLVFPQVERAA

SEQ ID NO: 147904 - protein, 414 aa, unidentified
MLTETPRSLATRFVALDVHRQYLMVGAVDLQQQVVLSPRRFGFTAFAEWAKVHLTHADAIVLEATSNAWLLYDQLQPLVAEVVVAHPQAVKLIAAARVKTDSRDTIKLASLLAANLIPAVWVPPQEVRELRALVTHRNRLVQQRTQAANRLHSVLQRHNLDPSPGMPFAAHQREWWLALDLPLAEKLRVQQDLSLYQTLNGLINEIEAELGRLSTCDPWRKQVPFLVQLPGLGVLSAMRILAAIGEISRFPSAKHLVGYAGLGASVHQSGETNRGGRITKEGRSDLRGIMVEAAWVAVEHHPHWQAQFERLAARIGKQKAIVAIARKLLVTIWHVLSQQESDIHAQIEAVTRKLLNWISHTGTIPGKKRDRLLLLYDYLDQLGLSEEVEEIHYGGSTYRLSERQKQLRATQQKG

SEQ ID NO: 147905 - protein, 387 aa, unidentified
MSKKIVAPAYVAAMARAEADPASARFWVGLDIGFKSTAVCVVDVDGAVVHQVSMKSHATEIGRYLRRNFKSHVTLIGMETGGLSPHLAGKLREQGFQVAVLDALQVHRVLSVKRNKTDTNDARGIAEITRSGRDYLTEVYVKSNLCFEVRASLIMRDRLVKQRRETEAMIRGLVRVYGGRIEPGSDSPATFRERAIDQLCLIADTEGVDLRLRVIPLLDLCERFYIEAGRIERELDLLAASNPVCKRFMEIPGIGTITALSFYSAIEDPTRFRHVDNVAAYLGLTPRVYQSGESLTHGGISKMGNQLTRTHLVGAATVMLANTKSFSTLKDWGMKLSKRVGFNKAKVALARKLAIVMFSLWRDGTHFMAKAADVGPHRDLMQARATA

SEQ ID NO: 147906 - protein, 343 aa, unidentified
MKISRVGVDLAKNVFQLHGVDRHGKTVLKRRLSRDKWVSALIKSAEPSCEIGIEACGGAHHWARLLMAKGFTVKVIPPQFVTPYVKSNKNDANDAEAICEAMSRPNMRYVTAKTVEQQDIQATHRVRSELMCHRTAKANQIRGLATEYGLVAPLQMASLRAAIPRWLEDAENGLTSRFRALLHGLWDDLIRLDQRIETLNGEIGSIAKSDPLAQRLQQLRGVGPLVATALIATVGTGKQFDKGRQMAASLGLTPRQHSSGGKDRLLGISKRGDAYLRSILIHGARAVVAKAKHKEDRLSRWVTELADRSHPNVAAVALANKTVRMAWAMMKYDADYEPEFAAS

SEQ ID NO: 147907 - protein, 421 aa, unidentified
MTSIPCTTPQTTWVGIDIAKKHNDVLIERPRRRRQHFKVANQLEDYRRFAKFLGDLEERPVIGFEATGNYHRTLAFFLAEKGFALRLVSSVAAARTREALYNSWDKNDPKDAQVIIHMLKTGVTQHYHDPLTHGINELQELSKTYFQISLHKVRIQHSILTHYLPLYLPEAEKYMKSRRAQWFTHLLERYPCHAAVAKFSREEFIEDAWVYVGRKVNKTAFLEDFYATASQTIGLPVSEESEAIRMFRIVLREHQRLCEIRADIEKEAESFLGENADYVRLKTLPGVGPILALTILAEAGDLRRFPHHRQFLKFCGLDLSSQQSGQFSGKKKLSKRGNRHLRYAFWLAATVAIRMRENSFRDKYARYVASDPTNPDLKRKAFTAVAAKMARVAHGMIKHETNYRPFHERAVPGGIIPAKGR

SEQ ID NO: 147908 - protein, 318 aa, unidentified
MTNITYQFNIGVDIAKQKLDVSFSDQRVVSFENNLSGFKLILKEIENKSQTRVVMEATGGYEKPLAHFLQGQGVAVSIVNAKRVRDYAKALGRLAKNDVIDAKVIRLFADAVNPKLLPTASDTQQALDAQVHRREQLVKQRAMEKQHLETVGNKDAVRSIKRTIAFLDKEIERIEKAIRALIRADSILTEKVERLSAIKGVGDITALTLIADLPELGQLSNKEISALVGVAPFCHDSGTQKGKRTTWGGRKQVRSILYMAVLSAVQYNPPLKAFYNRLLMKGKTKKVALVACMRKLLTVANSMLRNNTEWNPNHGKLA

SEQ ID NO: 147909 - protein, 412 aa, unidentified
MSGTIFVGIDVSLKSNAVCVLNSQGKKLDRFSVRNDRKGTDAIVKSIVSCTSKVENHPQAQIGIEATSVYGFPLLYLLKQETSLANVDMHCYILNPKQVNAFKKAYSDLPKTDPVDAFVIADCLRFGRIGTKEAYMDDFYSSLQKLTRARFHVAQDLAAEKNRYLANLFMKFSGMAQEQIFSDNFGVSAMALVEKYETVDDIANASVEELATFLNEQSRNKFADPLDLANTIRAAARNSYRLPNTVLASVNQVLAISARTIRFYEKQLKDYDKAIADIVATLPGNPLASIKGVGPVYSAGIIAEIGDVHRFSNQAALAKYAGLAWSRHQSGEFDADHTSLILSGNHYLRYYLIEAVNKVRLYDPDYAAFYNQKYTETRITPHKRALVLTARKFVRLVYALLRDNKLYTPPSV

SEQ ID NO: 147910 - protein, 400 aa, unidentified
MISIDGVGVFLGLDVGKQTHHGHGLTLAGKKVFDKQLPNSEPKLRAVFDKLTAKFGTVLVVVDQPASIGALPLTVARDAGCQVAYLPGLAMRRIADLYPGEAKTDAKDAAVIADAARTMPHTLRTLGLTDEATAELTMLVGFDQDLAGEANRTSNRIRGLLTQFHPSLERVLGPRLDHPAVTWLLERHGSPQALRKAGRRKLVEVVRPRAPRMAERLVDDIFTALDEQTVVVPGTGTLDVIVPSLAKSLAAVHEQRRSLETRIEALLEVHPLSQVLTSMPGIGVRTAAVLLATVGDGSSFPTAAHLASYAGLAPATRQSGTSIHGEHAPRGGNRQLKRAMFLSAFAALHDPASRTYYDRCRARGKTHTQALLRLARHRISVLFAMLRDGTFYEPKSPRLA

SEQ ID NO: 147911 - protein, 463 aa, unidentified
MSGEVRLGIDVACTAAHQASLADERGAFLWQGWRFRTTTADLERLWAKIPDGARVVVVMEPTRNAWAPLAAWLEARGAVVSVVPPEQSADLRDYYNKHTKTDRLDSKMLARMPMLHPDGLRRVGSLGPVDPFKRAVRHRSSLQKRRVACAMRLDALLELLGPGWLEVFGTVSYGKTAVAVLERYSNPVALKKLGRARLAKLVIRASRGAWREAKADEILSAADETLALWAAGGLDFDELAEDIAIEVRQIKILDAEIAALDDRIEALYETADPAGIVASAPGIGTVLAAGILARTGDLNRFENLAGIRSFTGLVPKIDQSGTSDHHNGPTKAGDPGLRQALFLAADLARKADPTLAARYHRLYVDAGKHHNSAVCTIAAVLITRIAACWRNGQHYELRDTDGRPITESEGRTICTERYKIDTATRAARRNGTDPKRTGRRGKESTEAAPAAGPSTTEPTEQAA

SEQ ID NO: 147912 - protein, 342 aa, unidentified
MTAIGVDTHKATLAACAIDDLGRAIGEETFGNDPTGHAAFIVWARSIEPEATIGIEGSSSFGAPLARAIHAAGLCVREVPPHLSRFERRRTGRPGKSDPGDALAIARVTAREPNLPPIRLPDRTSEIRLLLEAREDLIGETTRARNRLHAHLRVLLPGYGGKVANLVAARHRTMVRRLLRGNATVQGELARSLLDRLLRFERECDVLTRRLEALVEGHPLLGLPGAGPITVARLIAEAGDMRRFRTPDAFAALAGVAPIPASSGQVQRMRLNRGGNRQLNRALHVIAVTQARFYPPAKAYVTRRIEADGKTRREAIRALKRQLVRPVFRLLVEGAAAQVQAA

SEQ ID NO: 147913 - protein, 401 aa, unidentified
MVSDFMKGRYNLMKIFVGIDIAKLNHFAAAISSDGEILIEPFKFTNDADGFQLLVSKLESFDKNSIIIGLESTAHYGDNLVRYLVAEFYQVCVLNPIKTCQMRKNNVRKTKTDKVDTFVIAKTLMMQDDLRFITFFDLDMMDFKALGRFRQKTIKQRTRLKIQLTTYVDQVFPEIQYFFKSGLHQNAVYALLKEAPSPKEIASMHMTHLANLLKVNSHGHFTKEQAKELRVLAQKSVGANDSAISIQITQTIQQIELLDSQLEKIEAEMTDIMKFNDSVIMTIPGIGYINGGMILGEIGDIHRFSNPNKLLAFAGLDPSVYQSGNFQAKTTRMSKRGSRVLRYALVNAAWNVVRNNATFKAYYDAKRSEGRSHYNALGHCAGKLVRVIWKMLTDEVEFNLE

SEQ ID NO: 147914 - protein, 457 aa, unidentified
MGRKGKRTEGLEEAHPFTGMSQVNLNAAGVDIGAVEIVVCVSGEENTQIVKAFGNYTVDLQAIGKWLKEHNVKTVAMESTGVYWIPLFEELERQGFECLLISSRSLRRVAGRKSDITDAQWIQTLHSYGLLESSFRPQAELIGLRTLLRHRGQLVEHRSPHILHMQKALLQMNVQLSQAVSDMTGVTGQTIIQAILTGERDPQELAAMREPGCKKSVEEIGKALTGTWREEHLFVLKQSMELYTFYTDQVRACDEEIERVYRLTRPDWEAGEVKPLSERKRNSHSKNKPQNPEHIRKHLKRISGVDLSVVDGFGVSLAQTVIMEVGTDMGKFPSEKHFCSWLGLAPKHEISGGKVLKNKTLKTKNRAGQAFRMAAQSVKQADCIFGVMYRRLKARLGPAQATVATAHAIARVVYRMLKYQVEYETISVEEYEQKYKDQQLKYMKKKAAKLGYQLTPA

SEQ ID NO: 147915 - protein, 346 aa, unidentified
MDKFDPCGIEVSAQELVVALSRDGRAERLRSFPNTAEGHAALLRYLYSGSQRVRVALESTGLYGLDLAYALHRDAQIEVMVANPRAVRHFASALMQRSKNDRLDAEVLREFAARMPFQAWVAPSAHCFALCAVTRRLETLTEQSTAEKNRLHAASLSVAFPPAVRRDLQRSVRSIQRALARLTREAQRILEQDPLLNSSYHLLLTAKGIGPTSALRLLAETALLSEDLDVRQWVAYAGLDPREYQSGSSVHKKVRISKTGNRHLRRALYMPALVAVRHEPHLRAFYQHLLAQGKCKMQALVAAMRKLLHAVYGMLKHRQPYDGAKLYRLAENLYAPSSGHCSAEAA

SEQ ID NO: 147916 - protein, 314 aa, unidentified
MTSVSTPASRFIGCDVSKSTIVVFDDTTGRTRTVANQPESLARFAAGLDPSCLVVCEATGGYEVALLDALLAANVPAHRADARKIKAFIRSFGTLGKTDTLDAKAIARYARERGPQLARWQPPDPDRATLQALVLTRDDFVRQRTAFSNRRQAPGAEPVRPHLDDLLACIDRQIKAIELRIAAILKASQPLKRDADILTSIPGIGFKTAADLLALMPELGFLDRRQAAALASLAPHPRQSGNVNAYRRTKGGRPEIKRALFMAAMAARNHHPTLRPFFLKLVANGKKKLVALTAVMRKLIIIANAKLRQQHQLS

SEQ ID NO: 147917 - protein, 339 aa, unidentified
MQLYAGLDLHSRNTYIGIMDKEFKRIFGKRVLNKLPVILDTLAPFQDQLKGIVVESTFNWYWLIDGLMDAGYQCVHLANPSAMKQYEGIKHTDDQHDAFFLAQMLILGILPQGYIYPKEDRPVRDLARKRLFLVRHKTSHILSLQSLIARCCGQRVSANEIRKFTVEDLQRLLEQEYIVLSAQANLDTIVFLKQQIQQLEKAIQKKVKLNKAFQQLLTVPGIGLILAMTIMLEVGDIGRFPQVGNFASYSRCVPSNRLSDGKSKGHGNRKNGNRYLSWAFTEAAHLSRRYNESFRSYYNRKVAQANTSLATKALSNKLARICYYLMRDQVPFRQELLSH

SEQ ID NO: 147918 - protein, 401 aa, unidentified
MPDGIRWVGLDVHARESTLAVFDQATGEVATRRVVGRPHELLPVLREIPRPARMVYEAGPTGYGLARRGRAEGLEVAVWAPGKTDRPASDRVKTDKRDAIRLARLLAAGELVLVTVPSVQREQLRDLVRCREDIRADLMRARHRIGKFLLRREIYYDGPAVAWTLKYRSWLTSVRFADPASRATLADYLHAHDVLIARRAQVEAELAKLALTAPCAPTIARLRCLRGIDTLTAFGLCAEIGEWERFDHPDQLASYLGIVPCEHTTGAQRRLGSITKAGSTHARRLLVEAHWHYRRGPAVGQALEHRQRGHAPEIINISWKAQRRLNARWRQLRDARHKPGGVVAVAVARELAAYCWEIATWRAHPDPVPPASLPAGDPLTQTAPLPPKHKTTTRRRITNSR

SEQ ID NO: 147919 - protein, 356 aa, unidentified
MTKTLMAGIDLHSNNLMIGIVDQDGQRVGHQKLACDLKAVLAYLRPYQRRLKSLAVESTYNWYWLVDGLRAAGYPVVLANPAKITQYAGLKHADDKSDAYFLAELQRLNILPTGYIYDAELRPVRDLLRRRVSLVQQRTALMLSFKSLYARTTGQAMSLSRLKGMAAKAARDLYEHPADQLIATVQHEHIAALNESIAKIEKLVLARARTLPWYEHLDTVPGVGRILGMTIALEVGEIERFASPGQFASYCRAVAAERTSNEKNKGRNNRKCGNKYLGWAFVEAANFAKRYDERSRRWFDRKAARTCKVLATKALACKLAKAAWHVMSDQVPYDGGRVFGKAAANQVNGLATSQRD

SEQ ID NO: 147920 - protein, 365 aa, unidentified
MGMLAERVDHVVGVDTHRDSHSAAIVVARTGEVLLGRTIAADAFGYKRLLRFARTHASGRRVWAIESSGSYGAGLTAFLLAHGEWVVEVDRPARPARRNGAKSDELDAIRAAHEALGREHLAQPRRRGDREAIRVLLVTRRGAMRARTKAINHLKALIVTAREELRHQLRNIPTDELVNRCARLRTLPSHSDEHRATVIALRHSARRVLMLEAEANDLETELQRLVKRAVPMLLDEIGVGPISAAQLYCSWSHPGRLRDDGAFAMLSGSAPIPASSGQTVRYRLNRGGDRQLNCALHTIVLTRLKHDPATRAYAARRSAEGKTPREIKRCLKRYVARHLFRVLEAHGPTAHTERPQRTRTLGICS

SEQ ID NO: 147921 - protein, 340 aa, unidentified
MTITTVGIDLAKNVFAVHCIDQNGKAVLVKPKVSRAALSELIAGLPPCVIGMEACSGAHYWARLFRQYGHDVRLMAPKFVSPYRMAGKTGKNDAADAIAICEAVQRPHMRFVPVKDENQQAMQCLHRTRQGFIQERTATYNRLRGLISEFGVIAPQSTDALRHVVSDQKETLPVQVRLCIDDLLTHVTNIEEKIAEYDRVLSRVAKTDHRSQQLMELKGVGPTTASALVASIGNAHDFKNGRQLAAWLGLTPSQYSSGGKSKLGRITKAGDAYLRTLLVQGARSVMVGAENRTDPFSRWVCSLIGRRGYWRAVVAIAAKNARLCWASLHYGDDFRLYSTT

SEQ ID NO: 147922 - protein, 462 aa, unidentified
MKLYLGGDVSKGYTDWVILSDKKQTVLENFQLDDTYEGHCKLYSTVEAYFDKYPGLEMYAAVESTGGYENNWVHTLKSYQKVFNLKVARVNPAGVNYNRRAGMKRNVTDAISALSIAEYMINHPENIIYDQDEKWKTLCRHWNFVEMQKSQRVQTINQLETILYSANPTLLRFKKNKLSNWLLELIIKCPTADKLAKVKPEKLAKISFLTLKKAKGLVAEAKLNIASATDRNSEILVRQIARQIKAFDENIKSQMKLIEEELICPEIELLKSFKGIDTTSAIGLLLEIGTIERFPTVKGFSCFFGLHPKFKQSGDKIIGVRMSKQGSKNMRKILFNIAKGAITFNPLIRDVYEKKLSEGMSKMAAIGVCMHKILRIIYGMLKHNQVFDPLIDKHNNERSKSKQQEKKLQESANIDKSRRYQEFDATAPISRKQIKKRKEHDLSQCEITSQITGSACSSNTKL

SEQ ID NO: 147923 - protein, 374 aa, unidentified
MNHHTEAFVAFDTSKLRNAVAVAEAGRAGEMRFVGEIDNTGVATAKLVKKLAARYERLTFCYEAGPTGYGLYRQIKSLGHECIVVAPSLIPQKPGDRVKTNRRDALSLAKQLRAGDLTAVWVPDERHEAMRDLSRARGAAVEDLRGKRQQVSSFLLRRGLHYPGKKTWTKAHMVWLASVKLAHVEQRVAFEEMLLAVRQAQERIERLEQAIRDAVADWSLAEVVTALMAMRGLDLISATTLLAEIGDLSRFQTPRELMAYLGLVPSEASTGDTVRRGPITKTGNHRARRILVECSWSYQHAPRVGKKKLEKVAAAPPAVREIAWKAQCRLSARYRALIRKGKPKNVAVTAIAREFAGFIWAVSREATSAGAAAA

SEQ ID NO: 147924 - protein, 342 aa, unidentified
MYYIGLDVHKKTISYCIKDASGQVHREGTIGATRNELDRWMKTLPQPWTVAMEATIFTGWIYDHLLPHAAQVKVAHPLMLRAIAAAKKKNDRIDAGKIADCLGCDFLPECHMASTEIRDRRRRLRYRHLLVRQMAQRKNRVSGLLLETGVSQNKQRLHKVGYFRDLLSTNEDISESIRPLLRLSRETIVRLQKTDYGVVSSLQRDPLLAERIKRLRTIPGVGPITALTWALEIGDVSRFRSIQQAISYCGLCGDEKSSAEKVMRTPISKQRNKHIQRTLGEAAKLAPSQNHELAVVYEKEKQKGHANRATLAVARKMVAWLLAVDRRQRDFVPSEDRKNAAA

SEQ ID NO: 147925 - protein, 411 aa, unidentified
MNPVVGLDVAKGESQVQAFLDKKKPYKRSFKVAHTIEGLESLHQYLREIENVTGIRPPVVLESTGHYHTPVVQYFEERGYLLIIVNPLISYRAKSSSLRKVKTDLIDARHLCELYYKEDLEPYKKRGIQLLNLRNLSRQHANITGIYVQTKLQFQAVLDQVFPEYRGVFGDLYSVVSLLTLLEFPTSEDISAVDEETVANRINELCPSRSRKWANTQAEKLMAASARNPFQRTLYQSHILSLEMYIKMLLEYQKHLSKFEEEINALAKEIEEYKIIQSIPGIGEKIATTIISEIGEIDRFNHPKKLVAFAGIDPSIFESGKFKGSVNRITKRGSGRLRHALYMAVRCAIRDCRKKKTTDEIIPRNKRLREFYDKKREEGKPFKVAVIACANKLLQWIYALLQNNSTFQDLT

SEQ ID NO: 147926 - protein, 406 aa, unidentified
MKGKIRNSPSTSRARKRLNKHLEQINLYAAGIDIGSQMHYVAVPEGLDDEPVRSFSCFTGDLKSMANWLVEIGIETVAMESTGIYWIPAYEILEDYGLEVLLVNARHVKNVSGRKTDVLDCQWLQQLHTYGLLHGAFRPPEQITALRAYMRQRETLRRYAGSHIQHMQKALRQMNLLLDNVVSDITGKTGMTIIRAILNGERDPDKLAVYRDGRCKKSEEEISHSLHGHYREEYIFTLRQSLHLYETYHEQIQACDAAIEQLLGKFDTNGDPDSLPSSKDRKSASAPAFDVRGELYCITGVDLTGIAGISEITALKILSETGTDMSRWKSAKHFSSWLGLSPGNKTSGGKILSKKTKRTANRASSALRMAAYSEERIGCLLSQDEIKTWFTEGHYRHSTQTGTIDL

SEQ ID NO: 147927 - protein, 351 aa, unidentified
METQQTASSKLFIGIDIHKRSWKIHCATDLFSGKTFSMPPRPEVLKDYVAKHYNDYEVTTAYEAGCCGYHAHRCFESYGWSSLVVNPADIFRKGKERFTKTDRIDAQLIARELKDGRLTSICVPDKCREQLRSLFRRRNDLVKDMRQIKSYIKMQLLYYGIEIPPEYDNDHWSHNFRYWLDDLKFEYDTGTEVLRSRMRSFRFIDQEFRDVSTLLRRHTKTHFKHDYMLLRSIPGIGSIVASGILSELGDLRRFKNIKHLAGYVGLAPGIYQSGDTLRHTGVSMRAHRLIRSYFIEASWQAIRTDPVMQTYYRKHQGKNVKSIIVKVARKLLSRTLAVIKTGIPYEIGIVE

SEQ ID NO: 147928 - protein, 377 aa, unidentified
MKKELYLGLDVHKDCIATAVAEAGRRGEVRDTGVISNDLHAVEKLLARLRKAHGRETLLHACYEAGPCGFGLARRLRQLGVECEVVAPSMTPTRSGDRVKTDKRDARKLARLLRAGELTPVYIPEATDEAIGDLCRARSDAVDDRRRSRHRLKGFLLRHGYRYQGKSAWSAAHQRYLRELVLPHRAMKVILEEYLQAIAAGDERIERCEAGMRELLEKWRLAPAVRALEAMKGFQTVAAMILVSELGEVHRFAHPRQVMAYLGLVPRENTSNDKRRQGRITKCGNAHARWLLVECAQHYAAPPKVSKELSRRQQGQGQEVRAISWRAQNRLHSRYTRLLARRLQRNKAMVAIARELCGFIWELLRTQPCYHVPATSV

SEQ ID NO: 147929 - protein, 375 aa, unidentified
MSIALPNGAFIGKPFKVVHSDPRSRDLAVTKIKEAQETYSLKSRCFLESTGIYHIPLLCFLRDKGFDCSVINPIITKNSTNINIRKLHNDKFDSKKAALVGLNVSLKASIIPEDSVVDLRNLVRDYYYFKDLQSAVALKLTAELKVSFPAYAKVFSKVTTQSSLKLLSSYPLAGDMLEASKDDIVETIRSTARFGEAYALRKYDAVIAAAQDASVFGRALPSNAVRIRLYIDTYQEYQKHLDALLKALHETVERLQDTLIYDQICLLQSLRGIGFLSAVVLIAEMGDFKLFPSPKKLYAYFGLDPAVKQSGKLNGDKVHMSKRGSSLARRVLHMVALNNVKVDKGRHTCESCHLRLLHKKVFWQEKTSSNGRCHA

SEQ ID NO: 147930 - protein, 387 aa, unidentified
MPQPNDLSRSLIALDQNSTIIAVVELSHSSWLVGGVVPGIERQPRKKLEPSPERLLALLHRWRDEAVRAGSTITRIALAFEAGRDGFWLARWLEARGVEAHVIHASSVAVSREHRRAKTDRLDTELLKRGFLGWLRGERGHCSMAHVPTIAEEDAKRPNRERDGLVGERTRIVNRIKSTLARVGIRNFKPALRKAAERLATVHTPEGMPLPPNTLAELQRDMARLSFVVSQIKEIEETRQKRLEQQPETGPDAMVRLLARIIGVGVETADMLVHEVLSRPMRDRRAVARYAGLTGSPDESGAQRREQGLSRAGNARVRRGMIQLAWRFLMFQKESALALWYRARTADSRSGTRKTMIVALARKLIIALWRFVTTGEPLEGVVLRPAT

SEQ ID NO: 147931 - protein, 370 aa, unidentified
MNSILYIGIDVHKESYTICSYRIEDDEAKFVQKIKPDYKVVLKYMEQMRRQYGNDIEFLCGYEAGPLGYKLYHELNNAGIACVIMAPSTLGVTNNNRVKTDKNDARNIARSLAFKLYSQVHVPTPEDEEVKEYIRMRDDKKTALKKVKQQIQAFVLRQGYRYEGGSTWTIAYVKWLRSLEFDNLLQEVMSEYLISYDYLTSKLERIDERIEELASGERYAENVKKLKCLIGIKTYTALSVIVETGDFKRFEKPNQYASFIGLVPSEDSSGGTVKQGSITKTGNRVLRRLLVESSQSHARGAIGHKSKELNRRQRGNPPEVIAYADKANERLRRKFYRLVLKNNKPRNKAVTAVARELSCFIWGLMTDNIV

SEQ ID NO: 147932 - protein, 425 aa, unidentified
MNDDVLIAVDPHEASNTAAVLDPVTKMVIEVARFANTVDGYGQLTTFAARWELRRWAVEGCYGAGRSLAQRLVADGEIVLDVPAKLAARVRVYSRGHGRKTDKDDAVSVGLAALDGTGILPVTSDDATVSLRLLCDRREELTAQRTQAVCRLHRLLAELTPGGMRRELSANKAQALLALIRPADDVGRVRVHIARDHLADIRALDARIKYIGGQIAALVTASGTGLTALFGIGPVIAGRILAEVGDVARFATKDAFASYNGTAPIDVSSGDQVRHRLSRAGNRRISHALHMMAVTQIRYPATPGRRYYERKRCEGKTPKEALRCLKRRLSDLVYYQLITDRRGTIGACGSPTTPPPTRSTSTSPATRSRRAAPPSRPPRRPAQMGSSPWTGKTAAWSASRSWTPAPASTTTSSTRPKSTAKTAAS

SEQ ID NO: 147933 - protein, 430 aa, unidentified
MLGIGIDWSEEFHLVAIGRPGEGVVEVRRVEHRPDALAALVADVAAIEPDPAEVRVVLETRHGALVEALLDAGYVVVPVNPDLVARRRNPARKKDDAEDARIACLLALDRHQRLSPLIPHGELAGELRAIARDDERAARDERRLLKRLRADLVAVYPAALAIAGEDLGAPTVLRMLERWPAQDELARASDAELEAFARACHHGWPDRFVTRVRQALSVEHFSARDYLVRAKSSTIALAASQLLLLGTQRRAWEKRMGELLLGGPRKGRDKTVKDPDMGKAFPGGEIYLSFPGLGDRLAARVAGEIGDHPEQFETPSSLACYAGKAPVTRRSGKSQVVVGKRLARNHFLDNAVQQWAFSSLTYSSWAREFYDAQRARHKGHHAALRALGNRWLEVLWHCLRQGVLYDEGRHVANRNRALGLAPGPSARAAA

SEQ ID NO: 147934 - protein, 338 aa, unidentified
MDNYIGMDAHSSICVFSIVDANGKEVNQAKIATNGQLLVEYIRSIEGSKKLVFEECELSAWLFETLRGEVDELIVCNPTRNQQYKKAKTDKLDAQNLARLLRGGFLTPVYHDGSKTEHLRALMSGYQDIVDTGVSIKNRYKSLFRKAGLPARGAGLYDDSSLLENLSRPDQRFIGRGFYRLLETLEKEREQYIVAIRKSSRAFPEIRLLKAIPGIGDIQAAKIVSQVISAQRFRDKHKFSSYCGLVRHRMESGGHIYGSKRSWGNRILKCVFKMAAQTVVRGENEFRAYYDELRLKGTSDRAAKNAVSRKLAAISLSILKTLRPYDETRIMPQTEQAG

SEQ ID NO: 147935 - protein, 371 aa, unidentified
MEAYVGQQFVGIDLHRRRSVVVRTTAAGEVLEKVRIVNDVGRLAEVIARAGDAPEVVLEATYGWYWAVDALQAAGAAVHLAHPLGVKAFEYRRVKNDERDAIDLADLLRMGRLPEAWIAPPATRELRELVRHRAKLVALRSHCKAEVHAVLAKCGVQVLMSDLFGVAGTDLLDGLHLPAPYTARIGSLRRLMDQLDFETDVFCGLVRRRLATDPGYTAIRTIPGVGPILGAVFVAEIGDVGRFATAPQLACWAGLTPKHHESDTHVHRGSITKQGSRLVRWAAVESVQLLPATSRVGQIRDRVGARRGRNIGVVAAARQQLEYVYYALRDHHVRALRSNPCGGISRPTELVGAGRAGHDPRSSTRRGRPSD

SEQ ID NO: 147936 - protein, 340 aa, unidentified
MRRLYAGSDLHGNNNLIGIVDEEGKRIFKKRLPNEPQVILEVLKPYKEEMVGIVVESTYNWYWLVDTLMDEGYKVHLANPSAIEQYSGLKHADDKHDAFWLGEMLRLGILPEGYIYPKEQRPVRDLLRKRAHLVRLRTSLMISLQNILSRNLGRKMSVNDVKALKEDRVSPLLEKNEDLALAGRVSKDLMDQLTHQIFKIEWVVQKKVVLKPEYRYLPGVFGVGKILSLTIMLETGPISRFPTVGDYVSYCRKVPTQWMSNGKWKGSGNRKNGNKYLAWAYSEASEFARRLYPEARAYYQRKMQKTNAAVAHSALAHKLARAAYYVMKDHVPFEPRKLFN

SEQ ID NO: 147937 - protein, 401 aa, unidentified
MPSLRENSQRIKRFRELKATLRTDRTRLLVGIDVAQAEHVVHLRHAHTRVVVPTLTIPNTTRGFTQLWARIQQAQRSTGCREIVCGLEPTGTYHRALAAFLETQGADVVLISSSVAAWNRRTQDGTWDKNDRKDAANCADLLEQGKILFASQPTGPLAELRQLVRLLRRARTELASCKARWRTTLRPSLAPMGEPLPSRLWAELPAVLQAWEPVAPGRPAVPKGRLPLGLATACTDLDAQVTAVQARITTIEAACTPLAERLPAYALLRTIPGIGPTVGAILVAEIGDVAWFTTCSQLRKLAGLDIVRVQTGQYAGQWRISKCGRGLLRWALYQAAGGLARTTPGRARLAALKAKRHGDRFAGFKAMVELAAKQLRLVWGVWRSGRPYDPTRAGGVQRQRR

SEQ ID NO: 147938 - protein, 470 aa, unidentified
MSSQTIKMAERMKYTQRKGKGLPKQLESINLHAAGIDIGGETHFAAVPPREGEDAAVRSFGCFTADLHELADWFEECGVETVAMESTGVYWMPVYRVLESHGFEVRLVNARHIKYVPGRKTDVLDCQWIQTLHAYGLLRGSFVPPKNIDQLRAYWRQRKMLVESCAREIQHMQKALTQMNLHLSVVLSDVTGVTGIKIIRAMVQGERDPQALARFRHHSVKKSEEEIAKALTGHYSDEHLFCLRQALELYDAFQKSIADCDTELQKHMARFERKEPQAPLDDEGQKKRKTKKRANEPAFDLRAEVHRICGVDLTRIDGIGAMTAQTIISECGPDLSAFPTPGEFASWLGLCSNNQITGGKIQKRRSRSVKNRAATALRMAAESLHSSQSYLGAQYRRKRARLGAPKAITAMAHKLAKLIYAMIRHGQAYVDYGQQKEEQHHTERIKRNLIRQAKKIGYELMNSETGELVS

SEQ ID NO: 147939 - protein, 310 aa, unidentified
MDIIAVGIDVSKDRLDVAVHPGGEAFVVERNGAGLEQLTARLKQLAPSIVALEATGGFETIAAAAVGGAGLPIVVVNPAQVRAFAKALGQRAKTDPIDASVIAHFAAATRPEPRPLPDEATRFLSDLVTRRRQIVDMIGAERQREKRATSQHLRKSITRLIKALEKELVSVDTDIDDAVRSSPAWREAEDLLASVPGVGPIIPRTLMAELPELGRLNRKQIAALAGLAPYTRQSGQWRGKSFIGGGRQAVRTVLFMGAMTARRHNPVLKAFFERLVAKGKPKLVALIAVARKLLTILNVMIRTKTPWQPA

SEQ ID NO: 147940 - protein, 317 aa, unidentified
MPQSERIVGIDVSKLTVEACLRARRERLSQPSTPEGRQAMIAWLRRHDVAVAVMEASGGYEREWAAALRAAGIAVKIVDPKRVRYFARSAGRLAKNDPIDAEMIAWFAETFATEAAPGHDPEQEAVDRLMTVRAMLVRLESQIGQLKEHPQPPLVERAQRVIARVIVRQRKQLETAIAARIARHADLAERHRIIQSVPGFGPHCAAGIIAWLPELGAIGGKPAAALVGVAPYDDDSGGHRGERHIKGGRREIRDLFYMAALAATRCNPVIKAHYQQLRARGKKFKVALVACMRRLMVILNTMLRRGQMWNPPAAAVA

SEQ ID NO: 147941 - protein, 455 aa, unidentified
MYLPDWKWIPIRKGLLLMSNKVIFNLDELFISVGIDVGADFSWMSIALPNQQFVGKPYKILHNSIDSLTTAVSKIKEAEELYSLESRIFLESTGIYHYPLFCYLRDKGFNCSVINPIITKNSTNINIRKVHNDRFDSKKAALVGLKPDLKVSLMPSDLALNCRNLCREYYDLMDNRSAYVNKLQGELRMAFPQYLGIFSKVTINTSLTLLETYTSPSAFLKADKQEIIDIIKSTARFGLTYAQNKYNAIIQAATDANQFGYIIDSNIKRIRLYISFIRKYDEEINSILESLHELVDANEDSDFVKQIHLIETFKGAGFLSAVSIMGEIGDFSAFSKPKQLFAYFGLDPAVKQSGKFEGTKVQMSKRGSAIARRVIHTLTLQSISISRNREAKNPVLREYYLKKCDSKPKLVAMGAVSHKVCNMIFAILRDNKPFKIIVPQEHIKQYNSAKCDIAA

SEQ ID NO: 147942 - protein, 321 aa, unidentified
MNRMNYVGLDIHKKSISCCVRRADGTIIQEITITATRQALDEWMQQLPQPWMAGMEATLFTGWIYDHLESCGATVKVAHPAMLQAIAAGKKKNDRVDARKIADLLRCDYFPECHMAPREIRDRRRVLRYRNLLVRQAVQMKNKVSGLLMEAGVPYNQQKVHQKKYFAELLQKQKKEMPPSMPELLRLSRSTVEALTGMQRQLIRALESDALLAARVERLASIPGVGRVVALTWALEMGDISRFASVKKAVSYCGLCGAEKSSGGKTERTPISKQRNKHLQTMLIEQRNWRRAGMRNWRWFTTARNREEIATGPPWRWRANW

SEQ ID NO: 147943 - protein, 354 aa, unidentified
MSQTPNTAIAVIGIDIGKNSFHVVGHDARGAIVLRQKWSRGQVEARLANIPPCLIGMEACVGAHHLSRKLASLGHDARLMPAKYVRPYSKGQKNDFNDAEAIAEAVQRPTMKFVATKTAEQLDLQALHRVRERLVSQRTGIINQIRAFMLERGIAVRQGIGFLRTELPTILATRTDALSPRMLRVIEELAGDWRRLDQRIEGLTGEIATLAHQDQACSRLMTVPGIGPIISSAMVAAIGTGDVFSKGRDFGAWLGLVPKQISTGDRTILGKISKRGNRYLRVLFVQAAWVVLVKIKDWERYGLKSWIEAAKKRLHHNVLAIALANKLARIAWAVLAKGRAFELTRTDDASVRPA

SEQ ID NO: 147944 - protein, 353 aa, unidentified
MNQELRRVIGGVDSHADNHQAAALDERGRLLGSKSFAVSAAGYRELQAWLASFGLIDRVGVESTGSYAAGLTRHLLAEGVRVLEVNQPHAHSRRRRGKTDAIDAELAARHALSLASAVTPKQSSGIVESIRQLRVARGSAVKSRSAAIVQLGDLVRTAPSELREQLAIRSTVKGKAGLCRRLRPDTDRLSEPANAAKLALRSLAGRIAGLDEEIAELDRQLAPLVATAAPRTTALLGISTGHAGQLLITAGQNIDRLHSEAAFAALCGASPIPIASGKRGRYRLNPGGDRQANRALHMIAVCRLRHCPKTRAYAHRRSSEGKTKKEIIRCLKRYIARQTYATLREDLRSLAIA

SEQ ID NO: 147945 - protein, 415 aa, unidentified
MKKHSNSVKKSESPMKRRNPRAEQRRDSSEVMAELVSQLRQQLEAKSVPAAESAGDEGGAVRPNLDRLTVGVDLGDQWSNYCILGLGGETLREGQFRTRRQEVGEFFQGLAISRVVIEVGTHSAWVREVIAGLGHEVLVANAQRMEGRKRGRRKNDRIDAAKLARLGRVDPKSLYPIQHRSTEVREDLLVIRVRDSLVESRTKLISTVRGMVKTMGARLPGCSSVSFSGKAADQIPPEVRETLEPLLRLIHTLSEEIKSYEKRIEKLGNEKYMDTKLLRQVNGVGPVTSLAYVLTLETPQRFKRSRDVGPYLGLVPQQEDSGDSQPQLGISKAGDRMLRKLLVGSAHYILGPFGPDTDLRRFGMKLCERGGKNAKKRASVAVARKLAVLLHRLWSSGEVYEPLGYGKTITESAAA

SEQ ID NO: 147946 - protein, 373 aa, unidentified
MGKHKLGFVAFDSAKEKHAVAIANDGRDGEVRYLGEIDNSPDAVRKLVTKLSRQYERLHFCYEAGPTGYGLHRQLTDLGHVCDVVAPTMIPKRSGDRVKTNRRDSVTLVKLLRAGELRAIWVPDTVHEAVRDLTRAREVAMIDLKKKRQQVLSFLLRHGRIFPGGKNWTKMHERWLAKQTFNHPAQQIVFQDQLEVINAAHVRLAALEQQLREIVPTWTMAPVVAAYQALRGVSFLVAITFVAEVGDVRRFATPQQLMAFLGLVPSERTTGDTVRRGSITKTGNHRARRVLIEGAWTYRFSARVGEALRGRLKDLPLNIRSIAWKAQVRLCARYRRLIANGKKTPVATTAIARELAAFLWAIGQQVAPLKPAA

SEQ ID NO: 147947 - protein, 328 aa, unidentified
MKVSHIIGTDLSKASIDLFCHGLKSYLKINNCLTGFKQILSWLKDQKIKTSAVMIVMEHTGLYSYHLEAFLHEHQIRFTKVSALAIKRSLGLIRGKNDKIDAQRIARYAHEKSDQLIAATKPDPRLERLQMLHSTRERLVKQRASLICAVKEYQAVLKQSDVIITAQLELIKNFTRQIKVIDAAIGELMTKEQNISQSYQLLKSVKGVGKVLATATIIKTKNFTLFANARKFACFCGTAPFENSSGKSIRHKTRVSHLADKGMKTLLDLSAKSAIQYDKELKAYYQRRIEMGKSKKSTINIVRNKILYRMFAVIRRQTPFVENYLQTA

SEQ ID NO: 147948 - protein, 462 aa, unidentified
MKDKGSERSTKRSRREQRILEKVHLNAAGIDIGGESHWVAVPEDRDEQPIRQFKSFTHELIALADWLVACGVETVAMESTGVYWIPLYEILEERGIEVLLVNARHVKGVPGRKTDILDCQWIQQLHTFGLLRGSFRPDAPITALRSLVRHRDQLVEAAGSCVQRMHRTMVLMNLQLHNVISDVTGVTGIAILRDIVAGQTDPAVLARHRHPRCKATEQEIAASLTGHYRDEHLFVLRQTIELYDLYQEKLLRCDEQIETRIRTLEATCESPDKPLPESRKTRRRSAHEPRFDIRSPLFALCGGVDLSQLPGLGPYGALKLISEIGLDMTRWPTENHFTSWLTVAPHNKISGGRLLSSRTQPSANRAAKILRMAAMSLGRSDHALGAFYRRLAARAGKAKAITATARKLAILVYRMLRDKMTYHESSAAHYDQQQRSRILRGLRKRAHSLGFEIIDTSTGLVL

SEQ ID NO: 147949 - protein, 370 aa, unidentified
MLDTTTFVGLDVHARSIKAVSLDVMTGEVRCATFGYDAGAVAEWVRSVDPKARCVYESGVTGFDLQKRLSGLGVDCVVGAVSKMIKPSADRRRKNDRNDAEFLARMLSVGNVVEVWVPDDECEAARDLTRALEDARDDLSRAKQRLSKFLLRHGLAFDERTPTGRRKGNWTRAHWSWIESIRFAEGADNDVLAYYVDAVRRAAEEKARLEGLVEAEARKPRWRRRVDSLRCLKGVDTASAADLVFEAGEFSRFRNARSFAAWVGLTPSEHSSGESDRRGAITKAGNKHLRKALVEAAWHYLTCSGRPKEPARGQAPDRGARRHAAKGVRRLVERREALLARGVHGNKANVATARELACWVWAVGLMAEEA

SEQ ID NO: 147950 - protein, 341 aa, unidentified
MEEYIGLDVSMKETAVAIRRAGERIWRGKCASDPSIIAELIRKRAPSVKRVVFETGPLSVWFYHSLRTEGLPAICIDARHAKAALDMATNKTDANDADGLAQLAEVGFFREVRVKGFDSMLTRTLVAARTRLVRITTELSNQIRGVMKTFGLLVPAGKGGTFEKNVRSLLADQDRLASIVLPMLEAWRGIRVRAAELGRQLVRDARQSRACRILMSIPGIGAITATSFTTAIEEPDNFRKSRSVGAWIGLTTRRYQSGEVDYDGHISRRGDRPLRGLLYEAAAVILTRSSTHSTLRTWGLQLRERIGFKRAAVAVARKLAVIMHAMLKTGELFNPNAGAAA

SEQ ID NO: 147951 - protein, 348 aa, unidentified
MRFYKTQHSYYCGIDLHARSMFTHILDHEGKTVFERDLPAGPDAFLDAVAPFRQGLVVGCECMFAWYWLADLCEDHEVPFVLGHALYMKAIHGGKAKNDRIDAGKIAGLLRGGMFPLAYVYPRAKRETRDLLRRRCFFVQQRSQLTAHIVNTNSQYNLPPLTKKLCYAGNRSDDLAKRFQHPSTQQSILADLKLIDAYDEQIDEVERAVLRTAKIDNPVTLQLLRTTPGIGKILSLVMLYEIDQVSRFPEVGNFLSYSRLVRCEHESAGKKKGSGGKKIGNAHLKWAFSEAACLMLRAMPEAKKWLQRQERKRGKKKALAVLEAKIGRTVYHLMRKQQPFDAQRFFCS

SEQ ID NO: 147952 - protein, 324 aa, unidentified
MSKTILGIDVSKKELVVALLMKDSSIHKKKFANDKGGFNSLLKWLKFKKINDIKICMEATGNYSTAIADFLYDLSYEVNVVNPACIKAFAGSKLTRTKTDELDAVIIAQYASKSELTPYKPLNPSLKELRYMYRCLNDLKKQQVDVLNHLENEDLLPNSVCKVWKELSKNLQQQMNEIEKSIDNLLQNNPGINQQLQNLQTIPGIGKTTAVAVIAESPDISTFKDARAYAAYAGLVPKHRNSGSSIKGRAKLSKLGSAKLRKAVYFPAIVAKNHNPILKAFAEKLKRKGKHTMVIIGAIMRKLLHIIFAVLKHNTAFNPNICAA

SEQ ID NO: 147953 - protein, 322 aa, unidentified
MAMLSFCGIDVAKDRLDVMVLPEQQCLSVRNDVDGWAELVEQLRSFAVAAIGLEATGGYERGIMHALLAAGMSVRQINPFRLRQFARASGVVAKNDPIDARMIASFVAVMPTRLAQRNAPAVERLTEMLAVRRRLSNEKVAAENAARLLEDPMLQRLSRRRIARLSTDIDTLDERLVEIVAADAALAHRYRLLISMRGVGPVLACTLIALLPELGRLNRKQVAALVGVAPYNFDSGLLKGVRRIWGGRAPVRHVLYMAAMSASQHNPVLKAFHDRLKAAGKEPKVVIVAVMRKMITTLNAMVRDDVAWADRSTGRHNVPTAR

SEQ ID NO: 147954 - protein, 424 aa, unidentified
MKVTYKTCCGVDVHKSFLVATIITTTGGIEPSYQKKRYSTFNNSILEFKQWLLDNDCHDLCMESTGKYWIPVFNLLEDDINVTIANPKWVKAVKGNKDDTKDSKWIGDLFRLGLVKGSYIPCKKIRILREFTRYRYKIVSCRSSEKNRYQNALTVCNVALDSVVSDIFGKSSTSIIDYLLEQSGNSINHEEIASKLLKSLKSKEDAVIESIEGYQMTDSQKYRMHLVRAHMDYITAEINDVDREIEKLISSDPDFENAIQFLMTIPGVKRDSAITVISEIGIDMTQFSSSKRLCCWAGLTPGSNESGGKKKSVRVTRAGVYLKPALVQCAHAAVKSEKFPYYKKKYESLMKRRGKKRAIVAIARMILTAIYQMLSTGESWNPSDLYKIDIPEALLEKQKAKAIKQAMKLLQREGLYPPPEPIAS

SEQ ID NO: 147955 - protein, 343 aa, unidentified
MKLSRVGIDLAKNVYQLHGVDGSGKTLWKRRLKRHQWFKVLVDTVGPECEIGMEACAGAHHWGRELQSRGYTVKLIPPQFVKPYVKSNKSDAKDAEAICEAMSRPHMRFVTVKRVEQQDIQATHRVRAELMTQRTAKANQIRGLVAEYGLVAPKHLSSLRAAIPCWLEDAENGLTSDFRALLHGVWTDLLLLDDRVGEMDRKIKQLADNNEDCIRLQQLRGVGPMTSTAMIATVGDARQYRKSRQMAAAIGITPKQQSSGDRDRLLGISKRGDVYLRTLMIHGARAVVARAKHKDDRLSRWVTNIANTKHPNVAAVALANKTARMAWAMLRHETDYDPDFAIR

SEQ ID NO: 147956 - protein, 335 aa, unidentified
MEKITTVGIDLAKRVFSLHGVDATGHVVLRKTVRREQLMEVVAGLPPCTIGMEACSGAHAWARQFQGFGHEVKLMAPAFVVPYRKSGQNDGNDAEAICEAVQRPNMRFVPVKSEEQQALLSLHRVRQGWIEERTATINRMRALLTEFGVVLPNRAPHVRRGARLAGEGLPALARRALEDLCEQLRVLDERIGVYDRELQAQARASEPAQRLMAIRGIGAITAVALVATVGNARDFESGRQFAAWLGLTPRQHSSGGKTRLGHVTRRGDAYLRCLLVQGARSVLHTAMRHTDRMSRWVLSVQARRGYHKTLVAIAAKNARIAWALLSKGQELRMAA

SEQ ID NO: 147957 - protein, 390 aa, unidentified
MDRLYERCCGIDAHKKMIIACFKRGNDQEIREYGTTTELKELTAWLLSEKCEMIAMESTASYWKPLYNIFELSGLDAIVVNARDMKAVPGRKTDVKDAECIADLLQHGLLKASYVPDREQRELREASRYRKSLIEERARELNRLQKMLEGANIKLSSFTSDINGKSSRRILNALLEGKKLNEEQLQELLHGSMHKKIPEIMKALDGILTPLQKQLIKNIIDHIDDMSRRIEDMDKLISNYLDKYQKAIKQLDEVPGIGIQSAETILAEIGLEMERFPSDAHISSWAGLVPGNNESAGKRRNSKTTKGNKTLKTTLIQCAKSAVKKEGTFFYAQYQRLVVRRGKNRAIVAVAHSMLIAIYHMLKENKINRIKSLEKIIIISLTRSEKLMPT

SEQ ID NO: 147958 - protein, 348 aa, unidentified
MRYFAGLDVSLEETAICVVDENGVIVKEVRATSEPEALIVALREVGLPLERVGLEACSLTAWLYEGLRQAGFSAICIETRQANAAMKTMPNKTDRNDARALAQIMRTGWYREVHVKSRQCRLWRSLLVARRTVVNEMRSIENVVRAILREAGIKLGTPSRTAFADRVRERASGDVLVMPLVEPLLTILTTMLQELARLTKQVLDIVRPEPICRRLMSVPGVGPITALAFRATIDRPDRFRRSRNVGAHLGLTPERYQSGETDIQGRVSRCGDELARTALYEAAHTLLVRSCKWSSLRAWGMQIAKRRGMARARVAVARKLAVILHRMWRDQTEFRFGKEPSATVSAAA

SEQ ID NO: 147959 - protein, 343 aa, unidentified
MKITTVGLDLAKEVFHVVCCNQAGKLVKKKKLKRAQLLAYFAQLPPCLVGMEACASAHYWARSLRALGHQVKLLPPQHVKPYIRGQKNDYNDAAGIAEAVTRPGMLAVEIKTIEQQDIQALHRLRNGRVKERTALCNQLRGLLGEYGIIIPRGVGSLRKQLPDILACADNGLSDLFRPLLAEAYQQLDELDTRIDYYTKAIERESKQDDRCQRLQTLPGFGPIISSVFASHVGNGRAYHRGRDVSASIGLVPRQHSSGDKQVLLGITKRGDKYLRSLLIHGARTVVMHAEKKDDHLSRWINRIREKRGYNKATVALANKLARMGWAVLRNNTVYQPAEARLSN

SEQ ID NO: 147960 - protein, 346 aa, unidentified
MIIIGCDFHPSWQQVCWLDIETGELVQQTVLHVPGEVEKFYRQFAAPALIGMESTGNCQWFVELLERLGHVVWIGDAAKIRASDVRQQKHDRRDAELLWRLLHEDRFPRIWTPSSEQRDARQLLIHRHKLVRVRAQVKNELQHLAMNRGVQKKRRLWSAAGKQALRELPLATWASRRREDLLKLLSMLDGQIASLDLAVKAAAERDEKARLLMTQPGVGPVTSLAFVLTMGDISRFPRGKQVASYLGLIPREYSSGGHQRFGPISKQGNRFMRMLLVEAAQVAVRCDPQMRSEYLHRCHRKPKGVAKVAAARKLAIRLYWMLRTNRGYPEIVRIESGPRVPLVSAS

SEQ ID NO: 147961 - protein, 370 aa, unidentified
MWLERGESTIDPNQECPSRFTVNEKGIVMTMIGIDPHKATHTAVAVDDDENVVDELTLEASSSQAERLTGWAEGFGNREWAVESANGLGYLIGQQLVACGETVFDVPPVLASRVRLLGSGKSQKNDPNDARSIAIAALRSDRLTTVQPDDHVVVLRLLVKRHRDMARLRNKHCSRLHALLLELEAGGIGVKISVTNASGLLDSITTGDEATRYRILIAREVVDDIARLDATLRASKKRVATAVAASGTSLTNIVGVGPIGAATIIGYTKDVTRFPTRGHYATYNATAPIEVSSAGNTRHRLNLRGNRILNHAIHIAAVTQLRHDTNGRIYYDKKIAEGKTPKEAIRALKRRISDAVYKSLIADTRRTATH

SEQ ID NO: 147962 - protein, 353 aa, unidentified
MGDQSIQSEVILGVDTHLDTHVGAVISDTGKLLGTLAVPTDAAGYLKLLTWANSLGRLRRAGVEGTGTYGAGLARVLHDHEIDVLEVNRPDRANRRLQGKSDPTDAEGAARAVLSGSAAAIPKAQSGAAEAMRAVSVARRSAVKAKTQAINQVRALLVNAPQDIRERLWKGKPSECIDGCARLRSLGTTPLLQTLAATLRMLAKRWLMLAEELKKLDAMLERLTSQHAKRLREQFGVGPQTAAVLIAVAGDNPERLRNEAALAALCGVSPLQASSGKTTRHRLNRGGDRSANNALWTIAMVRMRSDPRTRAYVERRTAEGMSNKEIHRCLKRYIVRALYPLILADLADSARFT

SEQ ID NO: 147963 - protein, 407 aa, unidentified
MEVLYPRCAGLDVHAGSVTACARIATGAQVTYEHRTVPTTTRGLLDLAEWLTGHGCTHGAMEATGVYWKPVWHVLEEHFTLVLANPMHIRNVPGRKSDINDATWIADLLAHGLIRSSFVPPGPIQELRDLTRTRRQLVHEVARHVLRIQKTLEDANLKLTQVMSDIVGVSGRAILNALIAGETDPARLADLTRGRLKATRADLLDALHGRITDHHRFMIKLHLSQVDALESAVAAIEARIGEALGPFRAAVSLLTTMPGLSETTARVLVAEIGTDMSRFPSVGHLISWAGFCPRLDESAGKRRSTRTRQSAPWLKPTLVNAAWAATRKKDSYLRAQFLRIKSRRGAKKAILAVASSMLTAAYFMLRDGVEYHDLGHQYFAQRDKDQLAKRLLQRLRDLGVAVEVKAA

SEQ ID NO: 147964 - protein, 350 aa, unidentified
MIIIGCDYHPGFQQIAYVDTETGELQERALQHREEAEKFYRELAAQGLKVCVGMEASGHARWFERLLAELNFELWIGDAAEIRSKRVRKQKTDRQDAQLILKLILKDDFPQIWVPSWENRDLRQLLWHRHRMVQARTRLMNQLQAVALNEGLRCKKRLWREAGRQQLEAFRLAPWASRRRQDLLELLDRLNPTIAELTQAIEREVEKCPEARRLQTHPGVGPLTALAFVLIIGKADRFRCGKQIASYLGLVPLEDSSGSRRRLGHITKQGNTLLRFLLVEAAQVTVRSDPGWRSKYHHLMMRRGRKIAKVAMARRLAVRMYWMMRKGWNYEQLKKFGSHAGQLVPGDGVK

SEQ ID NO: 147965 - protein, 357 aa, unidentified
MTTAKTTTTADTILAIDLGKYKSVACAYDRATAQARFDTIPTGKDELRKLLARHRPAVVVIEACTLAGWVHDLCAEEGLTCKVANTASEAWKFKHTKRKTDKDDALRLAQLEALGQLPTVPVPPQLTRQWRALIAYRQGLVGRRVAAQNRIRAILLGQGLPAPRGHRAWTETGLRGIAEHARPLPACGPDELWRGLLDLALTEYRQVQKLLAPVEAKLDERAQADPAVRLLETIPGVGPRTAEAVAAHLHDPGRFASGKQVSAYAGLVPRQYQSGECDHRGRITKRGPALLRKLLVECAWAMLRYNAGARAVYARLSRGKARKKQAIVALARKLLVRCWAMLRDRVPWRDDPPAVPA

SEQ ID NO: 147966 - protein, 347 aa, unidentified
MSKHHVSGGDVAGLLACFSELQRKAVARMARSFPFIVVQEAGLDGFWIHRVLEAEGIESHVVDAASIAVPRRRRRAKTDRIDGETLVRTLMAYKRGEPRVCSMVVPPSPAEEDRRRLCREYKELVAERVRHVNRIKGLLFAQGIRDYEPLKRDRRACLDRLRTGDGRPLLAHLKAQLIRELDRLELLLDQIKTVEAERKAVLTSACDPHQVATPPALLMALKGIGPDFAGVLWTEGLSRHFANRRQLAAYAGLAATPWQSGSVAHEQGVSKAGNPRLRTTLLQLAWLWLRHQPRSALALWFHAHVGQDCRPGARKRGIVALARKLLVALWKYVTAGEVIEGAVMKAA

SEQ ID NO: 147967 - protein, 328 aa, unidentified
MAFIGIDVSKNKLDVLWLRQVQPQKVKTRVFPNHPSSLGEVGQWLSRQTGEAPESLHVVMEATSIYHEHLAYALHAAGIRVYVANPARVKEFARSEGVLNKTDKHDALVLALYVREKHSRLTEWQPEANEIRQLRALLARLEALETDRQRELNRQEKAQATDTSSRVLASIADMIRALEDEISKLKQDIDNHIGGHPRLKHDRKLLQSIPGIAKVCSLALLAMINSRDFQQARECAAFAGLVPVQSESGSSLRGRSRISKAGGSRIRKKLYMAAVTACRCNPDVHALQQRMLARGKSKMAVLVAAMRKLIHIAFGVIKHQQEYVPQAI

SEQ ID NO: 147968 - protein, 318 aa, unidentified
MPQEMRSVGLDVAKAKVDACIHSLGLRLSAASTPEGEAELVAWLRANRVGRVVMEASGGYERSWAEALRAAGLTVRVVDPKRIRHFAKAAGRLAKNDPIDAETIARFAEAFPDDSVQPHDPAREELARLVQAREALKDVQERIKQQREHQPPAIVVEALAAVAKTLRAEMRRLEASIASRIKANPAFARRGELIDSFPGLGAQSVAGFVAWLPELGRISNEATAALLGAAPYDDDSGQRKGVRHIKGGRRKLRNLLYMAVVGAATQHNPVLKAYYQRLLAKGKEPKVAIIACMRKMIIILNTMLARDEPWNPQAHAAA

SEQ ID NO: 147969 - protein, 381 aa, unidentified
MRQVCGLDVHKDSVFACIVNEKGVVFQEKFGVLTPELEQLAAALQEHDVDEVCMESTSVYWMPVWRVLERYVMDLKLVNPYFIKQLPGKKSDVKDAEWIATCLLKDLIRGSYVPADIIQQLRQYDRRISDLNVECVRKLGKLDAALQRCNIRISNYVATTDGKSYKEVVRLISEGVRDPAELLKVIHGRITNRVGKNVIIASLTGVISDTDIDVIRQLREEVDLAQRHKDECQSKMDAICQQYFPEQLKKLQTIPGVKGRSATAIIAEVGSDVSSFQDAAHLVSWCGLKPRNEESAGKIKARSITHGNRYLRKTLIECSWGASKTQGCYLNKFSYYQTVVRRKNKMKVQVAIARKILTAVWYVLHDNVAYRDYTPDIAPAV

SEQ ID NO: 147970 - protein, 398 aa, unidentified
MDLPVYYELKTNNGNRDYRIQIGGHYMNYNTVYVGMDVHKESFTLCSCKYEDEKASHYQRTPASYKNVLRYLAFLRTIYGEDTRFVCGYEAGCLGYSLYHQLENFNVECVILAPTTMLEQRSKRRIKTDKRDAEIIARSLAQHNYSPVHIPTETDNQTKEFIRMRDDHKAELKKIKQQILSFCLRQGYQYDGSGNWTAKHVKWLRSLKPAGLYKEILDEYLLTYTILTDKLNRLDQRIEELASKEEYKESVSKLTCFLGIKTHTALSVIVEVGDFQRFVSARKFAGYLGLVPGQHSSGDDRNGLGITKAGNTHVRRLLVESAQSYTRGKIGYKSRVLRSRQAGNSPQVINYADRANERLRRRYYKMVLKDGKKYNIAKTAIARELACFIWGMMTDNIY

SEQ ID NO: 147971 - protein, 442 aa, unidentified
MEILYPYVGAVDVHKRQVTVTARTPHPGDGARWETTRTFRTFYGELLAMARWLVVERGVTHVAMESTGPYWWPVHSALREVGGPGLVIEVVNAAHVKAVPGRKTDVRDAQWLAQLMEVGLLRGSFLPPEEVRRLRDFTRYQTKLTEERSREKQRLLKVLEAAGIKLDNVASDTFGVSGRSMLEALVAGERDPVVLAGLARGVLRTKTSDLRLALAGRFTAHHGHLVALHLARIDHLDQMLTQVKQTIGRVGPDPTGGLAGTFATQIDLLMSIPGIGERAAIAVISEIGVDMARFPTAKHLAAWAGLCPGNHESAGKRRSGRRRKGSAHVCSILVEAAFAASRTRSRIGARYHRLHRRFGGRANPGAARKAAFAVAHTLIKVIWSVLASGQPYTDLGADFYTHRVDPQAHTRKLIAQLEALSGKRIVFCDPADDPGGGQHHAA

SEQ ID NO: 147972 - protein, 374 aa, unidentified
MEQCTAFVGLDVHKDSISVAMMSTEGVAVELGQIENTPTAIRKLVRRLADKHSRLSFAYEAGPCGYGLYRQLKDMGHDCLVAAPSLIPKRPGDRIKTDRRDAMTLARLLRMGELTAVWVPDPHHEAVRDLVRCRDDVKQAERRCRQRILAFLLRQGRHYGKNNWTQEHRQWLNSQQFDHQEHQTVFTHYLHAIIESEERIGQLEREMGEALGSWSLAPLVRGWMAMRGIKLVAAMTLASELGDVSRFARPEGLMSFVGLVPSEHTSGQSRRQGGITKSGNRHVRRVIIESAWAYRHKPCWSSALRARAAGASEAVRVIAWKAQKRLHKRYHRLTTLCKAAQVAVTAVGREELGFIWAIGCQVMREQQSPAQAGV

SEQ ID NO: 147973 - protein, 409 aa, unidentified
MLKIVYPNCCGIDVHKTFVVAVIAITDDQRITRYYRRRFSTFTKGLQDLRNWLELYSCFHVCMESTGKYWIPVFNVLEETCDVYLAHPKYVKAIKGKKNDKKDAKWIADLYKHDLVANSFIPPLKIRQLRDMFRYRMKLTSILTSEKNRYQNCLTWSNLQIASVVSDVFGKSAQEMIKSVLDNPQDKPNLAKFMHKNMKANAETLNDSMTGNLTVEQIQKLTIIKSHFDAVTFCQNNLDQMIQELGKEYEKQRQLVQTVPGLSNPLTALRIISEIGIDMTKFPTAGHLCSWAGLVPRNDESAGKKHSTRITKGGRYIKPLLVEVANAVVRSKNCPEHRNKYLQLKKRRGHKKAIIAIARRLLVALYHILLKSVAYDASLYHVPELKQTKRKLTIKEAVLFAQSQGFQII

SEQ ID NO: 147974 - protein, 349 aa, unidentified
MKVAQLEQDRLASVVRVGVDLAKSIYAIYAVDRRDRLVVKGMLKRREFEQFLQCLPPGCLVGMEACGGAHGWGRTCSQLGLKPVLMAPQAVKPYIGEQKNDLRDARGICEAAGRPTIRPVRVKSVAESDLQMVVRVREGRVAARTAKSNQLRGLVLEYGIVIPKGSAALKDRLPALLEDAENGLSAQARQVLDSLYREWLVVDGLVQEADQWLRNLERELPASRRLQSIPGIGPVIALALLAVAGDGRTFKNGRALAAWLGLTPKQHSSGGKQRLGQMTKQGNTYLRALLIHGARAAVNSPRAAPDRLLRWARALAERSGKNKAAVALANKLARIAWRLLVSGGTYQPA

SEQ ID NO: 147975 - protein, 346 aa, unidentified
MLYAGLDLSRKRLDFHLLDAEVATIDVGASPPDADGLRGLSQRLERHGAPVRAAIESMNGARFVHDRLELAGWQVEIADAQKVKGLAPLACKTDRIDAWVLAELARRDLVPAIWLPDPLVRAERERARWRLHLVRHRSSLKQRVHAVLLTHGKPCPVSDLFGVHGRQLLARLGLPQPWQGTIEASLRLIDELDREISDCERELRRLGADHRYVPLLCTVPGISWVLAYTIAAELGDISRFPTPRKPAGCTGLCPRVYQSGERDLRGPLAKRGPRYLRWALVEAATHACTAPIYRDRYQQTKARIGKQRGAKVAQVDLARRLAEAIWHMLTREQPFAPKGATDPLAA

SEQ ID NO: 147976 - protein, 387 aa, unidentified
MNVKARRTKKQVNVENWAINLLPKEELSKKIEVVEKELRSYTWRDLETNGKFAKNDKLSFITDDMLIVGCDIGSENHYIRAIDVRGRELSRGAFEFSNTSEGFENAKAWVLALAAKHDKKQIVLGLEPTGHYWFALAAWMISNGISVVQVNPYAVKQSKEIENNSQLKDDRKDPKLIANLVKDGNYGMPYLPEKVYADMRRLSMFRDQLTEDRIRNINRLHRVLKIYFPEYMDAFGKIDGAFTLEILKVSAIPSDITALGAEGMKNIWHNAKLRGRGYSRANEIVSYAEKSVGLTDGTDAGREAVKWYAEQILRLDEQLAEIESALHEKCREIPYAENILAINGVGENILAGILAEMGDISRFDDVKEIQKLSGMGLVACSSGKHKG

SEQ ID NO: 147977 - protein, 369 aa, unidentified
MKKHITFVGLDVHKNSINVALADGDRNGDVRYYGAIGGTLDDLDRVVKKLSSPSRELRFVYEAGPCGYDIFRSLTDKGYSCVVASPSHIGKKPADRIKTDRRDATMLARLHRAGELTYVFVPRAEDEAMRDLTRAREDALKAQRVARQQLGGFLLRLGFRYQGRTAWTPAHFRWLADQKMPTPSQQIVFQEYINAIDETTKRVGRHTRQIEILVPSWRLAPVVRALHSLRGVSLIVASTMIAEIGDLTRFENPGKLMAFLGLVPSEHTSGQKKRQGAITKCGNSHARRVLIEAGQAYSYQARISPLLLKRQEGVSKEVKDISWKCQVRLCARFRRLTATGKNRNTVVTAIARELAAFMWSIAKQVPISA

SEQ ID NO: 147978 - protein, 406 aa, unidentified
MNQLYVGIDVSSRNNVTYVMKPDGSKHSEFSVANNLPGAKELSFRVCQALDELQLDSVIFGMEATSIYGEHLARALREDGSLGKFNRKIFVINPKQVRKYREILPELPKNDFIDAYVIADSLRFGRILPREYAENNVYESLKTLTRTRLALIQKQADAKQKLANLLFQKCSSLAQDNVFGGISTTFLNLMECFDSVDDLANLSLPELTSFIAGSGRGRFKDPDAIAKAVQAAVHGSYRLPKVMNDSVNQALSLYVSLIQTLKVQIDALDTSIEKHFDIIPNELKTIPGIGKVYSAGIIAEIGDIGRFDSHASLAKYAGLVWSQHQSGDYEAQSTHLIKSGNRYLRYYLLEAANSVRRCDSEFKRYYDLKYKEVNRGQHKRALALTARKLVRLIFRLLKDNRLYSAR

SEQ ID NO: 147979 - protein, 428 aa, unidentified
MNYNTQNAKIASITEKTLIVGIDVGSETHYARAFDWRNYEYTKKPLEFSNTEAGFQTFKAWMEDMAEKHGKTAVIPGMEPTGHYWFALGKFLQDNGMKPVHVNPHHVKKSKELDDNNPNKNDRKDPKTIAALVNEGRFSYPYIPTGIYAEIRSLSNLRFQTQEELTRIKNRLARWFAIYFPEYKDVYGDLKAVSGRMVLKEAPLPEDIRKLGVEGVNRIWRDAKLRGAGMKRAKTLVTAAEHSVGSKEAPEAARMELKNLLDDMDVYTARQEGLLRNIEEKLKEIPYIDNLLAIKGIGMVTVSGFIAEVGDIGRFDNPKQLQKLAGYAIVANDSGKHNGESRISYRGRKRLRYVLYEAAISLVGKNAEFREIHEYYRTRKENPLKKMQSVVAVACKILRIFYAILTKGVEYDPKKLLGDIKRPQVQAA

SEQ ID NO: 147980 - protein, 424 aa, unidentified
MNCTQNERINQVSEQTLVIGVDIASELNYARAFNWRGIEQGKVFKFFNNLEGFQAFNEWAHQVMSDNKLTNLIVAAEPTGHYWFGLADYLKDEKLKLVLVNPFHVNRAKELDDNHPSKTDAKDPKTIAKLVIEGRYMEPYIPEGVYADLRIMYNCRQKVTKAMISLENQLKRWFKIYFPEYLSVFGNLSGQGSMAVLEKAVLPEDIISLGIDGINKLWRERKLRAVGMKRAESLYEAAVKSIGRREGSVGGRAEFRMLWEDYCHKMEQMEKLNIELESLLHKVPQAEEVLKMKGIGVVSVAGFFAEVGDLRRFESPKQIQKLAGLAIRENSSGKHKGQTTISKRGRARLRAVLFNAAIALVGRNGAFKSIHEYYIGRKANPLKKKQSIVAVSCKLIRIIYAICRHKEAYDEAKMLRDIRREQLA

SEQ ID NO: 147981 - protein, 380 aa, unidentified
MKKELYLGLDVHKDCIITAVAEEGRKGEVRETGALSNDLHSVEKWIGRLRKTHGKEVILRACYEAGPCGFGLARRLKQLGVECEVVAPSLTPKRSGERVKTDRRDARKLARLLRAGELTAVYIPEATDEAMRDLCRARSDAVDDRRRSRHRLKGFLLRHGYRYQGKSSWSAAHERYLRELVLPHPAMKVILEEYLQGIAAADERIGRCEAAMRDLLEQWRLAPAVRALMAMKGFQSVAAMILVSELGEVHRFGHPRQVMAYLGLVPTENSSSDRRRQGHITKCGNAHARWLLVECAQHYASPPKVSKELSRCQQGQSHEVRSISWRAQNRLHHRYTRLLARRLQRNKAMVAVARELCGFIWELLRTQPCYQTQSQIGLKS

SEQ ID NO: 147982 - protein, 340 aa, unidentified
MQTMTTIGLDIAKSVFQVDAGGQAIVRRQLKRRYVLTFFQKLSPCLVGIEACGSAHHWSRELQALGHTVRLMPPAYVKPYVKRQKNDATDAEAICEAVTRVNMRFVPTKTAEQQSGLVLHRARHLFVRQQTSVINAIRAHLAEFGIVAPVGRHGVEELLNVVADSNDKRVPEIARACLSAFGAQLRMIKEQILEFDRLIRVWHRSNELSMRLDEAPGVGPVLATALVAAVADPKSFRSGRNFSAWIGLVPKQHSSGGKNRLGNISKQGDRYLRGLFVAGALAVIRYAKIHGTTHRPWLTALLARRPTKVAAIALANKIARMVWAMMARGERYKEPFALAR

SEQ ID NO: 147983 - protein, 351 aa, unidentified
MLLIGVDYHPSFQQIAFLNQDSGECGELRLNHGDGEAERFYRELQQRGVRVRVGMEATGFARWFERLLAELGFELWIGDPAEIKAKRVKKQKTDRKDADLLLKLMREDRFPKIWIPTPENRDLRQLLWHRHRLVQMRTRIVNQLWALAMNEGQHRKKKLWSEQGRAELEKLSLAPWANRRRRELLELLDRLNPTIEELTAAAEQEAKKRPDVLRLMTHPGVGPLTALAYVLIIGTPSRFARGKQIGTYAGMIPSEESSGDKQRLGHISKQGNALLRFLLVEAAQAAARVNPEWRRRYIHLAMRRHKSIAKVAMGRRLAVRLYWMWRNGCPYSPSLEFGSYAGQPGIVHGVR

SEQ ID NO: 147984 - protein, 415 aa, unidentified
MNRLIERCAMLDIHKSQITACVRVPDGQGGRRQEICEFRTTTAGLLTLADWLHSYAVTVVGMESTGIYWRAVFYLLEDEFECRLYNARHLRHVPGRKSDVQDAEWGCQLIEHGLVRESFVPPRPQRELRDLVRYRKAKIQERGREVQRVEKTLQDAGIKLSSVASEVLGKSARLMLDALISGTHDPDVLADLAKGALRKKIPALREALDGRFSGHHALLIGQMLGQIDFLDETIATLSERIEELTRPFSREIELLDTIPGVDKRAAEMLLAEIGPDMSRFPTEAHLASWGGMCPGQRESGGKKHSAATRKGSKWLRGTLTECSKAVVRTKGTYLSARYHRIKSRRGHAKATVATGHKILTAAYHVLNQGVAYHELGEDFFYRRDTEHTERYQRRLIHQLERLGHKVTLEPLQEAA

SEQ ID NO: 147985 - protein, 402 aa, unidentified
MNAVGIDVSKGKSMVAIMRPFGEIVSTPFEIKHTSSDINSLVKLIKSIEGESRIVMEHTGRYYEVLAHQLSEANLFVSAINPKLIKDFDNDSLRKVKTDKADSVKIARYALDKWQNLKQYSVMDELRNQLKTMNRQFGFYMKHKTAMKNNLIGILDQTYPGVNTYFDSPARSDGSQKWVDFASTYWHVDCVRKMSINAFIDHYENWCKRKKYNFSKSKAEEIYGKAKELVPVLPKDDITKLIIKQAVNQLNSASTTVESLRTLMNETASKLPEYPIVMAMKGVGASLGPQLMAEIGDVSRFTHKGAITAFAGVDPGVNESGSYEQKSVPTSKRGSSDLRKTLFQVMDVLIKTHPQDDPVYQFLDKKRAQKKPYYVYMTAGANKFLRIYYGRVKEYLASLPES

SEQ ID NO: 147986 - protein, 557 aa, unidentified
MENVTQASCLHAQQARRLRYIHGEPFQTRSKSSIAPVTYSCHVGYPHGRGGTLCGVLRRDGRVDNQPAADAESVDMSKPGLDASGVKTIVTSPWRTALSRSGAARVPFSPYQMQRCERPSISQDEDGPRVQTTTTEVSMKQTNAKKQPYWVGIDWGKAQHTVAVADDRRAVVEQFTAPATLEGLARLHETLQALGPVEGVAIEATHNPVLYSLVQKGYTVYPINPKLSKNWREGSSVAGGKSDPRDGRVLATELARRHEELRPHRDADPATAELMGLCEKQRALIDQRTALVQRLREAVSVYYPAALEFFSDLTAPTAWAFLKRFPNPQQLAGARQDTLIRFLRAHQIGLKPVWLERIARRHEAAAWPTPPAALSEEGLALACIAQLQALQAHIDRFSRLIAERTKELPETPLVGSLPGAGERLTPELTALVRSGDVPASGVAGLRCTAGVAPVEDQSGKHRGTRMRRRCNKHARNTLHLFAWCSTRCCQWAKAFYDLCKERGDTHATALRKLADKWLRILNAILRTGQPYDEARHLENLRAARSPVYARLCEQHRG

SEQ ID NO: 147987 - protein, 410 aa, unidentified
MKTSGLDVHKDSIFCAIYDGKSYGAVQEFDTFTNSIKQMGFYLHSEGVTRIAMESTGIYWIAVWNILEEMGFELILVNPFLIKQMPGRKSDVKDAQWIAKLLHKDLLRGSFVPDATVQKLRTYSRKYMKLQQQITRSLLKMDNILIMSGIRISSCVSNIGNKSVMKIIDSLIRGETDPCTLSAQVYGNRENKRNGKLHEALTGNMQEQHRESLAMEKELHDLLVIQSERCLAKMEEICNEEFSEELALLRTLPGISLISAMIIIAETGANTCTERSRSMKAFENSGKITGWAGLRPRNDESAGKYKSTVITKGNKYLKSILVQTAWAASRTKRSFFMEKFNRLAMRKSRKKALIAIARKMLVIIWNVLNEKSGYNPTLLPVYNPEKLTSKVRYHQREIERIEQLISRKTA

SEQ ID NO: 147988 - protein, 327 aa, unidentified
MEKQQQNYAGIDIGLEWIDAAWYENEKLQHAKLPNTLAGFKQLVKQCGSKSQYVMESTGPYYMGLALYLHLHEIKVSVVNALVIKRFIQMQLEKSKSDKKDAAWICRYGISQQPELWQAPKEYIIQAKQMQTALFQLTKQRTALINSKKSLAQMPVVSKESKGSYERMIKLVNKEIKLLERSLEELLKQHEGKKMKALETIPGIGKRTISMMIIATDGFRKVDNYRQLSSWAGLSPKEYSSGKSIRGRVRISKMGGKELRNLLYMCSLTAIKCNKACKELYNRLKAKGKNGKLALAAVGNKLIKQCVAIAKSELPYDEKYLSEKACV

SEQ ID NO: 147989 - protein, 369 aa, unidentified
MKKIVKYIGLDVHKNSIVISIAKNGRDKDVNFYGAINHDMNQLHKFLRKQISQGAELKCVYEAGPCGYNIYRSLIDKGIDCIVVAPSLIPKKSGDKIKTDRRDSQNLARLHRSGDLTAVYVPKLEDEALRDLVRARDDCVNALRRAKQQLGAFLLRHNICYSGKSKWSKAYFNWLADIAMPHQAQQITLQEYIDIIQDGKNRIERISQQMRQLSDQSQLSHLNKSLQSLRGVSDIVSTVVVSELGDLTRFDSPVKLMAYLGLVPSAYDSGDKKKRGKITKTGNGHVRRALIEASQAYRLPARKSRAIAKRNKGLPKEVCKIAWQAQVRLCGRYKRLVFRGKNANLVKTAIARELAGFMWAIAHAVPKVA

SEQ ID NO: 147990 - protein, 343 aa, unidentified
MKSYVGLDVSLKQTSICVVDESGSVVREGVVISDPEAIAAFVRLNAPGAVRIGLETGPTTTWLWTELKRLDLPVICIDARHAKAVLKMQINKSDRNDAAGIARIMQTGWFKEVRVKDIDSHLVKALLVSRALLVKIKRDLENQIRGLLKNLGLVIGRGKFNVFAVRTEELIEDRPELVAVIRPLLAARKAIEEQVHNLDRRVLKLARHDMQVRRFMTVPGVGPVTALCFTATIDDPTRFKRSRSVGAYVGLTTRRYASGEVDWSGRISKCGDAMLRMYLFEAAGVLLTRVPKWSALKAWGMRLAKRNGLRKAKVAVARKLAVILHRMWIDGTEFNWSKEEASA

SEQ ID NO: 147991 - protein, 428 aa, unidentified
MTKKVHNRLERFLQLKRGIRGSKGHLLVGIDVAKRKHHAFFGTATGKTLLRRLIFDNSREGFEGLLSEVKRQKEAHGLKNVVFGLEPTANYHKPLGEYLIKGGEEVVLVGTVAVKHNRRLMDGRWDKHDTKDAANVADLISQGKCLYYEHPDLRLRELRNLLSLKRRLRRQEHGYRVRIRNQLVAKYFPELDVHYGESESVGLAIVRWCLSPGEIAGLKVEEFIGRVTGRRVGIKQRRRLEAIWERAKESIGCEVGQRVAFEAKVMVEGLRQIREVIKATEDRIEEICKGFKEYPYLLSLPGFGPDISSKVLGAIGNPFRFRAGKQVVKMAGYDLSADRSGENSDRATPVISKQGKADLRYALYQAAQIASSKNRDFRIYYGNKLRGREREKGIHTKIKVKLAAKLLVVAWTLMKKKERFDPSYLNLE

SEQ ID NO: 147992 - protein, 351 aa, unidentified
MMIIGVDYHPGFQEIAFLVEETGECGERSLMHSNGETENFYRELKARGISVRVGMETTGYSRWFERLLAELGFEVWIGDAAEIKTRRAKKKKTDREDARLLLKLLLEDRFPRIWVPSPENRDLRQLLWYRHRLVQMRTRIMNQLQALAMNENRCWKGKLWSARGRAELEQLPLAFWASHRRQGLLELLDQMNPAIDELTAAVEKEAKKRPETLRLMTHPGVGPLTALAFVLIIGTPERFGCAKQICSYVGLIPSEDSSGGRQRLGHISKQGSSLLRYLLVDAAQAAVRCNADWRRRYRHLAMRRQRNIAKVAMGRRLGARLYWMWRNRCEYSSSLEFGSHAGKLDRGNGGQ

SEQ ID NO: 147993 - protein, 339 aa, unidentified
MIHVGVDLHQRFCYMTALDSRGRQLNAQAVANETVALRAYFKQFRKPVRAAVEACSFWPAFRAAVGDQVDLQMVHPTRVKAIAAAKLKNDRIDSATLAHLLRCDLLPQAWMADEPTRDLRQQVRLRATLVRQRTRLKNQVHAILHQHGLKAGGGTDLFGKAGRAWLKKVQVGRKAQDALSTYLQLIDQFGDHIGKQDREVKTFVNRDQRAQWLMTIPGIGQYSAMLLLAEIGNVERFAHSRALCNYAGLVPWVRESANKRRSGGITRVGSPWLRWIMVEAAQVAVRTSPGVKSYFERLRRRKHRNVAIVAVARKLLVAVWALLQHGECFDEARFVNAAV

SEQ ID NO: 147994 - protein, 412 aa, unidentified
MNIIHDICCGIDVHAKTVVVCLIKRGKKQIRTYSTMTDDLLALSEWLVSEGCKHVAIESTGVYWKPVFNILEGSLEVVLVNARHVKAVPGRKTDVRDCEWLADLLRHGLLRASFIPPLPTRELRELTRHRYTLVSDQTAVTNRIIKLAESANIKLAQVASNALGVSGRAMLRALSRGEQDTTKMAEMARGALREKQGQLRRALKGNLTRSQRFVLKELLDQLEQLEAAVARVSEEIREQIEVNSDPFVKEAVRLLQTIPGVGEQVAEVIVSEIGTDMTRFPSDKHLSSWAGMCPGNNESAGKRKSGKTTKGSNYLRAALTQAGWAASHTKNTYLAAQHKKLARRIGKKKSLVAVGHSILVIAYYILKNQASYHELGGDYFDRQNVDLQRARLIRKLESLGLKVTVEVVPEAA

SEQ ID NO: 147995 - protein, 379 aa, unidentified
MSRLAKVKSFYNINLTSDDEVFVGIDVHKKSYHVAFALNGVPAIDFNMVAKPKKLNEKLQPMAQSIKQIVYETGPTGYGLVRNLIKNKFPASVVATSRIPRPATADDKTDKLDSIKLAQYAAKGLLHPIAIPTLRQEADRQLYRMRHRQAHQFAKVKVQIKSFLLMHGIDEPEELKNWTLAGVQYLRDMRLLDTLRLSLDELLNDYDYFNSRVKQLSKTIAASLDKGVLGRRMGLLKTHPGVGAVVSCQFVTELFHYKDFSSAKQLYKYLGLCPRVSQSGERSSSGSINKAANGRLRNNLIQAAWSWVRTDIEASKCFWRIYKNCGGLKQKAIVAMARKMSGHLWAMLMNDQPYDKEKAKSRLNKEKQKKKESPAAMLL

SEQ ID NO: 147996 - protein, 346 aa, unidentified
MLFVGDDWAEDHHDVEIVDDAGRRLAARRFPEGLFGLTGLHALIGEHLPEPGPGPGPDSEAQVKVAIETDRGPWVAALVAAGYEVFAINPMQVARYRQRHSTSGAKSDAADAHLLAEILRLDREHHRPIAGDTPQAEAIKLVARAHQTMIWDRSRAVLRLRAALRDFFPAALEVFDDLDAPDVLELLARAPDPDRAARLSKAKITAALTRARRKNVEARARHTQQIFRAPQLRQPPAVQTAYAVIIANTVRLISQLNSQITELGEVVGEHFGRHRDAEVYLSQPGLGSILAARVLAEFGDDPHRFADSKARKNYAGTSPITRASGTRRIVLARYARNRRLGDAVHQ

SEQ ID NO: 147997 - protein, 437 aa, unidentified
MACRYAGIDWASEKHDVLVADEAGVEVVAATFAHDEKGLTALCRTLVRLEVVLVAIERPDGLLVERLLDAGLRVLALHPNKVAAARDRFRVSGGKSDRFDAFVLCELARTDHHRFRVLEPDSDRTKAIRALTRAREDLVAARTGIVNQLRAELERFWPGPLTLFSHMDAEILLAFLERYPSPADAHGLGVARMQAFLAHERYSGGQHPTALMAKLRSAPRARIGELELAARRRLVLSFVAMVRTLNAQIKDLEREIRAHVRAHPDGCIFLSLFKSPASVITAAELLAEIGDCRERYPDRDALAADAGQAAVAHESGKWKTAGFRRACNKRLRVAFCRLADSSRHWHPWAQTLYAQARQRGHEHPRAIRTLGRAWCRVVWQCWRNHTPYDPALHRALQRHITVTIPTATGPVVDQAATKRLAGPGLWRPDLATAAPTT

SEQ ID NO: 147998 - protein, 339 aa, unidentified
MKLYTGFDLHSSSSYLGIIDEDGKRIWKKKLRNDPILISKTLRRFKKDIDGIVVESTYNWYWAVDLMIEEGYHVHLANPSRIQQYSGLKHADDEHDAFWLAEMLRLKILPEGYIYPKDQRPLRDLLRKRGHLVRLRTSLITSLQNILARNVGSKMNTNSMKALTEDRVTPLLAGNDDLSLAGKVSKDAIDSLSRQIIAIEKAVEKKLPLKKPFDLLMSMPGVGKILAMTIIMETGSLDRFPKVGNYVSYCRKVPAARFSNEKKKGSGNRKNGNKYLSWAYAEAAELARRFDPEARAYYDRKRRRTNAPIAYNALANKLSRAAYYIMRDGVLFMPERMFT

SEQ ID NO: 147999 - protein, 403 aa, unidentified
MAKQTTKSIATNKSLKAVKVKSSRAKAADATASTTASMPAPSAPPAPPAPLPELIVLGIDVHLRQHVVCRKTDAATVQPAQRMKPQDLVAWVVKQKSHAKRIVCCYEAGPFGYTLQRQLAAQGITCHVVRPQDWDRHGERVKTDSRDARELAEALARYEAGNKHALAIVRVPEVEQEHRRLITRQRESFSREVRRLGAMGRSHGMSQGHEVSGRWWRKGAWSALSKRLPQHLRDLLEPLVQVLVKLEELIAQRAAQIEAKAMAATSRPKGLGALTERIIENEVLDWTRFNNRRQVSSYTGLCPSEHSSGGKRRQGGINKHGNPRLRHALVESVWRFIRMQPGWKRLLRVAERLRSGDGTRPANKKKIAVALARELAVDLWRLNTGRSTLEALGLIAAKTATAA

SEQ ID NO: 148000 - protein, 401 aa, unidentified
MQDTQQHGTVDVFVGVDVGKGQHHAVALDRNGKRLYNKALPNDEAKLRALIAELKTHGRLLFVVDQPSTIGALPVAVARDEGVLVAYLPGLAMRRIADLHAGEAKTDARDAAIIAEAARLMPHTLRSLRLADEQLAELTMLCGFDDDLADQVTQTSNRIRGLLTQIHPALERVLGPRLDHPAVLDLLERYPSPAALAATSEKTLANRLTKLAPRMGKGLAAEIVQALSEQAVTVPGTQAATIVMPRLAQQLAALRKQRDEVAAEVERLVLAHPLWPVLTSMPGVGVRTAARLLTEVAHKAFASAAHLAAYAGLAPVTRRSGSSIRGEHPSRRGNKVLKRALFLSAFAALRDPVSRAYYTRKIQQGKRHNQALIALARRRCDVLFAMLRDGTIYQPKSAPNA

SEQ ID NO: 148001 - protein, 337 aa, unidentified
MGLYCGIDLHSNNHVVTVIDEEDRRLYERRLPNDLAITKAALEPFRAQLVAVAVESTFNWYWLVDGLMEAGYQVRLVHTGAVVQYDGLKHTDDEHDAFWLAHLMRLGILPTGYIYPKSGRGLRDLARQRMRLVQHRTSHITSVQSQVWRSTAVRLRSETIKGKGKQPWPELLDPDVALSVETGRAAIDALSAQIERLEELLLKRVGLLPQFQLLKTVTGIGPILALTIALEVGDIKRFPGVGEFASYCRCVDSRRLSNTKKKGEANRKNGNSYLAWAFMEAAHFAIRNLPAAKRFYERKRRQRNALLAVKALAHKLARACFYILRDQVPFAPDRLFA

SEQ ID NO: 148002 - protein, 410 aa, unidentified
MEVLHQRCAGLDVHKKSVVAAVRLATENRLVTEVKTFATTTAGLLALSDWLVENGCTHAAMEATGIYWRPVWHVLSDGEIELILANAAHVKNVPGRKTDVSDAGWLAELLAHGLIRPSFVPDGQTQELRALLRTRKQFVRERTRHAQRIHKTLEDANIKIDAELSDILGRSGRAMLEAMIAGESDPVRLAALAHRNVKASQGELQQALRGRVTPHHRFLLKLHLGQVDHLDAAITTLDGQVEVNLAPFRTAVELVSTIPGVSTLSAEVIVSEIDLDMNRFPTVGHLISWAGLSPRNDQSAGKRRSTRLRKGAQWLKTTLVQCAWAAKNKKGSYLQAQFRRLLARRGPQKAICAVAASILTAAYHMLKDGTVYEDLGPDHFSRRSKTTHAQRLVRQLQRIGYAVDIKPMPA

SEQ ID NO: 148003 - protein, 416 aa, unidentified
MKKGQDTRGYERYPAFDIHREYLLVGAWNEEKEWVLTPRRVSIEKFLEWAKKNIRSGDIVVLETTTNVWTIYDIVAPLASRVLVANAAEVSEIANARVKTDKEDIKRLLKLLVGGIVPEVWVPPMYVRELRGFTSYRARLVKTSTMIRNRLQSLLHKHNLMLSEAGLLDQTWWEAQKNISPLEKLQIRQELTLLREVEKLKVAVDEELQRQSTSAMWGKQALQIMQLPGVGFVVAMTVLAAIGDISRFENASKLVGYAGLGAGVHDSGKTHKEKKITKKGRRELRWAMVEAAWRAVGMSPFWKAEYEKYLDRMRKSNQAIVVIARKLLIAIWHVLSKEETDIHATEEDLAYKMLLLSWSLSEEVRLGLTYKQFAKYALMKLGVETDITRFVRRNVPRRLAPREEVLARMTELGLNA

SEQ ID NO: 148004 - protein, 342 aa, unidentified
MTTIKYSVGVDIASSTFTASVGEIPWQVVLKPQMFENTEDGYQALLAWFAQHHLSVSETVVCMEATGVYSEGLAYFLYAKGYRVAVQSPLEVKRTFKPYGPKSDAVDSLQIAEYACRHMDKLSFWKPRSEILEQVKALLAVREQFVSQNTAHQNALKAIQRKVVRTPFAEQAYLQLIEQVKKQIKAIDTEVRRLIESDPTFKEMLLLLLSVPGVGLLLAAHFILLAQFSLEYKVLASFLGICPNEHSSGTSVFKHATSRHFGPSAIRKLLYLAACSVCTHRPHFGMYLARKTKEGKPARLVLNNVENKLVRIMCAVLQSKTAFIENYHSVQPLVFQKALTLS

SEQ ID NO: 148005 - protein, 349 aa, unidentified
MITIGVDFHKRTSSYTVLDDKGLMITQCKLENTPDNIKQFLNKWPQPKQLAMEATYNWGLYFDTTETYVDRFMLGHPAKMRAITESESKCDRHDAKAIAHLAMIGYLPKAYIPTKEARDLRSLVRLRSFFIRQRVAIRNKTQALLDRNIWPSERPPSFKNIYCKRGIKWMKELNLPVKERFILDELLKSFEQLNIQIQTVDSYVETTACDMPAVKCLRTVPGLRNSKIHLYTILFEIDDVQRFPRARDLIRYAGLIPSEHSSGEKQRTGHLIQRANHALRTALIESAFSAVLADKHLKAYYRQTKERNNSSAAIVACARKLGYAIYHVLKEQRAFRPFPPVAAPGPFAV

SEQ ID NO: 148006 - protein, 336 aa, unidentified
MNETTCVVGIDVAKRKLDIALLVNGKTKFNVFDNIPAGHALLQQWLAARGTPQEHTHICMEATGPYSEAVAIVLVEAGWRVSVVNPARIKGFAQGELARNKTDRADAALLARFCAAMCPSLWTPPSPAWRELHAWVDRLQALKDMHQQESNRLEAHEASGQLLLVKAVQAHLDWLGQQIDELERNINGHIDRHPDLKGDAELLHSIPGIGKTTVAKVLAYAGDVRRFANAKALAAFIGVTPRQRVSGSSVKGRTMMSRTGHADLRRALYMPGLVARRHNPVLRVFGDRLRITGLAPKAVVGAVMRKLAHLIYGVIKSGQPFDANFTRARLDFQDGI

SEQ ID NO: 148007 - protein, 462 aa, unidentified
MAGKHEAESSEGSRKQLQGLPVIRRNVAGIDLGSERHWVCAPTPDGSGREIASFGATTVELMRMAEWMKSRSVESVAMESTGVYWIPPHEVLEGQGLQVLLVDTRQLARVPGRDKKTDPTDCEWIQRLHSCGLLRGSFRPEEAVCMLRTLVRDRANLVAERGDWLRRMQKSLDQMNVRVHRAVSDIDGVTGMAILRAIAGGERDGQKLAKLRDPRCSKTEQEIAEQLSGHWREDHLFGLQQALKMYDAVQERIAAYEQEILRKLGEMERAEQRGQTAPPLKNANKAKMIKKRGQEPVRQALFRMSGVDITHIDAIAVETVEVVLSEYGPDLSRFPTEKQFVSHATLAPHVPTSGGKPIRKRRRNSASTRVAAALRMAALSLRHSQTALGAYYRKMAQRLGGDIAVFATARKLATLIYRLLRWGQPYVDEGATAYETRYCQQRIRRLAATAKELGYQLAPINA

SEQ ID NO: 148008 - protein, 345 aa, unidentified
MKITTVGIDLAKNLFQVHAVDERGKAVLRKQLRRGQVAVFFANLPPCVIGMEACASAHYWGRTLQGFGHTVRLMAPQFVKPYVKTNKNDVADAEAICEAVGRANMRFVPIKSVEQQAILSVHRVRQGFVKARTAQANQIRGLLGEFGLVIPQGIINVAKRVPEILEDASNELPVPIRHLIERLNQHLKELDRQVKEFEKEIIVWHRGSDLSRKLEKIPGIGPLAASALVASIADAHSFDNGRQVSAWLGLVPRQCSSGGKATLLGMSKRGDAYLRTLLIHGARSAILAAKNKVDNTNGWLTNLLTRRHPNIAAVALANKNVRTVWALLAHGREFRADYVPLRMAA

SEQ ID NO: 148009 - protein, 349 aa, unidentified
MIIVGCDYHPSFQQIAFVDTETGELKEQRLMHREGAEEFYRALTATGLPVRVGMEASGHARWFERLLAELQFELWMGDASEIRRKRGRKQKTDRQDAQHILHLLLKDDFPKIWVPSWENRDVRQLLWHRHRMVQARTRIMNQLQAVALNEGLRCKKRLWREHGRQQLEAFRLAPWASRRRRDLLELMDRLNPMIAELSQEIEKQATGSAHVQRLMTHPGVGALTALAFVLIIGEVERFHCGKQVASYIGLVPLEDSSGNRRRLGHITKQGSSMLRFLLVEAAQVTVRSDPQWRRQYFHLMMRRGRKTAKVAMARRLAIRLYWMWRRGWDYEQVSRFGSHAGQPGNRHGV

SEQ ID NO: 148010 - protein, 354 aa, unidentified
MVHVGIDLHQKTCFLHALDDQTGEICLDQDVPSERQALLDCLEPLRERGDLRLIIEACGFAGYWWDQLDPLGEVVAVHPKHVKEYKGNKRKNDRRDAAFLVALSQLNRLPRAYLGSTAERDLKDLLRYRVGLVRIQTRLRGRLRNVAQRYGTVLAASDVDSVKARRLWQEWPLRETHRLIVDQLLAVLAEIERKRAVVEEQILAAARPDRRVQLLDTLPGLDYFGALLAAVEIGDWQRFYSGDAVACFAGLVPRESASGGHIQRGKITKEGSPYLRWIMVQAALHADKSPRLKRLQERVAKRRGPMQARVAVARERLVIAWHMLRTDQPYEERAPRESGGRPASSGKPESPLTH

SEQ ID NO: 148011 - protein, 408 aa, unidentified
MEAIIERCAGLDVHQESVVACAICGSLDRRPTITVAAYGTTTAELLALVDWLEALEITHVAMESTGVYWKPVWNLLEGHGFTLILANAQRIKNVPGRKTDMKDAEWIARLLRSGLIESSFVPPTDVRDLRDLTRYRKKLRQDATSEKNRIHKVLQDANIKLSSYMSDLFGVSGRAILTSLIGGEVITETALELLVHGRLRSKLPSLVEALNGRLRRHHRDMIRFSWDHLCFLEQQIVTVEREIESHLQAYREKVDLLSTLPGVKPTAAAAILAEIGPDVKQFPSAGQLASWAGVSPGVYQSAGKVKRVRTLPGNAMLKATLCECAWAASMSRDTRLSACYWRLVKRMGKKKALIALAHTMLRIIYAMLRDNKSYEEFGPDFGTKKRLNHEDRMVKQLKALGYTVSKVA

SEQ ID NO: 148012 - protein, 402 aa, unidentified
MNAVGIDVSKGKSMVAIMRPFGEIVSAPFEIKHTASDIHSLVELINSVEGESRIVMEHTGRYYEVLAHQLSEANLFVSAINPKLIKDFDNDSLRKVKSDKADAVKIARYALDKWQNLKQYNVMDELRNQLKTMNRQFGFYMKHKTAMKNNLIGILDQTYPGVNTYFDSPARSDGSQKWVDFASTYWHVDCVRKMSLNAFIDHYQNWCKRKKYNFSQSKAEEIYGKAKELVPVLPKDAITKLIIKQAVDQLNSASTTVESLRTLMNETASKLPEYPVVMTMKGVGTSLGPQLMAEIGDVSRFTHKSAITAFAGVDPGVNESGSYEQKSVPTSKRGSSDLRKTLFQVMDVLIKTHPQDDPVYQFLDKKRAQGKPYYVYMTAGANKFLRIYYGRVKEYLSSLPES

SEQ ID NO: 148013 - protein, 363 aa, unidentified
MSEDIYFVGLDVHARKTAAAAVQLGSGEVRKAQLPGSSAAAIEWLQALPGQVRAVYEAGPTGFELARSAKAAGVELMVCAPGAIPRQPGDRIKTDARDALKLARLHAAGQLRAVVVPARELEALRDLVRAREDLRGDLMRARHRISKLLLRQGILWTGPGETWTERHLQWLSEVRFQQPLQEVLFGEYLAHHEVLLARRERLDRLIGEQSVQGPWAPLVARLRCLRGIETLTAVGLVCEIGDIGAFSHPKQLSSYLGLVPSEHSSGTKRRQGSITKVGSSHARRLLVEAAWNYRRAPSVSLTLKRRQQDQPPAAIETAWRAQIRLHRRWAHLDAACSKKRTTVAVAVARELACFVWEVAQQPD

SEQ ID NO: 148014 - protein, 403 aa, unidentified
MNAVGIDVSKGKSMVTILRPFGEIVSSPFEIKHTSSDILSLIKLIHSIEGESRIVMEHTGHYYEVLAQQFSAAGLFVSAVNPKLVKNFNNDSLRKVKSDKADSIKIARYALDKWQNLKPYSTVDELRTQLKAMNRQFHFYVKQKTAMKNNLINLIDQTYPNANTYFNSPPRSDGSQKWVDFVYTYWHVDCVRKMSLNSFVKHYQNWCKQKKYIFNKSKAEEIYTKATELVPVFPKNEITKRIIRQAIAQLNSTSATVETIRILMNETASKLPEYPIVMQFKGIGPSFGPQLMAEIGDITRFTHKGALTAFAGVDPGVNESGSYAQKSVPTSKRGSSNLRKTLFQVMDVLIKTMPQDDPVYQFMDRKRAQGKPYYVYMTAGANKFLRIYYGRVKEYLCILSESS

SEQ ID NO: 148015 - protein, 388 aa, unidentified
MNRIIKIGMDVHSKNYTLCAMEPTIGAKDRIFGEVQVAPDYKEVICFIESLKMKLGFCDDYSIECGYEAGCLGYTLYHQLTGAGVKCVILAPTTMLTQRGKRIKTDKRDARLIAQCLCYGGYHPVYIPTGEDDAVKEYLRMRDDHKLALKKLKQQINAFVLRHGQQYSGTKWTIKHVTWLKKLELDPMYRETLDEYLASCEEQEAKIERYDKRIEEIASEARYQENAKKLGCFLGIRTHTALSLIVETGDFKRFAKGNTYAAFLGLTPGEHSSSDNVNRLGISKAGNTHLRCLLIEAAKGICKGAIGHKSKELRARQSGQPAEIIAYADKANTRLRSRYYKLIRHGKKKNVAVAAVARELACFIWGMMTGNISIRPKGDTSGPAVSQG

SEQ ID NO: 148016 - protein, 343 aa, unidentified
MTRYIGVDLHTNSFTACFLEEGQPERIQTIDLQKGLEGFIETLQKTDELAIEATGNSAWFRDQVLPSISRVAVIAPWQFEVIRRSVKKTDKHDARAIAFFLSKDMVPEARLKETSHIQLSSLIATRDQMVKLRVSLLNKAHGLFNRHGIKIKKETLTSKKGFEREASGHEWDVLEQVELEVISGQLDSIKTGCKRLEQEIASFVKTLPGYDNIISIKGIGPLSAAVFLCTIGDIEDFAKAGNLAAYFGITPRVSQSNDSQRVGRITKRGNKIARTTLVQCALIAKRYSPYLHNFYEHIKSTRGAGKAIIATARKLLNTIFYTLKKNWVFENFPEFKLKSCNQS

SEQ ID NO: 148017 - protein, 360 aa, unidentified
MSDSISIGVDVHAGKNCVFALDRDTGEALEATLSGDPAELVRWIGENRLSGGTCCYEAGPTGFGLARALAAAGIRCVVAATSKLPRRSDRRKNDRVDAEWLARMHAAGSVRAVRVPTEREESLRHLSRLRGEVARDLRAARQRVASFLLLTGTRYELTKRRWTKTFRRWAAALEFAQPADTFVFRQKLAAVYRLEERLAEVEAEIARAVASSPELAERMARLECIRGIGRVTAFSLVCEVCDFRRFRNGSALASYIGLVPSESSTGSRTRRGGISKTGSSHLRRALVEAASAYSRPCRGASAPEDPRVPALVRARAAECSRRLRRRREHLVGRGLAANKVKVAVARELCEWIWWIAVMPA

SEQ ID NO: 148018 - protein, 419 aa, unidentified
MHNEVSENGVLSNFDPGSAVRVADLLKARLRMQLARSHIIKRRPLRSRLECLAQPLQKGTPFMTSNKKYIGMDVHKESISIAVMNSTGKFVMECVIETKASMLLQFIAGLRGDVRVTFEEGTWAAWLYDLLKPHVSEVVVCNPRKNALLKNGSKSDRIDARKLAELLRGNQLKPVYHGEQGLRTLKELARSYLTISKDVTRVMNRLKALYRSWGIACAGTHVYAPRHRSEWLGRISEAGVRRRAEHCYQQLDVLRLLRQQIRRDLLLESKKHQAWRLLGLIPGIGPIRAALLIALIQTPHRFRTKRHLWTYSGLGLETHDSAQYRVVEGQLQRSKKPVTLRGLNQDHNHDLKDIFKGAATRVSSSSHGPLHDFYEHLLAQGRKPTMARLTLARKIAAITLIVWKKEVHFDASYLTSQAA

SEQ ID NO: 148019 - protein, 427 aa, unidentified
MQDVEDEPLFAERVAGLDIAKAGVEATIRVPSDTTAGRRQQETRTCGTTRAELESLGDWLRSWGVTKIGMEATSTYWKPVFFLLESRGFDCQLYNAAQVKALPGRPKTDRADSIWLARITERGSVRSSFVPPEPIRRLRTHTRYRRHLTQARTAEKQRVEKLLEDGHLKLSSVISHIHGVSGRDMLNALVAGQRDPKALAQLARGTMRGKIRRLEQALDCSFFTAEHAAVLAMMLATIDHYTAQIEALTARIEAIIEPWMHQVDGIGPVCAQDIIAEIGTTMTAFPTAAHLVSWARWSPQVKQSAGRRTGSNATGRGNPYLSAALGEAAVGAGRTQSFLGARYRRMVRRMPKKKALVATGNSMLTIVHALLADPEASYQDLGADYHEQRMHTRRQARNHVRSLERLGFKVTIQALNPGTGELLAPAG

SEQ ID NO: 148020 - protein, 340 aa, unidentified
MQAPRHIGIDLHRNQFTCCVRLENGRNYLTDWKLEDLPRFVKKLRPSDEVAVEVTGNTRLFHDAVAPYVKRVVAVDPNQFKVISHSVKKTDPNDARNLALYLEKDLLPEVRMKDKTQAQLASLTQTRDTLVKLRTALKNKVNNILSAHGINLEKEALSSEKKLNEILAMRFDTMVKLELEVIIEEIRSLNQRIAKLEKTIADEGSKLEGHQNLTSIKGIGPLTGSILLSVIGDINDFADEGKLAAYFGIVPRVSNSNETERSGRITKRGNKLGRTALVQCALIAQRYSPYLKRYYEQVKARRGTGKAIIALARKLLGVIYRTLKNKWVFEDFPNFVLAEA

SEQ ID NO: 148021 - protein, 411 aa, unidentified
METIVERPGALDVHKAQVTACVRTPKPGGGREAHFAEFATTVAGLLTLRDWLAAHGVTQVTMEATGVYWKPVWAILEDDFELLLVNARHVKQVPGRKTDMSDAAWLCQLAEAGLLRASFVPPKPIRTLRNLTRYRKTQIQERAREANRLHKALEDTGIKLDCVASDILGVSGRAMLDALVSGTTDPGVLADLARGRLRAKLPALREALQGRFDRMHALWIGSILAHTDFLDEQISGLTEMIAEQIVPFEKAVELLCTIPGVQRRTAECIIAEIGVDMSIFASAKELASWAGLCPGNDQSAGKRRSGKTRKGSKWLDRALEEAALAATRSKDTYLAAQYQRLRPRRGHKKALGAVKHSIIVACWHMLSTGEIYNDLGGDYFQRRDPDKTTKRLVAQLERLGHTVTLQEAKAA

SEQ ID NO: 148022 - protein, 345 aa, unidentified
MQITTIGLDIAKRVFQVHGADDTGRAVLRRKLQRHDVLAFFAKLPACLVGLEACGTAHHWARQIKALGHEVRLVPPAYVKPYVKRGKTDAADAEAICEAITRPSMQTVPVKSTEQQAVLTLHRVRDLLVRQRTMLINALRGHMAEFGIIAPQGARRVGELVALLMDQNETVLPALARQALRPLAAELQALEQRIAQAEAAIMAGHKQNEASRRLAAIPGVGPITASAIVATVGDASQFRSARHFAAWIGLVPKQNSSGGKQRQGGISKQGNPYLRRLLVIGATAVIRHAGGRLAATPSGAWAKTLLERRPARLASVALANKTARIAWALLTKGESYRSIAPAQAA

SEQ ID NO: 148023 - protein, 312 aa, unidentified
MAMLSFCGIDVSKDRLDMVVLPEGWFFSVSNDTAGWAELVARLRPLTVSAIGLEPSGGYERGIIRALLAAELSVRRINPNKLRQFARARGVLAKNDRLDARLIAEYVAIMPTRVVQRDAAVERLAEIVTMRRQLCDEHVAAENQAAHLEDAMLRRLSKRRQTRLEADIRLLDKRLAEMVAANVALAQRYELLTSMPGVGPVLAFTLIALLPELGKMSRKQIAALVGLAPYDFDSGKLKGHRSIYGGRMPVRNVLYMAALSASRYSPALKTFHKRLAAADKKSKVIIVAVMRKMITTLNAMLRDSAAWQPRSA

SEQ ID NO: 148024 - protein, 452 aa, unidentified
MTEKDEILMKIVNPRAAGVDIGSRSHWVAIGQGPNDFKEFGVYNEDLYSIALWLRENEIKTVAMESTGTYWQSLYAVLMAEGFQVILCNGKFTKNIKGKKTDILDCQWIQKLHSIGLLSGSFLPDEETEQLRTFCRHRSNLLASAAAASKKMQKYLRLLNLRLDVVVNDICGLTGMAIIKAICNGEKNPEKLAELRHHNCKKSKEEIAKALHSNGRKDYLFALKQELEMYEVFQSKITQCDIEIENMLAQTIDNDDDKKQHHIEGKPYKKINKNTPKNIDLNLMAYQYFEGVDLMAIEGMSYSTVLALISEVGVDGIKKFPTAKHFASWLRLAPNNKISGGKVLSSKIPKGSNRLKISLRNAANAIGNLKDSTPLSDFFKRINFRKGRVSAISATARKLAVIIWNMVVKGVPYHNPEEYLFRDQKKKLGLLKRIQKQITKFELESTDFQFSN

SEQ ID NO: 148025 - protein, 324 aa, unidentified
MLAALTIPNSVAGVERLLGWLTEHDARDAVIGIENAAGYGRLLCAALAAAGCEILNVPAWRTHRDRHEQGRGKSDPGDAVAIAHVVLRKREQLGPALEPELIRALALLEGLRRQSVYNRTQAIQRLRAIWTQVDPEGEARVIHCQRQRELRKLTRIAFGAGIAEQAAARCIRELAREIERLNARIATLEHELEQLLRECGNPFADLAGAGATVAVALIAHSGDVRRFKDKGAYARFCGVAPIRCGSGQTAGHHRFDRGGNRQLNAALHRIAVVQARVDPRAQAFLTRKRAEGKTTREARRALKRHLANVVYRRLHAWAENALPA

SEQ ID NO: 148026 - protein, 378 aa, unidentified
MSDFTGFVGLDVHKDTIAVALAGSGRGEVEYLGEVRNDAGVVKALRRRLGERAAGASFCYEAGPCGYVLYRELLAAGYDCEVVAPSLIPRKAGERVKTDRRDSLKLARLHRAGELTSVWVPREEDEAIRDLVRAREDLKAIELKARQRLGAFLLRHGRVYREGKSRWTQRHFEWLGRQRFASPVQQLVHEEYLDTVRDAQARVRGLEARMREALQGWCWRAVVEGLMALRGVDLITAMTVVAELGDLSRFDSPRQLMAYLGLVPSEHSSGARRRPGAITKTGNGHVRRVLIEAAWAYRFPPRKTAHLRRKAAAAPKTVQALAWAAQRRLCARYRHLYQAGKAKPKVCVALARELVGFIWAIACEVQGKPHASRALLGH

SEQ ID NO: 148027 - protein, 419 aa, unidentified
MKRKKNNNSADVNEKILIVAIDIGAGEHWGYFRSPNGDEVRPFSFCPTRSGFEGLWRRIRDYQCDHDLTDVVIGFESTGSYAEPFIHFFREKGVRLVQVNPMHTKRLKELTGNTPHKTDQKDPRVIADIIGLGHGLSVIVPQGVSADLRRLIHARERAVSDLTAKNNQLTALVFVVFPEFLTIMKTLTSRSALFLLKRYPLPEAMKRVRCATLVRQLRRISRGRLGTERAYALLGAARRSVGIIHGASGIAIEITYLIDQIEQTQAFIGELEQRIQACLRQIPWSRNLLSLPGVGAITVGGLIGEIGDFKAFHTVKELEKLAGLTLYEISSGAHKGRRRISKRGRPLIRKLLYLAALNTVKTDGIMYHRYHRMLDHGMPSIKALVAISRTLLGIMYALVRDNTVFERIRYEENVVKNVA

SEQ ID NO: 148028 - protein, 312 aa, unidentified
MERSFVRIDVAKQQLDVHVRPTDASFRLGRDDAGLTELVERLQRLAPVLVALEATGGYEITVAAALGSAGLPVAVVNPRQIRHFARATGTLAKTDALDARVIARFAEAIQPVARPLPTAEAQALAERVARRRQLNEMLGAERNRHQQVRDPRLQRRIATHIRWLTQALADLEADLDDLIRSSPLWRETDNLLQSVPGIGDVTAYTLIADLPELGRLDRRKIAALVGLAPINRDSGTTLRGRRMIGGGRPMVRCVLYMATLTAVRFNPVIAHFYRRLIAAGRPKKVALIAAMRKLLTILNAILRDQRPWQQPA

SEQ ID NO: 148029 - protein, 421 aa, unidentified
MSYKIAGIDIHKRVLMVVVASVADAVADATGAAMEFECRRFGTGASERQHLVAWLQEHQVREVVMESTAQYWKPVWLDLEPHFEKLHLAQAQSNRAPKGRKNDFRDAKRLARRLLAGELMLSFVPEPEQRTWRLMTRGRLQLVRERVRLQNQVESLLEEARIKLSSVISDLLGVSSRRILEALSKGETDAVKLAELGDDRLKCTKEQLADALRGAPEPAHLQLLKLHLERLQLLDEQIEQLSRMSASALTNYQDAVVRLAAVPGFGAESSQQMVAEVGVDAEAFPSAGEFASWVGVCPGSNVTAEENQSSHCPKGNRYVRRILSEAAHAAVKKQGSHFQNVFRRFLPKLGYNGAIWVVAHRLARLTWKILHDGVSYIEQGEETNPRAKKRRAQKLAQALRRLGYSVTLTEINPSPMAQAST

SEQ ID NO: 148030 - protein, 335 aa, unidentified
MRLYCGIDLHAKNSYLAIIDEQRKRIFKRNVTNDRKLILAFLDPYRSELQGVVVESTFNWYWLVDTLMDDGYTVHLANVSAIQQYEGIKYVDDKHDAFWLADLLSLGILKEGYIYPKEQRPIRDLLRKRGHLMKLRTSLLVSLTNTLANVCGTKVPSHRIKGKEDHVSVHLDHHESLALMGQVSKAAIDMLTDQIKTIESHVEKQCKFDTPLLSLPGVGKILGLTILLETGPIGRFPAVGNYVSYCRKAESTWKSSEKVKGRGNRKNGNRYLSWAFAEAAEHARMFDTASRNFYNRKLQERNSPVAHAALANKLSRAAYYIMRDRVPYEEAKLFG

SEQ ID NO: 148031 - protein, 333 aa, unidentified
MKDLANFQHFVGCDVSKSTLDFAIHERGKDYRTFEHIQVPNTTQGFQAMRKWLRTFKIDVKKAVIAMEHTGVYSNALAEWCFKKGVTFVLLHPLDVKNAGCRGRNKTDKVDAQFIADYVYTMREKLTPSQPEASVIKRLRELRNERQLAVRARTAYLNQFKTVTDHSTLKRMEKMADSFTAQINAIEKEIKKVIDSDSQIKRTYDLLISVPGIGLVNALATIVATGNFTRFQTARQYAKFSCVSPLARQSGTSIKSGDHVSRAGHNEIKSLLTQGARRVINTDPQFKAYYERKRAEGKTHGCVMNAVKFKLICRMFAVIKRQSPYVDTEAYRR

SEQ ID NO: 148032 - protein, 387 aa, unidentified
MSEMFNPHAPATAYDHNTTIVAVLELSGKNWLLGAVAPGLSRRTKRSFEARNVEAVVRALEQAKGESAKARFEVARIVVGFESGRDGFWIARALQQRGFEVYVMHAASIAVERRGKRAKTDRLDVDLLLTTLMGWLRGEPGRCMMAPVPSEEEEDLREAGRRRETLVHARLKVENQISSLLIRQGIEGFKPRLKNAETKLCELRTFDGRSLPANTMNSLRLLLAQHRLLSAQLKEIEEARQRVVNVAKPDRLQRMILALARVVGVGVETATVLVHEVFSRSFKDRRALGAFVGLTGTPYNSGSSKTEQGISKNGNARVRRMLSQLAWRWLGHQPESALAQWFNARLGGAKGRVKKVLIVALMRKLVIALWRLAETGEIPIGARLAAR

SEQ ID NO: 148033 - protein, 335 aa, unidentified
MISIDGVGVFLGLDVGKQTHHGHGLTLAGKKVFDKQLPNSEPKLRAVFDKLTAKFGTVLVVVDQPASIGALPLTVARDAGCQVAYLPGLAMRRIADLYPGEAKTDAKDAAVIADAARTMPHTLRTLGLTDEATAELTMLVGFDQDLAGEANRTSNRIRGLLTQFHPSLERVLGSRLDHPAVTWLLERHGSPQALRKAGRRKLVEVVRPRAPRMAERLVDDIFTALDEQTVVVPGTGTLDVIVPSLAKSLAAVHEQRRSLETRIEALLEVHPLSQVLTSMPGIGVRTAAVLLATVGDGSSFPTAAHLASYAGLAPATRQSGTSIHGEHAPEAATGN

SEQ ID NO: 148034 - protein, 453 aa, unidentified
MAFISNAPVRHRTVGIDLAISAVQVAQIFDDGRAIGKPIRFRLTSTDLRRFVSAIKSGVGAETPITAVMEPTGMAWFPVANWLQRAGIKVIRVKGQRVKALRKYLSEHAKTDAADAHVLGAIPGFGGRGLDPVHVPGPEQHALQRLTKQRHRYQELVCSARRRVLDLVRWACPALEPVLPDTVTQITLAILGELFDPRKVVAMRRDVLARFLSRHASGNHPKSGPFIDSLVEKLKSAAEETIELHGDSVDFVALQFEVAQEVEHLRLWDRHVSAIEREVEQIYQRVHPSNALRTIPGIGATLAPLLIGVLGYAKRFRNEDHIRGFCGMFPTRSSSGGIEKPGQRLTKSGSDRVKRALYIAADVARKIDPDLAAVYWRLMVNKGHHHKQAICAVATRLINRIYRVLKTGEPYVLRDQEGNAITVQEGKRIVAAQFTVPLEVRQSRRNQPMPEPA

SEQ ID NO: 148035 - protein, 348 aa, unidentified
MAHFVGLDVSVKETAVCVVDQAGKVVIEQKVASEPEDIIMLLTSIGADYERIGIEAGPLSQWLVNGLAKAGLPVICVETRHMKSLLQAQKINKSDRHDARGIAQMMRVGLFKPVHVKTLESQEQRMLLTARKLVQHKMLDVESDLRGTLRNFGLKVGVVSKAGFEARIRELVEGLPRLAQIVEPLLTIRSVLCREFSKLDKMLLDAVRHDPVCRRLMTAPGVGAVVALTYRATVDQPQRFIHSRAVGAHAGLTPRRYQSGEIDYDGGISKSGDTMLRTMLYEAAQVLLTQSRRWSWLKAWGLRVAQRRGMRRAIVAVARRLAVILHRMWMDGTDFRWGSEPNAVTLPA

SEQ ID NO: 148036 - protein, 366 aa, unidentified
MKNNSTVARPRKQIFKRQQLTIGIDLGDRFSYYCVLDAAGELMVEQKLPTTKLAMKQVFGRMPSSRVALETGVHSPWVSRQLAELGHGVIVAHARNVRLIGESSRKDDRLDARMLARLARMDPRLLSPVQHRSAEAQAQLTVIRARAALVGARTALVNAARGLAKSYGERLRKCGTQQVNRDSGAVLSAELRTALGPLLAEVESLNQRIAEYDRRIEQIATEVHPEVARLKQVKGVGTLIALSYVLTVGDPRRFRRSRDLGCYLGLRPGRRNSDSSQPQLHISKEGDRYLRTLMVQGAHYILGPFGQDSDLRRWGLKLAERGGANAKKRAVIAVARKLSVLLHKLWVSGEVYEPLRNHRAAVSEVA

SEQ ID NO: 148037 - protein, 384 aa, unidentified
MNKNSIVFIGLDTHKEFFEVAHELEGRDEHVIHDGRISSAKASVIKMVRDFQSKYPQATLHFVYEAGPCGYWIYRLLTSLGHCCYVVAPSLLPKKPGERVKTDRKDAMKLAHLLKINDVPIIYVPEAEDEAVRDLSRARQTATNDLNHARLQLKGFLLRNNIRYDGTANWSAKHIRWLNELILPHPAQHIVLQEMLHTIDERMRRLARLVNELEHQVKQWRYYPVVKAIQAMRGVRFLVAASLIAELGDLRRFDTPRKLMKYLGLTPKEESSGDHRRLGKITKCGNGRARRLLIEGAHAYKHPPKVSTEIQKRQEMLSKEVIDIAWQAQLRLCRRYQRLIHRGKHRNLVVTAIAREMIAYIWAISREIAIAPIDVAKRKSRVPA

SEQ ID NO: 148038 - protein, 426 aa, unidentified
MPSSVAMTERFAALIGIDWGDRKHSVCLLPVGYEARERFELEHRPIAIHGWAASLRKRFGGRPVAVCLETNNGPLVSALLEHDIFVVFPVNPLALARYRKAFAVSGAKDDPSDAELALDFLHRHPDRLSELCRDSVDMRTLRRLVQTRRQLVDDRTRITNRMTHQLKAYFPQALSWFRDKDTEVFAAFLERFPTLQAAQRAKRTTLETFFRRHNVRYETTIQRRIEAIAAEQPLTSDPAAIEPASLHVQILIPQLRALSAAVARFDKEIATLCSRLPDFSLFQDLPGAGPVYSSRLLVAFGEQRDRFSGADSIQKFAGIAPVTERSGNSTWVHWRYVASKFLRQTFVEWSGETVTQSSWARAFYHHHRAHGADHQATLRALAFKWIRILYRCWMDRRPYDEARYLRALQRRGSTLLGDAPQNEVST

SEQ ID NO: 148039 - protein, 349 aa, unidentified
MRFYTKTHQHYCGIDLHAKTMYVCILNAAGETLVHRNIRTDQTRFLALIAPYRDDLVVCVECIFTWYWIADVCAREHIAFVLGHALYMKAIHGGKAKNDKLDSHKIALLLKGGMLPQAYVYPNAMRATRDLLRRRLHLARQRAHLIAHIQNTVHQYNLPALGVRLGKPTERGEVAACFPDPVVRRMMQLDLDLIGYYDEQLAQLEWQLVKQARGQDAQMYHLLSSVRGIGKILTLVLLYEIQDIHRFPTCGQFLSYARLVRCPKESAGKIVGKSNKKIGNSYLRWAFGEAAVLFLKGNPAAQQWLEKQASRHGKGKALAILAKKLAQTVYAMLTKNRCFDEARFMAHLQ

SEQ ID NO: 148040 - protein, 274 aa, unidentified
MGFEPGPSKEGSWMMAQNDLVVVGIDIAKHKVDACIRSLSLQGTFPSGAEGRRKLIAWLRKHKVGKAVMEASGGYERDWAKALHQAGIGIRIVDPKRVRSFARSAGQLAKNDAIDAVMIAWFAETFGEAKGQAYDAAREKLSKVMNARQGLLDLQINLQNRSEHAGPELVQRMQARLLKKIALEMTRLEAAIAAMIKATPHFAERAEIIESVPGLGEITSAGLIAAMPELGQVSNKVAAALLGTAPYDDDSGRRHGDRHIKGGRRKVRNLFYMA

SEQ ID NO: 148041 - protein, 347 aa, unidentified
MSITMIGLDTAKSVFQVHGVNETGKVEIRRKLRRSELIPFFEKQEACTVVMEACGAAHHWARVLSSLGHEVKLIAPEAVRPFVKKGKKNDPADAAALCEAASRPAMMFVPVKTIEQQGILALHSARSLLVKQQTMLANAMRGLATEFGLTVPQGIGRLEELLALVDTDKTFPEKARQVFTRLFGQCCALAASISAFEEEIVAHARQDQTARRLATIPGVGPITASLIAATVVDIGLFKSARHFAAWLGLVPRQYSTGGKTRLGRITKAGNREIRRLLVLGATSMVYRAPQWNSVVGMWTRGILVRRPVRLVTVALANKMARIAWALMTRKEVYRAKGRVAAATEAAV

SEQ ID NO: 148042 - protein, 339 aa, unidentified
MTIVGCDFHPSGQQVAIFDATSGEICERKLMHHEGEAEQFYRQLPVPSLIGMEATGNSQWFVQLLEALGHEVWIGDAAEIRASYVRKQKTDKRDAAHLLKLLLEGRFPRLWVPDAEVRDLRQLLIHRHKLVEIRSRVKNGLQHLALNQGMQKKHRLWSVAGQKALRELPLVGWTACRRQDLLQLRSMLDQQIAQLDAAVAQAAEKNPQVRLLMTQPGVGAITALAFVLTIGEPGRFQRGKQIASYVGLIPREHSSGGRQRRGAISKQGNRLLRMLLVEAAQSVVRHDPEFRKQYQHRCHSKSKGVAKVAAARKLAVRLFWMLRTNTAYPEIVRIESSPR

SEQ ID NO: 148043 - protein, 353 aa, unidentified
MKKIVKQVVGVDVAQSELVVCLGRMTDDWSAELYANKTFANTKGGMQALAVWVKKQTDPEVAVRFVMEATGVYHEGLAYFLEEKGCQVSIVLPNKISNYMRTLEVKTITDKTSSQAIALFGLERKLDNWKRPKEIFRKLRQLTRERDQIIVERTMVKNQLHAEQTEAYPNKTSLKRIKARITILTKQEKEIKNELAVLIAQDAEVKKMKATISSAPGIGLLTAATVLAETNGFDLIRNKRQLASYAGYDVTEKQSGTSVKGKPRISKKGNKYLRKAMHLPALAAIRHNERFKAIYARLMSKHGIKMKAAVAVQRKLLEMTYTLYKTNKPFDKNYLKEKNINGTKNLERSLQPL

SEQ ID NO: 148044 - protein, 362 aa, unidentified
MLYLAIDQHRKQLTVNLRNEQGDVLLKRQVSTEWKRVRAFLAEIQERSRPEGGFVVILEVCGFNDWLLKLLREYECRETIVVQPEKRSKKKTDRRDAHSLGDILWVNRERLLAGKKVRGIRSVQLPGPQDAADRQLTWMRKRLGDQRTRTINKIKHILRKHNLEQECPTKGLDTIKARRWLAQVALGPIDRLEMDQLVVQWKLWDEQKDEVEAEIAKRQAQSNTAPLLATIPGCAAYGSLALASRIGPIERFPRPASLANYWGLTPRCRNSGEVTDRLGSITKQGSAMARFILGQLVLHVLRRDAWLRGWYGRIKRRRGAKIARVAVMRRLATIIWHMLKHNEPYAVGGPSQRKRQAQAAQA

SEQ ID NO: 148045 - protein, 387 aa, unidentified
MPQPNDLSRSLVALDQNSTIIAVIEMSQSSWLVAGMLPGIERQPRKKLDPSPERLLGLLHRWRDEAVRAGRTITRIALAFEAGRDGFWLARWLAAHGVEAHVIHASSVAVSREHRRAKTDRLDTELLKRGFLGWLRGERGHCSMARVPTIAEEDAKRPNRERECLVGERTRIVNRIKSTLARLGIRNFKPTLRKAAERLATVNTPEGMPLPPNTLAELQRDMARLGLVVSQIRQIEDARQKRLEQQPETGPHAMVRRLARIVGVGVETADMLVHEVLSRPMRDRRAVARYAGLTGSPDESGAQRREQGLAKAGNARVRRGMIQLAWRFLMFQKESALAIWYWARTADSRMGTRKTMIVALARKLIIALWRFVTTGEPLEGVVLRPAS

SEQ ID NO: 148046 - protein, 334 aa, unidentified
MQDSIFIGLDVHKATIAVAVAEGVRGGEVRAMGSIPHTPAHIAKLAEKLAKSGQRLRFCYEAGPCGYGLHRQLTELGHDCIVVAPSLIPMKPGDRVKTDRRDAAMLAKLDRAGELTAVWVPDSAHEAVRDLVRARATAVRVLGKARQHLQGFLLRHGRVYAGKRGWTLAYRRWLTSIRFDQPAQQVVLQDYIHAVTDGEARVERLTRQIEQIMPQWSMAPVVDALQAMRGVAFIVAVTLVAEVGDFSRFSNPRQLMAYLGLVPSEQSSGATVRRGGITKAGNALARRALIEGAWTYRMQARVSRKLHDRIEALPQRSEISPGRLKCGYAPATES

SEQ ID NO: 148047 - protein, 455 aa, unidentified
MKKNVSKNGVVKMGTSLPVFNPHAAGIDIGDTMHCVAINDGHGGHEVKTTSAFTCDLHEIVTYLLLNGVTTVAMESTGVYWLSLYLLIEEAGIEVYLVNAKTVKNVTGRKKDDTDAVWIQKLHTCGLLQKSFQPEAEIRLLRTYVRQRKNVINLSSDVVRRMQKALELMNIKLHTVISDILGKTGMNMINAILKGERDPEFLSTLCDPRIKASQEEIIKSLNGIWREEYLFLLSQAVENYEFYQKQIKSCDQKIEEQLLKQVAIINHGDITNIEQATEEKSKPKKKGKKNQFNFSASTYLKEIVGVDLTKIPGISDVSALEFLSEVGTDMSKWKSAKHFAAWLNLTPNTKITGGKIISSKLMKKKNKAGQYLRQAASSLKANKSPIGDYYRRMRGKLGGRGAILNTAHKLARIIYTMLKNNTEYSVGLVNDNQEKYKEDKIKKLEKQLARLKQVA

SEQ ID NO: 148048 - protein, 482 aa, unidentified
MKPRQKDKDKRAAGRPTRPSWQEMNRKQRRETMRKIQSEELSLEVIHPDAAGIDIGNESHYVAVPPSRDIQSVRRFGCTTAELKAMAQWLKQCGIQTIAMQSTGVYWIAVFDILEEAGFEVYLVNARETKNLPGRKTDVQESQWLMKLHRYGLLRNSFRPSQEIRTMRTYWRQRNDLVQAGARHIQRIQKALTQMNIQLANVLSDVSGMTGQAIIKAILAGERDPHKLAAFRDPRVKASEEQVERSLEGHWQKDLLFVLKQEQDGYEFCQQQMAECDRQLDQYLQQQEDRSKGASLPEEKRKERLKKKKGNKPRFDLRTGLFRMAGVDLTQIDCIDVMTATTILSEAGSDMSKWETEHHFVSWLRLCPDNRISGNKIIGKGRLPTSNRITNALKMAASTLRTSNTYLGAQFRRLRTKLGAPIAIKAMAAKLARLIYRMLRYGMKYLDQGAAFYELQHRKLQIKHLKSKAAKLGFQIVQAPAA

SEQ ID NO: 148049 - protein, 349 aa, unidentified
MRFYNRQHRHYCGIDLHVKTMYVCILNATGDVLLHRNVATTPAAFLAAIAPYREDLAVCVECMFTWYWLADLCAVERITFVLGHALAMKAIHGAKAKNDKIDSHKIAVLLRGGLVPQAYAYPADMRATRDLLRRRLHLVRKRGQLLGHIQMMREQYNLPAFDRRLAYPANRDGVSAHFPDPSVRKSVEVDLALIDEYDVLIADLEQMLVREAKCDDADAFHRLKSVPGIGPILALTILYEIHDIHRFDRVQQFASYARLVKGQHESGGKILGTGGAKMGNVHLKWAFSEAAVLFLRHTHTPRVQKQLARWEKTHGKGKALSILAHKIGRAVYYMLTRGTVFSLEKFLAA

SEQ ID NO: 148050 - protein, 434 aa, unidentified
MSTATKSRIVITRGMRRQQARQARCQQRVPPHALLVAVDLAREKQAVCLMQHQRVVGRILCETPAENFAPIFTAADEWCREHQVQEQVFAMEPAGHYWMLLAEQCEARAKPYVLLHPLSVARERESARYNREKTDPRDAEWIANWAAQGKITETVLPRTHAHAALQDLAYAYFDARRHAASARTALHNFWHRLVPEFFTIFRDATRDSALATALALKPFSEMCRLTPEAWLVEVRRHMRKTRLQKKRVLALHAAILAAAQQPHRRAGEGMPWRIRLAAERRRLLETHKQLLRERILEHYAARPEAAYLDSITGADVFHNALTLGLIGELEAYDDPRTLVKLAGLEINHFQSGTMKKNSHISYRGRVRLRTAAYQQARFLVKRNPVYAARFAQLLRDKKFSAQQCYVAIANSYLRTMHVLAKTKTFYRAPTTSNT

SEQ ID NO: 148051 - protein, 417 aa, unidentified
MDTDCKTKFKENTMNAVGIDVSKGKSTVAVIKPFGEIVKMPFDVFHTTKDLAELTSLILSLDGESRVVMEHTGKYSDPVVTALCSAGIFVCVVNAKLVHDYGGDTIRRVKTDKVDALKIAGYCLDKWVNLKAYTPACEHRKMLKAHNRQLSAYMKIKSMLKNNLISLLDQTFPFANELFTSPARTIDGHEKWIDFVAHFYHCECVSALSQLVFSKSYEKWCRKNGYKFSLSKVDEIYSVATKYLATLPRNDFTKTLIVQTVRQLNCLCETISIVKSEMEKIASLLPEYKTVLDMHGVGKTLAPQLIAEIGDIENFPKRSSLARFAGIEPPENQSGSYNQHSRRISKQGSPHLRRALFQVMCCVLQLSHENEPTFQFIDKKRSEGKPYKVYMIAGANKFLRIYYARVKECIDTPQKCG

SEQ ID NO: 148052 - protein, 322 aa, unidentified
MKYIGIDVSKATFVVAYSSDKGGEIRIFNNTTTGIKQFIGALPKDGSIHCVMEATGNYSALLLYMLNVARITVSMENPLKIKNFARAMLSTVKTDKIDARLIALYGEKMNPQPFKVQGEAILRLRQKRTVIRQLTKQITAMSNLRGSLACLPVPDKGATHTVDETIKFLEKRRDRLQSELTDLVEVEFSRQLALLTTIKGIGITLATALILTTGGFTYFQNAKQVSRYLGICPTYEQSGTSVNIRGHINRNGDAYTRGLLYIAAWPASRFNAQCKETYTRLRQNGKPGKLAMIAVANKLVRQAFAVVAHDKEYIDGFVSNRP

SEQ ID NO: 148053 - protein, 338 aa, unidentified
MPLYSGIDLHANNSVVVLLNEQDQVIYQRRLANHLPEILEALAPYQADVSGVVVESTYNWYWLVDGLMEAGYRVHLANPAAMQQYSGLKYTNDHSDARWLAHLLRLGVLPEGYIYPKAERAVRDLLRKRAHLVRQHTAQVLSVHNLMVRNTGVRFGAKRIEELTPSELVSMLSHPEQVLAVTSSLAVLHCLGQQINTLEKAVQKRLKHTPAYAQLQTVDGIGTILAQTIVLETGDVGRFPTVGNYASYCRCVGSTKISNGKRKGQGNVKNGNPYLEWAYMEAAQFAMRFSPTVQRFYQRKQAKSHLMIARKAVAHKLARACYDIMRDLIPFEVHKAFG

SEQ ID NO: 148054 - protein, 403 aa, unidentified
MVFIEYFGIDVGKGKSFIAHYSNNEFVKEFEITHDNNGFDSLKKYIKNFSGVYFLFEATGIYSKVLEKFCTDNKISFCVINPLEAKLLTNSLRNWKTDKSDAHKLAVLAKNINKKPSRNLLEEKYIKIRELTRYYEEINNQQNYLKNQLIQLLDMTFPELQNLFKDRYSKLALQVASKFPHPEFVDSNDIEELKKTINTCTEKNLSEKKKAQYANKLVEFSMASYPSVSKDSFLTDKLVYVIEDLLNLMKRNVSIKQRLLVLAEEFEEFKIIKSIPGIGDLTAIMIIGELGDIKSFDSHKQLNAYVGIDIKRYQSGKTHFKDKINKRGNKHARSLFYLIIKNFLLGQRLFKNHIIDYYYKLKKQPNGKGHKTASVACINKLLKTIHYLVINNKEYDYHMSPHG

SEQ ID NO: 148055 - protein, 358 aa, unidentified
MSNVKSSRLDFTGQPIYIGLDVHKKSWSVSIFSKYGEYKTFNQPPEADKLVHYLSHYFPGALYYAVYEAGYCGFWIHDQLSKKGIQCLVVNPADIPTKNKERRTKRDPIDCRKLARSLRNGEIEGIYVPCRSKLEDRTLIRTRQSMVRKQTRCKNQIKGMLLFYGVVIPEQREMGHWSRRFIQWIERIRMERASGDIALKAHLEELNHLRQLIASLNRAILHLARTEEYRPFVRLLKTAPGISTLTAMILLAELGEITRFPSLDELSCYVGLIPDTQESGEKEYVGAITQRRHAQLRWLLIEASWVAVRKDPALLMAFQEYCKRMRKTKAIVKIARKLLNRIRYVLKNQAEYVPCVIE

SEQ ID NO: 148056 - protein, 363 aa, unidentified
MEVAGRFVGIDLGKRTYEMCIVDRKGKISRTGGKTDFAGIDRLCEKLNGDDAVAIEACNLAFRIERAIRKSVGCKVCIMNAGKLAVIYMSTRKTDKEDSLKLAKLLKTHDEDELPIVAPPSDEEWERRKLLSEYRSLKCQRTKEINKLHAIFEHNGYTQFVRKDMCSEKNRANILPLLKGYEKEEAERLVERLNLLEKQIERLLQKINAEVENDGKIQKVMTVPGIGPITALAYVAYVGDVNRFDNAHQVSNFIGFVPKVDNSCTICRSGHTTKKGNPLLRSLLVQAAWSTVKSKNGGALRDKYKYMAESRCIGKGKSIVTIARKLGELLYLILKTDQEYKPQKFITPELKISKLAEDALECS

SEQ ID NO: 148057 - protein, 392 aa, unidentified
MVVSVGIDVSKDKHDCFIVSSEGEVLADVFTIPNTMDGFHCLLQRIRDCTAPQDKIKVGLEATGHYSYNLLGFLLDNGLATYVLNPLRTNLYRKSLSLRKTKTDRVDARTIASMLLSDAGLKPYTSTAYHNEELKSLTRYRFDKVKERAKLKSSISRLVCILFPELEKLVPTLHMVSVYALLEEFPGAKQIAGAHLTRLKALLETASKGRYKRDVALQIREAARNSIGSRMPAKSLELQHTIRLTRELDREIDEIEEQIQSIMGELHSPITTIPGLGFRMAAMILAEVGDFTRFDSPDKLLAYAGMSPSTYQSGQLKNCYPHMEKRGSRYLRYALYNATKYVCLWDPTFSAYLAKKLTEGKHYNVALSHASKKLVRLIFAMEKSRQPYRVAP

SEQ ID NO: 148058 - protein, 343 aa, unidentified
MDHFAGLDVSVKETSVCIVDDTGKLVREVKVTSEPEALLAVLKNPAYHFKRIGLEAGPLSQWLFGALAEAELPVVCVETRHMQAVLKAQINKTDRNDARGIAQMMRVGLYRPVHVKTLRSQKLRMLLTHRKLLQSKAIAIENDLRGTLRNFGLKVGMVGKVKFEARIKELVENFPDLAELVEPLLIVRRVLREQIVILHRRLLAIVRDDEVCRRLMTVPGVGPVVALTYRATVDVPARFRKSKAVGAVFGLTCSKYQSGEIDWSGRISRCGDEMMRVMLYEAAQSMLRSKKWSWLKAWAMQIARRRGMKKAIVALARRLAVIMHRIWVDGTEFRWTREQAVAT

SEQ ID NO: 148059 - protein, 345 aa, unidentified
MNKTIVGVDLAKKVIQVCIYTNRKVHSNTEMTPKEFTCWLVNSMPATIVYEACGTSNYWKQLASSHGHDARLISSRLVAVVRQNQKTDKNDALAIVQASLLPDVNFIQGKTAEQQQLQSIVRLRELSIRQKTASKNQLIALLSELNIQVSNRNGGLRATIDETLEDADNGFSPSFRQAISTAWDQYSSLVEAIDTYDDCLEKSLSYQPECKKLLKIEGVGTLNAVNLYIALGCADIGAFSKGKAAAACIGLTPIQHSSGGRAKIGSIGRGFKNTLFRSQLITGAMSIVSKVANRPPKTKKEEWLKNLIERRGKKCAAVALANKNVRTAFAILTQGTEYKAEPLVS

SEQ ID NO: 148060 - protein, 340 aa, unidentified
MGDIITIGLDLAKNVFQVHGVDEAGSVVVRKRLRRGQVLAFFAGIPPCLIGLEACATAHHWARELIALGHEARLMPPNYVKAYVKRNKHDVADAEAICEAVKRPSMRFVPLKTAEQQSVLMMHRARDLLIRQRTMLVNALRGHLAEFGLIEAQGLHKVARLITIVMDEMDGRVPDIARQVLKVIVSQIEDIRRGIAELETQVLAWHKNNPVSQRLATIPGIGPIIATAIAATVADPNTFRSGREFAAWLGLVPRQNSTGGKARLGGISKRGNSYLRRLLVNSAHTVLLCSKAAKTDPWLISLLRRKPRLVAAVALANKTARVAWAIMSRRETYRHVAAAA

SEQ ID NO: 148061 - protein, 420 aa, unidentified
MKVVYRTCCGVDVHKSFLVATIIKTTSGVEPSYQKKRFSTFNNSILHFKEWLVKNQCRDVCMESTGKYWVPVFNLLENEINVTIANPKWVKAVKGNKDDTKDSKWIGDLFRLGLVPGSYIPCKPIRILREFTRYRYKLTSCRTSEKNRYQNALTVCNVALDSVVSDIFGKSATSVIDYLIEQPDNSINHEEIASRLLRSLKKKSDSVIESIEGYQMTDSQKYRMRLIRAHLDYITSTINDIDTMLDSLIAPYENAVQLLCTIPGVDRNSAITVISEIGTDMTPFSNSKRLCCWAGLTPGNNESAGKKKSVRITRAGVYLKPALVQVAHAAVKSDKSPYYKQKYERIMKRRGKKRAIIAIARMILTAIYQMLSTGEAWNPTDLFKIDMPEPMKEKQKEKAIKQAMKLLIREGKISESQLAS

SEQ ID NO: 148062 - protein, 345 aa, unidentified
MKLYGGIDLHSNNSVIAIINEHGETLTAKRLNNDMSVILSFLSPYKDNLKGLVVESTFNWYWLVDALMDEGFKLHLANPAAIKQYSGLKHTDDHSDACWLAEMLRLNILPEGYIYPRELRAVRDLMRKRMDIVQQSTKNLLSVQSCYMRHLGYKLSSNKIKQMAAIRKGVDAEQVHADFSSMNTALSVISNLSLIRCAQQQINAIESAILQQTSLSPEFINLTSIDGIGNTLALTIMLETGTIKRFDSPGNFSSYCRCVKGARYSNGKKKGATNQKNGNRYLAWAFTEAANFAIRYNPTIKKYYQRKLAKTNQVIAIKTVAHKLARACYHVLKDNVPFDEHKAFS

SEQ ID NO: 148063 - protein, 379 aa, unidentified
MICVGIDVSKRKSTVCFMAPGDKIIRRLFDVKHTKEELQPLVDEIRVQAKYDEIKVVMESTGVYHLSIAYFLQQNGIFVSVVNALKVANFNKAENFRHTKTDSIDSTNIARYGIAYWAKLPQFDLNGDKYFLLKRLCDAYLNFSEERSRILLQLQSQLEQTMPGIFDLFGGFDINSGKDKLLDFLERYCHIEDIIAKSEAEFVASYCGWAKEKGYRSNESKAATIYAQAKNGIPSIPNNPIVRETSMWYVGLLRRADEALMASLTRMEDIAKDLPEYELVGEMGGVGRVTRVALIAQIGDVRRFKNKHSLICFAGLTPSIHESGKFRASQNHIVKKGPARLRKVLYQVMMSLVMHKIPKDDAVYRFIKKKEAEGKYEKK

SEQ ID NO: 148064 - protein, 383 aa, unidentified
MKAVCGLDVHKDSIFLCILHSDGELFEQVFGVLTFQLEEMRKLLQKHHVFEVCMESTSIYWIPIWRVLSPHFTLRLVNPYFIKQLPGHKSDIKDAQWIAECTLKELVRGSFVPPEIIQQLRQYDRRIFDLNAEIVRKVSKVDGVLQRCNIRLSNYVSNIECKSYRDVVRRLSEGVTNPNELMKLVHGRIVNRHGAETILASLTGVVSQAEIDVLRQLHEEIGIAESHRNECQQRMLEICEKHFPEELERLQKIPGIKERAATSLIAEIGTDMSKFETANHLASWSGLRPRNDESNKKIKSRKITHGNVYLRNTIIQCAWAASRQKDCFFSRFSYHQTIVRRKNKMKVIVAVARKLLVAVWHVLHDKTDNVDFKPDREESANNG

SEQ ID NO: 148065 - protein, 458 aa, unidentified
MKKGKRSELLIVNINAAGIDIASTEYQVCVPEDRDGEPNRRFEAYTCDLHSIAQWLKQCRIDTVAMEATGIYWVQLFMVLQEYGIDVVLCNAKHIKNIAEKKTDYVDASWIQLLHSYGLLRESFQPENQIRQLKDLMRHRERIIQSMSQDILRIQKALEMMNIKVHKVLSDIKGKSGLNILEAIISGERKPSVLAELVHHGVKASKEEILKSLEGNWNDAQLFILKQSFDSYRFALGQIEEVDQSIKQLLIAYAHVAGESKNKKPIERAIKRKLTQGNILHFDAEQYSYDILGVNLTRIPGISSLTAIKLISELGRDFTAKFPSVKQFCSWLNIVPNNKISAGKILSSKVPKRKNFAGQALRVAANTLSKSKGYLGDYFRRMQSKLGYNQAIIAVAHKLARIIYQMVKVKAEYDESIDRAKNVKLLDFKRKSLQKRLAKIENEIYLSNCNTSNLLLVR

SEQ ID NO: 148066 - protein, 414 aa, unidentified
MSMEVVYTRCCGLDVHKQSVVACTIVPGAARRPTKTIRTFGTTTDQLEALAEWLLAQKVTHAVMESTGVFWKPVFNILAGRIEVVVVNAQHVKVVPGRKTDVADSEWLADLLRHGLLRASFIPDQAQRQLRDLTRTRVALIDERSRTIRRLHKVLEDANIKLSSVATDVLGVSGRAMLEALVAGTTDPHAMADLARGRLRAKLPALEQALTGRVSEHHRLLLKTHLAHIDFLNQAITQLSEQVTECLRPFEAELERLETIPGIKRRTAEVLAAETGLDMGRFPSAAHLASWAGMCPGNQESAGKRKTGKTRKGSKWLRRALVEAGRAAARKRGSSFFAQYRRLAARRGPNKAAVAVGHALLTTVYYVLARQDTYRGPDPVQQEQHLRARTEKRALRQLQDLGYTVTLTPLAQAA

SEQ ID NO: 148067 - protein, 416 aa, unidentified
MNAVGIDVSSRKSTVAVLRPLGEVVCLPFDVTHDIAGLASLVEKLKAIDGETRVVMEHTGRYYEAVAKALHEAGFFVCAVNPLLIKEYGANSLRRVKTDKADAVKIARYALDNRADLRDFTPMDAIRYDLKTLNRQFQLASKQRTASANNLIALLEQSFPGIRKCFDSPVRSDGTQKWVDFAHSFWHVDCVRKQPFPAFCERYRKWCKRHAYLFKLSNAEEVYALAKRAVVLTPKSKVVKVLVQEAANQLISISRSVEVYRAEMDRLAAMLPEYPVVMAMYGVGKSYGPQLMAEIGDVRRFERKQALVAFAGIDPMPNQSGDKNVRSNKSSKRGSPYLRKTLFNVIRTYLQCAPQDEPVFQFLNRKRAEGKPFYVYMLAAANKFLRRYYAKLRDYFASLDTLQPVAPIPTILKAAL

SEQ ID NO: 148068 - protein, 367 aa, unidentified
MQRFHGIDRHKRSSTISVLNREGVEVAFVASCANFSTYVEKLGADDAVVMETGMGSFWWADRIEARGASCSVIDPYRFRIIKDSWKKTDKHDSRTMAKALWVQSMSGEFGLPVVWKPPEVIRELRKLFAQYRDLNVHLCMVKNRVQALAVENGIALTLMQKKELFNPRTGAEALGKLELSEASRVAVRINQEILWGVEKQKEHLAQEILRTGAPLAKEVKLLLTIKGVTFLTALAFLADVGDVRRFRTLRRMNAYLGLVPRLRQSGEKSRIGHINRASRSLTRTLLTQSVNKALEGSAVLRRFYERVCERSGTGRARIAVIRKLCGIMRQMLLKGETFREVKADLFAKKLRLFERRLEELKGERKSA

SEQ ID NO: 148069 - protein, 398 aa, unidentified
MKWYLGIDIGKLTHVVCIMNELGEVVKLPLSFTQNSLGWQRFDSYLNSIIDHMEYPSVQAGFEATGHYWTTLYLKLKHLGMKVSVLNPLEVKAFRNEGIRGNKTDSIDAVKIAKLLRFGDFRETYVPDEQTTGLRQLTRLKIDLSVMQAQLKQKCLAILDQVFPEYGALFSDVFGTSSRALLSEASTPEAITALSTTKLTGILRKASRGRLRENKARQIKQQACVSVGITFSLDAFTLSLDVLLSQVDHLEEQIVELNTEIAKRVKTIKTTIQSIPGIGPDTAGVILSEVGDFNRLISKDGAEKLVALAGLDPKIKESGKYKGKTKMSKRGSAYLRHAVRNAAFIAVAVSKDPMFTRIYQKHIDKGKHTEVALSHVARKMLHVIYALLKNKTKYKPVV

SEQ ID NO: 148070 - protein, 341 aa, unidentified
MKEYTSKTVYMGIDVHKNSYSVTALCDKQIVKKDRLPANPNLLVSYCQNKFKGAKIHTAYEAGFCGFSLHRTLVNLGIDNRVVHPAGIEVAARERVKNDRRDSEKIAVQLAEGRLRGIHIPTEEREGYREISRLREDFVLKRNKVSTQIKSFLHRHGMFSEVDDSVLGKKKVMSLMERKLSRDLSYVLCKLCEEWLHLTEEIEKINEKLGEQAQEDQLEQIYRSLPGIGPVVARVLANELGNMSQFSNEKQLFSYTGLTPREHSSGEHRWLGHISRQGKSIVRKVLVQAAWRAVGIDENLAKQYNNLKARVGGKRAIVAIARKMIGFARCCFKENRLYEKR

SEQ ID NO: 148071 - protein, 339 aa, unidentified
MSKQTQTKQAMVFCGIDVSAATLAVAVQQENQRFEERVFDNTASGHKALIGWLRKDKVPARVSLEATGIYSLDLALALDQAEGIEVAVLNPKLMHRFAQTLRRSKTDSADAQVLAEYSCRMPFTPWSAPELSGLRLRTISRHIQSLVVEQTRQNNRLHNAEKSATTPRCVVNDLKRSMASLKLRIVRLRREALELVRSDEAMRKRFDLLILIPGIAAISALQLLGELAPLSPEMSVRQWVAHSGLDPSHQVSGTSVHKPSRISRAGNRHLRHALYMPALVAVRRDPHLKAFYETLLNRHKAKLQALIAVARKLLHAIYGILRTQTAYDGSKLFPLIKTT

SEQ ID NO: 148072 - protein, 361 aa, unidentified
MEHTTIAVDLAKSVFQVAVSHKAGRVDVERRLSRERFLEYLAKQPPATVLLEACGSAHYWARRLQPFGHTVRLLPAHDVHRYVRRNKTDRTDTKGLLEAGRNDEIHAVPVKTVDQQAIASLHRLRSTWLATRTARLNTVRGLLREFGLVMPVGAQHVVPQVRALLVESSDVPDLMRPSLASACDEIESIEQHMRAVERQLTTLARDRDDIRLLQTVPGVGLLTATALVALVGDARRFPTSREFASFLGLTPREDSSALHRRLGAISKQGDGYLRMLLIHGARSVLLRAKSAGVPTPFQAWARATQQRRGHNVAAVAVANKLARLVWAVWTHQRPYDADYRPTATRQTSITSSPQEDCTELN

SEQ ID NO: 148073 - protein, 352 aa, unidentified
MQAISVGCDAHKHYSQLELQDASGQVLNRVRIDHSPGAVSSFFSRLPGGTPVALESVGNWYWIADEIEAAGCLPLLTNPAKAKLMMGHVNKTDKLDANGLATLLRIGSLPTVWLPPAALRDQRELPRTRMALTALRTSIKNRIHSLLAKYNLSPEDGSQLFSRKGRSWLESSLSRLPPETGRCLAQQLELLDFLSLQIDTLEERIHNLIALTPTMQLLKSLPGVGDMLAIVIEREVGTISRFPSAPQFSSYCGTTPRVNSSGGKTRYGKLRTESNQYLKWAFIEAANAISAHHAQRDWTTRHVSKLYLRIRSRKGSSVAIGAVARHLAESTFWILSKNEPYRESSKVSPRQG

SEQ ID NO: 148074 - protein, 449 aa, unidentified
MTQRKIPGEGLPVIHPRAAAIDIGSRFHVAAVPPDFIEEPVQTFQAFTADLQRMAQWLKSLGITTVAMESTGVYWVAAFEVLRACGIEVVVANAREARSVPGRKSDVNDAQWLQRLHACGLLRASFHPERDVAELRAYLRVRERHLDYAASHIQHMQKALILMNLQLHHVVTDLTGATGMRIVRAIVAGERDPEILAQMRDIRCKASIKTVQAALIGNYQPEHLFALKQYLDLYDFYQDRVNECDRQIEGVLTRLAEQRPAPSDPLLKPRHRTRQPNAVDFDVRPMLYQIAGTDLTQIHGIGPYLALRLISECGTDLSRWPTAKHFTSWLCLAPGCKISGGKVLSSRTRKTTNRIAAHLRLAAVTVGRTSTALGAFYRRLAARVGKAKAVTATARKLAILFYNTMRFGRTYADPGADHYEQLYRERVVKQLHRRAAEFGFRLETVGCVS

SEQ ID NO: 148075 - protein, 331 aa, unidentified
MKITETIGIDVSKATLDVCIHSNQELATFENSPKGFALLLKWCYRSSSHPREHVFIAFEHTGLYSERLSEYLSKKEIPHSMISGLQIKRSLGIARGKSDRIDASKIALYAYRLRDEIKPSVAQSKEIKAIKKLLSLRDRLVRQRAGFKASSKEQKNVLKRKDNGLLFKVQDRMIKELTKQIKEIEKEMQLIIKSHQELDHMFRLLKTVKCIGDQAALFLIVYTEAFTKFKNARQFAAYCGVAPFPNRSGTSLRGKTKVSHLANKKMKSLLDMCAKSSICYNMEIREYYYRRVAEGKNKMSTVNIIRNKLISRVFAVINRDTPYVDLWRHAS

SEQ ID NO: 148076 - protein, 385 aa, unidentified
MDVVYPVCCGIDVHQARLTACLRRVQEDGQVTKDVQEFDTTYPALLILLDWLIAQHCPVVALESTGVYWKPVYHVLAGSLEVLVGNAQDMQQRPGRKTDKADARWIAELLAHGLIRPSFVPPPAISALRDLTRTRVALVQTRSQAKNRVHKVLEDTNVKLASVVTDLFGVSGRRMLAALIAGERDPQALAGLALGRLRRKLPQLEVALTGQFTHHHATIIQASLELVDLLNRQIADLDSQIGELVAPLESQITQLDSIPGVDKIAARDILAEIGTEMSRFGSAARLASWAGVCPGNNESAGKRRRGKSRPGNRYVRRVLVQCAWAARKTPTYLGRTFRRLEVRLGGKKAAVAVAHKILVIVYHLLSEGTVYDEERYDRLQPRQEA

SEQ ID NO: 148077 - protein, 324 aa, unidentified
MQHEPLTDAALPVAGVDVSKAELDLYVDTVGRRLRVANDDAGVARLLATMLEHKVRLVVVEATGRYHRRVAAALLEAGVNVAVVNPAHARDFARAAGKLEKSDRIDAEMLARFGRAMGPRAAVKTPENQAVLSDLVSRRRALVQVRVAEANRAHDKLPKLAAGQSRKLMRLVDQQIEDLDREIAKLVEADDDSGRKAKVIDSVPGIGPGTANQLVVDLPELGTLNRQEIAKLAGLAPLNCDSGRYRGQRKIRGGREDVRTCLYMAAFNARQECRRFKDYFDGLIARGKLYQVAMTACMRKLLVTLNQMVRSNTHWDQNFHGALT

SEQ ID NO: 148078 - protein, 380 aa, unidentified
MGWPGRAQRPTTTVEQDGEASKLEELTMHTHQKSSDPIATIGLDIGKNTFHLVGLDKRGAIAMRIKVSRNQLVRRLVNLPSCLIGLEAGSGSHHIARQIEPLGHDVRLIPAQYVKPFLKGHKNDFRDAEAIAEAVQRPTMHFVAIKTPEQSDLLSLHRVRSRLVRQRTAIINQIRGFLIERGITVRQGPVPLRKVLPEVLSSPPEALSPRLVRLIAELDEDWRRLDERLEALSAEIESLSEHDTACQRLMTVPGIGPIISSAIVAAIGTGSGFKQGRDFAAWLGLVPKQESTGDRTKLGRISKRGNKYLRTLFVQAAHVVIERRPAAAMRALWPWIEKASKRLAHRNLLAIALANKLARIAWAVLARGRDYQPRITTNAA

SEQ ID NO: 148079 - protein, 367 aa, unidentified
MNKSSTVMMSGNEILKHTKLTIGMDLGDRATRYCVLDEAGDVILERSIPTTKKGMEQVFSAIPGSRVALETGVHSPWVSRQLTQLGHEVIVAHARNVRLIGESSRKDDRLDARTLARLARIDPQLLSPVRHRSAEAQVHLTVIRARAALVGARTALVNAARGLAKSYGERLRKCGTQQVRQDLAAGLSVELRAALEPLLGEIESLSQRIAAYDRQIEQIAKKEYPEVSLLQQVKGVGTLIALTYLLTLEDPHRFRRSRDVGCYLGLRPGRRNSGSSQPQLHISKEGDRYLRTLMVQGAHYILGPFGEDSDLRRWGLRLAERGGKNAKKRAIVAVARKLAVLLHKLWVNGEVYEPLRNHPTTAVDAVA

SEQ ID NO: 148080 - protein, 418 aa, unidentified
MDHRPPFLYQATVGIDWADQKHDVFVRFTNGDSYRRKIGSRPEAIQEWLLELRSACAEGKIAIAVEQRRGALFYQLCTHLHWIDLYPINPHSLSSFRLTFFSSRAKDDPVDSRLLEELVRTHCDRLRLYQPVTTTERKLDLYCRQRRSLLDLATKTELKLVSTLKQYFPLVVNLFAAVGMKSDIALDFLSRWQTLQELRRAKTHTVRSFFYAHNSRSQSLIKKRLQQIAEAHEVTDDHALTEPMILTTKCLVGQLRQFKQSINEFDRKIKELFKSHPDHFLFETLPGAGEKLAPRLLSLFGSDRSRWTDATDLQKYSGIAPVVERSGKSLWVHRRLSRPIFVCQTFHEFAQQSTRFSSWADQFYRRQREKGKSHHSAIRSLAFKWIRIVFACWKANTPYDESLYINALIKRNSSPSST

SEQ ID NO: 148081 - protein, 370 aa, unidentified
MKKSTMYVGLDVHKNSIEIAIAESGRRSEVRSYGSINGTRSALDKVIRKREAKGDSLSFVYEAGPCGYEIYRHLQSKGYDCIVVAPSMIPRHSGNRIKNDRRDAQMLARLHRAGELTNIYVPSLEDEAMRDLTRAREDAKAVERKAKQRILMFLLRHGHRYGGKTPWSKAHFNWISTLRFPHPAQHVVLQESLDALSECTARVNRLTEQIQQLLPEWRMYPVVKALQALRGVSLVVSATTVAELGDLTRFDSPVELMSYLGLVPSGHSSGESTRRGSITKTGNGHVRRVLVEAAWSYRLPARISAKLHKRQEGISREVCDISWKAQLRLCTRYKRLLAKGKANQLIITAIARELCGFIWAIANEVEAAKA

SEQ ID NO: 148082 - protein, 443 aa, unidentified
MDWASEKHDVLVQDVGGEQVLAATFAHDERGLTAMCNTLVRAGVVLVAIERPDGLLIERLLDAGLRVMAIHPNQVAAARPRFRASGGKSDRFDAFVLCELARTDSHRFRVLIADSDDTTALRALSRAREDLVQTRVALANQLRAELERFWPAGAQVFADVDSPIGLAFLQRYPSPADARGLGEQRLAAFLARHAYCGRKTPAQLLAKMRDAPHGRAGDAEIEARRAIVLALVAALRPIVTKISELTREIAHRVRAHPDGHVFLSLFRDPKSVVCAAALLTEIGDCRTRYHCADALAADAGMSPVAVESGKRKVATFRRGCDHRLHTAVATLADATRHWHPWAADRYTTARARGQDHQRAIRTLGRAWIRVLWRCWQDNTAYNPARHRGLQQHIAVSIPDPSSPRLDMKATQRIAGAAITQQAARSAEREALDSQPTSATTPEG

SEQ ID NO: 148083 - protein, 410 aa, unidentified
MEVLYPHCAGLDVHKDTVVACVRHMTDGVVRREVRTFKTTTTDLLALSEWLASEGCTHVVMEATGVYWKPVWHILSDGDIALTLANAAHVKNVPGRKTDVNDATWLADLLAHGLIRASFVPDAATQEQRGLLRTRKQLVRERASHVQRLQRTLEDANIKLDSAISDVTGVSGRAMIQALIDGEADPARLAELAHRRLKTAPETLREALRGRVTKHHRFLLALHLKQIDALDEAIAGIDAEVDRHVEPFRAAIAQLKTIPGIGDLGACVILAEIGHDMSRFPTQRHLISWAGLCPKNDESAGKRRSSRMRKGAPWLKTTLIQCAWAAARKKGSYLQAQFYRLRARRGAKKAIGAVAASMLTAAYHMLKDGTFYQDLGADHFDRRAKGVAAKRLIAKLESLGYDVQITPIAA

SEQ ID NO: 148084 - protein, 339 aa, unidentified
MTEVSTIGLDLAKRVFQVHGVDKTGEVVIRRALRRSQVLTYFAKLAPCLVGMEACATAHYWGREIGKLGHRVKLMPPAYAKAYVRRNKNDPADAAAICEAVSRPSMRFVEIKTEAQQAAGGLHKVREMLMKQRTMLINALRGLMAEFGIVVAEGPQHIGELVAILADPEDRRIPAPLHEALTRMAEVLRGLEGQIEGIDKQIVTWGRGNETCRHLITAPGYGPILSSAMAAIVVNPAVFRSGRDFSASVGLVPRQDGTGGKVKLGPISKRGNGYLRRLLVNGAMSVLNSKRAKQDPWLVKLLQTKERKVAAVALANKMARIGWALMMRQEDFRAKPAAA

SEQ ID NO: 148085 - protein, 443 aa, unidentified
MTRKNQKRFEVIHPDCAAVDVGGREHLAAVDPSKYSDPVKRFSTFTDDLHAMADWFESMGVKLVAMEATGVYWIPLFEILDRRGFEVYLVNSRATRQITGRKSDVLDCQWILLLMTHGLLRGAFRPSDNVCSLRSLVRQRGNKVRDQAKALNRMQKALVQMNIQLAQVISNIAGVTGMSILRAIVDGERDPEVLAMLRDKRVKADQATVARSLRGNWRAEHLHALSQELAAYDFLEKQIGECDQAIAFALERLPVLQEQVIPPSKTLRNPHRSNEQQSVLHRALNQVMGVDLTAIPTIGIDTALVLASELGPDLSRFPTSQHFCSWLGLAPPTRISGGKPLAGKGVKVINRAAQALKQAASIARNDKSFIGASHRARLTRMDTCCAIKATAHQLARLIYAMLTKGQPYVEKGIEEFEERSRDRQMRALERKARKLGLELVKAA

SEQ ID NO: 148086 - protein, 334 aa, unidentified
MQYTHRLGIDISKRTFEVALMQNLANSNINHNKFDNDIKGFKSLVSWLKKGGISMEQILVCLENTGIYHRGLVGFLQKQEVFVWVENPRQIKCSIGIQKGETDALDAKRICLYAFKNQEAAQNYQPNDKGLQAVADLLALRDRLNTARCSLEKPIKELKEMNLIEEAKRLEKACKNSLKEIAKDIAEIEDEMKSIVEADQEVKKNYQYILSVEGVGMITALEILVNTHNFKRFEDAKKLACYSGIVPHPHQSGTSVRKKSRVDHMANKILKKALHMCALSAIRCKGDFKTYFERKVKEGKNKMLVLNAIRNKILDRIFACVREQRMYVPLRLVA

SEQ ID NO: 148087 - protein, 359 aa, unidentified
MQRNKISFMGQKIFVGIDVHKRKWSVATITESGLERVHTQNASAQELIDFLHRHYPEGDYLAVYEAGFTGFSTYYALADAGVDCMVIHAADVPTTQYESVMKTDKVDCLKLAKSLRVGSLNGIYVRPKDSIDDRGVVRVRRAVIKDLSRYKIRVKHLLMNNGVKLPEQFDKRKGSCWSGSFIAWLKSDIKLLSTTRRSLDLLIAQVERMRQAQLQATRELRSLSSTAAYRDNYGLICSVPGIGGIVAMTLLTEIHDIGRFNNERQFASYLGLVPTSHSSGDKTIHGEMTFRGNKELGPLMIEAAWIAIRNDVGLAASFSSYCRKMKPQQAIVRIARKLSNIIIAVLKSKKKYVPYTPNG

SEQ ID NO: 148088 - protein, 342 aa, unidentified
MHHAAIDLGSKESQICIRQPDGAIVEERKLPTRKLTELVKTWPTSRVVMEASAEAFKIADAALAAGHQVRVVPGKLVRLLGVGDRGVKNDQRDARQLSQASWQTDVPSVHIPSLAARELKSICGARDVLVATQRTLSNNVRGWLRTQLWKLPSGKMVTLPERLRTHARSNNHELPEHIERQLTMLTQVAEQVKAADRQARKLATEHSVCRRLMTVPGVGPITALRFVAAIDDPSRFSSAHRVQSYLGLTPGEHSSSERERKTGITKAGPSELRRCLVQGAWAAMLARRPHPMLEWARQIAERRSRPVAAVALARKLAGILFAIWRDGTTYEPKRAARRSAPL

SEQ ID NO: 148089 - protein, 316 aa, unidentified
MLQRRFIGIDVCKARLDVAFRPGGDALTVSNDARGIARLLKIVKSAEPECIVLEATGGFELRLLEELSANSAPVVLVNPRQVRQFARASGRLAKTDTIDAAVLAHFAEVMQPSERLLPDAKTRELRALLSRRRQLVEMITAETNRRTHALELVRQGIAVTIRCLRRQVAILDRKLAAFIQQTPVWQRKAELLRTTPGVGPITSATLIAQLPELGTLNRKQIAALVGVAPFNRDSGIMRGQRRIWGGRSQVRTVLYMCMVAALGRNPVIHAFYQRLRAAGKPGHVALVACMHKLIIILNAMLNQGTSWSPPLLANQV

SEQ ID NO: 148090 - protein, 315 aa, unidentified
MIKDTIGVDISKDHLDAHRMSDGAARRFANDTAGHSAFIDWLGQAGPAHDIRVVYEPTGPYHRAFERQVDRAGAALVKVNPRQARRFAEATGKLAKTDRADAAMLARMGAILELEVRSVRGPLLNDLKDLHMAREALIKNRTAARNRAKNLTLAILKRHNAEQLRQIERQIIAIEREIMLIIKHDPDLAGRFDILVSIPGVSTVTAFALLIDMPELGTLEQGQAASLAGLAPVARQSGTWSGRAFIRGGRANVRHALYMPALVAMRFNPDLKAKYDQLKAAGKAPKVAITAIMRKLIVLANALLSKGRKWVPSLP

SEQ ID NO: 148091 - protein, 416 aa, unidentified
MEVLHPRCAGLDVSKTDVKVCVRLASGGRTKATETVTTWESVTNQVLALREHLIEQGVSLVVMEATGDYWKPFYYLLENGPFELMLVNARHAKNLPGRKTDVSDAAWLAQLGAHGLVRASFVPPQPIRQLRDLTRARTTAVRSRAKEIQRLDKLLQDAGIKLSSVASQTLGVSGRAMLEALIAGQRDPEQLAQLAQRRLRPKIPQLTEALTGHFTEHHAFLCRLLLDTIDQYERTVTELTTRIEVVIKPFQGARDLLVSIPGISTAVADVVIAETGADMSRFPTAGHLASWAGTCPGSNESAGRIKSSKTRPGNPYLKGALGIAALAAARSKDTYLSTKYRRLASRRGPMKALVAVEHALLIATWHMLTNGTYYQDLGADYYASRTPEKATRRAVSQLRKLGFTVTLTPESPAVVT

SEQ ID NO: 148092 - protein, 340 aa, unidentified
MFTNFVGIDVSKSKFDLALIKGQDKDHVIQAVFDNTHKGIKSMSKFLEREHKVQLSETIFCMEFTGVYCYPLTDFFVKKDCHVWIEMPVNIIRSLGLQRGKNDRVDAHRIALYAYKNRDDVKLWKPQREAILKLRDLLALRERLIVAQKSLQMPINEKISMGDKKGAEMVRKGCQKSMSSLENEIGQIDKNLDDIIKEDPQLKELFQLATSVPGIGKLTALFMICFTNEFSMYTNPKQLACYCGVAPFEHSSGSSIRGRTRVSHMANKVLKRMLHMGAMSVISRDPELRDYYQRKVAQGKNKMLVINAVRNKIIHRLCAVIKRGYEYQSENIFKERLVMS

SEQ ID NO: 148093 - protein, 347 aa, unidentified
MYPFYLGIDLHLKRTYLVLMNGEGEVLDKQRLKNTDIPAYITENVPKETYAVMEATRNWPFFYDLLDKHVDRVELAHAKGVRMIAEAAVKTDQIDATVLAHLARLNFLPIAYAAPKEIRDLRQHLRYREWLIDERRRAKNRVHAVLAGYNLASPVTDLFGRAGREWLQEVVEEELRFSSKKVVIETLEMINQLDIQIKELAKDIPLPEELEPKAELLMSMPGIGKLNSAVILAEIGDINRFSSPKALCNWAGLTPRVHKSDEVVRHGRISKQGSRYLRTAMVSAAMTACRISPRWYGVYEHLSRRIGRRGAKVAVGRRLLTVVYYMLKRDQPYEEDYEQRRSVEQGA

SEQ ID NO: 148094 - protein, 351 aa, unidentified
MIGGVDTHTDIHQAAVIDSVGRHLDTQSFETTSAGYGQLLAWLRAQGEVIAVGMEGTGAYGAELARFLTASGITVVEVDRPDRRARRAHGKSDPIDAYAAATAVLSGRASGTPKSRDGIVEAIRALRVVRKSALKARTQTINQIRSLMVTAPSALRDKLRGLPTSVLIDTLARTRPTADLTDPACAAKTALRRLARRYQALQQEIKEADADLAPLVTRAAPSLVALPGVGTETAGQLLITAGDNPDRLRSEASFAHLCGAAPIPASSGRTHRHRINRGGDRNANSALYTIVLVRMRHDRRTRDYVARRTAEGMSTKDIMRCLKRFVAREIYRHLRSTSILNTDPADQLDDL

SEQ ID NO: 148095 - protein, 350 aa, unidentified
MLIIGCDYHPGFQQIALVDTETGELEERHLAHRQEAEQFYQELKQRNVAVRVGMESSGHSRWFERLLRQLEFELWIGDAAEIRTKRVRKQKTDRQDAQLLLRLMMEDRFPRIWVPDAANRDMRQLLWHRHRLVQMRTRVMNQLHVVALNEGLRRKKALWRPAGRSELESLVLAPWASRRRQDLLDLLDQLTPKIQELTRLLEEEVEKRPVTRRLMTHPGVGPLTALAYELVIGTPERFHCGKQIASYVGLVPTEESSGDRRRLGHISKQGNVLLRFLLVEAAQVTVRSHPEWRSTFFHLAMRRGRKIAKVAMARKLAVHLYWMWRQGRDYGQLQKLGSHAGEPGNRDGGQ

SEQ ID NO: 148096 - protein, 370 aa, unidentified
MKKNSTRRQSPKRAAARNEEPITIGLDLGDKTSRYCVLGGGVEPLSEGSVATTRKAMTQKFAGLRRCRIAMEVGTHSPWLSRLLSQLGFEVIVANARQVRLISASSRKNDRMDAQLLARLARADPRLLWPIRHRSEQAQSDLMVIRIRASLVEARTSLVNAARGFTKALGERLPSCDTDSLGVEKTEALPECLRDALRPLLEQVEALTEKIKESDAKIEQIARTQYPETELLRQVSGVGTLIALTFVLTLEDRERFQKSRDVGCYVGLRPKQSESGQSQPQLRISKEGDRYLRTLLVQGAHCIVSRRGPDTDLKRWGLKLAGHGGKNAKKRAIVAVARKLAILLHRLWVTGEVYEPLRNSPTVRSKKKAA

SEQ ID NO: 148097 - protein, 387 aa, unidentified
MPKTSDRSEVPAAVHTRIAAIFVSLELSRKVWLVTSLSPGAGEKMSKHSVPAGDVAALLLRFAELRRKAQARTGDCFSIVTIQEAGLDGFWLHRLLESEGVESHVVDPASIAAPRRRRNAKTDRLDGEALLRALLAFKRGEPRACAMDVPPTPEEEDRRRLSRERKTLIAERVEHVNRIKGLLFSQGVSDFEPIERDRRKRLEELRTGDGRPIPIHLKSAIARELDRVELLIDQIKTVEAERDKLLAEQRPDASPSPGAMLLAFKGIGSEVASVLWSEAFYRHFDNRRQVASYAGLAPTPWQSGSVSHEQGVSKAGNPRLRSTLIELAWLWLQNQPQSGLSLWFKRRIGDGRGKKTTIVALARKLLVALWKYIAFGVVIDGAVMKNA

SEQ ID NO: 148098 - protein, 417 aa, unidentified
MEKGEKASTCRYIGLDIHKYYSVVAGVDRDGKEVLSACRVEHMELEDWLKKHLLPTDRVVIESTTNAWHVYDLLEPLVAEVQVANPIKVKQIACARVKTDKKDTFILARLLAANLVPTVWVPPMHVRELRQMVSHRRRLAGMHTQVVNRMHSVAHRHHLSHPKGKDFQEKNTGWQKDGSLSRLEKMQLELDMEMREHLEKQVGRMTRELARLSHEEPWASDMLYLMQVPGCGVVTGMTILAAIGDITRFETPKALASYSGLVPGLEQSGVKLRGKGITKEGRKELRWVMVEVAWRAVKADPHWKKYFETLQKRMHKNQAIVAIARHLLTMVWYVMTRHEPYSHYSPERIAYKYLTWAWALDTEQRQGMTRPQFARYYLMRLGIGNELERVALNPKFPYRLASMEDVLELHPELRPPE

SEQ ID NO: 148099 - protein, 320 aa, unidentified
MAESFVGIDVSKARLDVSARPSSERWSVPNNERGIADLVDRMLKVGPSLIVLEATGGFELACVGALAAAAAPVVVINPRQVRDFAKATGRLAKTDAIDAEVLAQFAEAVRPEVRVLPDETTEELKALVARRRQIVEMLGVEGNRLLSARPRVRPDIEAHIAWLKKRLGDFDRELEACIRSSSVWREKENVLRSAPGVGPVLTTSLLANVPELGSLNRKQIAALVGVAPLNRDSGTLKGRRTVWGGRASVRAALYMATLVAVRHNPVIKQFYVRLTSAGKPHKVAMVACMRKLLTILNLMIRDGKRWQFSDAPLLDIKDSC

SEQ ID NO: 148100 - protein, 403 aa, unidentified
MTVRPLVWVGIDVGKTSHHACAVDETGKVLWNQKVSNEQRAIEQLIARAHKGADEARWAIDLTSPMALMLITVLLGAEQSVVYVPGHVVNTMTGAFRGEGKTDAKDARVIAETARMRSDLSEVAMPDELVVELAQLTGYRTDVMADWVRGVNRLRSLLGSIFPGLEAAFDYSNRTPLILVAHLCTPAEIRAAGIKGVTAYLGDNGGWPTAIAKTAATAVAAAKQQPLALPGEAGTAALVKRLARKLLDLDHEIKDIDKTITERFRDHPYAHIIESLPGFGPGLGAEFVVVTGGDLASFATAGRLASYAGLVPVPRDSGRISGNLHRPKRYNRRLRRVFYMAALSSIRGDGPSRQFYDRKRGERLIHSQALLALARRLVDVLWALLRDGREFTPDKPTPATAAA

SEQ ID NO: 148101 - protein, 391 aa, unidentified
MIYVGIDVSKDKHDCYIVNSDGVVLADVFSVENNLDGFDLLLQRLKSVAPDLLNVKVGLEATGHYSYNILGFLLDKGLATFVLNPLHTNLFRKSTSLRRTKTDRVDARTIAAMMSSGIVLKSYTAISYHNEELKSLSRYRFDKVRQRAKLKQAVSRLVTILFPELEKLVPSLHIASVYALLAELPGAKQVASCQLTHLTNLLSAASKGHYDRSKAVVLRNAARRSIGSAMPAKSLELQHTIRLIRELDAEISEIEAAIKQIMDQIASPILTIPGISYRMGAMILAEIGDFARFDSPDKILAYAGLSPSTYQSGKLDNAYAHMEKRGSRYLRYALYNAAKYVCHWDASFCAYLAKKRAEGKHYNVALSHAAKKLVRLIFALQRSGQPYCPTA

SEQ ID NO: 148102 - protein, 369 aa, unidentified
MGEDSTVFVGLDVAKNRHAVAVAEAGRGGEVRYLGEIGADTVSVRRLVARLAKRHGKLHFCYEAGPTGYGLYRMLTAMGHGCSVIAPSLMPRKPGDRIKTNRRDAVQLARLLRAGELTEVWVPDGAHEAMRDLLRLRDAAVNDVRRKRQGISSMMLRTGRVFEGKTSWTRKHRQWLQRQRFDYPAQDLVLQDMLVALQQAEARLEQVEDKVREFVPQWSLAPVVAALQALRGIRLVAAASIMAEVGDLGRFATARQFMGYLGLVPGEHSTGDKVRRQGITKAGNTRARRTLIESAWSYRHLPRTSPRQRRAQEGVSPAIKAIALKAQSRLCGRYRKLAAKGKRLTVANTAVARELAGFVWAIGRAALAV

SEQ ID NO: 148103 - protein, 344 aa, unidentified
MKKVLIGIDFSKEKFDVAIIVKSTSTQEHALFDNKVSGYRKMIKWVNSVVEDVPCSSWLFCGETTGGYSRMMSDWLYAQGYDVWIENALVIKRTFPLKRLKNDTVDAFMIAEYALRFEDRVQLYEPLSQALTELREIFLYRHHLVRHRCSFEVRRIEKRFTQQKSANKNVISQSARHIITEINKEIAKCDEKIKEYIESDDQLSSIFAIVTSMPGVGTINAVSLMVYTNNFTKFAYNPRKIACYYGIAPFGRDSGTSVHTDPRVGFIANKMLKSLLTQAALASVRTCPQIAKYYQRLIERGKKPMVALNNVKNKMIAIITAMVRTGCMYQPDNICLATKSVNVK

SEQ ID NO: 148104 - protein, 426 aa, unidentified
MHDNRNERINQISEDTLVIGVDIAKCVHYACAVDERGREVKKSFSFRQSRQGFETFYATILKVMESHQKKNVVVGFEPTGHYWMNLSSYLTDRGIRFVLVNPLHVKQTKELDDNLQSKNDPKDARVIAKMIPQGYYSIPRDMTPIEAELRHGSAFRARLKKQGASTQNRIKRWIDLYFPEFISVYKSIGMNASTVLSSYPLPEDLVREDPEKLLENLKNLGGKHFSVKNLTKLLDVAATSIGYQESPEMARAEIQILLTQMKLLEEQLVSIEKQLVTLAKQMTDFDLFLSVPGIGENTVVEILSEIGAFSHYKSPRQILKLAGLTLVTNSSGKKEGNKRLSKRGRKRLRSLIYKAIFPILHAIPAFRSLYDYYSEHREHPVAKKEALLILCRKLIQVLHGLSKRGETFNEERMVADISFFGNQEAA

SEQ ID NO: 148105 - protein, 369 aa, unidentified
MKHSIIFVGLDVHKDSIDIALADDGRNGEIRFYGTIGGDLDSLDKAIRKFRRSGVELRFVYEAGPCGYELYRHLTTQGFHCDVIAPSMTPKKSGNRIKTDRRDAITLSRLYRSGELTPVYVPREDDEAMRDLVRGREDAVNATRKARQRLSAFILRHGFRYSGRNAWSVAHLRWLANIKMPHPAQQITLQEYIHSVEECSERVDRLTEQILKLIPAWRMAPVVAAYQALRGVAPIVATTMVVEIGDLRRFENPSQLMAYLGLVPSENSSGQTTKRGGITKTGNSHARRALIEAAQAYSHPARISRELRKRQEGLSREIKEISWKAQIRLCGRFRKLQARGKNRNRTVTAIARELSGFMWAIAKEVPMSA

SEQ ID NO: 148106 - protein, 410 aa, unidentified
MIFVGDDWAEAHHDVYLCDEAGTRLAAKRLPEGIEGMTRFHDLVATHAGDPGEVIVGIETDRGLWVQALVEAGYVVYAINPKAASRYRDRHTLSGAKSDPGDAKMLAELVRTDRHNHRQVAGDTALAEGVKVIARAHQTLIWERTRVTNRLRCSLREYFPAALDTFDELAGRDTLAVLATAATPTQAAKLTPAKIRTVLRQAGRQRNIDTRADTIAAGLRTDALRAAERVEAAHGATTRASVAIIAALNTQINVLADELANHFEQHPDSDIYLSLPGVGVVLGARALGEFGDDPNRYANTKSRKNYAGTSPITRSSGTRSVALARFARNNRLADALDQWAFSSITASPGARAYYDRRRAAGDSHHKALRALANRWVGILHGCLDHRTHYNENTAWAHRIDSDLKRIAQAA

SEQ ID NO: 148107 - protein, 413 aa, unidentified
MNCTQNKKIEQVKETTMIVGIDVGSEKHYFRAFNWRGIELTRKPVAFSNSMEGFNSFYNTIVELMQKSELEEALVGIEPTGHYWFDLGQFMGEKDIKFVMVNPHHVHKTKELDDNSPSKNDRKDPRVIAGLVRDGRYFYSYMPTGAYAELRNASNRRFVLVEEQTRAKNRLQKWIAVYFPEYKGIYTHIDAKGGMLVLKKAPTPEEIVRLGVEGIIKIWKDAKLRGNGHKKAMLILAAAMRSIGLKAGLTEARMEIQDLIEDYELQTVRYADKLLEIKGIGITTVAGFIAEVGDITRFDSTKELQKLAGLELVADSSGKHNGKTKISKRGRKRLRYLLFEAAISVVGKNEEFKEIHRYYTTREKNPLKKMQSLIVVACKLIRVFHAILTKGIRYDASKMLKDIRHPGEQLKAA

SEQ ID NO: 148108 - protein, 320 aa, unidentified
MSALSVTVGIDVAKAHVDVCVLGTHSDVLRFANDVDGECALAAALQSMDVGLVVMEATGGYEAALACALQAVGLHVAVVNPRHARDFARSMGRLAKTDAVDARMLAELAAVLMRRDDLARFLRPVADERQQWLAALVTRRRQLLTMLNSERQRLQITPRKLHPSIEAIVAAIKAQLDDLERQMVGHVREHFGELDGLLQSTNGIGPVASATLIAQLPELGRLNRREIAALAGVAPVANDSGNRKGRRRVQGGRFEIRRVLYMATLTAARYNPVIRAFYERLRAAGKLPKVALVACMRKLLTTLNAMVRTGKPWDPSLHRA

SEQ ID NO: 148109 - protein, 343 aa, unidentified
MKLSRVGIDLAKDVYQLHGVDRFGKMVWKRRLKRHQWLKVLLDKTDPGCVIGMEACGSAHHWGRELQSRGYTVKLIPPQFVKPYVKSNKSDAKDAEAICEAMSRPNMRFVTVKTVEQQDIQATHRIREELKGRRTAKANQIRGLVAEYGLVAPKHMSSLRAAIPCWLEDAENGLTHYFRSLLHGLWDDLLMLDDRMCEMDKTIKRLAKDNEDCVRLQQLRGIGPMTSTAMIATVGDARQYHNSRQMAAGIGITPRQHSSGNKQRLLGISKRGDVYLRTLMIHGARSVVTGAKNKDDPLSRWVTEIAKRRHPNVAAVALANKNARMAWAMLRNKTDYDPDFAMS

SEQ ID NO: 148110 - protein, 362 aa, unidentified
MLIIGCDYHPSGQQVFGIDKESGEVFADRWIAHTGNELDEFYGGLPAGTVVGVESSGNMLWFERRLQQYGHQLRLGDAAQIRTKETRKQKHDRRDAELMARLLMENNFPDLKWVPSLAERDQRQLLMHRHKLVRMRAQVKNQLQHIAMNQGQQKKRQLWSKAGRELLEKLQLDPWTARRRDDLLRWLDLLNGDCENLERAVEQAAEARADARLLMTHPGIGPVISLAFVLTIGTIERFERSRQLVSYLGLNPSEESSGERRRLGGISKQGSGFMRLLLIQGAQTAVRGDEALLRQYRRLAAKKHRAVAKVMVARKLAVRMFWMLKTNQRYPELVRMRGSSSHLVVSKTDRLSERPASLRIQP

SEQ ID NO: 148111 - protein, 370 aa, unidentified
MLDTTTFVGLDVHARSIKAVSLDVMTGEVRCATFGYDAGAVAEWVRSVDPKAKCVYESGVTGFDLQKRLSGLGVDCVVGAVSKMIKPSADRRRKNDRNDAEFLARMLSVGNVVEVWVPDDECEAARDLTRALEDARDDLSRSKQRLSKFLLRHGLVFDERTPTGRRKGNWTRAHWSWIESIRFAEGADNDALAYYVDAVRRAAEEKARLEGLVEAEARKPRWRRRVDSLRCLKGVDTATAADLVFEAGEFSRFRNARSFAAWVGLTPSEHSSGESDRRGAITKAGNKHLRKALVEAAWHYLTCSGRPKDLAKGQAPDPAARRHAAKGVRRLVERRGALLARGVHNNKANVATARELACWVWAVGLMAEEA

SEQ ID NO: 148112 - protein, 469 aa, unidentified
MDKSKKQKRKNKKHRKVDSSNLEQLNLNAAGIDIGAEFHYVAVPNGRDPEGQDVRHFTTFTADLHKLADWLHQCNIDTVAMESTGIYWIPVFEILDSQGFDVRLVNPRNVKNAPGRKTDVVDCQWIQQLHTYGLLQSSFRPENQICELRAYLRQRAMLVSYASHHIQHMQKALEQMNIKLSQVISDITGVTGMKIIRAIISGERNPVKLASMRNARCNNSESIIAKALEGNWRSEHIFALQQAVELYDFYKNQIIACESQIQHHLESFDDRSNGTPLEKPPRQSRGSSNQFHFDARLYLHRMTGVDVTRIEGIEGPTALNIIGEIGIDMSPWPTEKHFASWLGLCPGSKISGGKVLSSKTKPSANRAAHAFRLAAYSLQRSKSAIGAFLRRKKAQKGAPKAITATAHKIARIFYNMLKYGTEYVDLGQEYYEQRYQDRVVANLKRKAKQFGFELVNIKEHELLTELPAS

SEQ ID NO: 148113 - protein, 379 aa, unidentified
MEITTKPQPSADIEHATLFVALELSKAKWLVALYAPDREKISEYTIDGGDAPALLALIEKRCAQAHKKLGRPMRVMSCYEAGYDGFWLHRFLVSKDIDNRVLDAASILVSRRGRRAKTDRLDVAGLLRSLMALARGETQVARVVHVPSVEDEDRRRLSRERRRLIAERVAHVNRIKGLLMLHGVRDFVPTRRNWPQQLSTLECAEGSKLPARIRTEITRECHRLHMVIEMIKQVEAEQAELTEQVPGPAKALMQLKGLGPAISAILSQEVFFRDFANRREIASYLGLAPSPWKSGGIDRDQGISKAGNRHARQAAVELAWLWLRHQPGSALTQWFKVRVGDMRGRIRRITIVALARKLIIALWRYLKHGLVPEGAILKA

SEQ ID NO: 148114 - protein, 351 aa, unidentified
MKNHKYVALDVHKASVTMGVRDGAGKCVGHAVVQTKAETIKELIAGLSGTIHVTFEEGTQSAWLYDLLKGRVAECVVCDPRRNKLLESGSKSDHIDVDKLSELLYLGGLRSVYHGDHGTRALKELVHNYESLVKDQTRVKNRLKAIFRGREISYQGAELYQLKERQQWVSKLNERGVRQRTEQLYEQLAALEPLVVAARQKMLRESRQQKASKNLQYISTLGEISVAELIGTVDTPYRFRSKRQFWTYCGLAVVRHTSSDYRFEQGELQRRRKSGPTRGLNQNYNRRLKKIFKTAALTGSHTGPFKPYYERLVQRGLSPELAQVTLARKIAAVTLNLWKKGERFDPKNLQS

SEQ ID NO: 148115 - protein, 333 aa, unidentified
MKIFVGIDIAKLNHFAAAISSDGEILIEPFKFTNDADGFQLLVSKLESFDKNSIIIGLESTAHYGDNLVRYLVAEFYQVCVLNPIKTCQMRKNNVRKTKTDKVDTFVIAKTLMMQDDLRFITFFDLDMMDLKALERFRQKTIKQRTRLKIQLTTYVDQVFPEIQYFFKSGLHQNAVYSLLKEAPSPKEIASMHMTHLANLLKVNSHGHFTKEQAKELRVLAQKSVGANDSSISIQITQTIQQIELLDSQLEKIEAEMTDIMRFNDSVIMTIPGIGYINGGMILGEIGDIHRFSNPNKLLAFAGLDPSVYQSGNFQAKTTRMSKRGSRVLRYAL

SEQ ID NO: 148116 - protein, 449 aa, unidentified
MAQRSGLTRGDRRRNSRIEALRAVVRPDRAVLSIDLGEDKQVAALIDHDCRIRGRRVVKAKAHQLGGLLAWAGELAVRQGFAGVVVACEPTGHRWRSVMGLADEARMGFVCVQSLRVHLEREADDYTRDKTDHKDAVLIGRLVVRLECYLPERADADWARLRHLGARRARLVTEATSCQQQIADLLGCSWPAALSAAAKPLESKTWLACLSVVVDAGADLAALAADGVGAFTAAARTQLPRFRSNRPYHRIVRDFFAALSDPAGVVNQRPGALERVGLVLADWQNAQARLSDVEFRMVGVLDAMGLTALVTSIPGVSVVGAAVILAETGDPSRFASARSVVKHAGLNPTENTSATFRGTTRVSHRGRPGLRVAAWRAVWGALPHNRVLAERYTHLTTRASDQLSAGQARAACAATLLRWLYAIVTHRQAFEATIASGRARTHRSEALAA

SEQ ID NO: 148117 - protein, 370 aa, unidentified
MLYLAIDQHSKQITVCVRNEEGDTVLSRQVSTRPEKIEAFLQQLTEMDPDFMAILEVCGFNDWLIERLRNWKCQEVVLIHPEKPSKRKTDRRDARKLADLLWLNRERLAANEPVHGLRRVYMVTQRERENRQLTALRKTLGQRRTRTLNKIHRIINCHNLIWDYPTKSFQTQAGRRWLEKVELPEFDRLEMDMLLKEWTTWDEQIAQVGEKIVERANHREPGEIFSAAQILMTAPGVSHYSALTLSSRIGPIERFPRPRSLANYFGLTPGCRNSGKATDRLGSITKEGSKIARFILGQLVLHFLKQDPQMRSWYRRIKKRRGSKIARVAVMRRITTVFWHMLTYQEAYSIGGPPPRLRQLNSPATRSDAA

SEQ ID NO: 148118 - protein, 412 aa, unidentified
MDVTVERCAGLDVHKATVTACIRLPGPDRERAQVIQTFGTTTAALLTLRDWLTAHQVTDVAMESTGVYWKPVYYVLEDAVRVLLVNAAHMANVPGRKTDVADCAWIAQLLECGLLRGSFVPPPAIRELRDLTRYRKALIQDRTREANRLHKLLEDAGLKLASVATDVLGVSGRAMLTALVAGTTDPAVLADLARGRLRAKLPALRQALTGHFRGHHAFLLTHLLAHLDYLDELLAALSQEIEAHLVPFAAAAARLQTIPGVKQRSAEAIVAEIGVDMTRFPTAGHLASWAGLCPGNNQTAGKRRRGRARKGDPWLKGTLVEASLAAIRVKGSRFGALYRRICRRAGHNVAIVAVAHAILEIAWYLLRHGTTYHELGADYLDRRDKQRTTDHYVRLLEKLGHRVTLEPAAIAA

SEQ ID NO: 148119 - protein, 408 aa, unidentified
MDTAFQFFAGIDWGSVKHRVCLISRDGQIMAERWIEHTGDSLAELAAWLRQHTSDSPSLLAAAIEIPRGAIVETLLEHGFTVFSINPKQLDRFRDRYSPAGAKDDRRDAFVLADALRTDMHCFRSVKLDEPTMIRLRELSRLDDELAQEQNRAVNRLREQFHRFFPQLLQLSECADEPWLWALFELAPSPLGAARLTEAKVARLLQQHRIRRLTAAQVRAVLKTKPLTLAPGAAEAAAEHALLLLPRLRLLHQQRADLGRRINAVLDQLATPAEDKHEHRDAAILLSLPGLGRKIAATMLSEASQAIADRDYHALRCYSGAAPITRQSGKKKIVLMRRGINQRLRNALYHWARVSVVFDPESKKRYAAMRACGHSHGRALRGMADRWLKTLTSMLTTRTLYDAQRRAA

SEQ ID NO: 148120 - protein, 345 aa, unidentified
MENMHYIGLDVHKKTISYCVKDGSGRIYAEAEIPATRLDLDIWMKTLPQPWTAAMEATIFTAWIYDHLKPHAAAVKVAHPLMLRAIAAAKKKNDRIDANKIADCLRCDFLPECYMASTEIRERRRTLRYRNLLVRQAVQMKNKIAVLLMEAGVSYNKQKLHKVGYFRELLATNQDIDEGLKPLLRLCRETVVRLGKTESALVRSLQRDSLLMERVERLMTIPAVGPITALTWALEVGDVRRFSSIKKAISYCGLCGAEKSSANIIKRTPLSKQRNKHLQTILIEAAKMAPRNSVDLAMIYDREKQKDNANRATLAVARKLVAYLVAVDRRQKDFLVVERENRTAA

SEQ ID NO: 148121 - protein, 347 aa, unidentified
MLADELDYVVGVDPHRDTHALAIVRAGTGAAVFPAQVAASEHGYAQALRLAEREAPGRRAWAIEGTGSYGAGLARFLARRGERVLEVGRTRQERRSHAKTDALDALRAARSVLGKAQLASPRAAGEREALRALMVARAGALAAKKAGLCQLRALLVTCPEPLRSELRSLTRARLLRRLAVVRPDRHQDAELRGTLIALRALARRVQALTAEERELKREIQALVARLAPALLDEPGIGPVAAAQVLLSWSHRGRFRNDAAFARLAGAAPIPASSGLVLRHRLDPGGDRQLNRALHTIVVSRRKHDPATSAYVERRRAEGKSVREAIRCLKRYLARHLFRLLEAGPIAA

SEQ ID NO: 148122 - protein, 413 aa, unidentified
MQVLYDRCCGLDVHKKTVVACVMVTSSDGQVHKQVRTFGTTTMDLLTLADWLASFQVSHVAMESTGIFWRPIFNLLEEGPTIILVNAQHMRAVPGRKTDIRDSEWLADLLRHGLLKASFIPAKVTRDLRDLVRYRKTLVQERAQEVNRLQKVLETANVKLSSVVSDVLGKSGRRMVVAMIEGVSDAEALADLARGSLRQKLPQLQEALQGQVGPHHRVLLRQIFAHILFLEDTIQQLQQEIEQQLCLFEEAFHLLLSIPGIQMIAAAAILGEIGCDMSCFPSAKHLASWAGVCPGNKQSGGKCLSGQTTKGNTRLRSLLIEVVWNISRMKDNYLSAQYHRLARRLGKKKAAMAVAHSLLVIIYHVLRDKQPYSDLGADYFDSLDKERLTRQSIRRLEALGYAVSLTPKQEVVA

SEQ ID NO: 148123 - protein, 390 aa, unidentified
MQPILKSCCGLDVHKSMVMACIAHGPLDKPPKFEIRKFSTMTDDLRTLKEWLKEYGVTAVAMESTGIYWKPIFNILEDDFEVVLANAQHIKNVPGRKTDVKDCQWIAHLFRNGLISGSFIPPREIRELRDLTRTRRKLVEAMTAEKNRVQKVLEDANIKISSVVSKVFGVSSLNMIGALLEKDTLSVDEIAEMAKGKLKRKVNQLVKALNGNVTDHHRFLLKQHLAHIDCIVERIREIDEEIQRKLRPYEKEFRAIQSVTGIKEVSAVSVIAEIGVDMSRFPDEAHLSSWAAMCLGNNESAGKKKSGKTRRGNNYLKATLTEAAWAASRTKGTALSAMYHNIARRRGKNRALVAVGHQILIEIYRVLKTGELYQDVGAEAVNGRKSKIGN

SEQ ID NO: 148124 - protein, 366 aa, unidentified
MKIIHWIGIDDHADKWTIAQFKGDEEKPAKEFELLPDATGYRKLIKFAKELGGEVRIVYEAGPCGYELYRRLTKAGLQCQVAAPSLTPRKPGDRVKTNRRDAVKLARYLRSNMLSLIVVPDQARESQRDLMRARHTVQKDLISIRHQITKTLLRYGHRYREGKTAWTDRFWTWLSKIKLEGEHGQFVLDEMIRTHAQRLERRVRYDQEIEAAAKKPEYAPLVAAFSVLRGIDRLSAMTILSELGDLRRFATAPQLMAAVGLVPSESSTGDKTTRFSITKTGNAHVRHIAVEAAWQYQRRITTGTKITRRRKDQPKALVDIAEKCDLRLNRKFHRMTSRGKLSTIAAVAVGRELIGFIWAIGQIAHP

SEQ ID NO: 148125 - protein, 482 aa, unidentified
MKAKQKEPTEKSTGQSSQLHWRQMNRKQRRDLERKIQSADLTLQLVHPDAAGIDIGNESHYVAVPPDRDSQPVQHFGCTTAELRAMADWLKQCRIRTVAMQSTSVYWIAVYDVLEQAGLEVYLVNARETKNLPGRKSDVQESQWLMKLHTYGLLRNSFRPPQEIRTMRTYWRQRNDLVRSAARHIQRIQKTLTQMNMQLANVLSDVSGVTGQAIIKAILAGERDPQKLAAFRDPRVKASEKDIARSLEGNWQEDLLFVLKQEQAAFEFCRKQMAECDRQLEQYLQKMEDRSQGATLPEEKRKDRLQKKKGNQPQFDLQQQLFRMTGTDLTQIDGIDVMTATTILSEAGWDMIKWKDEHHFVSWLRLAPDNRISGDRIIGKGRLPTSNRVTVALKLAASNLRTSQSYLGAQFRRLRARLDTPVAIKAMAAKLARLIYRMLRYGTKYVDNGSRYYELQQRTREIRRLKLKAATLGFHLVQSTAA

SEQ ID NO: 148126 - protein, 339 aa, unidentified
MSHSIGIDVSKATLQVYIPIKDENISIDNSVKAIRALYAKLKKYYKKEAKDIIFVFEPTGTYSSVLKHFCADKGIPAFIVNPRQSAHFAKALDNRSKSDIIDAVMLSKMAMMAEQGQIVVPIIDEVQETLREMLTLYKLLQKQRTALSNHLEALEAKKRITVITKKVKKEILHFKEQEALLVDEMLALIHADKKLSSDLKNITSFVGIGNLAGIALLHLFISYPEANRQQISALSGLDPIETTSGTSLNRRSKISKRGNSIYRSILFMPVLVSTRLNPHMKAFYDRLKANNKHSTVAHIAVMRKMILITHSLYKNNQPFDSELYEKRVAWHQETSSNIT

SEQ ID NO: 148127 - protein, 461 aa, unidentified
MPSARRTPKQLQLDGLPTIHPNAAGRDIGAEMIVVAVPPDRDPEPVRVFRTFTPDLRELADWLVACGIDTVAIESTGVYWIALYELLEAQGLLPYLVNSRHVRMVPGRKTDWNDAQWLQKLHALGLLQASFRPDAEIVALRTLVRYRAEVVQHRSPHVNQMQQALKVMNIQLSEVLTDITGRTGMAIMRAIVAGERDPVTLAQFRAPSCKSSQEMIAKALTGSWKAEQIFVLQQALALYDAYTAQLKVCDQRIEQYLQTMESRGAPNAPLPDLPPSKHDKKAKNEASFNARAQYARIVGSDLVAVLGLSAGHVQTIITEVGTDMSRFPTSKHFCAWLGRAPRNAISGGKVLHSHTAKVANRASQAFRMAAYAVSRSETAVGAYYRSMRARKGPQQAIVATAHKIARIVYHLLKTGENYIEHSAAEYEEQRRERELRQLTRRAHKLGLTLAPAPTLTDLPSI

SEQ ID NO: 148128 - protein, 323 aa, unidentified
MIIIGVDFHPEFQQIASVDTDTGEFQEKRLTHREEAEKIYRALACAGQKVRVGMEASGHARWFERLLAELQIELLIGDAAEIRTKRVRKQKTDRQDAQLILSLLLEDRFPRIWVPSWENRDLRQLLWHRHRMVQARTRIMNQLQAVALNEGLRCKKKLWRERGREQLESFRLAPWASRRRRDLLELLDRLNPTIAELSQAIQQEVEKCPEARRLMTYPGVGPLTALAFVLIIGEADRFQCGKQVASYLGLVPLEDSSGNRRRLGHITKQGSSMLRFLLVEAAQVTARSLPQWRSKYLHLMMRRGRKTAKVAMARRLVTPMEER

SEQ ID NO: 148129 - protein, 350 aa, unidentified
MNELNETTTAIWIGLDVAKDTFAACVNLEHIAGQEPQIRRMKTQEFERTERGVEQCLAWADQRLEGAGRPAAALRVCMESTGRYSQEAARWLWKTRPSTQPAIVNPRFIKDYGGSLRLRNKTDSLDARVIACYGADRNPPAWEIPSKEYQALQELSRQRHALVKTCAAEKQRMQETTLNRTVRAIQSRHVEQLQAHIQTLEDEIERTIEQCAPLAEDVRVCDTIPGVGKVTIGVVFSELGDLRKYARARQVTACAGLTPRIVESGTSLRKPTRLAKTGNRRVRGALFLAAMGALRTKKPNKLSRFYAKLTKAGKTKMQALCAVMRKILVLMRAVVISGEKYDDSYDPRTT

SEQ ID NO: 148130 - protein, 353 aa, unidentified
MTGETAMTLYIGVDFHPHQQTVSYCNNEEGEVHQALLVHNPEQVRRFYGQLPKAVVGIEASCTAAWFEQLLNELGHELKVGNPSAIRARARSRHKSDKRDADLILDLLLKDEFPELWRRPLPSQSVLEQLRFRHHLVKHRTQVCNRLQALAHAAGLPKRGIQTKRARVALVATNFTETQSFERDQMFELLDDLTQRIKQVEKWLEEKAAGDEKVELLLTHKGVGLLTALAVVHTLGDVSRFPSSKEAVAYTGLDPLEQSSAGKVRFGSISKAGSSVLRHLLGQAMHVAVRYDGELRSFYKRLASRRSKSIAKVAATRKLLIRLFIMLRDGIDYSEFKRRGSAVGMPVLSHGLQ

SEQ ID NO: 148131 - protein, 351 aa, unidentified
MSNVPQFFIGVDLHKIVIQICIVDKQGEIVKESRHRANNLSEGLDVVQELMPYKKNGIISVEAVGFNRWFVNALKQNDFEVIVCNPNMLNLKMSGKKTDRRDAFEIARRLMLGDIQKSAKTYYPDDDCFGKRKVIRTRHRLIEARQTITNQIRANLNAYKLPSGLDLKTKKTRKVLWGLEWPTEDMEVVFQSLMIAFENMTESIALLDYKLEEMSLDPMVSLLREHLPSCGPVTSAVIYYELGDVTRFKNSRTVASYAGLVPRVNQSADTSHHGRLTKRGNKELRHILGEWAIRLMHSDERVVAWAEPRLKRTHKNKIRMALARRLLIGVYKMLLTGELFSMERCLGMERG

SEQ ID NO: 148132 - protein, 379 aa, unidentified
MILAGIDVAKDKHDCFIMNSDGEILVKAFTFSNNLEGFNFLYEKIRSVTKPKDKIKVGLEATGHYSYNLLGFLLNKGLPTFVINPLHTNLFRKSLTLRKTKTDKVDSRTIAMMLMSDVALKPYTDTSYHNEELKSLSRYRFTKVQERSKLKTSVSRLVQILFPELEKIVCTIHMSSIYHLLEEYPGASYIASVHLTKLTNLLMEASHGRYNRNTAIKFREAARNSIGSILPAKSLELKHTIKLIRELTVEIDEIDAEIKKMMDSIASPITTIPGIGYSMGAMIISEIGDFSRFSSPDKILAYAGLSPSTYQSGQLNNCYSHMEKRGSRYLRYALFTVAQKVCIWDNTFAEYLSKKRAEGKHYYVAISLSLIHISEPTRH

SEQ ID NO: 148133 - protein, 321 aa, unidentified
MNKSTIFVGIDISKDVFDVYDSEDGHFQFSNDEKGFKLFKKQLTSAHWCAMEATGCYHQQLAITLFETGLRVSVINPLIIKRFVQMKLKQVKTDKSDSKMICLYALEQVLELWSPEPDYIVECKTLQGVVRLYFKQRTALKNTLHSISTSKRGKVKLKRSIVRQLKCLDKEISLLEGAIENLIRTHEKDLYTRLNTIPGVGKKTSMLLIVSTNGFRDFENSRQLSSYFGLAPNERSSGSSVRGRSRISKRGDSLVRNHLFLCSFTASVHNPQCKALYDRIVSKGKSKKLALIAVCNKLIKQAYGISKSGLDYDKNYVGRLS

SEQ ID NO: 148134 - protein, 369 aa, unidentified
MKKLSTVQASGSKIFKDPKLTIGLDLGDRSSYHCVLDEAGRVIHEGNVSTSNKAMGKVFGSMARCRIGMEVGTHSPWASRLLLALGHEVVVANPRQVRLISDSSRKHDRLDAQTLARLARVDPHLLRPIRHRSARAQRDLMVIRVRAALVEARTGLINTARGLAKSFGERLPICGSDQMGVEQTKLLPAELQQVLEPLLKEVASLTEKIKEMDRRVEQIAREDYPETELLQQVKGVGPLIALTFVLTLENKARFAKSRDVGCYVGLRPRRGDSGESQPQLRITKEGDAYLRKMLVQGAHYILGYRGPDTDLRRWGLKLAARGGKRAKKAAVIAVARKLGILLHRLWVTGEVYEPLRNAHAQQELKKTAA

SEQ ID NO: 148135 - protein, 321 aa, unidentified
MQSQNTIVYAGVDVAKATLQLHLQGQQREFNNTPNGHLQLVAQLQTVPSVQVVCEATGGYERAMVKVLHQEQIPVSVTNPARVRAAAQAQGQRAKTDRIDARGLTDYGQRYQPKATPPVSATQEQLVNLTQWLKQLIHGRALAKTQAEHHQDPFVRRQHAKLMTHLESQIEAVEKQIEALIEQDAALQQRVTCLDKIQGVGPRTAWMVLAHMPELGQLNRQEVAALAGLAPWTRESGTMKGMRCIGGGRPEVRLALYMAALSAARCNPVLRILYKRLRAKGKLPKVALTAVMRRLLTYMNHCIKALPSETAGAQTEELKAA

SEQ ID NO: 148136 - protein, 400 aa, unidentified
MIHVGVDIGKSKHAAAAVNDAGACVMRPRFFTQDAGGFASLFGALEGQGGAASVVVGMEATGHYWKVLRHALVARQYRVDVINPLITSREASADVRGRKSDKLDALAIANVLRKGGYSPAPGELAATDTLKVLARHRKALVARGSDAKRRLISALDVAFPEAAKTLGDLFGAASLAVVRAFPSARLGAAADIRTLTSLFAKASGGQLGREAAEAYREAARHSLSLAMDTKGEEFVITQIVDEIRAAADQIDEVERRILAEPQPIIARLLGSIKGAGRIQPMAVAAELGDPSRFAGPDMAKKVLAYAGCDPRVRESGKWKGRAKMSKRGSPTLRNALYLLAGTIRLHTPFFNAVYKRQVAMGKHHNVALSHVVRKIVEVMCGMYKTNTPFMPQQPEVTPCS

SEQ ID NO: 148137 - protein, 361 aa, unidentified
MADTTSLVTGGVDTHKDFHVCVAVDELGRVLGTEQFPTTLRGYRSLLRWLGGFGQLGAVGVEGTGSWGAGLARFLTDAGVEVIEVNRPNRQARRKRGKSDPADAEAAARAVLAGEAVGTPKAATGTVESIRLLRVARRSAMKARTQAANQVHSVIDTAPEELRAKLIGLKERERITKAARMRSNNTSTPLGAAKLALASLARRWLLLTEEITQLDTHLAVLVESAAPSLLGIKGVGVATAATLLAATGDNPTRLRSDRSFAALCGSSPVDASSGRQLRHRLNRGGDRQANCALYLIVLNRLSWDQRSKDYVARRAAEGKTKKEIIRCLKRYVAREVYEAIMGDMAEQVAPITTLKAFQRAA

SEQ ID NO: 148138 - protein, 422 aa, unidentified
MRILEPLQIFILEESVVLNAVGIDVSKERSTVAVLQPGGVIVHKPFDVPHKSRNLHDLAQYLGSLEGDTRVVMESTGRYHEPIRNALSKAGLFVCTVNPHLIKNYGNNTIRKVKTDSADAKKIARYTLDNWAELREYTSMDTTRTQLKTLNSQFSFFMKQKTAAKTNLIALLDTTYPGVNKLFDSPVRADGSEKWVDFAYSFWHVDCVRKAGITAFTDRYKRFCKHHGYEFQEAKANAIYKDSKELIATLPKEAVYKELIQESIRQLNLLSENVEHIRKTMNELASTLPEYNTVMSMYGVGPTFGPQLMAEIGDISKFQHREALTAYAGVDPGKNDSGQEVHNSSHASKCGPSRLRHTLFQIMTTILQTGVKKDDAVSSFLFKKKAENKPYLVYMTAGANKFLRVYYGKVKECLRNQEQAEE

SEQ ID NO: 148139 - protein, 441 aa, unidentified
MAMRKREEDQVFPNAAGIDVGGSSHWVAVPRQASDEPVREFGAMTDDLNAMADWLLSCGVDTVALESTGVYWIPVFEVLEQRGLKVWLVDARQMKYVPGRKSDVQDCQWLQKLMSLGFLRAAFRPTEEVCVVRAVARQRDVLLTEQASWVQRMQKALVQMNIQLTEVLTDVMGMTGQAIIRAIVAGERDPKALARHRNGRVKASEHDIAKALTGNWRDEHLFVLRQALAMYDDIGRHLSECDAKLQGLLNKLGQSKVDLGKTPRAGSKTRAEFDTRQILANWAGVDLTRINGLGLSAVMKLLSELGPNLSRFANVKHFCSWLGLCPGTKISGGKVLSAKTKRSANRVRQALKMAAMSLSHSDSALGAFYRRLSGRMDKPRANTATAHKLARMVYFMLTRGEAFVDEGQQRYEEQQRERSIAALKRRAAALGFQINPTSAPA

SEQ ID NO: 148140 - protein, 343 aa, unidentified
MQTITTIGFDIAKSVFQVHGVDAAGEVVIRRQLKRRYVLAFFQKLSPCLVGIEACASSHYWSRELQALGHTVRLMPPAYVKPYVKRQKNDMADAEAICEAVTRANMRFVPTKTPEQQSCLMLHRTRHLFIRQQTAVINSIRAHLAEFGIVAPVGRKGVTELLHVVADPSDKRVPEVARACLAALGTQLLSLKQQILEFDRLIMAWHRSNQTSKRLHYIPGVGPMLATALVASVADPRTFRSGRNFSAWVGLVPKQHSSGGKDRLGSISKQGDRYLRSLFVAGALAVIRYAKIHGTKHRPWLTALLGRRPTKVAAIALADKIARVAWAMMAKGERYKQPVALAA

SEQ ID NO: 148141 - protein, 411 aa, unidentified
MEVVHVRCAGLDVSKKDAKVCVRVAGSGRRKTIETVTTWGSTTSQILALREHLITEQVTSAVMEATGDYWKPFYYLLEDAGFEVLLVNARHVKNLPGRKTDVADATWLAQLGAHGLVRGSFVPPEPIRQLRDLTRTRTAITRERGREIQRLEKLLEDAGIKLSSVASDIAGVSGRAMLEALIAGERDSAALADLARRRLRSKIPALTEALNGRFTDHHAFLAKMHLDLIDQHSVAIEQLTERIEVVIEPFQGFRDLIATIPGIGPLNADIIVAETGADMTRFPTAAHLASWAGTAPGKNESAGKSKSSKTRPGNPYLQGALGTAAMACAQNPTTYLGARYRRIATRRGPQKANVAIQRSILTAIWHMATTGTLYDDPGADYFSRLHPERAKNRGLHQLEAMGYKVTLDRAG

SEQ ID NO: 148142 - protein, 346 aa, unidentified
MHHSTTVGVDLAKNVIQVSVVSARGKELINRSFTRTKFAEFLGKQKSSLVAFESCASAHYWARAAKRHGHEARIIPAKAVAPFRQGHKTDSNDALAVAEAARRPNIKEAPMKTAEQQGLQAIQRSRELLIGECTALSNHLRGILLEFGVAIPQGFASLLRALPEILEDGDNELPDLYRPTLHRMHQRLLELREDIESMTKEVDGLVKQHPVCKRLTAIEGIGPIGALSLYAVMGSGKAFTRSREFSAYLGLTPRQYSSGGKAYIVGISRKVGNRRLRSILIQGALAYVYRMKEPRSCKDRWLRDLIERAGPRRAAVALANKNVRTAWAMVTQGTEYQRRLQLEMAA

SEQ ID NO: 148143 - protein, 368 aa, unidentified
MEDDITVFIGLDVHKDSIAVAAADAGRCAPRFIGTCAPKITELCKTLAHLGQPAHALVAYEAGSTGFALARELAEHGWRCQVIAVSKTPRRPGERIKTDRRDALSLAGYLRSGELTPVTIPDARDEAIRDLSRAREDAVRARLKARQQLKAMLLRHGKPYTGKTSWGPTHEKFLARIAFDHPAQQIAWAEYRSTVLEAGQRVDRITQALREQVMDWRLGKLVQALMCFKGIDFVAAVTLAAELGDLHRFEHPKKLMAYLGLVPSEFSSGNSRSQGSITKSGNSHVRRMLVEAAWCYRYSARMSRPVTERQEGQPRSVCEVAWRAQLRLCTRYRRLCARGMHSNKICVAVARELAAFLWEAGRLVDYPA

SEQ ID NO: 148144 - protein, 388 aa, unidentified
MIYVGIDIAKLNHFAAAISSEGGILIEPFKFSNDYDGFYLLLSKLAPLDQDSIIIGLESTAHYGDNLVRFLISKDFKVCVLNPLSTSAMRKNNVRKTKTDKVDTFVIAKTLMLQDPLRFISLKDLDYIELKELGRFRQKTVKQRTRLKIQLTSYMDQVFPELQHFFKSGVHQNSVYTLLKEAPTPNDIASMHMTHLTHLLQTASHGHFGKDTARGLRILAQKSVGIHDSSLSIQITQTIEQIELLDSQLFHTELEMANLVTCLHSVIMTIPGIGTTNGGMILGEIGDIHRFPTPGKLLAFAGLDPSVYQSGNFQAKKTRMSKRGSRVLRYALVNAAHNVVKNNATFKAYYDAKRSEGRTHYNALGHCAGKLVRVIWKMLTDEVEFNLE

SEQ ID NO: 148145 - protein, 353 aa, unidentified
MPKSSESRPERTYAGLDVSLKQTAICIVDEAGKIVWERMAATDPEVIANHLFRHAPGLERVGLESGATSAWLWRELRGRGLPAVCLDSRHAHRVLSMKRNKNDRNDGRGLADLVRMGWYREARVRSLDAQLVRSMLLSRQQLLEARRAIENQMRGALKALGAMTGSTKGRRFMPRVIQLRAEQDWLGPVLDPLLAAHAAIAKQLKAVSNSILAAAREDADVRRMMTVPGIGAMTALAYKAAIDDPKRFTSSVKVGPYLGLTPRQHQSGESEWVGGIGMTNDPLLRSYLYEAAGVLMTRVRRNCPLKDWALRLAKRIGWKRASIAVARKLAVILHAIWRDGTVFEWKTAEPLAA

SEQ ID NO: 148146 - protein, 342 aa, unidentified
MKITTIGIDLAKTTLSVHGVDDNGKVVLRKSMSRSKLLEFMANREPCLVGMEACGGAHDLARRLIAMGHRARLMAARFVQPYRKSQKNDGNDAEAICEAVARPNMRFVPVKSAEQQALLSVHRVRLQLIETRTALINQLRGLLAEFGILMPKGRYQLRTHATPALEHPDLPELARTVLKELNTRIQALDIEILSQDRRIEAYARDNVLAQRLIAICGIGPISASAIVASVGDAKLFKNGRQFCAWLGLVPRQYSTGGKARLGRITKRGDVYLRTLLVHGARSALNVLAKRTDRLSTWIQSLSARRGYKKAIVALAAKNARIAWAVLATGKPYEPRGCAQAAQ

SEQ ID NO: 148147 - protein, 418 aa, unidentified
MNEDLFARLSRRYLALDIHKHYSVAAGVNFDGKVTLEPVRIEHADLEGWLKKHIQPTDYVVIESTTNAWHIYDLLEPLAEKVLVANPIKVKQIAQARVKTDIRDTLILARLLAANLVPVIWVPPVHVRNLRYLLSQRRHLVGMHTQTVNRMHSVAHRHHLSHPKGKRFNKKNTEWQQAEELSDSEKFQLELDMNTKKHLYEQAEKITKKLARMSHEKPWAESMMYLMQLPGFGVITGMTVLAAIGDITRFETPRHLASYSGLTPGLDQSGVKLRGKRITKEGRKDLRWAMVEVAQRAVKSDPLWKHRFNALQRRMHRNQAIVAIARRLLELVWYVLSRKQPYRNFSHERIAYKYLTWSWQLNDKDRDGLTRQQFTRYYLMRLGIGHDLTRIALNPKYPRKIASAAEVLALRPELSQIE

SEQ ID NO: 148148 - protein, 423 aa, unidentified
MKSLKTQTFTAYVGIDWADTKHDFCLQEPGSDRREFGCVAHQVECIDEWAKSLHQRFGGPIAIALELAKGPIVYALQKYDFLVLFPINPLTLAKYREAFKPSRAKDDPSDAELALDLLVRHPERFAPLQPQSAAMRTLISLTERRRELVNDKTRLTNRLTHTLKQYYPQVLDWFDQHDTVLFCDFLTRWPTLLQAKRAHQASIKAFFHAHNAHRPKLIAGRLAAIKASVPLTQDPGVIVPCTLHAMVLIEQLRVVLQAIEQFDRHIAELAPTLPDYSLFAGLPGAGPHLAPRLLVAFGEDRERFQRAEELQKYAGIAPVTERSGKKSWVHWRWQCPTFLRQTFIEWAGQTINKSFWAGAYYYQQRAKGSTYQAAVRALAFKWIRILYSCWKTRTPYDETKYLNALKRRQSSLLTNLVPNPQNA

SEQ ID NO: 148149 - protein, 398 aa, unidentified
MICVGIDIAKGKSTVCFLKPGGEVLRTPYDIPHTAEEITKLIRDIRSYDEEVRVVLEATGHYHLPVVAQLLEADIFVCVVNALRMKKFCAQDIRKAKTDKIDAAKIAAFGLTYWQDLQRAKPTDEVYRELRLLSRQYFQLTSMLVKAKISLGNLLDNVMPGIADVLQDRDPHHKLTDFVLKYLHFDKITAMGEKKFVSGYCSWAKKQGYRMYERQAEEIFALVQNSIPALPMTPSTTIVVKEAIRVVREIETSRTSILTQMQAFAKSLPEYFLIREMACVGDTLTPLVIAEIGDVRNFHSKHALIAYAGIDAPPYQSGGFNGTERHISKRGNGYLRHVGFEIMQCKLRLKPEGDPVYEFIQKKRSEGKCGKEAMVAGINKFLRIYYGKVTELYRELEA

SEQ ID NO: 148150 - protein, 408 aa, unidentified
MDVLYPCCCGIDVHESFVLVCLSQVEHGNVHKELKRFQTYTGDLKALCQWLREAKCTHVAMESTGIYWRPVYDQLFGFFEITVTNAQHMKAVPGHKTDVKDAEWIADLLQHGLLTKSFVPPPEQQELRDLTRLRITLVQERAQLSNRVHKVLEEANIKLTMVLSDIFGVSGQAILHALAVGETDPERLASLAHRSLRRKHAQLAQALDGHMGAHHQFVLQELLGLISSLDQSIGRVEGKIEERLRPLDDTLTRLAEITGVGRRILYVLFAEVGTDMGRFPDAPHLASWAGMCPGQDESAGKRRSGRTRKGNRWLRAALIQAAHAAGRTQTYLGEQYRQISKRRGKKRAAVAVGHSILIIFYHMMKSGEPYQEKGVAYLQKKQQQRLQRRLVERLERLGYRVQAPSAVA

SEQ ID NO: 148151 - protein, 364 aa, unidentified
MDPALGLGWDVEVSTAEQETSMNIVRIGLDLAKYVFHLHGVDERGKVVLRKTLRRPGVAPFFANLPRCVLGMEASNGAHYWAKTLSEFGHDVRLISPQFVTPYVKSNKNDRNDAEAICEAVGRPNMRFVPVKSAEQLAIQAVHRIRSRLVASRVRLVNQIRGLVGEHGVVVAQAIGNLRRALPRIIDDEANGLNSIVRALIGELREELSDLDGWITIYDRKIINLYRMSEACQRLGEVEGIGPITATALVAAAGDGKYFKNGRQFAAWIGLVPKQRSSGGRSRLLGISKRGDRYLRTLLIHGARAALGRTRGKQDPRSLWLLKMRERRHANVVAVALANKNARIAWGLLASGMNYDQHLTVSSA

SEQ ID NO: 148152 - protein, 321 aa, unidentified
MNPAQAYVGIDVAKERLDVAQRPTGEVWSVSNDPPAIGELVERLRRLQPTSVVLEATGGLETHLVAALVAAHLPVAVVNPRQVREFARATGRLAKTDTIDAQVLAQFAEAVRPSARPLPGEATRELSALVTRRRQLMEMLTAERNRLRTTSKRVRQNLESHIRWLECCLSDLDDELDRSVRSTPAWRERDEILRSSPGVGPVTSATLLADLPELGRLDRKEIASLVGVAPFNCDSGRFRGRRRVWGGRSQVRAALYMAALVASRRNPVIRAFYQRLLAAGKPKKVALTACMRKLLTILNAMARHHTPWRIMDLALAGQDSC

SEQ ID NO: 148153 - protein, 467 aa, unidentified
MMKKARAMVKQKHENKVKPGVVDAMAQINHNAAGIDIGSEEMYVAVPPDRAEESVRCFQTFTADLQHLADWLKACRVDTVAMESTGVYWIPLYEILEERGFQVCLVNARHLKNVSGRKTDVLDCQWIQQLHTYGLLSASFRPSEQVVAIRSLVRHREMLVQYRSAHIQHMQKALTQMNLRLTNVLSDITGVTGLKIIRAIVAGEHNPKVLAGSREPGCKKSEAEITKSLEGHYRREHLFALKQALELYDFYDQQLQACDTELEAMYQQFDPPEDPGTPPPTPRQTKRRKNQAHFDLASALYRMSGVDLTQINGLDAMTAQKVLSEVGSDMSKWPTAKHFASWLHLCPNTKITGGKVIQTGVQPTQNRVSTALRIAAASLHHSDSALGAYFRRMRARQGAPSAITSTAHKLARIIYFMLKERKSYQDIGADYYDQQYRTRIIRNLNRQATKFGFRLEPVLLAPIHEVS

SEQ ID NO: 148154 - protein, 412 aa, unidentified
MEVLHAHCAGLDVHKNMVVACVRHMVDGEVRREVRSFQTVTAELMALSEWLSAEGCTHVVMEATGIYWRPVWHILSDGDCELILANAAHVKNVPGRKTDVNDATWLADLVAHGLVRASFVPDEQTQEMRSFLRTRKQFTRERTSHIQRIQKTLEDANIKLDSVISDVVGESGRRMLEALIGGETEPQALAALASRRIKASPAELEAALRGRVTAHHRFMLRLHLDHVEALDTAIARIDKEVDGNVEPFRQAIQLLSTIPGISTLSAEVMVAEIGVDMARFPSDGHLISWAGLCPRHDESAGKRRSTKLRKGAPWLKTTLVQCAWAAVRVRGSYLRAQFERLRSRRGAKKAICAVAASILTAAYHMLKDGTLYQDLGANYFDNRAKNGHIVRLVNRLKNLGYTVQLTPLQEAA

SEQ ID NO: 148155 - protein, 375 aa, unidentified
MSKIRFVGLDVHADTIAVAVAEPSGEVRSFGIIANRPESIRKLMHKLGPAQQLRVCYQAGPTGYVLYWQLATLGVRCEVIAPTLVPVKAGDRVKTDRRDAMKLARSYRAGDRTPVWVPDAAHEALRDLVRAREAANRDQLRARHRLGKFLLRTGWQRPEHLKTPWSIPHLEWIKNKVHFEQPAQEVALADYVHEIEHVAMRLERLDRAIQEAARLAPPRMRAVIAALQALRGVAEITAVTIVAELGEISRFRTPRQLMAYSGLVPSEYSSGSTRRPGSITKTGNAHLRRVIVEAAWAYQFRAWLGGYLLKRQTGLSQEIRDIAWKAQNRLHLRYREFLARGKNKPQIVTAVARELLGFIWVIGVKVEAEHQRIAA

SEQ ID NO: 148156 - protein, 432 aa, unidentified
MYDRLQVGIDFCQKRADFCLLFPDGQPLESHIAVDNSYLGYSRAKQLLLDALHDYTFDGIDVSGEATGYLWLPFFLHLAADPELELHDLRLHLLNPRWVKWFKKCFAQDDKTDQKDPYYIAERTRTRPPQVAWSARPGILALRFYTRLRFHLVQNLAREKCYFSAFLFLKASAYRRIKPFSDVFGVTSRLVLTQQPSLDDLAQLPVEDLALHLHEMSGHHLRDPLKNARKLKRVAEQSFPLQQRLALPVQRILDLTLEHIQFLEHQVERVNQWIATELQVHPSIRQLATIPGVGPVFSSGNGAEIGDIQRFLQGTKWDAKRRRYRPRNLRDAEDAVAKIAGLWWPRTSSGDFEAEDRRMAKTGNRYLRYYLIQAANKMRSNIPEYAAFYARKFSESSKHHHKRALVLTARKSVGLVVGLLHRNEPYRSKGRH

SEQ ID NO: 148157 - protein, 340 aa, unidentified
MGDITTIGLDLAKSVFQVHAVDEMGSVVMRKRLRRGQILAFFAEIPPCLIGLEACATAHHWARELTALGHEARLMPPNYVKAYVKRNKHDVADAEAICEAVRRPSMRFVPIKTAEQQSALMMHRARDLLVRQRTMLVNALRGHLAEFGLIEAQGLHKVAKLIAIVTNENDGRVPDIARQVLQVMVNHIEDIQVRIVGLEKQVLAWHKSNPVSQRLATIPGIGPIIATAIAATVADPNTFRSGREFAAWLGLVPRQNSTGGKARLGGISKRGDSYLRRLLVNSAHTVLLCSKQAKTNAWLTSLLSRKPRLVAAVALANKTARVAWALMSRQDTYRHAAATA

SEQ ID NO: 148158 - protein, 316 aa, unidentified
MQTALDVGIDVASKTVVVACAAGSFATRPVLNERQELRRWLGSLPAGSRVGLEATGGYHQLVVDLAHAAGLTVYVLNARDVKNYAEGVGRRGKTDRVDAEVIARFIAREHDRLHAYVPLSVAQRHLEQLLKRRGRLVATRVALELGWHDVAGIKAELRTLLKAHGRLLRQVDALIAQAVVAMPEVQARARRVRSIPGYGELGSITLAQALSHLPFTSADAFIAHTGLDPRPQDSGARRGRRRLSKRGPAELRRVLHICAMSAAATKVWGPYYQAQRAKGLSGTAALVVLSRKMARTAFAICKQQVDFDPSRLRPMA

SEQ ID NO: 148159 - protein, 376 aa, unidentified
MQSVKAKCGVDVAAKTLEATRRRGSELAREEFANDAAGHRALLKWVGKGAVVCMEATGVYHLQLALTLRAAGVGVMVINPRVAKDYAGALNKRSKTDKVDAKVLLDYLERMPFVEWIAPQQSVLELREHGRRITELVQTAVDEKNRAHARGTSRLSRVVLADVRSHVEHIEKRIARIESLAMNVIKSDPDLVEQYDIVAAICGVGRRSAILLLTELAILDRTMTAKQIVAYAGLDPRRYESGTTVEKPSRISKIGNARLRAILYMNALSAIRHERGARLFFARLVARGKTRKQALVAVMRKLLHGIWIVLQRRVRFDSSVLFAASIAQAESADAVGAASRPQASQDHKYGSSEAEELPQQLEPGSQEVRQRRRKVA

SEQ ID NO: 148160 - protein, 354 aa, unidentified
MPSKVTKPYSSAQPKLMSIGIDIGKDVFHIVGFDHNGKVVLRRKFRRLELDAVFEKLPRCVVGMEACLSAHFVSRRLRALGFEPRIIPAIYVKPFLKGQKNDYNDAEAIAEAALRPNLKLVKEKTQEQLDLQACHRVRSRLVSRRTATINQIRAFLIEHGIAIRTGANSLRRSLPEILLQRADELSPRMRVLIEELHGDWLRLDARIEALNEEIEEISRQEKSCQNLMTIPGVGPLISTATVAAIGNGEAFERGRDFGAWLGLVPRQYSTGGKPILGRISKRGSKYLRTLFIQAANVILMRPQNWPRYSFGAWLVTAATRLHRNKLATALANKLARIAWSVLRYNERFDDAQTV

SEQ ID NO: 148161 - protein, 354 aa, unidentified
MYGLKHQKEKRSMDYFAGLDVSVKDTSVCIVDDTGRITREVKVASEPDALLQVLRNPAYRFKRIGLEAGPLSQWLFSALAEADLPVICVETRHMRAVLKAQINKTDRNDARGIAQMMRVGLYRPVHVKTLRSQKLRMLLTHRKLLQSKAIAVENDLRATLRNFGLKVGMVGTAKFEARIKELVENVADLAVLVEPLLVVRRALREQIGVLHRSVLAIVRDDEVCRRLMTVPGVGPVVALTYRATVDVPARFRRSKSVGAVFGLTCSRDQSGERDRPGAISRCGDEMMRAMLYEAAQSMLRSRKWSWLKAWAMQIARRRGIKRAIVALARRLAVIMHRIWVDSTEFRWTREATAA

SEQ ID NO: 148162 - protein, 343 aa, unidentified
MQTITTVGLDIAKSVFQVHGVDAAGQVVVRRQLKRRYVLAFFAKLSPCLVGIEACASSHHWSRELQALGHTVRLMPPAYVKPYVKRQKNDATDAEAICEAVTRPNMRFVATKTPEQQSCLTLHRTRQLFIRHQTSVINAIRAHLAEFGIVAPVGRNGVDQLLKIVADIEDTRLPGVARACLAALGAQLQALKVQILEFDRQIRAWHRSSEVSTRLDAIPGVGPALATALVASIADPKAFRSGRDFSAWIGLVPKQNSSGGKERLGNISKRGDRYLRSLFTTGALAVIRYAKIHGTKHRPWLTALLARRPTKVAAIALANKLARMAWAMMAKGERYREPVALAA

SEQ ID NO: 148163 - protein, 424 aa, unidentified
MENTAARKRKQVPEGYLVVGVDPHKKRHAAVAITQDFTTQAKFKFDNTREGLEMMLDRTKSEMVKSRCRGVIFAIETGGHYWRNIAYYLDERGIPFRFINQYTLKRRREGKDLNHRKNDYRDGEVAAQLLCTGEFVESVIPQGVYAELRTSNNAYHRLVKERTRITNLVKGLLDALFPEFTQVFKDPGGLTALSVLSTCPIPKVIAGMTEDEFVATIEARHKGRRLMRKKLKALHYSAKTSIGIKAGARSLSYEIAFLVDKLELIRRHIRIMEGTLVRLVDETEEGKYLLSIRGLNYIAVAGLLAELGSFKLYRSAKQMIKMAGSNPTESESAGKKRSKTPMSKQGRPLLRYCAWTSVIPMLRFNPDFRAWAKQRRERPAHANPLNGREIVGAALNRLLRLAFALVKNQTYYQVSKPELTLVAV

SEQ ID NO: 148164 - protein, 375 aa, unidentified
MGHHSEAFIGIDTAKLRNAIAVAEVGRKGEVRYLGEVDTSEAATRTLIAKLAAKYGKLTFCYEAGPTGYGLYRLIESLGHSCIVAAPSLIPKKAGERVKTNRRDAEGLARLLRAGELTAVWVPDSRHEAMRELTRTRDAARGDLTRKRQQVSSMLLRLGRYYPGIKTWNARHRSWLANLRLDHPEQRFALEEMLQAERQAGERIGRLEQAIREALVDWSLAPIVPALMAMRGIDLVAAVTVLAEIGDLSRFESPRQLMAYLGLVPSERSTGESVKRGSITKAGNGRARRALVEAAWAYRHPARVGYEKQAQVAAAPRRAREIAWKAQVRLCKRFRTLSRKGKKSTVVATAIARELAAFIWAIAREVAGAPTARAA

SEQ ID NO: 148165 - protein, 429 aa, unidentified
MNYNTQNAKIASITEKTLIVGIDVGSETHYARAFDWRNYEYSKKPFTFNNDEAGFAAFKVWMEDIAEKHEKEAVIPGMEPTGHYWLNLGAYLQEQGMKPVHVNPHHVKKSKELDDNNPNKNDRKDPKTIAGLVNEGRFSYPYIPTGIYAEIRNLSNLRIQTQEELTRIKNRIARWFSIYFPEIKDVYKNPDAVSGMMVIKKAPLPCDIKELGVDGVNQVWRDAKLKGAGLKRARTLVSAAEHSIGSTEAPGSARIEIRNLLNDYEVYKNRMDDLMREIEAKLSEIPYIDKLMEINGIGLKTVSCFIAEVGDIRRFDNPKQLQKLAGYAIVADSSGKHNGESRISHRGRKRLRYALYEAAISVIGKNKEFREIHDYYRTRKQNPLKKMQSVIAIACKLIRIFYTILTKGVDYDGQKMLSDIVRPEIIMAA

SEQ ID NO: 148166 - protein, 409 aa, unidentified
MQYFVGLDWAAREHAVCVVDGRGAVVAQFTVAHTAAGMTDLAARLAKLAPTAELRIAIERPTGLVVDTLVEGKFAVVPIHPNVVKAARPRYSAAQGKTDLGDAYLLADLLRTDGHRFRTLVPLSDETKALRGLVRVRDDLVGQRVTAANQLRCLLEQFWPGAAEIFADVDSPIALEFLDRYPTPQSASGLGEKRMAAFMARHAYSGRRTATELVQRLRSAPPSVAGGLEAEAKGECVRALVAVLRPLVAQLATLSAAIEHAVDAHPDGKIVTPLFRSGRICAAQLLAEIGDDRGRFVSGDHLAAEGGAAPVTRESGKHRAVTFRWACNMHLRQALNTLADTTRHTNPWARSIYQRARERGHEHPHAIRILARAWCRVIWTCWQQRTPYDPTKHRAARPFTIRLVDQEAA

SEQ ID NO: 148167 - protein, 436 aa, unidentified
MEEVEDEPLFAERVAGIDIGKAAVMVTIRVPGDGGRRRRQQETREFRAVRKDLLALADWLRCWQVTKVGMEATGDYWKPVYFLLEQAGFDCVLYHASQVKALPGRPETDKLDSVWLARITGRGSLPGSFVPPEDIRRLRTHTRYRRHLTQARTAEKERCEKLLEDAHLKLSSVIRDIHGVSGRDMLTAIIAGERNPRTLAQLARGRMRVRIRELEQALDCSFFTREHAFILAMMLANIDHLTAQVSELSARIEVLCEPYARQIAQLDGIPGFGIITAQDIIAETGTGMTVFATAGHLCSWARQAPQVSQSAGKRKGKNATGRGNPYTGAAPGEAAIGAGRTQTFPGARYRRLVRHMPGKKAQGAIARTQLVIAHALLSDPGAEYEDPGTGYYERRADIRRRARDHVRSLERPGYKVTIESLSPDPETGELPITQAS

SEQ ID NO: 148168 - protein, 373 aa, unidentified
MDKGISYVAMDTGKRSFRVAAGYAGREERVEWEVVNEPAAVKRMVRKAQREAGGEVIFCYEAGPCGYALKRQIEALGVRCVVVAPSLIPVKPGQRVKTDRRDARKLVELFRAGLLTEVRPPTVEEESVRDLVRCREDVLEDLARCRHRLGKMLLRRGYLFGAGRSPWTQSHRRWMVAIGWEREADRMVFSDYLLAVDAAQSRLENLTAQLEAFAQQEPYKMAVAALGCFRGVSTVTAMTIVTELHGIERFTSPRQLMAYLGMVPSEYSSSEKVRRGSITKAGNAHVRRVLVEAAHQYRHSPSVGRILRKRREGKPASIIAIADKAQLRLHRRYRRLLFRGKPYGTMIVAVARELVGFLWAALQENAAIKRQTA

SEQ ID NO: 148169 - protein, 358 aa, unidentified
MTTYYIGVDVHNNSTELAIEKRNKIVARYSVPTTIPAISNVLDSLQGKKYLAMEEGPMAGWLYRNLNKKVDKFIASDPRRNKLISSDGDSDDKIDAAKLASLLRGDYLRAVYHSEDDQRCQLKHWVALYHDRVRDAVRHINKIRARCRMYGIQIPRLVLRDSSRRSQWLSKIKHPALAKQLNMLWIGYDATAKQTRVAKQQLIELSKKYPIVHFWKELPGIGLIRATTLFAFMDTPWRFKQKNRLWKYCGVGLQRSASGTDKKGRPKPARLQLPWAVNRTLKNAVLGAALSAINQKSNAFRDYYERMVKDGVIASNARHAVARKLLTVMWGMWKSNSRFDENLLCIELNRTTASALSR

SEQ ID NO: 148170 - protein, 422 aa, unidentified
MSNHTASWTYVGLDVHAETITVAVAEGSGRARGRGVGTIPNRPDSIRKAMKKLGEAKSLRVCYEAGPTGYALYWQLHKMGIACEVIAPTLVPVRTGDRIKTDKRDALKLAQTYRAGELTPIFVPDAEHEALRDLVRAREAAKKDQLRARHRLGKFLLRLGRRRDTQSQAWGQVHWRWLDSQVFDHTAQQVFDHTAQQETFQDYKNEVEHATERVARLDKALDRAVEQAPPRMQELVLALQSLRGVAMLTAVTVVSEVGSFARFPSAQKFMAYLGLVPSEHSSGGSRHQGGITKTGNAHLRRLLGESAFCGRLRPRRSPSLKRRQQGQSQAIVDMAWEAQKRLYQKHGRMRIRAKSHQVTVTAMSRELAGFVWAVGRQRETEMNKEDLPVERFKEAGKHPHGKEQSSKHLCDRHGRAELAPLV

SEQ ID NO: 148171 - protein, 373 aa, unidentified
MPKYSTAFGMDVHLRSTTVCALDADTGEAVTRRFPGNPWGEIAGWMDGFPGPSLAAYESGYLGFAPQRELAGLGVECVVAAVSKIPRSAADSASKNDRNDAARMAKAILAHDISPAWVPSPEVEGIRDLAGAYDGATARLATAKQRLLAFLARRGFVYGGTTPAGNPRKYWTYDFLRWLDKVRPEDDGGVRTLAALRNEVEAAAEARADLFSEYRAAVDASPIAAEVAALQSIKGCAFALAAAFSAEVGDFTRFRSGRQVTAYFGLAPSQRSSGDSVRLGGISGAGNALVRKLAVEGSWCYAAARHQPKLMPRDTGVPLEIRTHGRKGSERLLRRREEMLARGMPAAKANAATAAELVRWLWALGMMCREGAE

SEQ ID NO: 148172 - protein, 393 aa, unidentified
MICVGIDVAKDKHDCIILNSEGKILAGAFTFPNNAEGFDTLLHKIHSCANSNDKIKVGLEATGHYSYNILGFLLNQGLPTYVINPLHTNLFRKSMSLRKTKTDRVDAKTIATMLMSNVDLKSYTNTAYHNEELKSLTRYRFVKVRERAQLKQSVSRLVTILFPELEKLVPTLHMSSVYALLIEFPGAKQIAGAHLTHLNHLLNDASKGRYGRDMATKIRDAAQHSIGSVMPAKSLELLHTIRLIRELDSEIEDIEAAIQTIMNELQSPITTIPGMGVRMGAMILAEIGDFSRFDSPDNILAYAGMSPSTYQSGQLSLTGAYSHMEKRGSRYLRYALYNATKYVCHWDPTFSAYLAKKRAEGKHYNVALSHAAKKLVRLIYAMEKSRQPYKRTA

SEQ ID NO: 148173 - protein, 408 aa, unidentified
MQRYYLGVDWADKSHQLYVADESGRKIKEMEVQQTPEEMAELGRWLDESRSNGIELWAAIEKPHGRIVDFLLDHGVVVYPVNPKALDRARDRFRMSQSKSDCFDAYVLAEFLRTDHAHLRALEPNTAEAQELKMLTRDHQRLGRQKTRLLNQIGITLKEYYPRPLEVFEDLETKIALDFLKAYPTPQALSKLTRRGWNRFAKRDHHLSEARSNELWDKLNKPQLAVPEHVVRAKAKLLLALGVQLEASVKAVNTYNEEVESFFAAMPAADIAKTLPGGKSGTTVATIWAELGDAQNRWNSFRHLQAEAGAVPVTKSSGKSRVVQFRFACNKHLRQAMYWFSFNSLSRCEWAKKYYRDQRAKGHSKHQALRALGAKWLKIIFVMWRDHKAYDENYHLANIARQKMRQAA

SEQ ID NO: 148174 - protein, 376 aa, unidentified
MSKVRFVGLDVHADTIAVAVAEPDGDVRSMGVIPNQAESIRKLVNKLAPVEALRVCYEAGPTGYVVYWQLTALGVTCEVVAPTLVPTKAGDRVKTDRRDAEKLARCYRAGDLTAVWVPDAAHEALRDLVRCREAAKKDQLRARHRLGKFLLRRGRRPPATMHAWTQTHLAWVKTVHFAHAAQETTLLDYLHEVEHVAERIERLERAIDEAVKTAPTRMRVVIEALQAMRGIALVSAVTIVAEVGELSRFAKPRQLMGYSGAVSSEDSSGPRIRRGAITKTGNAHLRRVVIEAAWAYRYRPAVGAALRKRQTPVSAEVTAIAWKAQHRLHARYRHLLAKGKCKQEVVTAVGRELLGFIWAIGVKVEAGERTGPSAAA

SEQ ID NO: 148175 - protein, 359 aa, unidentified
MFKDSTTYIGVDLGDKQSHVVILDSNGEMIEEARLPTTRSAFQRKFSRLPGCRVAMEVGAHSRWASHLLEDLGHDVLVANARKLRAIYSNPRKGDRADAETLARLGRLDPELLSPIHHRSPPAQADLAVLRSRDAVVRSRSLLINHARSVVKSCGARLPSCSADSFAHKVAPDIPESLRPALAPILDTIACLTQQIRAYDRTIETLCSERYPETKQLRGINGVGPLTALAFVLTLENPDRFRKSREVGPALGLVPRRDQSGDKDPQLRITKTGDSYLRRLLVGSAQYILGPFGPDCDLRRWGLKLAERGGKNAKKRAVIAVARKLAVLLHHLWKTGEIYDPSCQSLKLANEPVVALAAA

SEQ ID NO: 148176 - protein, 344 aa, unidentified
MTYYTGIDVSLRSVSICIVNDRGEVCLETKVEAEIDAIVDRLRRFSSEVKSVGFEAGTLTQYLTYGLQAAGFEVICLEARQVSVTLAAMRNKTDRNDARGLAQILRTGWYSRVHVKSLQSHQVRALLASRKAILKKCVDLENELRGLLKVFGIRLPSRVGHGSFDAELRETVSSDEMLACALVPLLDARTVLYKTYLKLDNAVKGLVRVDPICRRLMSIPGVGAVTALTFKAAVDDPSRFKSSRTVAAHFGLTPRRFQSGEVDNPGHISRAGDADVRSALYVAAHSLLTRNAQWSNLKAWGVALAKIRGHRRAVVAVARKLAVILHRMWVDGSEFRWGPEAVSA

SEQ ID NO: 148177 - protein, 352 aa, unidentified
MKHALQQESILGVDTHRDIHVAAVINQSGQLLGTQSVSTNTAGYFQLFQWASSFGALKRAGVEGTGTYGSALCRFLSDKGVTVLEVNRPDRSQRRLNGKSDPIDAENAARSVLSGISQAIPKQQSGACEAMRIVSVARRSAVKAKTQAINQIRAMLVSAPQDVREKLWRIKATDCAKACAAVRSLGDTAVLRALSTTLKSLAKRWLALTEELKDYDKQLETLTQKHAQQLRSRFGVGPQTAAILLSVAGDNPNRLKSEAALASLCGANPLPASSGKTTRHRLNRGGSRAANNALWTIAMVRMRSDPRTRVYVERRTNEGLSTKEIHRCLKRYIARELYPLIMGDLGTMNAIP

SEQ ID NO: 148178 - protein, 311 aa, unidentified
MTETTIGIDISKDTLDVHRLSDGAAAQFGNDKAGFRTLKAWLKGHDLARIVYESTGPYHRDFEVAFEADFPLVKVNPLQARRFAQSLGTKAKTDRVDARMLAMMGEVFSLVPQPATPTNQRDLKELHIARLALIKDRTRALNRQKTLTLAILKRQAKARLKQLATRIAEVDEAIAEILQSTPEIARATKIICSIPGLSRISAAALLTEMPELGTLNKKQVASLAGLAPLTRQSGKWRGRSFIGGGRKLLRDSLYMPALVAMRHNPSLKVKYTALIAAGKPAKVALVALMRKLIILVNTLIRDDREWEKNRA

SEQ ID NO: 148179 - protein, 331 aa, unidentified
MAHQERPRVTVGVDTHLDLHVAHAKDQLGRCLETVSIPTTPAGYQHLLAWARGLGEVVAFGIEGTGCYGAALARFLAAQGQVVFEVNRPDRQARRRRGNSDPLDAEAAARTVQAGEATTLPKAGTATVEMIRSLRVARATAIKARTQAINALKALVVTAPAELREQLRGRSAARLVRQAAGLQPGQLDTPTAAAKLALRCLAERYQVLSAEVATLDTELDRLTAKAAPGLVALFGVGPDSAGALLVAAGDNPGRLRSDAAFSMLCGASPIEASSGKTIQHRLNRGGDRQANAALYRIVVVRLRWHQPTKDYMARRLTEGKSKQEIIRCLKR

SEQ ID NO: 148180 - protein, 409 aa, unidentified
MEVIHKRCCGLDVHKKVIVACLRILKDDGTLLKQVRTYATTTGALLQLSDWLAGMDCTHVAMESTGVYWKPVYNVLEGSFELLLVNAQHMKAVPGRKTDVKDSEWIAELLQHGLLKGSFVPEAPQRELRDLTRLRTSLTREHGRAVNRLQKILEDANIKLASVVSDVMGASARLMLEAIDAGETNPGLLADMAKRRLREKIPQLQEALAGRVKSHHQFMIQELLLHIDDLDASIARLNQELEKRCAPFEVELALLDTIPGINIHKGQEIIAEIGVDMSRFGSDARLSSWAAMCPGNNESAGKRKSGKTRDGNVWLKHSLVGAAHGASHTKDTYLQAQYHRLAGRRGKKKAIVAVAHSIIVIIYHVLNRLEPYKDLGPNYFDERDQKAVQQRLVRRLERLGYQVTLQKVA

SEQ ID NO: 148181 - protein, 358 aa, unidentified
MQSKIKQTNWFDNQNIYVGLDVHKKQWTVSIYTEEFEHKTFIQPPKAEALHSYLIKNFPGARYYSAYEAGFCGYTPHRKLHELGIENIVINSADIPSSFKEKYVKTDHIDSRKIARELRSRSLRGIYVFDPIHEELRTLSRIRFKLVRDHRKCKNRIKSFLMYYSIDIPPEYDNNNWSHTFLNWMKEINMNSEAGKIGLNVLLDDYQIKHLQLLDVTKKLKRLMKQGDNTLYMLLRSIPGIGPLTAIALLFEIGDINRFKNLRHLSSFVGLVPYTKQSDENEYTSGIHFRCNPYLRPLLVEAAWMAVRADPILLKYYQQHIVNSKPSKVIIKVAHKLLNRIRYVMKNRKRYEINTIQE

SEQ ID NO: 148182 - protein, 356 aa, unidentified
MYQVKTLDFTGQSIFCGIDIHKKNWSVCLRNEERELKIFSQNPEPGILAHFLNRFYPGANISIAYEAGFCGYWPQQVFATEGLSCKIIHPPDIPQPDKSRRYKTDRIDCRKLALELSKGFLNSIYIPRQSTIQSRSLVRTRQQLVKDQTRYKNRILSFLNFFGIDVPEGYKKSTHFSKRFICWLEQLPLASSSKAALQVKISVLKSIREQLVAINRKLRALAESQEYKHLIRLLLSIPGIGIQSALILATELEDITRFKNFDHLAGYAGFKPDVYSTGEKNVIKGITHQCNTLVRETLVECAWMVIGRDPALTQAYYEYKKRMHYNKAILRIAKKLLNRVRYVLLKNQEYQIGIVA

SEQ ID NO: 148183 - protein, 337 aa, unidentified
MENIRYFIGIDVSAEFYTVSVLLGKDNKYLSFQNFDNSIDGFEKMSTEFQSHGIVISESIVCMEATGVYCDHLAYYLIEKGFRVSIENPLKVKRAFSISKKKNDKVDSQRIAEYAYRFLDKLVIWTPKDTVIEGSKALLNVREQFVKQKISLMNARHAESKKKFFSHQAIKMYDDMIKEYNTKIKFIEDEIKKLITSNSTYQETVSNVMSIPGIGLILTSYLFVYTNGFNSNTNYKQLSNYIGIAPLEYQSGKSILYKASSSKVGPGSLRKLLYLSSMSAMTHNKEYNKYYKRKVAEGKSGKLVLNNIGNKLLKLVVAIIKSKNAFTENFRSVNPIF

SEQ ID NO: 148184 - protein, 348 aa, unidentified
MKYYIGLDAHSTTSTFAVVDQNGQCILRETVNTAENKLVGVIHRINGERHLTFEESTISQWLYLQLREHVDELLVCNPTYVAKKSGAKTDFRDALHLAQELRTNHLRPVFHDSSHWSEIRVSVSGYLDIVQEIIRFKNRLKSVFRAEALSNNENSFYKNKSRAKELKNPSARFVAEKLFNQIEFLENEKLKYRDLFTKNKKQYRPIRNLMTIPGVSLIRANIIAAIVCQPARFENKHRFWGYCMLVRHIQKSGGKIYGNKRFYGRRELRNVFIGAAENAMRTETTLRDYYDALRAKGTNHKEAKLSLARKIASVALCILKNNDTYNDSYDEYLRERKKLRLDFYNQKI

SEQ ID NO: 148185 - protein, 450 aa, unidentified
MSQSQTLNVPSEFAAFIGLDWADRKHSWKLVAAGSVEGESGELNHTPEALQQWATDLHDRFAGAPVAIALEQRRGAVVFQLSKFPHLVVYPVHPTTAAKYRQAFFPSGTKNDPLDSALLLELLLQHRDRLRRLDPDTPATRLLQLLVEHRRKLVDEKTRLSNRLTAALKSYYPQPLQWFDDIDAPLGCAFLQRWPTLAQAQHSHPGTLRKFFVQHNCRSAERIRERIEGIHQATPAVTDTALLEAGGIIVSGIVRASQALSESIAAVDARLQSAVAEHPQAGIFAGLPGAGAVLLPRLIAAFGTRLDRFPSASKLQCHTGIAPVHSQTGNTEIVHMRRACPKFLRQTFVEFASHSVAKSVWARAFLQNQLAQQKDYNVAIRALAFKWQRILHACWRNNTPYDEQRYLQTLQKRNSPLAKLSAIPKSAPTDPTAVGWKSVAGFHTLAMKNT

SEQ ID NO: 148186 - protein, 454 aa, unidentified
MEAFESRKRRRQARLSAVNAHAAGIDVGAEFHVVAVAPECDDAPVRTFQSFTGDLHRLADWLLACRIETVAMESTGVYWIPLYEILEARGMKVLLANARDVKHVPGRKTDVNDAQWLQQLHTFGLLRGSFHPPAEIAALRAYVRQRERLLEYAAAHVQHMQKALTQMNLKLQHVVADIAGQTGMRIIRAILAGTRDPQALADLRDGRCKRSAEEIAKALDGHYRPEHLFALEQALALYDAYQERIAACDRQIEAALAPLSAPEAPAEPLPPPGGKTRHKNALAFDVRTALYGVVGVDLTRIHGLGPSLALKLVAECGTDLSAWPTAKHFVSWLCLSPGNKVSGGKLLSARTRRTSNRATSLLRLAAVTVGKTDSALGAFYRRLGLRIGKAKAITATARKLAILFYNTLRHGMDYSDPGASSYEERHRERVLYHLERRAKLLGYVLEPAPAAEVS

SEQ ID NO: 148187 - protein, 327 aa, unidentified
MLYAGLDVHNNFCQAIVMTKGGKVVREDKIGTEKKEIEDFFNGLKNVKVAFEASMYYEYIYEILNGLGYKVSLSHPLKTRLIAESRIKTDKIDAKALADLLRTDLLPTSYIPPEDIRRMRHLVRHRIFLGRHRTKLKNHIHSELHRRNLKFCGPDVFTRAGMEWLQGLDIPAINSYLVILNAVLNEVKSVELKIKIEGMKYNEVRLLSTIPGIGVYSALIIFSEIGDINRFSSEEKLYSYAGMIPRVRQSGDSSYHGRITKEGSKHLRWILVEALRIHIQCAPDSKVTRYYYRLKKKKPGNVATIAGARKLLQVIYHMLKNKDEYRG

SEQ ID NO: 148188 - protein, 538 aa, unidentified
MVAALSWKGERPDPAGEIVKFRRPGRATLNSTRKVSMKSKPQDKTNKTTNHPTQRHWHEMNRKQRREMTRQIQSEDLSLEVVHPDAAGIDIGNESHYVAVPPSRDSQPVQRFGCTTAELKVMAAWLRQCRIRTVAMQSTGVYWIAVFDILEEAGLEVYLVNARDTKNLPGRKSDVQESQWLMKLHTYGLLRNSFRPSQEIRTMRTYWRQRNDLVQSAGRHIQRMQKALTQMNIQLANVLSDISGVTGQAIIKAILAGERNPHKLAEFRDPRVKASEEQIAQSLEGNWQQDLLFVLKQEQDGYEFCQKQMAECDRQLNQYLEHGEDRSHGASLPEEKRKGRLKKKKGNAPQFNLREGLFRMTGTDLTLIDSIDVMTATTVISETGYDMSKWETENHFVSWLRLCPDNRISGEKIIGKGRLPTNNRATIALKMAASNLTTERYLSRSAVSSIPNQARCPLRDQGHGRQAGPLGLPHAALRDEIRGPRSSLLRASTPRDTDQAPQGQSRKARIPSHPNTGGGLTVSGEECRFESYRADQRK

SEQ ID NO: 148189 - protein, 391 aa, unidentified
MICAGIDVAKDKHDCFILSSEGVVLADVFTIPNNLEGFNTLLDKLRTCTTAQDSIKVGLEATGHYSYNILGFLLDNGLATYVLNPLRTNLYRKSLSLRKTKTDRVDARTIAAMLLSDAGLKPYTDTAYHNEELKSLTRYRFDKVKERAKLKQSVSRLVCILFPELEKLVSTLHMASVYALLSEFPGAKQIAAAHLTRLKTLLADSSRGRYGRDVAVEIRDAAKCSIGSRMPAKSLELQHTIRLIRELDAEIEEIEAAIQTIMDELHSPITTIPGIGYRMGAMILAEIGDFSRFDSPDKLLAYAGMSPSTYQSGQLKNCYPHMEKRGSRYLRYALYKAAKYVCHWDPAFAAYLAKKRSEGKHYNVALSHAAKKLVRLIFALEKSRQPYCPAI

SEQ ID NO: 148190 - protein, 387 aa, unidentified
MSQTIAALIPAAVDYEKTLVLAIELSNKSWVLAAQVPGLPHTKASRTVDPEAEALLAAIAGYRARAAAAGRSIERMIAVYEAGWSGFWLARWLVRHGVEVHVIQPSSVPVDRRMRRAKSDGIDAELLLRTLLAWLRGEPRVCSMVPVPDEADEDARRCVRERSELIAERVGLTNRIGAVLATLGVSDYNPLLRNRKRRLAELRTGLGEPLPRNAHAKIERLLARLELVLAQIAELERERDAVVETEASDKASKMIQQLTSLRGIGVQSATVLVREAFVRRFANGKALGSYAGLASSPFNSGGIEREQGIGKAGNRRVRTVMVELAWLWTRYQTDAAQVCWFRERIGPTGRRVRKIMVVALARKLLIALWRFVTDGVVPEGAVLKPAA

SEQ ID NO: 148191 - protein, 345 aa, unidentified
MKITTVGIDLAKNVFQVHGIDERGKVALRRQLKRHQVAPFFANLPPCVIGMEACASAHHWGRTLQRLGHTVRLMAPQFVKPYVKSNKNDVADAEAICEAVSRPNMRFVPIKSIEQQAILSVHRVRQGMVRARTAQANQIRGLLGEFGLVIPQGISHVAKQVPALLEDASNALPMAFRHLINQLTGHLKELDRQVKEFERQIIAWHRGNPRSRELEKIPGIGPLAASALVASIADARSFDSGRQVSAWLGLVPRQNSTGGKAKLLGMSKRGDAYLRTLLIHGARSAIRAAQRCTQSTNRWLTNLLNRRHPNIAAVALANKNARTVWALLAHGREFKPDYVPMAATA

SEQ ID NO: 148192 - protein, 344 aa, unidentified
MHITSIGIDLGKNTFHLVALGERNKVLVRKKFSRAQLLAYCANLPSSLIGLEACAGAHFMGTRLREQGHEVRLIPAQFVKPYRKSNKNDFLDAEAIAEAVTKQNMRFAQLKTEEQLDVQAMHRVRDRLVQRRTALINEIRGFLLERGITFAANPIHLRKNLPGMMEDAEQNLSPRLRWLLERLWQEWKQVEIDIQAITDEIERISNENALCRRLRQIPGFGPLVSTATVAAIGNGAAFHRGRDFAAWVGIVPRQYSTGGKQKLFGISKRGNIYLRRMLIHGARAVLLRVKYDTGGFGQWVHRLAQRAPRNKVIVAIANKLAGITWAVLSSGKDYQHQPLQVTAA

SEQ ID NO: 148193 - protein, 351 aa, unidentified
MHHRRTVMAYFAGIDVSLEESSICVVDAAGKIVREVKVASEPEALVEFFGKLGLAPSRIGLEAGPLSQWLYDGLTRAGFEVTLLETRHVKAALSAMVVKTDRKDARGIAQLLRMGWFQPVHAKSVGARDVRALLAARKLLQSKLIDVELSIRGILRGFGLKMGKISKGRFEARVLELAEGHAMLGGIVAAMLRAREVLRTEFAALHRQVLAIVRACPISRRMMTAPGVGPLVAITFKSAVDDPHRFPKSKSVGAHFGMTPRKYQSGETDVTGGISRVGDVAVRTALYQAAHITLSEAMPYSSLKRWAMQVAKRRGLQRAKIACARKLAIILHRMWIEETDFRWGKETNASA

SEQ ID NO: 148194 - protein, 354 aa, unidentified
MSEKLNTAVAVMGIDIGKNSFHVIGLDARGAIALRQKWSRGQVETRLANMPPCLIGMEACVGAHHLSRRLKTLGHDARLMPAKYVRPYSKGQKNDFRDGEAIAEAVQRPTMKFIATKTAEQLDLQALHRVRERLVSQRTGIINQIRAFLLERGVAVRQGLRFLRAGLPQILATRTDVLSPRMVHVIEARAGDWRRLDERIEGLSADIETLVQHDPACQRLMTVPGIGPIISSAMVAAIGRGEVFSKGRDFGAWLGLVPKQTSTGDRTILGRISKRGNRYLRVLFVQAAWVVLIRPKSWERYGLKPWIEAAKKRLHRNVLAIALANKLARIAWSVLAHGRNFEARKIDEAAAQSA

SEQ ID NO: 148195 - protein, 383 aa, unidentified
MKAVCGLDVHKDSIFLCILHSDGELFEQVFGVLTFQLEEMRKLLQKHHVFEVCMESTSIYWIPIWRVLSPHFTLRLVNPYFIKQLPGHKSDIKDAQWIAECTLKELVRGSFVPPEIIQQLRQYDRRIFDLNAELVRKVSKVDGVLQRCNIRLSNYVSNIECKSYRDVVRRLSEGVTNPNELMKLVHGRIINRHGAETILASLTGVVSQAEIDVLRQLHEEIGIAESHRNECQQRMLEICEKHFPEELERLQKIPGIKERAATSLIAEIGTDMSKFETANHLASWSGLRPRNDESNKKIKSRKITHGNVYLRNTIIQCAWAASRQKDCFFSRFSYHQTIVRRKNKMKVIVAVARKLLVAVWHVLHDKTDYVDFKPDREESANNG

SEQ ID NO: 148196 - protein, 375 aa, unidentified
MKEKVRFLGMDVHAETIAAAIAEPDGEVRSLGTILNRMESVRKLIKKLGPAEKLRVCYEAGPTGYVLYWQLAELGVQCEVIAPSLVPVKAGDRVKTDRRDAEKLARSYRSGDLTAVWVPDAGSEALRDLVRAREAAKQDELRARHRLGKFLLRSGQRPPSGVRAWTHLHLIWVSQIRFTQMAQESTRLDYLHEVEHMRERVLRLEQAIAEAVKLASPSLQEVITDLQALRGIAQISAVTIAAELGQISRFAGARELMGYCGAVPSENSSGTRTRRGSITKTGNAHLRRIVVEAAWSYQRPPAIWAGLRKRQQTASDEAKEIAWKAQHRLHKRYARLAAKGKDKRKIVTAVGRELLGFIWAIGTKAEATVSQRIAA

SEQ ID NO: 148197 - protein, 400 aa, unidentified
MLSIGIDVSKGKSTVCGMKPGGEIVYTPFEIQHTREGMSELVSLLHNSGEEVRAVLESTGSYHCPVVAALLENGIFVSVVNSLRMKRFCSQSIRKVKTDRIDAMQIALYGLAYWQELQPTRLPEDTYRELQLLARQYYQMTSLLIKAKVDFNAICDQVLPGMQELMSDHAGRHKLSDFVLRYRHTTHILEMGETRFRKDYCKWAEKKGYRNCERMAALIFATAQNGIPVLPNAPSTQIVITEAIRVLHTVEASRDAILTQMQALAKTLPEYSLVREMPCIGDTLAPRLIAEIGDVRRFHSKRALIAYAGIDAPPYQSGKFCANNRHISKRGNRYLRKTGYEVMQSYVMHKPANDPIFTFIEKKRGEGKSGKLAMVAGLNKFLRVYYGKVTELYRSLPAIE

SEQ ID NO: 148198 - protein, 354 aa, unidentified
MSQTTNTAMAVIGIDIGKNSFHVVGHDARGAIVLRQKWSRGQVEARLANIPPCLIGMEACVGAHHLSRKLASLGHDARLMPAKYVRPYSRGQKNDFNDAEAIAEAVQRPTMKFVATKTVEQLDLQALHRVRERLVSQRTGIINQIRAFMLERGIAVRQGIGFLRTELPTVLATRTDALSPRMLRVIEELASDWRRLDQRIDGLSGEIEALARQDQACSRLMTVPGIGPIISSAMVAAIGTGDVFSKGRDFGAWLGLVPKQISTGDRTILGKISRRGNRYLRVLFVQAAWVVLVKIKNWERYGLKSWIEAAKRRLHPNVLAIALANKLARIAWAVLAKGRAFELTRTDDAGVRHA

SEQ ID NO: 148199 - protein, 412 aa, unidentified
MKDLLEISCGLDVHKEKIVACILIGPLGKPTRSEIREFSTLIPDMIALRHWIVSKNCHHVAMESTGIYWMPIYEILEDAFSGDITLLVVNARHMKNVPGKKTDVRDSEWISTLLRAGLLNGSFIPEKRIREFRDLNRYRKSVIRDITSQKNRIEKFLQSSGFRLSSFISDIFGASGRNIILHLIEHGQIDKTALDSCLKTKTRNHIDEILMSVNGTLSEHQKAFLRILMTHYDSLKKHLAEIETSLEEDMAPFVLQVEQLNSIYGISTTASCAIIAEIGIDMKPFKTAEHICSWAGLCPGNNESAGKRKSTSVTKGNPYIKSMLCEIAWVIAGKRNTYLSAWYWRIKQKKGAKKAIVALARKLLVIIYTMLKQGTLFDESCFETRRKRCEQKQLSRYIRELEKHGYHVEAQS

SEQ ID NO: 148200 - protein, 346 aa, unidentified
MEYIALDVHKKYTWARVESAKGERLFESRLAHAHGTVKNFVNRWSAGSTVAVETVGNWYWVVDEIEAGGGRPQLVNARLAKLMMGSVNKSDKLDAKGMNRLQRTGTLPTVWIPSSSVRDARELPRTRMVLSRQRTQLKNRVHATLGKYGYTVEGASDAFGKKGRKIVEELLVKLPPHTQQALRLILDELDHATANLKQIEEQMIEVFSPCPEINWLKSLPGGGDVLAVVIWTEIGTIERFNRAEQLASYCGLVPREHSSGGKIRFGAVRRDVNVYLKWAFVEAANSSLLNAERCSYGHISRLYQRIKPRRGHGKAKVAVARHLSEASFWMLKKGEPYREPMSSTQR

SEQ ID NO: 148201 - protein, 420 aa, unidentified
MFAVHILSRATHLFEEEQSRTNGRDPRIPERCSFKQLEQANTPMKKELYLGLDVHKDCIATALAEEGRTGEVRDSGSISNDLQAVEKWIARLRKAHGKKTRLHACYEAGPCGFGIARRLQQLEVECEVVAPSMTPTRSGDRVKTDKRDARKLARLLRAGELTAVYIPEATDEAMRDLCRARTDAVDDRRRSRHRLKGFLLRHGYRYQGKSSWSAAHERYLRELVLPHPAMKAILEEYLIAIAAAGERIARCEAAMHDLLEKWRLVPAVRALMAMKGFQTVAAMILVSELGEVHRFAHPRQVMAYLGLVPTENTSNDKRRQGRITKCGNAHARWLLVECAQHYAAPPKVSAHLSRRQQGQNEQVRRISWRAQQRLHRRYTRLSSRRLQRNKAMVAIARELCGFIWELLRTQPCYQAKSILL

SEQ ID NO: 148202 - protein, 342 aa, unidentified
MDEYDGKQFVGIDLHRRRSVIVRQSESGEQLSAVRIINDPVALGLEIERAGPNPEVVLEATYGWYWAVDTLQAAGAHVHLAHPLGVKGFRYRRVKNDVRDAADLADLLRMNRLPEAWIAPPATRQLRELVRYRAKIVALRSGLKAQVHAVLAKAGVLIAVSDLFGVGGRQRLAKVPLGAAYVQRVISLLELIDALDAHETRFSVMVADKLVGHAGYQAIQQLPGVGPILGAVFVAEIGDVHRFADPARLCSWAGLTPRHHESDTVVRRGHITKRGSKLVRWAAVEAIQRHPTTSKIALDRTRIESRRGKNIAKIAVARKLLTLVYYGLRDGHIRALAPRRAA

SEQ ID NO: 148203 - protein, 369 aa, unidentified
MKETVKYVGMDVHKKTIDIAIAEEGRDGEVRHYGSIDNTPDAIAKFIRKLLSTDCELRFVYEAGPCGYHLYRQLTGSSLNCIVVAPSLIPRKSGDRVKTDRKDSISLARLLRAGELTAVYVPAADDEAMRDLTRAKEDATIAGRKAKQHLSAFLLRHGKIYTGKSTWTKAHFNWIAEIKMLHPAQQIVLQEYVMTVMACKEQVARLLAQIHILLEQWRMAPVVKALKAMRGVSTIVAVTTIAELGDLGRFDHPSQLMAYLGLVPSEHSSGESKKRGGITKTGNGHARRALIEAAHTYRLPARISRLLRERQKDLSAEIQKIAWNAQVRLCGRYQRLIGRGKETNVVVVAIAREIAAFMWAIAKQVPIPA

SEQ ID NO: 148204 - protein, 413 aa, unidentified
MSTASSPTRFVALDIHRKYLVVGAVDAGQQVVLTPRRFGFEAFSAWATTHLTSSDAVVLEATSNAWLLYDQLEPVVGSVTLAHPLAVKLIAAARVKTDSRDTIKLAHLLAANLVPAVWVPPVQVRELRALVSHRKRLVNQRTQVRNRLHAVLHRHNLTLPPGKPFAAHQQEWWLSLDLSSSEKLRVQQDLSLSASLEELIGAVEAELGRLSTCEPWVKQVPFLVQLPGLGVLSVMSILAAIGDITRFPSAKKLVGYAGLGASVHDSGETHQGGHITKEGRRDLRGVMVEAAWVAVEHHPHWKGQFERLTKRIGKQKAIVAIARKLLVAVWHVLTEQEADCHADAQAIARKLMNWIAHHGLTPGQHRDRLLLLYQQLDQLGLSEELEEIDYYGTTYRLSVRQQLLREAQKRQSS

SEQ ID NO: 148205 - protein, 468 aa, unidentified
MPSKKSPKKRELDELACVFPNAAGLDIGSAEIVAAVPPDRDAEPVRVFQTFTPDLHALVAWLLECGIDTVVMESTGVFWIPIYELLEAAGITPYLVNARHVKTVPGRKTDWNDAQWLQKLHALGLLAASFRPDAEIRTLRTLVRYRAELIERRAPHINHMIQALKHMNIQLNLVLTDITGKSGLAILRAIVAGERDPQQLACFRESGCKHSEAEIAKALTGTWDDAQLFLLEQALEIFEYYTAKITGCDDKLEQQYQAMESRAEKDAVLPDLPPAKKDSRSKNALSFNARAQIARVVGVDLVAVMGLSAVTVQTIISEIGTDMELFPTVKHFCSWLGLAPHNDKSGGKVLRSRTMKVRNRANQAFRQAAQSVAQSDSSFGAYYRAMRARLGPKQAIVATAHKIARTVYHLLKTREPYQEESAAEYDRKRRERELKHLARRAQKLGYTLTAAQATAPESSPEPGGEGRF

SEQ ID NO: 148206 - protein, 362 aa, unidentified
MDYRIGCDAHKHYSQFAVLDQEGGLLAQQRVDHQPGAIRAFLASLPEGTPVALESVGNWYWIADEIEAAGCLPLLTHAAKAKVMMGNVNKTDKLDAKGLAKLLHLGSLPTVWLPPGEIRDERELHRTRMALSKLRTALKNRIHATLAKYGITSTEHSDIFAGKGMLWLHATLCRLPPETGRCVAQEIEALDGLQLQIAQLEERIRERIAVAPSIQLLKTLPGVGDILAIVVDREIGSIDRFATPGQLASYAGLVPTIHASGGKTRFGHMRKPSNQYLKWAFIEAANVIVRHRHHPAWKTKYVCQIYDQVSQRKGHAVAVGAVARHLAEGAFWILKRQQPYRPPALRQASPKQVRGRAQLVST

SEQ ID NO: 148207 - protein, 349 aa, unidentified
MIIGCDFHPRYQQIAMMDTETGELTERRLEHENGEAQAFYASLAKPARVGMEATGYGQWFERMLAEQGHELWIGHASEIRAGVVRKQKTDARDAAHLLRLLVEKRFPRIWIPSPAERDARQLLRHRHKLVCFRVSVKNQLHGLAMSQGICRKKKLFTAKGREELEKLSLGPWASRRRQELFGMLDRFNPVIDELDRAVQQQAENHADAARLMTQPGVGPVTALAFVLTLGPVARFPRGQHVVSYLGLNPKERSSGDKQHTYSISKQGNTMMRWLLVEAAQTAVRYDPELLRLYQRLKFRRGASVAKVAVARKLAVKLYWMLRATASVAQRAPMQGSSGGTLIPHVGSKF

SEQ ID NO: 148208 - protein, 339 aa, unidentified
MTILKQTVGIDVSYKTFDARFGTTNTQQQITLSPSKSFNNSLAGFKLFLRWLKKYILSDDIPLVFVMEATGVYYEHLAHFLFQHNYQVAVILPNKIRNYAKSLESKSKTDPLDAAVITRFGLERQLSLWTPPSDNIKVLRNLCREYHCLNANCTQIKNQLHALKSSFKPHRESFKRKTQLLKFLQRQIALIQKELRALVKSEPQLAQHLKNIKTAKGLGDITILTVLAETRCFQLVTNLKQLTSYAGFDIVFNDSGLKKGKTSISKKGNTFIRKALFMPALSACRANPQLKAFYQRLVAKGKNKKLAIIAVARKLLLLIYTLWKTNSPYVPDYNPVNKC

SEQ ID NO: 148209 - protein, 334 aa, unidentified
MELHTIGIDLGKTVFHLVGLNLRGEVVVRKKFSHKQLLHFTANLRAERIGMEAYGGSHFLGRALREQGHELRLIPAQYVKPYVKTNKSDYIDAESIAEAVGRPTMRFVPIKSDDQLDMQSLHRVRERWIMHRTAVVNQIRGLLLERGITVRKGRCHLDAALPGLLEDASMKLSGAVRLLLAQLKQELDQLTIRPEEADALVQKTAQESEVCRRLDAIPGIGPLTAPALIAAIGNGATFRKGREFAAWVGLVPREYSTGGKQKLLGISKRGNSYLRRLFVQGARAVLQFREKQSFRSESVADTAYIAHSLQRCRRGPGQQTSAHCLGCARQGRRL

SEQ ID NO: 148210 - protein, 354 aa, unidentified
MSQKLNAAIAVIGIDIGKNSFHIVGHDQRGAIVLRQKWSRGQVETRLANLPPCLIGMEACVGAHHLSRKLQRLGHDARLMPAKYVRPYSKGQKNDFRDAEAIAEAVQRPTMKFVATKTADQLDLQALHLVRDRLVGQRTGVINQIRAFLLERGIAVRQGLHSLRSELPGILATRTDVLLPRMLRIIEDLAGDWRRLDARIEGLSSEIETLARQDGACQRLMTVPGIGPIISSAMVAAIGTGDVFSKGRDFGAWLGLVPKQISTGDRTILGSISRRGNRYLRALFVQAAWVVLVKVKCWERYGLNSWIEAAKKRLHHNVLAIALANKLARIAWAVLNKERAFACVKTAETGSRPA

SEQ ID NO: 148211 - protein, 350 aa, unidentified
MPRKFDTAVVTIGIDPGKNTMHLVGLDARGEIVLREKVTRTKIVSRLANMRPCLIGIEAGMGTHYVTRDLLALDHDVRQVPPVYAKPFRQIHKNDFRDAHAVAEAVQRPTTRCVPPKTDEQLDLQALHRVRYRLVGQRTAIINQIRCFLLEHGITVRQRLHWLRHALPDILAQRTDVLSPRMVRILEDLAQDWRRLDDRIEAVSGEIDALSKNTEPCRHLMTIPGIGPIISSAVVAAIGDGAAFTRGRDFAAWLGLVPKQISTGDRTILGRITKRGNRYLRMLFLQAARVVLLRPRNWMQHSFGPWLAAAAQRLHHNVLATALANKLARIAWSVLVQHREYEASLSVATT

SEQ ID NO: 148212 - protein, 346 aa, unidentified
MEISRVGVDLAKNVFQLHGADDKGETVWKRKLSRDKWLKVLFTMVKPGTEIGMEACAGAHHWARVLHAAGYRVKMIPPQFVKPFVKSNKNDANDAQAICEAMARPNMYPVSIKTVEQQDIQAIHRVREEIKTHRTAKANQMRGLVAEYGLVAPKELASLRRAVPQWLEDGSNGLTPCFRQLLDGLWKDLRALDDRMAELDRQVAMIAKQNPTAKRLQKLRGVGPLIATALVATVGDGKQYRKGRDMAAAIGLTPRQHSSGGKERLLGISKRGDAYLRCLLVHGARSAMRTAKGKDDRLSRWILNLQERRHANVAVVAMANKTTRMAWAIMSKEVDYDPSFGAASET

SEQ ID NO: 148213 - protein, 475 aa, unidentified
MNSTVLPASVQLNINCNYIGLDVHSDNVVVCVRRNILKASGELQGKTIKLTKVSIRDSQDSLTQLLSEYADGQQHVMTAESTFNWYWLADIAEDHGWNFRLADPCTVSQANIKASNDETDAEYLAERLRMGSLKSTSVLPRSLRGARDLTRHRMRVMQEVSEKKIRLSNLYHNHCAHPLHGKQLQDLQFDYEQRGIDAILASGISGNGSELIIADLLDGLHDAQMRLEKVETLVYGRLDQIDTYRQGRLLLKTSMKGCGDVLSAVIITEIGDISRFRTMGEFVSYCRLAPASKLSNGKSKGQGNAKNGNAYLSWALTELAMLMARYNKSIRQYLDRKVKKSGLRVIGVRSLAAKLARCVYQVLRKKEGFDLRLAFGGTEFDEPITTRTKTKESPRGEAVTKSSRTKTASKTRTLVTNKKKNQDKKPTIAGTHTQRPKGVVSHKSASVASRVKAPCALTATKPAYAGTGCVKSRRE

SEQ ID NO: 148214 - protein, 332 aa, unidentified
MYIGIDVHKRYSQIAVLDHNGEIVDEVRVENANLEDFAQQYAGSQAAIEATSNYYHIYDTLSEYLDVTVANPGKLKLISDTDKKTDRVDAKQLARMLRLGSIPESYIPTDDVREARALVRGRHSLVENRTEYANKIHGLLDDHGISQDVKPLSVEGREFLAELSLPTPWDTLLASYLDIIETLTEQIESLEEVIEERAGSLKETQLLMTIPGVSYFTALTIYAEIGEVSRFDNDKDVVSYVGLNPVIRESGDSRFEGSISKRGSGRVRWLLVQSSYTAVHTCQDEYLSRFYDRLAQRKSSKKAIVATARKLLVSMYHMLDREEVYDPPGVSA

SEQ ID NO: 148215 - protein, 342 aa, unidentified
MEYYAGIDVSLECSSVCVMDGSGKFVREAKVASEPEALIGWFGSLGLSLERIGLEAGPLSQWLYAAMREAGLAVELLETRHVRDAFRAMPVKSDRNDARGIAQLMRLGWFRPVHCKSMDAQEVRAVLTARKLVQTKLLDVENSLRGILRGFGLKVGKTTPRSFAGRIQELVDGQPNLEAIGEALLSVRAVLQREFNAFERRVRAMARLNARTRLLMSTPAVGPIVALTYAAAIDDPARFKSSKQAGSHFGLTPKKYQSGETDRSGRISKIGDASVREALYQAAHVMLTKPVKDCSELKGWAMRIARRAGMNKAKVALARKLAVILHRMLANGTPFNPAAAAA

SEQ ID NO: 148216 - protein, 400 aa, unidentified
MRRCIGLDVHREFAQVAIWEDGVVWQAGRIQTTPEALREFAGSLCTTDEVALEATGNTYAIARLLERQVGRVVVSNPQKTRAIAEAKVKTDKVDAAVLAQLLAAGFLPSVWLPDEATFALRRQVTRRAHIVRQRTRLKNQVQSILHRNLIPRCPAADLFGRKGRAWLADQDLPRDEHQAVGALLRQLDFHGQELRIVDAELGRVGLERAEVRRLMTIPGVDATVALAIVAAVGDFSRFSTPQRLVSYLGLNPRVRQSGGQPAQHGRITKQGRAHARGMLVEAAWAAAKTPGPLRAFYERVRARRGMQVAVVATARKLATLCWHLVVKSEDYAFARPSLTVKKLRALELRAGLPARRGQKGSAAAYSLKEVRRRERELAEQAELAYRQLVVGWQPKRPARG

SEQ ID NO: 148217 - protein, 416 aa, unidentified
MKVVYQTCCGIDVHKSFLVATIIKTTSGVDPSYQKKRFSTFNNSILQLKNWLIENQCRDVCMESTGKYWVPVFNLLEDEMNVTIANPKWVKAVKGNKDDTKDSKWIGDLFRLGLVPRSYIPCKPIRILREFTRYRYKLTSCRTSEKNRYQNALTVCNVALDSVVSDIFGKSATSVIDYLIERSDNSINHEEIASRLLRSLKKKSDSVIESIEGYQMTDSQKYRMRLVRAHLDYITSTINDIDTMLDSLIAPYENAVQLLCTIPGVDRNSAITVISEIGTDMTPFSNSKRLCCWAGLTPGSNESAGKKKSVRITRAGVYLKPALVQVAHAAVKSDKSPYYKQKYERIMKRRGKKRAIIAIDRMILTAIYQMLSTGEAWNPTDLYKTDMPEPLKEKQKEKAIKQAKKLLIREGILSES

SEQ ID NO: 148218 - protein, 427 aa, unidentified
MNYTQNSKIRSITESTLIIGVDIAKHVQYARAFDYRGIELGKIKSFENTAEGFLMFQQWAKAIATENNKNSLIVGMEPTGHYWFNLAYFLKDMDIRVVLVNPSHVKKSKELDDNSQTKNDRKDAKTIAKLVIDGRYSVPYVPEGIYSEIRTAMNMRDDISNALVRIKNKIAQWNDKYFPEFNEVFCNWEGKAALITLKNFPTPEKVIAKGSVQIAMEWKKEIKRGVGLSRATKLVEAAKVSVGIKEGLRLAEKELKLILDQYDLYMNQYKELESEITELTLQVPGAREMLTINGIGIMTVAGFIGEIGDITRFNHPSQIQKLAGLNLIETSSGKHKGKTSISKRGRSKLRSLLFRVTIPLVSKNNEFKLLHKYYTSRIENPLKKKQSLILLSCKLIRIFYAILTKKIKYNPEKLIKDANIVDLPNAA

SEQ ID NO: 148219 - protein, 433 aa, unidentified
MPTNHPYDLVIGLDRSDRKADLHLIDTRTGTVEKQTVATSPEALHDWLAQLRQDHPQDRVALCLEQPAANLIVFLETYSWINLYPINPISLQKFRETFVTSRAKDDGKDAQYLAELLLSHHDKLKPWQPDDSQTRQLQQLVLHRRAVVDQRTGLTNRLKALLKQYFPQALELCGEDLWRPLATAFLLKWPTLQSLKKARKPSLKQFYYLQGSRSQTLIDQRLERIDKAVPLTDEIALLQSYTLRVQLLCKELQLLLKTLEQFDQQIAKVFQQHPDRPIFEALPGAGPVLAPRLLASMGSERERFPQPGNLQCLSGVAPVTKQSGGKCCIHRRYLCPKFLKQSFHEYAKESILHSRWAAAYYGQQRNKGCGHHTAVRALAYKWQRIIWKCWQSRTIYKEAIYEAALKKNKSPLVSLLDQIELGKSPVKNGAKKS

SEQ ID NO: 148220 - protein, 421 aa, unidentified
MRSAASTQEEALKVAGIDVHKKGLMVVVVDASTPEEKPTRRRFVTMPSELHRLLTWLREQGVEEVVMESTAQYWRSVWLELESHMRLHLAQAFSNRAPGGRKHDFKDAERLVRRLIADELILSFVPSGEPRIGRSMTRMKLQLTRDRVRLQNQIECLLEEMRIKLSIVVSNRLDASGLRILHALANGETDPGKLVQLGGERLQCTEEQLVDALTGRAQPVHGERLALQRQRLQLIDQQMARLNRMIAAAMKAHQDAVIRLAEVPGLGVDSAQQIIAEVGAQASTFPSAAELTSWVGTCPGKEESAEQNHSSRSAKGNKYMRRVLHQAAHAAVAKKGSHFQAVFRRLLPRLGYQSAIWAVAHRLCRLVWKILHEGVRFIEQGHEVGPREKRKRAQMLARALRKLGYQVTITPINQLTPNPVV

SEQ ID NO: 148221 - protein, 362 aa, unidentified
MNDMTMVGLDVHARMTLAASLELATGELRFRRLSGPPRSAVDYLQQLPGPVIATYEAGPVGYGLAREAAACGIEVRVCAPGLIARKPGDRIKTDRRDAERLVRLLAAGDLSFVRIPTVEEEQFRDLARCREAARADLMRARHRLSKFLLRREIEYDGPGGSWSERHWKWLRGIEFNDHASQAVFNDYLTAVGSLEQRRSGLDAQIAIAAPRSPWALTIAALRCLRGIDTVSAYGLCCEIGDFHRFKHPAVLTAFLGIVPCEHSSGESTKRGPITKAGSPHTRRLLVEAAHHYRHRPAIGVALARRQRGQDPRACEIGWRCQQRLHHQWQRLRVERRKPANVTVIALARELTCFVWEVGQLQP

SEQ ID NO: 148222 - protein, 410 aa, unidentified
MEVMFDRVAGLDVGKESVTVCVRTPGSRRGRRSETRTFKTMTGSLRVMRDWLVESGVTIAAMESTSAYWKPPFYCLEEVMEVWLLNAAHMKAVPGRKSDVRDAEWIAQLLEHGLLAPSFVPPPEIRRLRMLTRYRVQLMADRAREIVRLELMLEDASIKLSSVASSLKTVSARAILTAMIEGESDPLRLADMAKGRMRRKIPDLAQALTGHFDANHARLARSMLRRLDLVEQAIVELDAVIVDACRPWQHQIELLQTIPGVGPKVAETIVAETGADMTRFPTAAHLAAWAGVAPAMHESAGRQTPAGKRHGNKWLTAMLVEAAGSVGRMHGKNYLAVQHARLTKRRGMGRAQVAVAHSILVAAYWMLKRDEPYHDLGADWHSRRNDEAHTRRLIAQLEHLGHTVIIDPAA

SEQ ID NO: 148223 - protein, 404 aa, unidentified
MERVYIGIDWADDHHDIHVTDDSTVALDSFSIPHSYDGMKKLRERLGKSSSDPENVLVAVESHQGLLIYALLEAGYLVYPINPKAMDRYRDRYRMSSSKSDPKDAMVLANILRTDLHLYKPLPRETVADARLRQLTRSHKSLGQQKTKMLNQLTTQLKSYYPIALRLFSRLDHKITLAFLERFPTPEKAAAASLEDLRKFFQKQGYSQQWKVTFIYESLQQPSLRAPKELEEVHQTIVLSLVPVIRSLRDEIEKLANEIGKEFKHNPAHEIFSSLPTGELTAARLNGELGSDGTRYPTREYVQTAAGTAPVTRRSGKTILIFFRWQCNKHLRAAFQDLARESVKQCAWARQYFAEQMRLGHKPSRAYRALANRWAAIIWKMLQERERFNQSRLDKSQLKALSVV

SEQ ID NO: 148224 - protein, 352 aa, unidentified
MNQITTVAADLAKELIVVCAADASGRTLFFKQLSFQGFANWAANLPPCTIAMEACSSAHFWARTLAVLGHQPKLLAPDFVKPFRKSQATKNDRNDAQAILIAALQPDMRFVSVKSVEQQSILACHRMREGWKSERTALINRVRGLLAEFGIWLGRSPQNLARSLPRLIQEEELPARMRALLVQAQEHLGQLQRLMDQGELDIAAHARHSEAAQRLCTVNGIGPITASAIVASVADARDFRNGRQMAAWAGLVPKQSSSGGTDRLGKITKRGDTYLRGLLTQGARSTLNAALARAPDKRSHLEHWIVALRRRVGYHKAQVAIANKHARICWAMLAHGEDYRPDAWQHHAPKAA

SEQ ID NO: 148225 - protein, 349 aa, unidentified
MNKITLIGLDLAKSVFQVHGVDAEGNTVLKKRLTRTQMAEFFAQLEPCPVAMEACGSAHHWARRLAAFGHTPRLIPPQYVKPFVKTNKNDAADAAAIATAARQPDMPMVTVKSPEQQAVLSVHRARDGLVKSRTAICNQIRGLLTEFGVVLPVGAHQLQSRVPALLEDGENDLPDLLRQSIQRLYDHLKHLAQEIEQCEAMITAWHRQNDASLRLAAIPGVGVLTATAIVATVGDARQYRNGRQFAAALGLVPKQHSSGNKQRLQGISKRGDGYLRQLLIHGARTVWRFRQKAPDFEQTWLGRLAKRRPTNVALVALANKRARTIWAMLYHGRFYDPDFKPNLASAPAG

SEQ ID NO: 148226 - protein, 430 aa, unidentified
MKSNTQNAKIEAITEKTLVLGIDVGSETHYARAFDYRGIEYSKKPFKFSNTEAGFVTFKEWILDLKERHEKDKVVPGMEPTGHYWFNLGKFLQDNEMKPVLVNPHHVKKSKELDDNNPTKNDRKDPKVIAGLVREGRYMIPYLPDGVYADLRTASNIRFQLQAELTRIQNRISRWFNIYFPEYKTVYGKPDAKSGMLILKAAPLPEDILTLGIDGVNQIWRDAKLRAVGKARAKTLIEAAEHSVGSKEGAVAARMEIRMLLEDYESRNTRLQEVMVLIEELVRKIPMAEKLLEIKGVGIRTVSGFLAEVGDISRFNNPKELQKLAGLALVENSSGKHKGETTISRRGRKRLRYLLFEVTMSLVSKNQEFRELHNYYTTRRLNPLKKMQSLMAIAAKLIRIFYAMLTKGVDYDPKKMVSDIRRPAAYLQAA

SEQ ID NO: 148227 - protein, 343 aa, unidentified
MSIVGGLDIHRKQITFDYVDTETGEVRRGQICPADREHLAKWLARFAGQDAHFALEGCTGWRYVAEEIIAAGLTPHLADPAEAAHLRGPKRRAKTDRADARHQRVLLEQGRLPECWVPPSHVLECRALLEAYLDLREQRTGWVQRIHAVLFHHGAPHIAGQQLGTAGGAAALRAAAAHCSPAGQLQLAIAAQMLAVYDERLHQVRRQLLDRARHTRGAAELTARLYGVGPVTGLALTCWLGGAGRFSSSRKAVRFAGLDITVYSSAGKRSPGHLSRQGPEVLRWCLFEAGKAHARASAPDHAYYAQVKDRIDGKRAALSEARKIIRQAMHILAELGDDALAAC

SEQ ID NO: 148228 - protein, 346 aa, unidentified
MTIVETRAITGGVDTHADVHVAAALDPVGGLLGVEEFPVSPAGYARLLGWLGGFGAVALVGIEGTGSYGAGLARHLACAGVRVVEVDRSDRQDRRRQGKSDPLDAVSAARAAQSGRARGAPKGRDGAVEAIRALMVAKRSAAGERTRTINQARALLLTGPDDLRARFAKHAPAALVTGIAALRPRPGAAAGYATRIALRELGRRAVFLGGQLERLDELIVPLVTARAPGLLAVYGVGPNTAALLLIAAGDHPGRLRSEAAWAHLCAAAPIPASSGKVTRHRLNRGGDRQANHALWRIVFTRMGSDPATRAYVERRTKEGKSKAEIIRCLKRYVARQVYPHLRPAGD

SEQ ID NO: 148229 - protein, 427 aa, unidentified
MKVVYPICCGIDVHKRFLIATIITTKKDLLTPIYQKKRFSTFNNQILALKKWLVKHNCFDVCMESTGKYWIPVFNLLEDQMNVVVANPKWVRAVKGNKDDVKDSKWIAELFRMGLVRNSFIPEKPIRDLREFTRYRVRLVSQRSSEKNRLQNVFTVGNVAMDAVVSDMFGKSSKKVREYLISTDQFDPDYCLSLLHGRMKPKGQELIESIEGYSFSESQVIRIRLIEEHITYLNHTIELIDKTLDRMVEAYEPAIRLLCTIPGIKRASAIQIISEIGTDMSQFQTAKQLTCWAGLAPSSNESAGKKKSVRISRAGVYLKPTLVQCAHAAVKATKESPYYRIKYQKLSKRRGKKRSIIAISRMMLTAIYHMISTGEVWNPVDIDQVDMPEHVINKRKELAITAAKNLLIKEGLIPNDFQTVLGIVQKE

SEQ ID NO: 148230 - protein, 318 aa, unidentified
MVNESFVGIDVSKHWLDLGWEPRQQGERLPHDEVTITGLCQRLAREHPTLVVLEATGGLETHLASALAAAGVAVAVVNPRQVRDYARACGRLAKTDRIDAQVLAAFAQAIRPQARAPKDDETRELGALLARRHQLIEMRVQERLRLERASPVQRESLKEHIAWLTERIERLDIDLTHRLRSSSLWREQEDLLKEIQGVGIITRAALLSGLPELGKLNRREIAALVGVAPFNRDSGKHSGQRVIWGGRAQIRRVLYMAAVAAARSNPVIRHFYQRLRAQGKPAKVALVACMRKLLTIMNAMLKHHTPWNPNALELKHSC

SEQ ID NO: 148231 - protein, 523 aa, unidentified
MARAPKSKKHSSPAPQTIHKARGVISPRVQRVGPEHFGIVCVDCAKARSKWMLTDFYGRILVPPTEVEHTQACFASMIERLRTALEQAGIRDQIVVIERTGRYHRPVQRAFAKAGFEVRIIHPLTTKQHRQPANPGNKTDDTDLAAMQRGAVNGFGLLEPPADPLSIRLQLLARHRRDLVEKSVALRSQIHEHLYAIMPGYSKYFEDIYDARIPLWIARQFGSATAILQAGLPGLIVQLRRAEIRVHLPTLEKILAWARTAPAAEDESHLHLKILTELDDDRLSKVRGVRAIEAELAGLLVQTPYVLLMGIPGINVVSAAEFAGEMGPIERYATARAITGRAGLFPSRYQSDHVDYPDGQLVRCANRNLRRAIMMIADNLVKCNDHFRVLATGWRLHGRDARAVRVQVAGRFSRIAYQMVAGRKAYRHPCCQQRDYILNKLLIFHTDNEIGYDQLMRNLDAAVAQLPRSEYREEAVPLADELDRVLKKRGKGPRPLSEILPVVLAKLGVKPVRSPKSGEAILT

SEQ ID NO: 148232 - protein, 358 aa, unidentified
MKIIGCDLHARQQTIAMLDTDTGELEEKTLEHQGETVREFYSALSGPILVGIEATGSMQWFLELMEELGIECRVGHPAKIRKAETRKQKHDRRDARLLLTLLAENRFPTIWMPSSEQRDLRTLLRHRHQWVRLRSRVQHTLQSMALNHGLRRGRSLWSQAGQDELRSLPLAPHANERRKALMTLYPSLQESIDQLDHEVSQQVDQHPPARRLMTHPGVGPITALATEVFLGDPLRFIDGKALASYIGMIPSEHSSGRRQRLGAMSKQGNALLRYLWCEAAMHAVERDPELKRFYRRKLVQKGLGKARVAAARKLGIRLWIMMRDAIDYQEFCRRGKARQESGSVRAGMPVTNSGPAQQ

SEQ ID NO: 148233 - protein, 360 aa, unidentified
MFTERTSVGLDVHARSVVAHALDTITGEVLRARLCPDPVEVTRWVKGLPGPAAVIYEAGPTGFGLARVLGSEQIRTVVAAPSKLQRPAGDRVETDAHDAEHLATLLRLDAFTAVTVPDEATEAARDLVRAREDCRADLMRARHRLSKLLLRHGIVYSGGKAWTGTHQAWLRRQRFDSVLTQAAFDEAYDTVASITARRDRLEQRINVLAGDSQYTAVVRRLGCLRGISTLTGLGLAVEIGDWTRFSGNSIGAYVGLIPSESSSGQSRSQGPITKTGNSHVRRLLVEAAWHHRVRYVPGKTMQDRWDLASPAARARGDLGNRRLHQRWEQFQTRKKRPTVANTAIARELAGWCWSLAVLDP

SEQ ID NO: 148234 - protein, 374 aa, unidentified
MDKTRNSIVQLAFALPSLRKGLIMAEKSRSVIMGADTHKQFHTVAVITHAGERLAAKSFDANAKGYRQALAWVQVHGEVMRAGVESCGTYGAGLCAHLKKQDVKVYDVYSPDKQKRRRKGKDDTEDAFQAAEAALSLERCAVAKDIDGIFKSLTDLKAAYEQAVKHRTATVNAIKATVVKLPDAFRTRLRGMDTSELIDTCAAFRVSADGDRKDDTKLALRTSAKRVRYLDEDRDLLDKRIKSYAADFLPNTMSLLGIAHHGATTLLCAVGTNIERMKSECSFSMLCGTSPLPVSTANSHHHRLNRGGNRKANSVIHTMAISRLKHCEKTQDFMERKVAEGKSKKDVIRILKRYIAREVYNALKADLSSLGLAV

SEQ ID NO: 148235 - protein, 389 aa, unidentified
MRLPRLPHLPRAIEEWACALRTRYGGAPVAICLEQSRGPLIYALMKYDFIVLFPVNPRTLAKFREAFSPSRHKDDPPDAQYLAELLLHHRERLRAWRPDDEQTRTLRLLVEHRRRVVGDQTRTSNRMTALLKCYFPQALEWFPDIRTTMVCDFLLRWSSLDALKRIRRETLLKFFRKHNCVRRDTLEKRVASIKDAVPLTTDKAVLCSSELMIKALAVQMQATLSAIKEFDQKIEEICSVHQDYQLFQSLPGAGHVYASRLTAAMGSDRDRWQSADEIACLAGVAPVMERSGQSCWVRWRYFCPKFLRQTFHEYAGESIKHSFWARAYYESQRAKGKKHHAAVRALAFKWMRIIYRCWQTKTAYDEVKYLESLRRKGSSLLTYAANNPA

SEQ ID NO: 148236 - protein, 339 aa, unidentified
MKEYHYIGLDVHKRTIAYCIKNAAGKIIDEGSVATNRRELGDWAAALPRPWSGAMEATIFTGWIYDFLQPHADELKVGHSYMLKAICASKKKNDRIDARKLADALRCDLLPECYMAPSAVRDLRQVLRYRSLLVREATRLKNKTSGLLMESGAEYDKDRLHGKRYFKELLESLDYVPETVVDLLLLNEESLRVFESNQRRLVRWLQVHPSLSDRVRRLQSIAGVGEITALTWALEVGDPHRFRSVKQAVSYCGLCSGQSESAGKIKRGPLSKKRNKHLQTILVEAANLAPRWNPQLARVFAKELARGANKNQATLAVARKLVSYLLYVDKNEKDFIAKE

SEQ ID NO: 148237 - protein, 498 aa, unidentified
MDERRLVGIDLGITSAHTVRVLDERGGVLCRRKAIPTVQSLSEVEQAALADTPPGTRLEVVMEPTGPAWLPIAVFFAARGHVVYRVSSAKAHDLRRVLSRHAKSNGIDRDRRRHLCPAAAGRPVVDPGGLHPLQLPGAERAALERRVRACDRLTQQAAQHKRRIKDLVRQLLPVSPLVGDLGQADLAVLERYADPRVLLAAGRSRLVRVIARASNNHLGVERAQQWQAAAHAAVELYADHAAVAYDDLDDDLAAEVATEIRLLRAVTAELDRHAVERETCYRWVDPGSLARSLPGLAQVGGPALTATMGPAARFATASRFRSFTGLAPKASETGDTDRKGQPMSKAGNRLLRTTLVHPGPRRRHRPQARPTTRPHLPPADGPAWQGPPRRPVRRRRPPRRARLGGHGPRHALRDLRHQRHPGHPRAGQAHHRRALHRARGRPPPATQQKGEGPSPSPHGTCEWRSKRTHEATFPSAQSWASRHPRQPHQATRLTTDPP

SEQ ID NO: 148238 - protein, 326 aa, unidentified
MDKYIGIDISKQTFDGYGYSSSKNKEEFIKLNQTKKDFQKLIRLYGKDKVYVMEATGPYYMKLACFLYEKKIRVAVINPLIINRFSQMRMQRAKTDKKDAKTIFEYAFQQDVKLWEPPQKEVLQIQQMLTSINLIQKQRTATNNQLKAFESNGTIEPHVKKTLKTVIIKYDQAIEQLEKQMQKIVEKHYCETKERLESIPGIGKKTIPLLIAITNNFEKFIHYKQLIAYTGFSPRTFESGTSVKGKGHICKLGSAAIRKQLYMCAWSAKYHNKACIELYNRLKQKGKPEKVIKVAIANKLLKQAFSIVKNKTMYDPNYISINPAIN

SEQ ID NO: 148239 - protein, 331 aa, unidentified
MKKRVWVGVDVGSRELVVAVERNGKRGETLTFENTTEGHRKLIHFITKRGASARVVLEATGVYGLDLALALERAPRLEVMVANPRAVSHFGRASLQRSKTDVLDAEVILEFAKRMPFEPWIAPAREILDLRAISRRMEALSKMATQEKNRLHASHQSAESSEVVRADVEISIEHLATRVAQLRDQALQLIASHPHLRDAFGHLTSVKGIADIAGIQILAELAILPKDMNVRQWVAHAGLDPRQYQSGTSVHKPARISKTGNTHLRRALFMPALVAVQHEPHVTAFYEKLLGRGKTKMQANVAVMRKLLHAIYGMLTHDQDFKGEKFYAIGA

SEQ ID NO: 148240 - protein, 457 aa, unidentified
MENFYMGCDVSKGYADFVIIDQNKKLMEPVFQIDDTFDGHNQLYTILSKFLTKHPGATLYCAVESTGGLEDNWLKLLHRLSAILSVRAARINPMGPHNLHKASMVRNGTDAISAQLIAEYLIAFADKVRYNETDPYVSLRKQWNLIEMYKKQKTQLLNQLSLHLYTAVPFLVHYCKYGVPRWILLLLKAYPSASKIARARTQSLHKIPYVSVKRAQTLAIEAKHSVGAVDDPYSALVIQSIVSQILHLEKLINQHKRYMTQHCQLPQVQLLTSFKGIGIYSAVGLMLNIISVERFPSAKNLASYFGLHPVYKRSGDSKEGVYMSKKGRSAPREILYWVAKSAIVSNPLIKEFYQRHIKNGKTKMSALGICMHKIARIVFGMLKHQKPFDPAIDRRNTHAGSPAQVRLHEFRNKRRFQKTSDVAPISRRQVAIRKERKLSQLTESEPFGICASSPSNT

SEQ ID NO: 148241 - protein, 347 aa, unidentified
MRFYNRQHQYYCGIDLHVKTMYICILDAAGQVLVHRNVPSTPAALLEILAPYRGDLAVAAECMFTWYWLADVCAAEGITFVLGHALAMKAIHGGKAKNDKIDSHKIAVLLRGGMLPQAYVYPAAMRSTRDLLRRRLHLVRKRGQLLAHIQNTRAQYNLPAFEKRLAYPGNREGVVEHFPDPIVRKSIEVDVTLIDQYDALITDLELTIVREAKRHDPDAFHRIRSVPGIGKILTLTILYEIHDITRFDRVQEFASYARLIKCAKESAGKKFGTSGAKMGNVHLKWAFSEAAVLFLRHTTEGKTLLTRLEKKHGKGKALSILAHKIGRAVYYMLSRGTVFSMEKFLAT

SEQ ID NO: 148242 - protein, 339 aa, unidentified
MKKTSTIGLDLAKKVFQVHGVDEAGEVTVRRAVRRSQVLAYFGKLPPCLVGMEACASAHYWARELGALGHTVRLMPPAYTKAYVRRNKNDAADAAAICEAVSRPSMRFVTIKTAEQQAAAGIHKVREMLVKQRTMVMNALRGLMAEFGIVVAPGPHHVGELVAVLADPFDRRVPAPLHGGLVTMAEALRGLERQIAAVDKQIVGWGRGNATCRHLITVPGFGPILSSAMAAMVVNPAVFRSGRDFSASLGLVPRQDGTGGKVRLGPISKRGNGYLRRLLVNGATSLIKCQRARQDPWVAKRLASKPRKVVAVALANKLARIGWALMTRQEDFRSRLATA

SEQ ID NO: 148243 - protein, 318 aa, unidentified
MYYIAFDVSKKVLCGFDGEKELAFDNKKGLKALKSYLKKKYKDLNDLVIVFEATGVYSNYLKAFCADNNLKVYIINPKRSSNFSKAIGNRFKTDKIDTKKTIYEYRKIIGPEDIKVPKIDKVAQTLSTYLASYKFTVKKRVSISNHLEALERNTSSLELVALLKGELKRTKKTEEKIKAKIEEYIKKDSQLKEDYKRQMTIPGVGKVSAICLLSLFNKYKDTNQAQITALVGLDPTKRESGTSVKGKMKISKNGDRMIRGTLYFPLLSAIRFNKKIKALYDRLLANHKPKQVALIAAMRKLILISHAIYKNKTVYSAV

SEQ ID NO: 148244 - protein, 341 aa, unidentified
MQTVTLVGIDLGKHTFHLHGQDRQGKAVFRKRVSRKQLVEFFATFHACTVVMEACAGAHHMARQLAGFGHQVRLISPQFVRPFVKSNKNDFVDAEAICEAASRPAMRFVTPKTESQQTLGALHRVRESLIRDRTKTINQLHGFLLEFGISLPIGQAVIRRLPAVLAEYSLPPRLIAVLERLHAHHKYLCEQICEIEKELTRQLAEDDLGQRLLSIPGVGPITASVLAAEMGDGKQYACSRDFAAATGLVPRQYSTGGRATLLGISKRGDKNLRRLLVQCARAYMQRLERQTGRLADWVRAMLTRRHSNVVACALANKLARTAWALATHNTIFDARPSAMPT

SEQ ID NO: 148245 - protein, 440 aa, unidentified
MQILYSRCCGIDVHKDSVTVCVLVYSGSSEPEVRKKEFDTHFKALLNLKMWLLAQKVTHVAMESTGVYWKPVWQALEGHFELILANPFQIKTVPGRKTDARDCQWIAELLAHGLIRPSFVPPRETRDLRDLTRYRVKLTEERNRVHNRIHKILEDACIKIDTVASDILGVTGRAVIRAIIAGQEHPDWLADKAKGSLRGKRPELRLALRGRITDHHRLMLRELMEDLEFVERKIDRLDIEIGARVDTAALTRLCSIPGVNRVTAWTLMAELGADMSVFNTPQHAASWAGLCPGNHESGGKRLSNRTRKGNRWLRRALCQSAWAATRKKNSYIAAFFYRKAGKHGIRKAIVATAHRLLIIAFCILRDSTEYQELGDNYFDRLHPERTRNRLVRRLQRLGLEVFLQPHAPSLVPQPPDPLPTRKRGRPCKCVERGIPCKHSS

SEQ ID NO: 148246 - protein, 389 aa, unidentified
MVKYSLGIDMSFKSFHVCLSAIEQDQQVRVKASGSFFNNEEGFRLLEKWIGKHHKQAQLPLVVVMEATGVYYERCALYLHQTGYAVSVVLPNKAKKFLASIGYKTKNDKIDAKGLSRMGAERNLDKWQPMDDFFYTLRSYSRQHESLQQTKTIINNQKHAVENQSQPNALVESQLDRLIDTIDQQLKQLSKVIDEHINSNKEVSEKVKGICKIKGVGTFTIAVVIAETNGFALFKNIPQLISYSGYDVVENQSGKHVGKTKISKHGNGHIRRALHMPALHAGNWEGSVFQNLNQRIFERTKIKMKGYVAVQKKLLITIYTLWKNNEAFDKDYKNNQQQKHTEEQEEVLPSLVSDEIAGPFVKKVVPNKPELHKVNIPSEQSQYAPSLVE

SEQ ID NO: 148247 - protein, 331 aa, unidentified
MKNIFIGIDFSKKTFDATVLKANLLHEKGEHRQFSNNKNGALKLIKWVEKIGAREECLFCGEDTGLYSKIVSETIVNEGCFMWLDSALRIKRSLGISREKNDKKDSRDIALYAARFNDRAECYVPLDQATEALKKIFTMRKQLMKIYDKLLVNYYESKRYLDNELLSNAFAVQEELISQVKEKIKELEKQIKKIIESSPKLNKTFEILTSMPGIALINATAFIVYTNNFKKFNYDARKIASFWGVAPFGHTSGTSIKGTPHVSHYADSYLKSLLSEAALCASRYCPIINKYVTKLKKAGKHKNIVLNNAKNKMIHILVAMVRNNENYRKAV

SEQ ID NO: 148248 - protein, 457 aa, unidentified
MSKHSRKTKSQSLKVPSLPQHLQHINLNAAGIDIGSERHMVAVPEGRDTVSVREFGAFTADLKALATWLKQCGVTTVAMESTGVYWIPLFELLERHGFEVKLVDARHVKNVSGRKSDVLDCQWLQQLHTYGLLAGAFRPSDEVCVLRSYLRQREMLTQAASMHIQHMQKALQQMNLLLHNVVSDITGVTGMKIIKAILAGERDPRVLARNRNERCQNTTVTIAKSLVGNYREEHLFALRQALDLYETYQAKIADCNQAIIKQVEKQPDISDDGPPTPEKQVQARDRLRDGVDVRNLLFKKSGVDLFAIPGLAADTLLTLASEVGFDMTPWKTEKHFASWLGLCPGTKISGGKVLNKKTKRNPNRATQAFRMAAASLYRNQTALGAFYRRIKSRAGGQQAVTATAHKIARIYYAMLTKGTSYVELGQQAYEQRYKDRRIDHLKTQAKSLGFQLVPCAT

SEQ ID NO: 148249 - protein, 398 aa, unidentified
MPKPNDTSRSPVALDQDSTLIAVIEMSQTSWLVAGIVPGVARQPLKKLGAEPDALLALLERWRAEAGKAGRPIRRVAVAYEAGRDGFWLARWLRVRGVEAHVIHPTSVAVARTHRRAKTDRLDTQLLKRAFLGWLRGEPDHCTMAAIPTPAEEDARRPQREREALVGEKTRIVNRLKAALARLGISGFKPTLRKAGGRLAALRTPDGEPVPPNTLAELRRDMARLALVREQIAEIEAARRHRLEQAPDHSPGQAADKGPHAMLELVARVRGIGIDTAELLVNEVLARNLRDRRAVARYGGLTGAPDESGKRRREKGLARAGNARVRGAMIQLAWRFLMFQKDCDLARWYRARTEEIAGDRRVIRKKLIVALARKLLIALWRMATTGEIPNGLVLRPAA

SEQ ID NO: 148250 - protein, 320 aa, unidentified
MLSFCGIDVSKDRLDVMVLPDEYSSSVPNDPAGWAILVEQLRGFSITAIGIEASGGYERGAVRSLQAAGMPVRQVNPFKLRQFAKASGVLAKNDPLDARMIASFVGIMPTRPAQRTTPAAEQLVEMLAVRRQLSAEKIAAENASRLLEDPMLQRLSRRRITRLAADIELLDKRLVEIVATDATLAHRYRLLTSMPGVGPVLACTLIALLPELGGMSRKQVAALVGVAPYAFESGTLKGRRCIWGGRANVRQVLYMAAMSASNWNPVLKLFHDRLKGAGKLPKVVIVAVMRKMITTPNAMVRDDIAWADRLSGRHSVTTAR

SEQ ID NO: 148251 - protein, 406 aa, unidentified
MQGPVITVDVSKGSCHYQPYVSNGHPMRKPKVLHDTVEGFQSLSDLIDTMKDRYECETIPVIFEATGVYHHCLQKYLDDHQIPYYIISPLKSASYRNTTPNSNKTDDLDCSHIAKAYYGECNLFPYDKPSKSFHNLRELNRYYECELNHLRMRKNTFRKYLDIVYPRLDKCFKGHSSLYDEIPMEVIKQYPHPSLLLKHKEETIVKKIEKKTSHNALFIQNIVHEMYECSMHCYSGADVTDVESMILPELVDDLQSQKERCDEILKQLVSEAQKTPYFTSIVSIVGIGDNLAARIIAELGDMSRFSCRRAITAYAGLNPKIRQSGDMDGIHLAISKKGNKHLRCLMYLAVSCNYRLKKGDVLYEFNQKKRQQSFSPLKPKAATIATAHKLLLIIYALCTKGTVYHS

SEQ ID NO: 148252 - protein, 344 aa, unidentified
MNKFTTATATVFCGIDVSASSLSVALIEPDHAVTQREFANSASGHKALHVWLGKHNAPVRVSLEATGIYSLDLALALDAAASIEVAVLNPKLVNLFAQTLRRSKTDAADALVLAEYSQRMPFTAWQRPGVNALRLRTICRYIESLVVDLAEVKNRLHATESTSTTPRAVLVDLKQAQAAFLRRLAKMRREAMKLIQDDELLRQRFALLVSIPGIAEVSALQILSELALLPPGMTVRQWVAYSGLDPVHHESGTSVHKPTRISRAGNRHLRHALYMPTLSAVRFDPHLRAFYQALRARHKTGLQALMAVERKLLHAIYGIFKSGKPYDGKLLFPQIQLAVESITG

SEQ ID NO: 148253 - protein, 341 aa, unidentified
MKKTLYGGIDLHSNNAMYVITDEQDRPLFQKRLPNELPTVLAALAPYRPRLKTVAIESTYNWYWLVDSLEDNGYPVVLANPAKMEQYDGIKEANDLTDAAFLAHLARLKILPTGYIYPREDRPVRDLLRRRMLLVRYRTGLKLSLQNMVARQTGQSLGWRGVRTLDEDGRAELLGDNDCLPFVATHQVELIESLNEKIGLFEGKVLQRVQLRPAYERLLTLPGVGVILALTIMLETGDIGRFETVGDYTSYCRCVRARHTSNGKKKGENNKRNGNAYLSWAFVEAVHHALRCCPAAKRFYDRKVAKRNGALATKALAAKWSKAAYYVMKRQEAFDLTRVFG

SEQ ID NO: 148254 - protein, 388 aa, unidentified
MIYVGIDIAKLNHFASAVSSDGEILIEPFKFSNDFDGFYLLLSKLATLDQHSIIIGLESTAHYGDNLVRFLINKDFKVCVLNPIKTSSMRKNNVRKTKTDKVDTFVIAKTLMVQDSLRLTTLEDLDYIELKELGRFRQKTLKQRTRLKIQLTSYVDQVFPELQYFFKSGLHQKAVYTLLKEAPTPKDIASMHLTHLSNLLVKSSHGHFTKDMARELRVLAQKSVGLNDSSLSIQITQTIAQIELLDSQLFETELEMANLVTCLHSVLMTIPGIGTVNGGMILGEIGDIHRFSTPGKLLAFAGLDPTVYQSGNFQAKKTHMSKRGSRVLRYALMNAAHNVVKNNATFKAYYDAKRAEGRTHYNALGHCAGKLVRVIWKMLTDEVEFNLK

SEQ ID NO: 148255 - protein, 480 aa, unidentified
MQILVSRVCGIDVHKDMLAVCVLIYRTGEKPEARYKEFATHQKALSALQHWLSAQKVTHVAMESTGVYWKPVWYALEGHFQLLLANPFQVKALPGKKTDKRDSYWLAELLAHGLIAGSFVPPEKTRALRDLTRYRVKLSEEMNRIQNRIHKVLEDASIKLDTVVSHILGGTGRSIIEGIIEGKESPHQLAERAQGSLRGKRAQLELALYGRVSDHHRFLLKELLEDLQFVEAKILRLDKTLSSSVDWELVTRLCTIPGVDVITAWTLLAELGSDMRVFANSKKVASWAGLCPGNKESGGKRLSGRTRKGNRWLRRGLCQAAWGASRKKDCFLSAFFQRHKAQQGAQKAIIATAHRLLVIAYCILRDGTTYQERGGDFYDQLNAARTRQRLVERLRRLGVQVTISLPVPPVPSASTSIALAPALPAQALAQSADNLPPPSPPVNKRRPGRPCKCAERHIPCTHHRLPLAPTPLATPPVATP

SEQ ID NO: 148256 - protein, 310 aa, unidentified
MQDTIGIDVSKGTLDLHRRADGANVQLGNDTPGFKRLLKWIGPSAAALIVFEATGAYHRSLEKFLNLHKLPYVKVNPKQARRFAQAVGKLAKTDRVDAEMLARMGSALDLQAQEQPHESLHDLKELLTARRALIKDQTAAKSRLATATVPLLRRQIKRRLAQIARDIAQLDIGMRKQADKDEAIAERMDLASIPGVGRLTAITMLVDMPELGTLEAKQVAALAGLAPITQQSGKWQGTARIQGGRPWIRRALYMPALVAVRFNPDLKAKYTQFIDAGKPPKLALTAIMRKLLVMANTLLRDHRMWSEVRP

SEQ ID NO: 148257 - protein, 313 aa, unidentified
MGCSVGIDVAKDWLDVAFYPPQPLERWGTTPDALAGLCQRLQALVPDRVVLEATGGLEAEVVLALEEAGVPVVVTNPRLVRAHARSIGRLAKTDRLDAQVIAHYAAKLEPEIRPLPDATTRRLRALVLRRDQLTSMLTAERNRLARPKTTVVASVQRLLTAIEEERAVIEQELQAVLEASPRYQRQVRRLQSVPGIGPIIAVTLTACLPELGQVRRQPLAALAGVAPLNQDSGQRRGHATTWGGRRMVRKALYLAVLVGIRWNPCIQAAYRQLLSRGKAKKVALVACMRKLLTILNAMVRQQTDWWYPIPEAA

SEQ ID NO: 148258 - protein, 363 aa, unidentified
MAAKAMTLVGLDVHARQTHAAILDPDSGEVRVSRLRMPAIEVAAFLEGIGPRTLAVYEAGPTGFALARAACERGVDVRVVAPGSIPKGSGDRVKTDRRDAIRLVRLLAAGELGFAFVPSVADEQFRDLVRAIEDVRGDLMRARHRLGKFLLRRGERYPGPGGAWTAAHRAWLRALRFEDACSQATFADYLAAVELLMSRRASLLVALEQQIPDCGHAPVIARLRCFRGIDTLSAAGLCAEVGHFGRFPKPGPLAAFLGIVPSERTSDTKRRQGSITKAGSGHARRLLVEAAHHYRCQPCIGEALARRQRGQDPRVIAIAWRAQRRLHQRWEHLREHRRKPAGVVAIACARELAAFLWEAATLD

SEQ ID NO: 148259 - protein, 336 aa, unidentified
MEAKFAHFAGVDVSKQKIDVCLIVNHDKSEIAHSCFEQSKRGFSSLKKWLNQTTNKETDRLLICVENTGLYDDALMYYLFDNGLSTSLENAANIKRSVRDNRTKTDKVDARNIAMYAMAHFDELRLWEKPRKQIVQLQLMLSERSRLVNALKILKQASQEQQAFSWSGIVQSKPYQCGIKGLQKDIEQIEKDIWELIRTDKSLLQMFMLITSIPSIGKITAYHFICYTNEFKEVKSGKQLASYCGVVPFEKSSGSSVKKKPRLSHQGNKLLKTLLHLCAVTSIKMKGAFAAYYSKKIAEGKNGLIAINGIRNKLALTVAAVIKNNKPYDANYVYQP

SEQ ID NO: 148260 - protein, 273 aa, unidentified
MHKRVCHGTVMDEEGHVVKRERFSNDPDSLSSFMKDIGEAKVVMESGYCWQPIYDRLEEAGYDVRLAHPLKVKAIAEAKIKTDEIDSETLAHLLRADLLPESYVPPKEIRDLRELVKRRAFLVGMRTRLKNRIHAELAKRDIDPGSPLFTKHGRALLASLGVDAVSQLLPVMETLDRQIGEISAVLKRAAVEDGRARILTTIPGVGYYTALLLVAEIGDINRFPDAERLCSYAGLVPSVRRSGGSTVHGHITKEGSKWMRWALACPEIGFKWY

SEQ ID NO: 148261 - protein, 413 aa, unidentified
MEQIHDRVAGLDVHRDQVAACVRTPGPRGGVQTQKARFDATTGGLAALAEWLAGHAVTLAAMEATGVYWKPVYYALEDRFVVWLCNAHHVKNVPGRKTDMSDAEWLADVAAHGMVRPSFVPPPPIRELRELTRYRKTQIDVRAAEIARLEKVLQDAGIKLTSVASKVLTQSGQAMVEALIAGERDPAALAGLAKGKLRPKIPQLTAALRGHFGAHHAIVAARILAHLDFLDETVAALDEQIAARVAERYQSAARLLADVPGLERRSIEVIIAETGADMSRFPSPAQFASWAGLCPGNHESAGKRRRVATTPGDQWLRRTMIESARAAARTRGSYFAAQYRQIARRRGPNKAAVAVAHSLLDAIWHMLSTGEVFADLGEDYFTSRHDKEHQTLRLVSQLEKLGYTVQLAAAAAT

SEQ ID NO: 148262 - protein, 410 aa, unidentified
MTDKNIAQSEPVLVAIDISKARHEVLIAVPGKKRRRRLTVLNQLDDFNRLIATLSDYNRPVRVAFEATGNYHRALAYHLAAAGFEMKLVSSVALARTREALHNSWDKNDPKDAQVILHMMEIGNEQFYHDPLMRGTNDIQELSKTHDIVSKSKTELWHRISTHYLPLYFPEADRFHRSSRSDWFFAFLERYPSPHLISAMGKEEFIADAWTVVGRRVSKERLLADIYETAKTSVGLPVDADSDALRMFRLVLAEGRGLIAQRNEIENRSIALLKDDTDYQLLTSIPGIGPINALTILAEAGDLRRFGHHRQFLKFCGMDLATIQSGTFRGQTKLSKYGNARMRRTLWMAGQVAILQRANSFRDKFERYIAKDRQNTHLRRKAYTAIAAKMARTVHGIIKHGEPYRPFFEG

SEQ ID NO: 148263 - protein, 338 aa, unidentified
MYYSGIDQHKQFSYFTTVNDEGIIIKQAELKNNEFDILNYFYTLGKNHIATVETTGGWYWMNDLLSNHGINLKLAHAKYVKAIAYAKVKTDKVDSHILAQLLRLNFIPEAYKISDNLRPLRDTLRARLRLSQKRTSCLNFMNRMLEKFNINSPSQLTEFYKLQYLQFDNQEQLLKQQMLTLEKSLYTSLIPNEDIQRLLWIPGIGKLNAFSILLEVGDINRFQSGKNFFSYCRLVPSARNSAGKSKQRSSKDGNKYLKLVFSDAAVHSLQYYPAIKKYHDSKLRKKKKQVAHAIIAKEIARIVYYVLKNKSAFNNHFKGIELEHKKSVQWPRTSSPDV

SEQ ID NO: 148264 - protein, 370 aa, unidentified
MKKHITFVGLDTHKNSIEVALADEGANSEVRLYGSIGGDLDSLDKMIRKLRIPGAELRFVYEAGPCGYEIYRHLRAQGLHCDVVAPSMVPRRSGDRIKNDRRDACNLARLYRAGELTAVYVPHEDDEAMRDLVRGRQDAINAQRKARQQLGGFLLRHGVRYPGKCLWSLAHGRWLAGIKMPHPAQQIMMQEYIHTVEECTQRVIRLNEQIQQLLPDWRMHPLVAALQALRGVAPVVAATVVVEIGPMGRFKNPRQLMAYLGLVPSERSSGGSVRRGAITKTGNGHARRALIEAAHSYRHPARISRTILKRQETLTEPVRQIAWKAQLRLCARFRRLIARGKSRNRVVAAVARELSGFMWAIAKQVPVPQG

SEQ ID NO: 148265 - protein, 331 aa, unidentified
MTRLPNRANDAPLTIGVDVAKATLEVGFSDGESTLALNNDETGHEALVRHLAALGSYGATIGLIVLEATGGLELEVATTLQLAGYAVVVINPRQARDFARSMGYLAKSDRIDARVLAHMGQTLLQRDDLRKLVKPLPDERQRMLQAMVTRRRQLVGMRIAEQQRAGAPDKRMRRSLNIIMKALDREIARLDKEMHAFIGEHHAELAALLDSVKGVGKTTIGTLLAEVPELGELNGREISALVGVAPINRDSGTMRGKRTIFGGRPHVRKVLYMAALVASRYNPVIKAFYQRLLGAGKPKKVALTACARKLLIILNAMVRTRQPFDIARHLA

SEQ ID NO: 148266 - protein, 355 aa, unidentified
MDSVKYIGMDVHKESISIAVRNGAGKIVMESLIETKASMILQFIDGLRGDVHVTFEEGTSAAWLYDLLKPHVTKLVVCDPRKNASMREGNQNDKIDARRLAELLRLNHLSPVYHGEHGLRSLKELVRSYLTITKDLVRVMTRVKAIYRSWAIPCTGKQVYAPRHRAEWLGKIGEPGVRRRAEFYYQQLDALRTVRQQVRRDLLAESKKHPAWKRLCQIPSIGPIRAAVLLGILQTPHRFRTKRQLWAFSGFGIETQSSADHRRVGGQLERVKKQSSLRGLNRNCNHDLKNLFKGAAIVASSKPGPFQEFYTALLTKGIRPEMARLTLARKIATIVLMVWKRGACFDAQHLKPQTA

SEQ ID NO: 148267 - protein, 469 aa, unidentified
MGKGSGSGTTRGDRRRNARRERLRELLPRDGAVIGIDLAEDKQAIAVIDHDVRVIARKTARVKAFRLGEALDWAVAQARAKGFAHVTVACEPTGPRWMQVQRLCAERGLPLVCIQPLISHIAREQQDYTTHKTDESDCVMIARLAVELHCYIPEELDETWAHLRQLGRRRAQLVTAATASSQRIRDFLSVAWPAVMETCAQPLLSRTWLAAMQLVTEQCGGQPGRLAVMGEEAFTAAVRGAVAGWGGKKAWGSICRRIFAALTDTEGVVAWSRRGLLRRVADELGDLQRTRAQLRAAETDMAGVLGELGLSRLADIPALTAVGAAAILAETGDPRRYDSSSSLVKHAGLSPSDNASGAFLGNAHISRRGRPGLRLTVWRAVWPMLQFNPVMAAKYQAMTQAAGAAEEQAGGARQASAAAAAARSRRAKARVACAASLLRWIYAIVVHDTGWDAAAAVGPHAPRCPAEAS

SEQ ID NO: 148268 - protein, 400 aa, unidentified
MSTRHDRIWVGIDAGKGHHWAVAVDADGETLFSTKVINDEAQVLTLIETARERAEEVRWAVDISGRASTLLLALLVAHGQNVVYVPGRTVNRMSGAYKGEGKTDAKDARVIADQARMRRDFAPLDRPPELVTTLRLLTNHRADLIADRVRLINRLRDLLTGICPALERAFDYSAAKGPVVMLTEYQTPAALRRTGVKRLTTWLGRRKVRDADTVAAKAIEAARTQQVVLPGEKRATKLVCDLAHQLLALDERIKDNDREIRETFRTDDRAEIIESMPGMGPVLGAEFVAIVGDLSGYKDAGRLASHAGLAPVPRDSGRRTGNYHRPQRYNRRLRWLFYMSAQTAMMRPGPSRDYYLKKRGEGLLHTQALLSLARRRVDVLWAMLRDKRLFTPAPPVTQTA

SEQ ID NO: 148269 - protein, 479 aa, unidentified
MNNKAKKAKKQAVINNSTVNILSKKELARRIAMLQESMKAATWRELETNGKFTKNDKLTFISDDMLIIGCDIGSEMHYVRAIDSRGRELSQDAFPFSNSSEGFQSAKAWALELAAANDKHQIVLGLEPTGHYWFCLAAWMVSNDISVVQVNPYAVKQTKELEDNSQRKDDRKDPKLIANLVKDGNYGMPYLPEGLYADLRRLSMLRDQLTEDRIRNTNRLHREMKIYFPEYREAFGKLDGAFTLEALKVTPFPEDIVRLGVDGLKDIWHSAKLRGRGYSKADQIVQYAKESVGLKHGRAGGRKAVKIFAEQIESLSEALDEIEAELHQKCREIPYAENILEIRGIGENILAGILAEMGDITRFDDASEIQKLSGLGLVAWSSGKHKGETKISHRGRKRLRYWLFQAAKSAVSHGEEFKELHAYYTTRKDNPLKKMQSLIVIACKLLRIIFTILRTGCRYDPMKMHRDIKRPKRAVAQAA

SEQ ID NO: 148270 - protein, 428 aa, unidentified
MKYNTQNAKIASINEKTLIVGIDIGSETHFARAFDWRNYEYTRKPFEFSNNEAGFQTFKAWIEELQDKNGKSVVIPGMEPTGHYWFALGKFLQDSGMKPVHVNPHHVKKSKELDDNNPNKNDRKDPKTIAGLVNEGRFSYPYIPTGIYAEIRSLSNLRFQAQEELTRAKNRIARWFSIYFPEYKDVYRDLKAVSGRMVLQVAPLPEDIRKLGVEGVNRIWRDAKLRGAGMKRAKTLVSAAEHSVGSKEAPEAARMELRNLLNDMDVYASRVEELLGMIGEKLKEIPYIDKLMAIKGVGVITVSGFIAEVGDIKRFDDPKQLQKLAGYAIVTNQSGKHKGESRISYRGRKRLRYVLYEAALSLVGRNPEFKAIHEYYRTRRENPLKKMQSVVAVACKVIRIFYVILTKGVDYDPAKMLGDIRRPQIQAA

SEQ ID NO: 148271 - protein, 333 aa, unidentified
MEDAPTSSSATLSLGIDVGKSALELALSNGDGPIAKMSVSNDSEGHDRLLSWLEDHEAGPANTFACMEASGGFEEAIASLLYEKGYGVSVVNPRRIKGYADSQLQRSKTDTADAALIARFGDREEPSPWEPPEAAQSRLQELTRARQALQKEKTRTQNRLDDASEETVRRTYKDLLEEIDSKIESLEEEIQEQIEENQQLNERCQLLQSIPCVGLQTAAIVLSEIGSSDQFESARQAAAYAGLVPSHRESGTSVRGKPRMSKVGNGRLRRAMYFPAMGALRHNPAVKALGDRLEERGKEAMVIIGAAMRKLLHICYGVLKSGRAFDPSLHPTA

SEQ ID NO: 148272 - protein, 411 aa, unidentified
MVKENFIYVGIDLHKETHTAVMIDCYNQKLGEITFPNRPAAFPKLVTKVKKCNTDGKEVVYGLENAYGYGRALAVWLIDKGYLVKDVNTAISHRQAKHRGAMYRKSDSDDAKAIALATLNMLDKLPDACPNDAYWSLGQLVHRRDNIMKQRTRLVNQLHEQLCIAYPSYKQFFNDISRPTALYFWEHYPSRKYLKGKSVEDLRAELVPVSHNKCSTKTCEKILDAVASDKVKNNAYQDARDMVTLSIVSDLQHYDSQLTEVDKMLEQMYKMLGCTLTTIPGVNVITAVKILAEIGDIKRFSNANKLAQFAGIAPLHLSSSGKGKDLATKQGNRRLQATIYFLAIQMVQVSSKGTPRNSVVRAYYEKRKAEGKTSQQALICISRRLISIIYGMLKHGTEYRMPVVESAGEKL

SEQ ID NO: 148273 - protein, 382 aa, unidentified
MDIIHACCAGLDVHKKTVVACIRSIGPDGTVSREVRTFGTTTAELLALSDWLEAHGVVPVAMESTGVYWKPIFNLLEGSFQVKLVNAHPIKQVPGRKTDVKDAEWIAELLQYGLLSSSFIPPPEIRNLRDLTRQRTQIVRDRATVANRIQKVLEDANIKLSSVASDVLGVSGRAMIRAIIDGEDDPDELAGMAQRRLRGKIPELKQALHGRVTEHHRFLLRSLLEQIEFLEGLIARFDARIEEAMAPFDEAAGRLRAIPGVGEKAAEVIMAEVGPDMTPFPTAGHLSSWAGLCPGNDQTAGRQRNGKTTKGSQWLRTTMVQVAWAASRTKDTIFSACYQRWAKRMGKKKALVAVAHKILVVVYHLLKNRTDYRENGKPVKVA

SEQ ID NO: 148274 - protein, 364 aa, unidentified
MKRKVYVGMDVHKETIQIAYLTSNTKEMVKEQQIKHNEVHIKKFINKLKTEWNEIHCCYEAGVTGYPLYRYLKSLGVNCILVAPGKIPRQSSDKIKTDKRDAIKLARLLRSGDLESIHVPSEEDEAVRDYLRSRDSLRLDLGRNRQRLMKFLLRKGNVYSTTKYWTVSHYKWLNNLHFENEILHETFNDYYSRVRVQEENLKAMDQKIQEIAKSEAFRERVGILRCFRGVDYLTAMFLLSEVNDFRRFKTAGSFMSFLGLVPGEYSSGSKRKQTGITKTGSPRLRRILTEAAWQHRFPGTGSKIVAARRTGQPALVVALAEKASLRLHKKFRNLHLRGKTPQVMITAVSRELSGFLWAAMNLVA

SEQ ID NO: 148275 - protein, 318 aa, unidentified
MQGVRTIGLDIAKSVFQIHGVDAAGNVVIRRQIKRWYVVAFFQKLPPCNVGIEACATSHYWSRQLQVIGHTVRLMPPAYVKPYVKRQKNDAADAEAICEAVTRPSMRFVETKTPEQQSCLMLHRTRHLFIRQQTAVINSIRAHLAEFGIVARVGRQGVEELLDVVADPAERRLPEVARACVAALGIQLRMLKAQILEFDRRIMAWHRSNETSQQLDAIPGVGPALATALVAGVADPKAFQSARHFAAWIGLVPRQYSSGGREKLGRISKQGDRYLRGLFTAGAGSDPLCQDPWHQTSTLAHGIVSAPANKGRRDCARQ

SEQ ID NO: 148276 - protein, 345 aa, unidentified
MTSVATIGLDIAKSVFQVHGVDAAGQVVVRQRLARRRVLAFFEKLAPCLVGIEACSSSHYWARELMARGHQVRLMPAQYVKPYVKRGKNDAADAEAICEAVMRPTMRFVPVKTPEQQSVMMLHRVRLMLNRQRTQLSNSVRAHLSEFGIVAPIGRRGVDQLLAVVANDKDTRVPADARLCLQMLAAQLAVVKEQILENDRRVRASARETELGRRLMEVPGVGPLLASALVATVADPAAFKTGRDLAAWIGLVPKQNSSGGKERLGTISKAGNRYLRQMLVVGAMAVIRYAERHGTRRPWLVQLMQRRSAKVAAVALANKMARIIWALMTSGERYREPATVSAMAA

SEQ ID NO: 148277 - protein, 353 aa, unidentified
MMVFGVDPHKGSHTAAGADELGRETGGKTVKADRGGCRELIAWARALAPEGRRWAVEDVRHVASGLVRELLAAGEEVVFVPTRMMAAARAGGRGRGKSDPVDALANARAALREQEFLPAARLDDRVLEVRRLADHRDDLVAERTRTVNRLRWLVHDLDPAIAPPRRSLGGKAARARLAAALAALPASAGKRIAQWQLEAVTRLSAEVTALEAELRTLVEDLCPALLGTCGIAVITAARILGETGDVRRFRSPAAYARHNGTAPIPASSGTGTSGPQRLNRGGNRQVNAALHRAALVQARCHPGAIALLERRAGQVRETRKAALRVLKRHLSDVIYRALNADAWRLDQPAQQAA

SEQ ID NO: 148278 - protein, 338 aa, unidentified
MSIVMGLDQHRAQITADWLDTETGEVKRARVAPADRAGVRAFLARFRGQRLEVALEATTGWRFVVEELRAIGAVAHLAEPAETAGLRGPKKRAKGDRADARHLRELLMVKRLPESWIPPDHILDLRARVRLRHTLSEQRSEWQQRIQAVLYHHGCPQRRSLMIGDGRAWLAAQPLGESAREQVTIALAMIDALETQIAPLDRELRAYARRQAGCKALMNHYGIGELTAVTILAELGDCTRFSSSRHAVRYAGMDITVHQSDQRRAPGHLSRQGPPALRWALFEAAQVARRPGSPDREYYEQAAERLGGNRACLAVARKLLKRSYHTLRELGEEALQPA

SEQ ID NO: 148279 - protein, 328 aa, unidentified
MQGKVSSERTAMATVYVGIDVCKEWLDIHLHPLGRSFRVTNDTAGMRRLKRELDALDQMPRSALHIVMEATGKWHRAVQRSLHADGFYVSVVDPLRARLFAKACGFLAKTDRLDARLLAIMGEALKPAQTPPQDQALEALQELVNARSAANGERTALSNRMKTAVTAFLRKELTRRLAALDTHIARLDVEIERSIGAEPEMRRRLDILISIPGIGAVTAASLIAGLCELGACSGKQAAMLAGLAPLACESGERAGHRSIRGGRPAPRNAIYMAALSASRHNPDLAHFAERLKKAGKPNKVVLVAVMRKLIVLANTLITKNRIWTPNPP

SEQ ID NO: 148280 - protein, 355 aa, unidentified
MTTVPHDEVRVTVGVDTHEDVHVAVAVDQLGRWLAETWIATNTGGFARLVGWASEFGVIDRFGVEGTGSWGAGLARWLRAEGLVVVEVDRPKRKHRRHGKSDAIDAEAAARAVLSGEATAVPKTGDGPVEMIRVLRLTRRSAVKNRTMTANQINALVITAPDALSQDLRPMSTRRRVAVAAKFRTGDEPTTVLDATRYALRELARRYQHLTEQITRLDTQLDRLVAETAPELVAKVGVGTHTAAALLVTAGDNPERLVREGSFAHLTGTAPLDASSGKQQRHRLNRGGDRDANCALYQIALTRSSVDEDTKLYLKRRIAAGKTKKEAFRCLKRYIAREVHQILVRTPALQVALDT

SEQ ID NO: 148281 - protein, 358 aa, unidentified
MAGKVTETAVVGGVDTHKDLHVAAVVDQNNKVLGTQFFSTTRQGYRQMLAWMTSFGALKRIGVECTGTYGSGLLRYLQNAGLEVLEVTAPDRMERRKRGKSDTIDAECAAHAAFSGIRTVTPKTRNGMIESLRVLKTCRKTAISARRVALQIIHSNIISAPDELREQLRNMTRMQLIRTLGSWRPDASEYRNVTNVYRISLKSLARRYLELHDEIADLDVMIAAIVDELAPELTKRNAIGYESASQLLITAGDNPQRLRSESGFAALCGVSPVPVSSGKTNRYRLNRGGDRAANSALHIIAIGRLRTDDKTKEYVARRVAEGHTKMEAIRCLKRYISREVYTLLRNQNRQINSIPITA

SEQ ID NO: 148282 - protein, 364 aa, unidentified
MDEVIRTNACCSSDVDEQQQKITIGIDLGDRKSHVCVLDLNGEIVNQEIIRTSPTSFRDHFGAISSAVVALEVGIHSRWASRVIADCGHEVIVANACKVKFIFSNDGKNDRVDARSLARLARVDRKLLFPIRHRSEDAQAALSVLRARDAVVRARTRLINCVRGLVKPTGVRLRASYAEAFPARVVDQIPEGLRTAVALVLEQIQSLSDTITVYDQYADHIIATRYPKARLLQQVQGVGPLTALAFILTLDDPWRFAKSRHVGCYLGLRPRQDQSGDRNPQLGISKGGDEFLRRLLVNAAHYILGPYGSDSDLRRWGLRIAERGGRRAKKRAVAAVARKLAVLLHRLWITGEVYDPLYNSRAAA

SEQ ID NO: 148283 - protein, 383 aa, unidentified
MDTAATRNIEYSAFEPVLYLAFELSEAHWKLGFTIGVGQRPRERNIRSCDLVALQKEIQQAKKRFDLPETVRVVSCYEAGRDGFWLHRYLIQEGIENLIVDSSSIEVNRRQRRAKTDRMDVEKLLSQLIRYRSGDRKVWSVVHAPSVEDEDQRHLNRELAAAKKDRTRHNNRIKGLLVGQGVRLAIKADFLDRLDAVRTWEGLPLPPGLQMRLKREYERMKLAERQIKELERERIEAIRHSEDPSVDMVRQLLKLKGIGLNSAWLYTMEFFSWRKFQNRKEVGALAGLTPTPHESGSSSRERGMSKAGNRHIRGMAVEIAWGWLRYQPDSELTQWYEERFGHGSSRMRRIGIVALARKLLVELWRYLVTGAIPKGAVLKTRLI

SEQ ID NO: 148284 - protein, 320 aa, unidentified
MSEPYTVGIDVSMDRLDVAILPGGQRLFVANDAAGWAELVGRLQRCAIAAIGLEPSGGYERGVVRALLAAGFSVRRINPNKLRQFARARGVLAKNDRLNAQLIAEYVAIMPTRPVQSDPAAERLAEIVTMRRQLCDAHVAAENQASHLEDAMLRRIAKRRLARIEADIRLLDKRLAELVAAELGLARRFRLLCSMPGVGATLAYTLLALLPELGAIGRKQIAALVGLAPYDFDSSKFRGQRHIYGGRMAVRNVLYMAALAAFRFNPALKAFHRRLLAAGKKPKVAIVAVMRKMTGVLNAMLRDKTDWVDHTTGRHIVPAR

SEQ ID NO: 148285 - protein, 489 aa, unidentified
MSTARKQREGKKGSDAHRSASKRKARGSHCQQGEGHRRRSKLTITNPDAAGIDIGAQVHYVAVPEDRAEVSVRSFGAYTAQLDELVQWLKDCTIKTVAMESTGVYWIPLFQKLEEAGFEVLLVDARQAKHVPGRKSDVQDCQWLQQLHSYGLLRAAFRPEDSVCRLRTLQRHRKNLVESAAMWIQHMQKALNEMNLHLHHVLSDISGQSGLRILDAILAGERDPRKLASLADRRVEKSQAQIEAALTGDYRPELLFVLSQSLQNYRQIQEQIAQCDLNIEKQLAKMADCANPNQTSEPIQQSQDSAGCRPRKRKPKDALELSLAGHLRRILGVDLTTIPGLNILAVLNLLSEIGTNMTKWRNEKAFVSWLGLSPDNKISGQQVLSSRTRKVVNRAATTLRLSVMVLGKTNTPLGSFYRRKRAQLGAPKAITATARKLGCLIYRLIKNGQGYKEPDLHTYELKYKDQILNSLRKRANSFGFDLVQVPKAA

SEQ ID NO: 148286 - protein, 392 aa, unidentified
MVEKNATLADRHEAYLGLDVGKQSHWAYAVDSAGTVLLSRRVSNTEAGLDEVIAECPDDTLVVVDQRRNIGALAIRRTRAAGRPVAYLPGSAEHELAKGFPGIAKTDAGDAQVIARVALGMPQTLRPVSEGDPALDGARIMSAQVAQVQKDRTACANALRSRLLESCPAFERACEMTAPWCAGMLSELGGPWNMLDAGRERFCAASRKHGASRGQRDRLWDAISGERPHEQAVAAKMRYVKHFAGRIAADNQEEAMLEEAIAESLSGNADFANLQTIPGIGPRTAAQLVVSVDISQFGSHDKLASCCGLAPSTQRSGTSVNYDKGHRGGNKPLKNLLVFSCNSLGRSKSYYGEYLRRCLGRGMKRRCALKATARKRMKVIYAVMRDGTPYSA

SEQ ID NO: 148287 - protein, 342 aa, unidentified
MEYYAGIDVSLECSSVCVVDANGKIVCEAKVASEPQALIAWFGSLGFGLQRIGLEAGPLSQWLFAAMKAAGLAVELLETRHVRKAFEAMPVKSDRNDARGIAQLMRLGWFRPVHCKSMSAQETRSLLTARKLVQSKLQDVENSLRGILRGFGLKVGKTTGQKFAGRIEELVAGHPHLQTIAKALLAVRAVLRTEFAAFEKQTRRMVRSDTQARLLTSVPAVGPIVALTYASAIDDPARFKSSKQAGAHFGLTPKKHQSGETDYTGRISKIGDASVRTALYEAANVMLTKPVKGCSRLKSWAMRIKRRAGMSKAKVALARRLAVIMHRMLADGTPFNAAAAAA

SEQ ID NO: 148288 - protein, 372 aa, unidentified
MNYNTVYVGMDVHKESFSLCAYTIEAEKASHYQRTEADYKKVLNYLEFLRTIYGGDANFICGYEAGCFGYTLYHQLTANNVKCIILAPTTMLEQRSKKRIKTDRRDAEIIAKCLAQHNYSPVHIPTAKDEETKEFLRMRDDHKLALKKVKQQILAFCLRHNYRYDGKSHWTAAHLKWLKALTPEALYKEILDEYLLTYQTLSDKLERLDKRIEELATQDEYKEAVKKLCCFIGVKTHTALSVLVEVGDFKRFASAQHFASYLGLVPGEDSSGDDQNRLGITKAGNRHVRLLLTEASQCYARGQVGFKSKELKSRQSGNTPAVIAYADKANERLRRRYYKMVLNKYKKHNVAKTAIARELACFMWGMMTDNIV

SEQ ID NO: 148289 - protein, 422 aa, unidentified
MRSVALDVHLDFCEVAIVEDGEVRSAGRIETKPERIELFASSLGPDDRVALEVTGNAWEIARILEPHVAQVLVVSPSDTGIRQARAKTDRLDARTLARLLAAGSLDAVWMPDQATWVMRRRLSRRGQLVWARSRTKNQIHAVLMRQLVGRPPVSDLFGVKGRKWLAELQLAFEERETVDGAMRQIEFLDSEIAEVERLIAQDALHSPEIRRLMGVPGVNVIVAASFLAAIGDISRFQNPRKLVGYLGLDPRVRQSGAGPATHGHISKQGSVRARHVLVEACWTAVRQPGPLHAFYERVRARRGHSVAIVAAARKLACLFWCLLRREEDYAYAQPSLTKKKLRRLEITAGAPRYSANAAGIWSANAAVRQAERELARQAEVAYARTVRDWHAAQTANVGASVTPGRASKEPSKGKAARQTTSP

SEQ ID NO: 148290 - protein, 326 aa, unidentified
MYASLDLHKEYSQAVVLDFDGTVLREERVENEDPTEMERFSESLPPETEVVIESSSTWYWVYRILSRRHRVVLSNPLKTKAIASAKLKTDRVDAMTLANLLRGGYIAESYIPTQKTMELRELVRYRANLVRMRSSIKNRIHAHLLMNNVRVEAGPFTKEFIQQVRAIEDTKVQGYLRLIDSLNQEVRTASSEISREAMSNEDARLLMTIPGISFYSALLIASEIGDVNRFADSDGLVAYAGLVPSTHSSGGTTYHGRITKTGSPFLRWVLNQCARANIRTEPDGTVASFYKRLVRKKGGAKSAVAASAKLLRIVYCVLKERRPYHS

SEQ ID NO: 148291 - protein, 378 aa, unidentified
MRLRLRSASRRNPIQFPTNTGRPNPGDANKIQGCDYHPGFQQIAFVDSETGELQERRLEHPEEAEKFYRDLGAQGACVRVGMEASGHARWFERLLSELKFELWIGDAAEIRTKRVRKQKTDRQDAELILQLLVENRFPQIWVPSWENRDLRQLLWHRHRMVQARTRIMNQLQAVALNEGLLCKKRLWRETGRKQLESFPLAPWASRRRQDLLELLDRLTPTIAELTQAIEREVENSPEARRLQTHPGVGPLTALAFVLVIGKADRFQCGKQIASYLGLIPLEDSSGKRRRLGHITKQGNSLLRFLLVEAAQVTVRSDPEWRSKYFHLAMRRGRKIAKVAMARRLAVRMYWMMRKGWDYERLNKFGSHAGQPGHRHGVQ

SEQ ID NO: 148292 - protein, 330 aa, unidentified
MKNYSDVIGIDVSKLTIDAHIHIRAVHRVFSNTPKGYKALLSWTEVYLEQQVYFFCFENTGHYSTNLSIYLSENDIDYVEESPLAIKRSAGIVRGKTDKLDSAMIARYAWLYKEEFVLSSPKEQDIQELGRLLSFREQLVRDRTGKMSSLKEMQTLLSSPSTDYCCKIIKKTIHYLTKQIVALEQRVKKLMKSDESLQKNYELLNTLKGVGLILSCQILYHTSNFKRFNNWRQFSSYCGVAPFEHSSGTSIRRKNRIHHIGDRKMKTLLTLASVSAIQCDKELKQYYKKKVAEGKPKMVALNNVRNKILSRAFAVVRRGTPYVELQKFVA

SEQ ID NO: 148293 - protein, 353 aa, unidentified
MDSKKYIGMDVHKESISIAVRNAAGKIVMECVIETKASVILDFIHGLRGELHVTFEEGTWATWLYDLLRPHVTKLVVCDPRKNSRQGNKNDRIDARELADRLYMNKLSSVYHGGAGVRTLKELARSYLTISKDLARVMTRVKAIYRSWGIPCAGKQVYAPRHRAEWLAKITEVGVLRRAQFYYQQLDALRSLRHEVRRELLAESKKHKATKLLCQIPSIGPIRAALLIALIQTPHRFRTKRPLWKYSGFAIETHSSADYRNVKGQLERTKKQISVRGLNRDCNHDLKNLFKSAATIASVKPGPFQEFYAALVAKGMRPEMARLTLARKIAAIVLIVWKKGVSFDAQHLKSQTA

SEQ ID NO: 148294 - protein, 366 aa, unidentified
MTGTSSASRPRRRRPAAEVVLGVDTHRDAHVAAVLSLVGEVIGTDEFPATAAGYRDLLGWARASGTVRRAGVEGTGSFGAALSRYLLAQGVDVFDVNRFDRADRRRRGKSDPLDAENAARAVLSGRARAQAKTGDGPVEIARMYKLAKDSAVKARTQAINQLKAVLIRADPQLREELAGLGNAELFRTCARLVDDSLNHEADEGAVLHATHITLCLLARRISQLSEEIQDLEGRLTRLVERHAPQLLAVVGIGPDTAVTLLITIGDNPERLGSEASFAALCGVSPVERSSGSRQYRRLNRGGDRQANAALHRIVQTRLRVDPRTQEYYERRSKEGKTRREIVRSLKRYAAREVFHLVRPVQSSPPL

SEQ ID NO: 148295 - protein, 345 aa, unidentified
MTVYIGVDFHPYEQTVAYCDERDGEVRYRQFLHSDKQSLKAFYRKFGDEVVVGVEATGCLWWFEKLLFENGIKVKIGDPRLIRRAALSRHKNDFRDAETILDLLVNGSFPEITPRSERSREMLTMLNHRHFLVKKRTSIANTLQAFARSKGLDKFRLQALKRQKELLDAVSTDMERLIVISRFSLYNELSKEIAAFDAKLAEEADKDAKTRLLMTHPGIGVVTALALIHTLGDVRRFRRKEEVVAFVGLDPLEKSSGEKRRIGSISKHGSRLTRHLLGQAAQTCRDHGIKAHYLQVSRRRGRPKAKVAAARKLLINCYVMLRDNISYEQFATGGAKLACARGQER

SEQ ID NO: 148296 - protein, 408 aa, unidentified
MEVVYRCCCGIDVHKKIIVACLNQGGEQSLREFGTTTSEIKSLATWLTESGCEIIAMESTGVFWKPLYNLFELMDLDAIVVNAAHMKALPGRKTDVKDAEWIADLLRHGLLKASYIPSREQRELREITRYRKSLTEERCRETNRLQKILEGANIKLDSVVKDINGKSARKLLEKIIEDDVPTSEEEISKMIHGRMRSKLGQLVTAIEGITTPLQRKLLAQVIDHIDDLNRRIADLDKLVQDYMDEYEAAITALCDIPGIARRSAEVILAEIGLDMSRFPSAAHLCSWAGVCPGNCQSAGRRKHGKTTKGNKPLRTILTQCAKSARSVKGSYFSAQYQRIAARRGKNRATLAVAHSMLIAIYHMLRNNVPFRDLGSDYYDSFNRDRKIHGYLKRLKALGWEPDALPGSA

SEQ ID NO: 148297 - protein, 433 aa, unidentified
MLIQQRTAEEISMKGSRTKTANTVREGTLIVAVDIGMVSNHGYCMAVDGRSTKTFSFDNTREGLDSFWGMILSSKTRFQCTEVIVGYESTGPYGEPLIHYLRQKPVTIVQVNPMHTKKMKEINDNSPLKTDRKDPRVIADVIRLGHALSVVVPEGDAAYLRRVNNARERHVKERTSLLNQLQQFVFVIFPEFSRIIKTIDSKTALYILKKYTTPAKIGRVKLEKLGVEMRRRSMGKFGAEHAAALINFAKTTIGIEEGVEGLVMDIQHVLMQLEMINRLIAELEHEMEITLHRIPYSRKLLAIKGLGMVTVAGLIGEIGDFTKFSTQSEITKLAGLNIYEISSGKRKGQRRISKRGRSLLRKILYYAAVQTIRENGIMHDYYQRLIGRGMKRIMALVAVSRKLLRIIFAIVRDDSEFISNYESKRKEVIRKAA

SEQ ID NO: 148298 - protein, 317 aa, unidentified
MALQRIFVGIDVSKEWLDLWLEPRKRFERTSNDAAGLTAAIGLLRSLGVEAGLVVAFEATGGYELGLRQAMLEAGFEVRRLNPLRVRLYAKSLGRNAKNDRIDARVIARYAEAADTMPETLDPARERLAELVTHRRRLVDERVALGNQTGMLRCDLLQAQNRKRLALIERQIEETDALILEAIGQAPSLLAKLPLLKTLKGVKDVTAVTLLALLPELGRISRRAIAALVGLAPFDHDSGKLKGTRSIAGGRSPARTALYMAARAAARSKSPLGAFYKRLIEAGKTPKVATVALMRKMLVTLNAILRDNQPWKHAKAC

SEQ ID NO: 148299 - protein, 343 aa, unidentified
MEQISTIGLDIAKNVFQLHCIDENGEVIVRRQLKRRRVLAFFAKLPSCLVGMEACATSHYWAREIEKLGHEVRMMPPRYVKPYVKRNKNDAADAEAICEAVTRPTMRFVPIKTPEQQSVLMLHRTRQLFVRQRTTLINAIRAHMAEYGIVAGVGRNGVEVLLELIAKGEDERIPLAARECLMALAVQLQLVKRQILEADRRVLAWHRTSKVSKRLEAIPGVGPLVATALVASIPDPSIFRSGRDMAAWIGLVPKQCSTGGKEKLGNISKAGNRYLRKLLVVGALSVIKRAKILGYTRHPWLVRLMERRPTKIAAIALANKIARMAWAMMARDEKYRTPLPQAA

SEQ ID NO: 148300 - protein, 334 aa, unidentified
MELIKQVFGIDVSMDSFVNKVGTIATDQQTEIGTLRDFKNNIQGFRPFYKFAQSQQIEGVPQYFLMEATGVYYEALAYFLKSKGAHVIVVLPNKAKYFAKTLAMKSKTDPIDAHMLTQMGLEKRLNEWEPPSELMKELKLLTREHLSLKELKTDAMNRIHAKTHSFKPGKDTVKRLRREIKLYETLIKEVELSIRSLLQRDFKMWVKIQNILRVNGVGLMTIAKVLAETNAFALIRNGKQLTSYAGLDVVFNDSGKHQGKTRISRKGNKHLRQSVYMPAISAIKSNPKLKSYYDRMLEKGKPKKAGVIAVARKLLLLIYFLWINETDYDPEYVG

SEQ ID NO: 148301 - protein, 413 aa, unidentified
MDVMHPRCAGIDCSKKDAKVCIRVQGQGRRATAATVTTWGATTRQILALREHLLAANVTCVVIESTSDYWKPFYYLLDDELDVVLVNAASVRNLPGRKTDVSDAAWLADLGAHGLVKASFVPPAPIRALRDLTRTRTVITRERTREVQRLEKLLEDAGIKLSSVASDITGVSGRAMLEALIAGQRDPAVLADLARRRMRSKIPALTEALTGRFNDHHAFMARLFLDRIDAHTADIGRLDERIEEAMEPFRPTRDLLMSIPGFSRIVAEVFIAETGGDMSVFPTAGHLASWAGVSPGSNESAGRVKSTKTRPGNRYLKGVLGIAALSAARSKNTYFAAKYKRIATRRGPMRAIVAIEHAMIIAAHNMLTNGDFYRDPGANYYTAHQPARTKSRAINQLESLGYRVTLEPLTESA

SEQ ID NO: 148302 - protein, 466 aa, unidentified
MKQNRRRSPGKPRVSPTVLDRINPNVAGIDCGAAEHFVAVPPDRDPTPVQSFKAFTSDLLRLADWLTACRVTSVAMEATGVYWIPMYEILEARGFEVLLVNARHLKNVPGRKSDVSDAEWLRELHSVGLLRGSFRPPDAIVALRAYLRHRQTLIESAGTYVQRMQKALVQMNLQLPLVVSEITGVTGLRILRDIVAGHRDADHLAQHRDRRCRASKADIVAALTGNYRPEHLFVLKQNLELFDACQTQLTACDLALETHIRTLTAHMALPVAPLPAPRVTKKPRNNEPRFEIRAPLHQLTTGVDLSQIDGIAPYTALKLLSEIGTDMSRWPTEKHFTSWLTLAPKNKISGGRLLSSRTQPSANRAAAILRMTAMTLGRTQTALGAFYRRLAARIGKPQAITATARKLAVLVYRALKGELVYQDPGAEAYDLQQRTRILRRLRQRAATLGFELVNRETGEILEACAS

SEQ ID NO: 148303 - protein, 390 aa, unidentified
MFYLGIDIGKFHHAAALLTDEGKVIATVPSFSNTHAGFEQLLTLITYHLPPKEELRIGMEATGPYWIPLAWWLKTHGWPPVVMNPIKTSSLRNYGVRGSKTDNIDSVLIANALRFEGDKPQQVSPKHSEELCHLTRLRADMVKDRTRVALRVTSLLDRMFPELLCSFSKTLSPSCLALLSQAPTPTRVLALGEERLTTLLYHASRGKLGVTRAREIINKAAVSIGVNSQALEEILPLLLEQIDLIGSQLTTLDHRISELYEQAGLYFTSIAGVGTLTAATILGEFGSVERFKQAQQMVAFAGVDPKLRDSGQHRGAVHISKRGSRYLRRALYLACRGVVRKDDYFNAIYQRHRDNGKCYKEAIVAVMNRFIHVIYAIWRDNRPYYPLTPV

SEQ ID NO: 148304 - protein, 341 aa, unidentified
MTLYIGVDIHARQQTVSYLDTADGTTGLVELQHERDDIKGFYSQFQGEVIIGIEACGYTNWFEELVEQLGHQLLVGDAAEIRRLARRRQKNDRRDADLLLELLLHNEFPALFRYSRASRELLRQLRYRHKLVKLRTMVVNTLHALAINAGLSLRAKLLTKGGRRQLAGLQLSVISQQQRDELLSLADELTRRIATVEQWLKEQANRDPRVLRLQTHPGVGLLTSLCLVHTLGDLTRFPSTRKVAAYVGFDPMEDSSAERKAYGGISKAGSRLLRYLLVEAGQTAAKDDEHLKQFYRRLLPRRGKARAKVAVARKLLIRCFIMGRAEIDYAEFLRRGKKDAE

SEQ ID NO: 148305 - protein, 369 aa, unidentified
MDHYAGIDVSLEYSSVCVVDGSGQIVREDKIASEPEVLIAWFESLGYGLTRIGLEAGPLSQWLYAAMKQAGLAVELLETRHVRDAFKAMPVKSDRNDARGIAQLMRLGWFRPVHCKSIGAQEVRAELTARSLVESKLRDVENSLRGILRGFGLKIGKATSRGFAARVRELVKGHPTLETIAEALLSVHETLRREFAGFEKRVRGRSRMHEHAKLLMSTPGVGAIVSLTYAAAVDDPGRFKSSKKAGSHFGLTPKKYQSGEIERTGRISKIGDASVRAALYQAAHVILTKPVKGCTELKAWAMRIANRAGYQKAKVALARKLAVIMHRMLADGKPFNPNAKAERMAGKPVKATGKAAALLIEAQTMTAAV

SEQ ID NO: 148306 - protein, 397 aa, unidentified
MSLFCGIEWATEHHDVAVIDDEVHVVARGRVSNDAPGFAALLTLLAEAGDSAAEPIPVGIETDRGLWGAALRETGRTIYSINPLAASRYRARYALSGAKSDAPDAVLLANIVRTDPGAHRPLPADTEAAQAIRVLARAQQDAVWARQQIGNQIRDLLKDFYPAALVAFADLADGGLARRDARTILTAAPTPAQAATLTPARLRRLLIKAGRKRYLDRDVARLRQVFADTYLHQPPVVENAMGIHLAALLGQFEAACTAADELAEAAISHFEQHPDAEIITSFPGLGMLAGARVLAEIGDDRSRFAEARGLQAFAGSAPITRASGKKAVVLHRHIKNRRLAAVGPIWALGSLRASPGARRHYDARRAAGDWNQQAQRHLFNKFLGQLHHCLHTGLLYD

SEQ ID NO: 148307 - protein, 344 aa, unidentified
MLYVGMDLSRKRLDFDARRPGGELQERGAVPPDLDGLARLVGRLGDTEVLAVVESMNGARFVHDQLERFGWDVRIADAVKAKGLAPLACKTDKIDAWVLAELARRDLIPEIWLPNPRVRAERERARFRLHLVRHRTSLKNRVHAILIAHGIPNPSSDLFGAGGRRLLDRLALPEPWRSTTQASLALIDTLDAQIDACERELRSLGADHPYVPLLMSLPGVAWILAYTIASEIGDISRFPTPTKLIGYTGLTPRVEQSGEQDRRGPLRKNGPNHLRWALVEAAHTASRHPHYRPILERNRARHGSKRGTKITAITIGRKLAEASWHMLTRNQPFAPAGATRPLAA

SEQ ID NO: 148308 - protein, 353 aa, unidentified
MKRENAIKQSVGIDCGKIELVCSIGVMNHEFEEEIISNKAFKNTPEGFKKLKEWAKKLSDNSVEIIYVIEATGVYHERVSLYLYNEGCKICVMLPNKVKAFSQTLSVKTVNDKTSAQAIAYMGLEKKLDLWQPPHEVFNKLKQLTREREQLIEERTICKNQLHAEESGAWPNKGSLKRIKQRIWLLDKQVNEVEAEIKEIICMNQWLQEKLEYVCSIKGVALITAVTIVAETNGFNLIRNKKQLVSYAGLDVISKESGISVKGKSKISRKGNKYIRKALHFPALVAVRHNEQMKALYSRLVSKHGIKMKAAVAVQKKILELVFILWKKEELFDIEYINNKGQQTSVATLCELA

SEQ ID NO: 148309 - protein, 432 aa, unidentified
MSSLNKIFTHCAGIDIGSEKVFIAIENQPVKSYRTFTDSYRALGMDLKENKITHVAMEATGVYWITLYDVLEEMDFDVTLVNPADSKNLPGRKTDVQDCQWIQQLFSYGLLRKSFVPEDIVRKLRVYTRMREDKLQMASSHILHMQKALIQMNIRLPEVLSQTHGVSGMAMIEAILSGERNPKKLLSYCTSDLIKRKGNDILLALEGNYKEEYLFELKQAHTGYMFYLEQVEQCDEQIGKILEVYNKKVNNDYGDNHPIKPIRHNKPKIKHLHELLIGIQGANPTVLPGLTDYSLLRLTAELGNNITQWPTVKNFVSWLGLAPGKNQSGKMNKRSKKKSISRAGQIFKQAAQSLLISKQPGLGAFARRLKSRKGASIAIKATARKLAINYYNIFAKGMQYVEQGVKQYEERINQQQLKYITKKAREIGLQIA

SEQ ID NO: 148310 - protein, 432 aa, unidentified
MEDVHEEPLFVQRVAGLDIAKAEVEVTIRVPSDTSPGRRQQETRTFGTTRRELLELADWLRSWGVTKVGMEATSDYWKPVFFLLESRGFDCDLYNAAQVKALPGRPKTDRADSIWLAKITERGMIASSFVPPEPIRRLRTHTRYRRHLTQARTAEKQRAEKLLEDGHLKLSSVISDIHGVSGRDMLDALAAGQRDPHALAAMARGKMRGKIRRLEEALECSFFTDEHAAVLAMMLQVIDHYTAQISQLTATIEELAEPYLPQIEQLDAVPGIGMICAQDIIAEIGTDMAVFPTAAHLVSWAKWSPQVRQSAGKRKGSNATGRGNPYLGAALGEAGISAGNTQSFLGARYRKLTRRMPRKKALVATGNSMLTIVHALLSDPAAVYTDLGADYYEQRMHARRQARNHVKSLERLGYNVTIEAIDQATGELTAAS

SEQ ID NO: 148311 - protein, 374 aa, unidentified
MKADKKRSGKGCGMNSIVAGIDLGDRESLATVLSPVGDVTDRFSFPMNEEGYAFFSSRVPKDARVAFESTIMAYPIMRALKMHGYGDVTVAHPKTLAWIVRSKKKNDKVDSLKIAKLHMAGMLPESHLLDRDEQIARDLLVQRVKLGVEIGRLKSSVIGYLKREGLHHVLPKTRDNFSAARRRAIHALRFDDERDLVLRTMMDRLSFLEDQCIPLENCIKENAKENDNAKLLMSVPGVDYYLASLLCSFIGDVNRFPSDDHLASFFGIVPTSRDSADVKRRGRMTKDGSSIARWTLSIMVDTVMRYNKPIRDHYLSVKKRTGSGKLAHVSTMRKLTRMLYHMLKTKQHWKWENPHLTERKMTRLEEGGDQSSFR

SEQ ID NO: 148312 - protein, 384 aa, unidentified
MNKHSMIFIGLDTHKEFHEVAYCEEHRGASPVHYGRIPSSKVSVKKLLRQFESKYPGATLHVVYEAGPCGYWIYRLITSLGHCCYVVAPSLIPKKPGERIKTDRRDALKLVRSLKSEDLTPIYVPEPEDEAVRDLSRAREAAMKDLKEAKYQLKALLLRNNIRYEGTANWSKKHLRWLTELILPHPAQQIVLQEQLQTIEERIRRLERLDNELTHHVHQWRYYPVVKAVQAMRGVRLLVAVGVVAELGDLHRFDHPRKLMAYLGLVPSEQSSGGKRHLGAITKAGNGRARRLLIEGAHSYRYPANVSTELQLRQEGLPKDIVDIAWKAQLRLCKRYQRMSKKGKHYNLIITAIAREMAAYIWAIAKEVVLTPVNPKLRLSRVPA

SEQ ID NO: 148313 - protein, 394 aa, unidentified
MKLVGIDIGKSKHFFCIMDKKTGEIIVQPISFSNDKDGFDFLIQKLKPYSKDSVLIGMEDTGHYHFALLKFLLDKHFNIALINPKTTDLTRKMQGGITKNDKLDTLTICDVLDTPQRKNQYRITHVNTFDLYEQKQLTRQHHNLKEELNVYTNRLQKSIDIVFPEFNTLFKSKYGTVYMNVLKTFASAHHIANTDIRTIRKCFEIKGRGNRISLTPEKLKECAKSSIGISSIAEEIQIKHLVVQIELLNEQIAEIDKKIEEFSIQNNSPILSIPGISHFSGTSILAELGDIRNYSKPSQVIKFAGVAPSHYESSQFTAQHTSITKKGSKYLRKTLYQIILSVINHNPVFKQYYQLKISQGKGHRCAQGHCVRKLLRVIYHLLNTNQQFDPKLLK

SEQ ID NO: 148314 - protein, 341 aa, unidentified
MQIHSVGIDLGKTTFHLVALGAAGKVHVRKKFTQRQLLTFTANMQTSLIGLEACSGAHFLGRALRKQGHDVKLIPAQFVKPFVKSNKNDFIDAEAIAEAVERKNMRFVPIKTDDQLDLQAIHRVRDRLISRRTAVINQLRAFLLERGMVFAKTPAKLRAAMADVLENADADLTSQMRNLISMLWYEWKLVEQQIATLTDDLEKIADTDAGCVRIRQIPGIGPVVATAIVAAIGNGAAFRKGREFAAWLGIVPRQYSTGGKAKLLGISKRGNVYLRKILIHGARAAVLRIKRDRAPIGAWLDALDSRAPKNVVVVAMANKLARIAWAVLSSGNDYRPATVPS

SEQ ID NO: 148315 - protein, 417 aa, unidentified
MGKKFLAVCIMVGPLEGEPRVEIQRFGTTVLELRRLRDWLKQEGITHVVMESTGSYWKPVFNILEDAVKVYLANPQDVKNRKGHKTDNKDGWWLAHLLRHAMIQPSFIPPRAIRELRDLTRRRRRLLGNGSSEKNRVQKILEDANVKLGNVLADVFGVSGQLMLEALLEGKAGPQEIAQLAKRRARQRIPEIAAALEEHQMNAHHRQMIRYSLQHMQFLEQQIIQLDKDIAQKIGESGLETEWKLLQSVPGVQANSAATILAETGTAMQQFGDEKHFSSWAGVCPGNNRSAGKEKSSHTTGGDPWLRSALTECAWAAANLKTSFLKEKFWRVATKHGGKKAPAVVAVAHTLAHIIYAVLATGQPYHEKRAPALTLSQKERIIRHHVRRLGKLGVSVYAPQPAPRHRHQSAGSTPAPE

SEQ ID NO: 148316 - protein, 358 aa, unidentified
MKIIGCDLHARQQTIAMLDSDTGELEEKTLEHQGETVREFYSALSGPILVGIEATGSMQWFLELMEELGIECRVGDPAKIRQSETRKQKHDRRDARLLLTLLAENRFPTIWMPSSEQRDLRTLLRHRHQWVRLRSRVQHTLQSMALNHGLRRGHALWNQAGQHALRALPLAPHASERRAALLSLYPRLQESIDELDREVSQQAQNHPAARRLMTHPGVGPITALATEVFLGDPLRFSDGKALASYIGMIPSEHSSGGRQRLGAMSKQGNTLLRYLWCEAAMHAVERDPELKHFYRRKLVQKGLGKARVAAARKLGIRLWIMMRDQIDYQEFCRRGKARQESGSVRAGMPAINSGPAQQ

SEQ ID NO: 148317 - protein, 427 aa, unidentified
MPYRIAGIDVHKMMLAVVVSDVEVHGEYEFERREFGSTPAEWQRLAVWLLGQEVEEVVMESTAQYWKPVWGALEQYWKPICQKREGARRTSGALHLAQAQSNRGRQGRKRDFVDAERLVKRLVANELTLSFVPEPEQRLWRSVMRTKYQLRCNQVQVQNRLEALLEEAHLKLSSLVSDLLGVSGRRILTALAEGETDPEALAAQADHRLRATPEQLTDALGACRELHPVYRRLVKMALEDWQQLETQISQLEAEMATLLRPHQEEVKRLAEVPGVGVDAAQQIIAEVGAAAAVFPSPGHLASWVGACPGEEDSAGINYSSRSPKGNRHMRRILNQVANAAVRLKGSLFALLYRRYVPRLGHNQTIGIIAHRLCRLIWKILHQGVRYQERGPEVCQKSQRQRTARMIRQLLSLGYRVEFIQAPSSVPA

SEQ ID NO: 148318 - protein, 335 aa, unidentified
MQIYGIDLAKEKFDVSFFDLTSKKVSNQPSHKVVKNNFKSIGRFLETLPSDAVLVAEHTGVYGDTLLKCCMDSNVKIAFVGGYVIHRYRATPDRAKTDVLDCALLRDFGERYPDKLKYKTFPEEALYELRQLARHREMLVEQRKQLITADKSEDCRPIRSLAVKRSMDRIKEMLDTEIAETEKEMLKVINGHESIRHNYELVKSVNGVGLITAVELLVKTENFTKITTARQYSAYAGTAPYEKSSGKMDKGAHISKIGNRRSKTLLYICAESARLHNKEIKLYYERRTLIDKKPRHYVLNAIANKLLRIIFTLVEKGEYYDANFIRQDPRVVKYN

SEQ ID NO: 148319 - protein, 405 aa, unidentified
MQVLYKRCCGIDVHKKLLAVCLKTGKKQELREYGTHTQNLRELADWLIENECEKVAMESTGNYWKPVYNVLELLGLDVMVVNAQHMKAVPGRKTDMKDAEWIADLLQHGLLKASFIPDRDQRELRDVTRYRKSLVEERAREVNRLEKTLEGCNIKLSSIVTHLTGQSSRNLIGAVLAGDVTGERIEELSYGKVKEKKDELLLALDGVLSPIQKKLIAAILDHIDDMTRRISDVDNIISGEMKKYEDAIKALDEIPGIGRHSAEVILAEIGIDMSRFPTAAHLASWAGVCPGNYESAGKRKSGRTNKGNPTLKTTLVQCAKTATKKKDTFFRAQYERISIRRGANRASMAVAHSILISIYYMLKFNQPFHDLGRDYYHQCNPERKINNYLKKLSELGWSPPVPAIA

SEQ ID NO: 148320 - protein, 424 aa, unidentified
MKTNWTEQPYFAALDWAQDHHDVVVVDRIGTIVAEFQFAHTAPGWAQFEQQMQAFGRPPIALETSSGPAVDQLLQRQYPVYPVNPKAAERYRERKAPSGNKTDRHDAWSLAEALRTDGQGWRQLLPQDEATATLRLLCRDEQALIEQRTALVNHLQAALGEYYPLALESFADWTQPFAWAFVRAFPTPRALQQAGKRSWEKFLHLHKLWRPDTAPQRLAAWAQGQQLNASPAIVNAKSLLATSLASVLQSLQKQIEEYRSRIRTAFQAHPDHDIFGHLPGAKDKLAPRLLAELGSQREVFPDAQSLLCYAGVSPVSFQSGQIRKARIRWACDHFLRHTVHLWVDQSRARCAWAQAYYRVKRDKGHSHASTLRCLGKRWLKLLWRLWQDRLPYNESVHLQSLRTHGSFVAKLLALQPEPAPQPCE

SEQ ID NO: 148321 - protein, 400 aa, unidentified
MLSIGIDVSKGKSTVCGMKPGGEIVYTPFEIQHTREGMSELVSLLHNSGEEVRAVLESTGSYHCPVVAALLENGIFVSVVNSLRMKRFCSQSIRKVKTDRIDAMQIALYGLAYWQELQPTRLPEDTYRELQLLARQYYQMTSLLIKAKVDFNAICDQVLPGMQELMSDHAGRHKLSDFVLRYRHTTHILEMGETRFRKDYCKWAEKKGYRNHERMAALIFATAQNGIPVLPDAPSTQIVITEAIRVLHTVEASRDAILTQMQALAKTLPEYSLVREMPCIGDTLAPRLIAEIGDVRRFHSKRALIAYAGIDAPPYQSGKFCANNRHISKRGNRYLRKTGYEVMQSYVMHKPANDPIFTFIEKKRGEGKSGKLAMVAGLNKFLRVYYGKVTELYRSLPAIE

SEQ ID NO: 148322 - protein, 368 aa, unidentified
MIVIGVDTHKRSHTLVALDAATGATRGQLTIPATDEGTLLGLRFAAELDPVRVWAVEDCRHVSGRLERGLLASGDRVLRVAPGLTETSRRAVRQPGKSDPIDATAIARAALREGLDTLPAAHLDEQALEIRTLNDYRDQIVCERSRLACRLRWQLVQLAPDLEAKLAPASLDHPQVRERVARRLARLPRTAQVRVAKLTLKRIGQITVEERELRAEITALIEAHCPALLAEHGCGPVTAAIIIGHTAGAQRFRTDACFARHAGTAPIPASSGNTQRHRLHRGGNRQLNRAIHIIALSRARTDPATRAYLNRKHAEGKTKREAIRCLKRHVARRIWRILYTSAPAPHERPVNPNGTVKGDAPALMQCTR

SEQ ID NO: 148323 - protein, 402 aa, unidentified
MNAVGIDVSKGKSMVAIMRPFGEIVSAPFEIKHTASDIHSLVELINSVEGESRIVMEHTGRYYEVLAHQLSEANLFVSAINPKLIKDFDNDSLRKVKSDKADSVKIARYALDKWQNLKQYNVMDELRNQLKTMNRQFGFYMKHKTAMKNNLIGILDQTYPGVNTYFDSPARSDGSQKWVDFASTYWHVDCVRKMSLNSFIDHYQNWCKRKKYNFSQSKAEEIYGKAKELVPVLSKDAITKLIIKQAVDQLNSASTTVESLRTLMNETASKLPEYPVVMAMKGVGTSLGPQLMAEIGDVSRFTHKSAITAFAGVDPGVNESGSYEQKSVPTSKRGSSDLRKTLFQVMDVLIKTHPQDDPVYQFLDKKRAQGKPYYVYMTAGANKFLRIYYGRVKEYLSSLPES

SEQ ID NO: 148324 - protein, 352 aa, unidentified
MENIALIGIDLGKNSFHIHCQDRRGKAVYRKKFTRPKLIEFLATCPATTIAMEACGGSHFMARKLEELGHFPKLISPQFVRPFVKSNKNDFVDAEAICEAASRPSMRFVQPRTESQQAMRALHRVRESLVQDKVKTTNQMHAFLLEFGISVPRGAAVISRLSTLLEDNSLPLYLSQLLLKLQQHYHYLVEQIKDLESQLKRKLDEDEIGQRLLSIPCVGTLTASTISTEIGDGKQYASSRDFAAATGLVPRQYSTGGRTTLLGISKRGNQKIRTLLVQCARVFIQKLEHKSGKLADWVRDLLCREKQLCRHLCSGKQAGQNSLGPNGTTANLCSITAEIHRFKESLIWFCEY

SEQ ID NO: 148325 - protein, 315 aa, unidentified
MAMLVAQTKPVVGVDVAKNELVIYQDQSDRLEAIPNNKASISKWLRTLAGTVSIAVEATNAYHVLFADMAYEAGCTIYMIDGYQLSHYRKGVNVRAKTDALDARLLARYLKKEADELHPWVPPCPLYRQLLSLFRRRAALVQARTGLVQSWSNEPLLKTAFAAQINSMKRLEALVEKKIKDVLQRAELMGQVSRCMKVEGIGFLTAARLVTTFQRGEFSNANAFIAFLGLDLRVSKSGQSDGPRRLTKRGDPEARRLLHNAAMSGSRTAAWKPFYEEQRKRGFSTTQALVMLARKMARVVFALLKTQSEYRSKAA

SEQ ID NO: 148326 - protein, 342 aa, unidentified
MTAIGVDTHKATLAACAIDELGRVVGEATFGNDPDGHLSFIAWARSIEPEATIGIEGSSSFGAPLARAAQSAGHCVREVPPHLSRFERRRTRRPGKSDPGDALAIARVTARETNLPPIRLPDRTNEIRLLLEAREDLIGETTRARNRLHAHLRVLLPGYGGKVANLVAARHRTMVRRLLRGNATVQGELARSLLDRLLRLERECDVLTRRIEALVDGHPLLALPGAGPITVARLVAEAGDMRRFRTPDAFAALAGVAPIPASSGQIQRMRLNRGGNRQLNRAMHVIAVTQSRFHPPAKAYITRRIETDGKTRREAIRALKRQLVRPVFRLLVEGSEVRLDAA

SEQ ID NO: 148327 - protein, 321 aa, unidentified
MSEKSEVVVGIDVAKAFLDVFVAGGRLSRNRFPNDEEGQTALAAELVPLGPALVLLEASGGYEAEAVQTFVVAGLRVAVVNPRQARDFAKSMGTLAKTDRLDARVLCDLAAVVVRRDDLPRFLSEPADKERLDLQALVVRRRQLLGMLVGEKQRLSQARPAVRPSIKALIAAIESQIEKIDEELTTTVKANYADLADLLRSAKGVGPVFATAIIAELPEIGRLSRGKIASLVGVAPFAKDSGKSKGKRQIAGGRSQLRRALYMAALSAIRFNPVIRTFYQRLVAAGKPKKVALVACMRKLLTILNAMVRDNHSFDLSLHHA

SEQ ID NO: 148328 - protein, 312 aa, unidentified
MENEVFVGIDVAKDTLDVAATSGAKGSFPNTREGYEELERLVRPLTPVLVVFEATGGYELAAVEYLALEGLPVAVVNPRQVRDFAKALNILAKTDRIDAGVIARFAAAVKPEPRPLKDAEAQKLDALVARRRQLVEMIAAEKNRLPLAKEWVREDIVATIAWLTKSVEKINKEIADLIKKSPLWHARDALLRTATGVGKVTAFSLLCDLPELGTLNRQKITALVGLAPFNRDSGKMKGKREIWGGRGHLRSVLYMAALAARRSNPLIKPLYDRLIARGKLPKVALVACMRKLLTILNAMVKTNTPFQVRTCS

SEQ ID NO: 148329 - protein, 418 aa, unidentified
MKGVARWKLSITCCCGLDVHKKSITACVLWAEAKGKSRKEKKRFGTFTHDLLQLADWLEQCGVTHVAMESTGVYWKPVWNILAERFEVLLVNAQHIKAVPGRKTDQKDSEWIADLLQHGLLRGSFVPPQPTRELRDLTRYRVSLVQEINRIANRIQKVLEDANIKLASVATDALGASGRAILEAMLAGEQDSARLADMSKGLLRNKIPELKLALEGRMTEHHRFLLRQLFEHLRFTESKRSEIEQEIDKRMLPFEDKVTRLCTIPGVDRVTAWGMLAEIGLDMNQFPSSGHLASWACLCPGNFESAGKRLSGKMRKGNVSLRRCLSQAAWAVSMTKNNYLSALYRRIAARRGAKRAVMAVAHALLAIGYHMLKRKEDYRELGADHFDRIDANRIRRSLVRRLERLGHKVTLEPLAQTA

SEQ ID NO: 148330 - protein, 339 aa, unidentified
MDHYAGIDVSLECSSVCVVDANGKIVREDKVASEPGVLIAWFRSLGLSLVRIGLEAGPTSQWLFAAMQEAGLAVELLETRHVCNAFKTMPVKTDRKDARGIAQLIRLGWFRPVHCKSMGAQETRAMLTARKLLQKKLGDVEASLRGILRGFGLKVGKTTPKRFAERIKELVAGHSTLEVLAEALLAAHAVLLREFNGFERRVRTMARHDAKSRLLMSTPGVGTIVALTFASAIDGRFKSSKQVGAHFGLTPMRYQSGETDYTGRISKAGDKGVRTALFESAHIILTKPVKGSALKSWAMRLAKRVGMKKAKVALARKLAVIMHRMLVDGTEFDFAAAAA

SEQ ID NO: 148331 - protein, 358 aa, unidentified
MKYVGIDVHKKMCQAAILDEDGTLLDEIRFANTPEEIEEFSGKLTTFHDEVKVVVESTGNLWIQIHDRLEEHGFDVALSNPSKTRLIAEAKVKTDKVDARTLAALLRADMLPTCYVPGEELRSRRELLRHRLNLVKNRTMVKNRVHGLLDKHGLRMPGTTPFSKENIAWLREQSFGFMDDAIVRSDLAVLEAVDGQVTLIEGKIAALAAEDRSVRLLMTMTGVGYFTAMLVMAEVGDVGRFRGDKEFASWMGLVPSVHQSGERIRMGGVSGPGNKRLRWALVECVQAAVRFDPRFGGMYERVSRRRGKGCAVVAVAHEMSRIMYFMLSRGEPYRGENRGLTERKLKSMSKKAFNGLRN

SEQ ID NO: 148332 - protein, 388 aa, unidentified
MIYVGIDIAKLNHFAAAVSSEGEILIEPFQFSNDYDGFYLLLSKLAPLDQHSIIIGLESTTHYGDNLVRFLICKDFKVCVLNPIMTSSMRKNNVRKTKIDKVDTLVIAKTLMMQDSLRFSTLKDLDYIELKELGRFRQKTMKQRTRLKIQLTSYMDQVFPELQYFFKSGLHQKAVYALLKEAPMPKDIAYLHLTHLSNLLVKSSHGHFTKDMARELRVLAQRSVGLNDSSLSIQITQTIAQIELLDSQLFETELEMANLVTCLHSVLMTIPGIGTVNGGMILGEIGDIHRFSTPGKLLAFAGLDPTVYQSGNFQAKRTHMSKRGSRVLRYALMNAAHNVVKNNATFKVYYDTKRAEGRTHYNALGHCAGKLVRVIWKMLTDEVEFNLE

SEQ ID NO: 148333 - protein, 395 aa, unidentified
MERINPRCCGLDVHKDSVWACARIDGQSFIEKFGATSRELLRLGDWVAMESTGVFWKPVWNLLEDRFALMLVNAHHIKQVPGRKTDVKDCQWIAELLEHGLLKASFVPDRPQRELRDLTRQRTQLLGDRARVVNRIQKTLEDANIKLASVATDIMGKSGRAILDALVEGKLSPEQMAELVHKKMEAKKPLLREALQGRVTPHHRFMLRELLGQIDHLDQMIETFDHRIEEVMSPLERESVKRLDEIPGFDQRTGQNLIAEIGTDMSRFPSARHLASWAGLCPGNNQSAGKRKSGRTRKANRWLKATLTQAAWGASRTRRSYFSAQHRRLTTRRGVKRATIAVAHSLLAVSHCLLSRHEMYIDLGVNHFVPDPKRQADQMVRRLQRMGYTVDLKAA

SEQ ID NO: 148334 - protein, 314 aa, unidentified
MKAMRTIVAGVDVHKEMLAITVLIGDTDQEPEAHQFECQTFTEDLMKAGLKLKELGVVEVAMESTGVYWKPIYNVWAPMGINITVAQAAHVKNVPGRKTDMNDSHWLATLHRFGLIRASFIPDNVFQNMRLLSRHRTNLTEDLARVKNRVQKVLEDGNIKWGTIVSDVFGKSGIEVLGLIADGVTNASTLALKVTTKIKRKEEATKALTNCFTKDHCYLVKELMDQYHYLEARIKSVEEELAEKAKPYAHLIEKLDEIPGIDKVLAMGILAEATDDMSHFADERKFAAWAGVASGNNESGGKKKDQNAGKAIPT

SEQ ID NO: 148335 - protein, 424 aa, unidentified
MSGKKSVPAGLQALYARACGLDVHKKLVVACVRILDSKDGTVQSTLRKFGTMTADLLELRQWLAELKVSHVAMESTGVYWQPVFNLLEGHFQVWVVNAQHIKKVPGRKTDMKDAEWIAQLLQCGLLRPSFVPERGQRELRDLTRHLTKLVQQRNAVDNRIQKVLETANIKLGSVASDVLGVSGRKMIEGLLCGEKDVTVLADLAHHKLRAKIPELQRALEGELTEHHRFLLQQLLGQYDFLQKEIASVSERLGAVAPPSFRAAVEQLDEIAGVGERGARALLAETGTDMSRFPTHKHFASWAGRCPGNHESAGKRRSGKTPAANRHLDAVLTEIAHAAVRRKNSYFKAQYHRLAGRRGKKRAIGAVKHSLLVTVYFMLRDNKPYKDLGADYFDKLNPQQRIRYHVRRLQELGQEVELSPMAAAA

SEQ ID NO: 148336 - protein, 462 aa, unidentified
MKHTREKKHQEKHPERESLPLITPNAAGIDIGSSEHWVAVPEDRDENPVRSFGCFTADLHAMARWLKKCGVTTVAMESTGVYWIPVYQILEAYGFEVKLVNARHVKNVPGRKSDVSDCQWLQRLHTYGLLSASFRPENEICVLRSYWRHRDNLVRYASSHILHMQKALTEMNLQLHRVIADITGVTGMRIIRAIIAGERNREKLALMRTPGVKSTSEEIAKALEGDYREEHLFVLKQAVELYDFYHDQIDACDKEIEICLSRFDTKVDLESHPLPALKKGKKKSKNGPLADLRAHLYRMTGVDFTQIDGLDVLTVQTIVSETGLSPDAFPTVKHFTSWLALCPDNRITGGKVKSTRTKKAANRAAMAFRIAAQSLANSNTALGGFYRRIRARLGAPKAIIATAHKLARIFYTLWKTHKQYVDLGARHYEERYKDRVVRSMKKRLHDLGYAVTIEPMAAAASL

SEQ ID NO: 148337 - protein, 418 aa, unidentified
MAMKIVRFNCCGMDVHKNLVVATIGITDRKTNVTEYFQRSFSTLNSDLYRLKDWLRSHHCSDVCMESTGKYWIPIFNILEDEINVHLTHPKYVKAIKGKKTDKKDSKWICDLFKHDLIKFSFIPPKEIRELREIARYRYKLVCMRSSERNRYQNCMTVSNVGLASVVSDPFGKTASNIMKEVMKSNVIDDDKILKLVHKNCKNKDKILDSLHGYHIESDQRFKMEKSLDHMEYLDQLIDSCEVELIKRAYPFRRSFQHITQIKGISALSAILIISEIGIDMSQFGSDKQLVSWAGLSPANNESAGKKKSVRISKAGQYLKPLLVQCALSAIKDKTSYFGRKYSNIKKRRGHKKAIIAIARMMLVSIYHMILTGEEFQPCDYESFMDPKPNANPSLTVEKALNFLKQSGIDISSIPVNL

SEQ ID NO: 148338 - protein, 341 aa, unidentified
MGEVTTIGLDLAKHIFQAHGADASGAVVFRKKLRREQVLAFFAGQPRCRVAMEACASAHHWAREIGALGHETRLIAPAYVKPFVKRQKNDAADAEAICEAAQRPTMRFVLPKSAEAQGAAVIFRTRDLLVRQRTQLINALRGHLAEFGHVARKGPGHVAKLVELVRAAESDLPEEARSVLLITVEALEAVHARVRGLDRQIEARAKASPLARRLMTVPGVGPILATAMVALAPPPSTFRRGRDFAAWVGLTPRQHSSGGKERLGRTTKMGERSLRRLLIIGASSVVIAAGRGGARDPWLARLLARKPRMLVMVALANKMARIVWALMARGGSYRAPIAAAA

SEQ ID NO: 148339 - protein, 359 aa, unidentified
MQTQINKLDFSGQNIYIGFDVHLKDWKVTLVSETLVHKTFSQPPEPKTLHQYLLNNFPGGIYHSAYEAGFCGYWIHNQLISLGIKSIVVNPADIPTTNKEKVQKEDKRDSRKIARSLKAGELTAIYVPSEKTLEDRAFLRTRKMLTKDLSRYKNRIKSFLYFHGIEFPPSFKNPQSHWSKLFITWLESIPMGHDTGKQSLLALMNESKHLRESLLSVTRQVRAMSRTEAYQDNVKLLQSVPGIGLITAMTLLTELETMERFSNIDQLCSLIGLVPSTNSSGEKEKVGDITPRGHNVLRSAIIESAWIAARIDPALMICYRDYTKRMEPNQAIVRIAKKLLSRIRYVLKNKQPYVCSVVK

SEQ ID NO: 148340 - protein, 342 aa, unidentified
MNNSVISIDLAKNVFQVCEFNQYQKPTSNKKVRRAKLLDSVRKLKPTRIVMEACYSSNYWGREFNKMGYVVDLIPPHQVKPFVVGNKTDHNDALAIAEASFRSTTVFVPVKTIAQQDIQSLHRIRDRYIRSRTAVANQMRGLMSEYGVIVEKRIAVLRREVPYILEDAAQPLTVISREFVSELYDELRNYDRLIEAKDLLISELMTSNEDYHRIREVPGVGPIVGSAIIAAVGNAKQFKNGRAMAAWIGLTPRLYASGDTSRMGSMSKRGNQTLRRQLIHGARSVVNWCEKKTDGLSLWIQSLKKRMPDCKVVVAVANKLARMIWAVLSKAETYRPPEPKAA

SEQ ID NO: 148341 - protein, 338 aa, unidentified
MREKNMNAVGIDVGSKELVIVVMVNGKARKAKSFDNTPLGHQSIIQTLKKLKGKTRICIEATGIYHFDLAVALSRSETIEVMVINPKAAHNFAKALMTRSKTDAVDAETLGIYAERMTFVAWKRPSDECISLRAISRRIAALSKQKTQTKNQLHALVSTIETPKVVIEQTEQLIDILDTQIKSLRDSALNLIHQNEELKQAYELITGIKGIALASAIQILSELIILPKDMTARQWVAHAGLDPRIFDSGSSVSKKTRISKVGNKYIRQALYMPALVASRFEPNIKGYYHHMIEDNGLKKVQAVCAVMRKLLHAIHGMLRTNKEFDGARFYTFPITKNS

SEQ ID NO: 148342 - protein, 427 aa, unidentified
MSYRIAAIDVHKKMLAVVVADIAVEGEYQFERRKVGATPDELHVLAQWLVGQEVEEIVMESTAQYWRPVWGAMELYWKPARQKREGASKMCGTLHLCQAKSNHGPRGRKNDFADGERMIKRLVAQELVLSFVPDAEQRLWRTVTRRKYQLTRAKVGFRNQLESLLEQGHIKLSSFVSDLLGVSARRMLKALTEGETDPAALATLADRRLRATPEELRNALGACAQWSDVYRRLLKMMLEELKLIETHIEQLEREALSLLQDHHEVVRRVSEVPGFGVDSALQMIAEVGPKAATFPTPKALSSWVGVCPGNEESAGESHSTRSPNGNCHMRRLLNQAAQSAVKVKGSIFELTFQRLRPRLGYLQAIWAIAHRLCRLLWLILRHGVFYEERGPAVSAKSKRMRTARMIKELRKLGYCVAGGQLPAGNPA

SEQ ID NO: 148343 - protein, 315 aa, unidentified
MTKQSGTTVTLGVDISKEWIDAHLLPTGDTWRVPNDAKELQNWTDQLPDGITIAVLEATGGLETQTAAALARAKVPTAIVNPKQIKSFAQAMGQKAKSDPIDAKVIALFGEKIQPRAKTLPDEDQSQLKELLTRRRQLVADRTAEQNRLGSMRSKEAQKSIKAHIQWLTKQIEKIDQQIDDTIKKSPLWLAKEQLLTSVPGVGPQTARTMLAVLPEMGQLNRREIASLAGLAPYTRESGKWKGKRFIGGGRSEVRAALYMAALSSTRRDSPFSKFYRSLRDQGKPHKVAITACMRKILTVMNAVMRDQQSWSECG

SEQ ID NO: 148344 - protein, 356 aa, unidentified
MTKLRFLGLDVHAETIAVAIAEPGGEVRSIGTIPNRLESIRKMIGKLGPVKELRACYEAGPTGYVLYWQLTTIGVECQVVAPTLVPVKAGDRVKTDRRDAEKLARCHRAGDLTAVWVPDEAHEALRDLVRAREAAKKDQLRARHRLSKFLLRHGRRQPSGMKAWTKKHLEWVKSHVHFDQPALEAALQDYFHEVEHAAARIERLEKSLDEAIGKAPQQIRAVIEALQALRGVAQLTAATIVSEIGSFSRFEPRKLMGYSGLVASEHSSGNRLRRGAITKTGNAHLRRVIVEAAWSYQRRPWIGGYLLSRQRNLNLSDEVKEIAWQAQHRLHKRYAKLTAGGKNCYVADHITVLLWR

SEQ ID NO: 148345 - protein, 338 aa, unidentified
MQLYCGIDLHSNNSVISVINDEDKVIQEKRLDNDLKQIEELLSPYQSDLSGVVIESTYNWYWLVDGLLDKGYPVHLANTLAIQQYNGLKYTNDSTDARFLAHLLRLKILPTGYIYPKALRAVRDLLRRRLLLVKQRTAHHLSLQSMINRHTGQRLSSCQIKQLTEQELGIYFSSSAAQLTAITEWQMMHELTKQIDKIERFVLNECLQDELYSILTSIPGVGKILAMTILLETGPIERFPSVGNYSSYARCVPSDKVSNGKSKGKGNTKNGNRYLAMAFVEAAHYAAIWNPDIKKAYQRRLKKSPTMVAKKAIANKLTRACYHMLKEKKMFDVKLAFG

SEQ ID NO: 148346 - protein, 354 aa, unidentified
MRSMTEEGAVVIGGIDCHKYTHHACTIDAQGRQLADREFRATRIGYRELLVWLRDQGTLRAVGVESTGAYGAGLTRSLRQAGVTVIEVNQPHAQLRQRCGKSDPIDAQGAARRVLAGEATQIAKDTTGVVESIRLLKTARDSAVKARSMALCLLGDLLVTAPAELRESISRSTLKGQATVCARLRPAIDHLDEPTQAAKLALRSVARRILALKKEIEEIDVELEAVIHRAAPRTTSLLGVGTQHAAQLLTTLGQNYDRIHSEAAFAHLCAVAPVPASSGLSQRHRLSYQGNRQANRSLHMIAVVRLRYCSRTRAYAERRRSEGLSKKEIIRCLKRYIARQLYRELRADLAALST

SEQ ID NO: 148347 - protein, 354 aa, unidentified
MAMLAEMVDGVIGVDTHRDFNQVEIACPSGAVIATRTFTNDSAGHAEVLAWMVKHAPGPRLVLSIEGTRSYGVGLARAAATAGLIVIEAEQPTRKHRRGKDKSDRIDAHLAVLYALGLDADELPTPRSDGDREALRILLCARQELTTTTTGQTNRLRALLRDGDDTDHQLARARLTDTVLASLARRRLPAHASRQQAVRHGEIRRLALALRDAGRALATNRAELAAIVHDLVPGLLSQPGIGPVSAAQAIVSFSHAGRCRSDATFAKLAGTSPIEASSGQTIRHRLNRGGDRALNKALHVIATTRMRDDPVTQAYLARRRAEGKSDREIRRCLIARQLFRILTAAMTLATAART

SEQ ID NO: 148348 - protein, 354 aa, unidentified
MSNNSSPIVATMGIDIGKNSFHVVGLDRRGAIVLRQKWSRGQVEARLANMPPCLIGMEACVGAHHLSRKLQSQGHDARLMPAKYVRPYSKGQKNDFRDAEAIAEAVQRPTMKFVATKSGEQLDLQALHRVRERLVGQRTGVVNQIRAFLLERGIAVRQGLRFLRTELPIILAQRTDVLSPRMVHVIEDLAGDWRRLDERIAGVSAEITALAGQDVACKRLMTVPGIGPIISSAMVAAIGNGAAFSKGRDFGAWLGLVPRQTSTGDRTILGKISKQGNRYLRVLFVQAAWVVLVKIKDWDRYGLKAWIDAAKKRLHHNVLAIALANKLARIAWAVLNKEHNFECVRTTATSSRPA

SEQ ID NO: 148349 - protein, 403 aa, unidentified
MTMRRRAWVGIDVGKTGHHACAIDETGKVVWNQKVSNEQRAIEQLVTRACKGAEQVQWAIDLTSPMALMLITVLLCAEQSVVYVPGRTVNTMTHAFRGEGKTDAKDARVIAETARLRNDLSNVVLPDELVVELTQLTGYRADLMADWVRGINRLRALLGSIFPGLEAAFDYSTRTPLILVSGLCTPAEIRAAGIDGMTAFLVDNHAWPTGIVKSAATAAALANEQPLALPGEAGTAALVKRLACRLLELDREIKDIDKTITARFRDHPYARIIESLPGFGPGLGAEFVVVTRGDLASFATAGRLASYAGLVPVPKDSGRITGNLRRPKRYNRRLRRVFYLAALSSLRADGPSRRFYDRKRAERLIHTQALLALARRLIDVLWALLRDDREFTPEKPITATAAA

SEQ ID NO: 148350 - protein, 385 aa, unidentified
MSELNDLSRSLTSLEQDKTIIAVIEMSQSSWFVAGIIPGIERHPLKKLEPSEEELVRLLMRWRTEATKNGHTITRFAVAFEAGRDGFWLARWLRARGIETYVIHPTSVAVSREHRRAKTDRLDTGLLKRVFIGWLRGEPDHCHMAAIPTLAEEDAKRPNREREGLVRERTRIVNRMKSCLARFGIRNFKPTLRKAPERLATLATPEGVPLPPNTLLELRRDMARLRFVMDQIKEVEEARAQRLEQAPQEKTHAMVRLIARVIGVGIETADMLVHEILSRQLRDRRAVARYAGLTGAPDESGNKRREKGLAKAGNARVRRGMIQLAWRFLVFQKDSALARWYRTRTESAGKKRKTMIVALARKLLIALWRLVTIGEVPAGVVLRAA

SEQ ID NO: 148351 - protein, 344 aa, unidentified
MNIATIGIDLAKNVFQLHGVNGHGKVVLRRQIHRGQMRGLFVNLPPCLIGMEACASAHFWARTLQSYGHTVRLIAPHFVKPYVKTHKTDATDAEAICEAVSRPNMRFVPIKSIEQQSALSLHRVRQGFVRARTAQACQIRSLLAEFGLVMPRGIANIKQVPKLLQVAGQELPAPFCRLIERLLAHLKELDRQARELEEQIVDWHQRSEPSRRLAKIPGIGPITASALVASISDVRSFKNGRELAAWMGLVPRQHSSGGKPTLLGISKRGDRYLRTLLVHGARSVIVRVLKRDDQKGSWLERLLERRHVNVATVALAHKTVRTVWAILAHDREYCPNYKSLPVAA

SEQ ID NO: 148352 - protein, 412 aa, unidentified
MEAIYECVSGLDVHSKSVQACVRRLIGGGRTKQEVRTFGTMTRDLVMLADWLSEEGVTHVAMESTGVFWKPIYNILEGRCTVLLVNAHHVKHLPGRKTDVKDSQWLAQLLQCGLLQGSFIPERAQREWRELTRQRAQLVNQHSSVINRIHKTLEDANIKLGTVASNILGASGRDMLRALIEGRQTPTEMADLARRKLREKIPALQEALYGHVTDHHRWLLGELLDQVEDLERRIERFSCRIEELSGPFEDAIKKVDAIPGFDRRGAENVLAEIGVTMKQFPTGGHLAVWAGICPGNNKTGGKSKSGRTTKGNRWLRTALVQAAWAASHAKGSYFHAQFRRLVGRRGKKRALVAVAHSLLVVIHVLLSTGAEYEDLGADYFDRRDEDRIVRSHVNRLERLGYKVTLETYEEAA

SEQ ID NO: 148353 - protein, 403 aa, unidentified
MEQIIIGVDPHKLSATIEVVDKQEHLLGSGRFTTDQRGYTAMRSYVKTWPNRVWAVEGANGAGRPLAQRLVEAGEQVVDVPAKLAARVRLFDTGHNRKTDALDAHSIAIVAVRTKGLRVLAADGELEALRMLTDRRDELAHLRVQTVNRLQRLLSELFPGQRKKDLSALQAKAMLATVRPRDIAGKTRRRMAAEELADLVVVDGKLKKIKAELKAVVIARGSTLLEIHGIGPSGAARTLADVGDITRFADRNRFASWTGTAPLDASSGEQIRHRLSRAGNRRMNHVLHMAAIVQLRHDTQGRAYFRRKVAAGKTRMEALRALKRRLSDVLYRRLVADAQTRDRTAGDTGPGGHRGATQESSAADLSPHVGTSDKPLPGPARTTLRPPIRTRKTPPVRVPQAAS

SEQ ID NO: 148354 - protein, 372 aa, unidentified
MSEFNKYIGLDVHKATIAVSIADAEGGDVRFFGEIENNPTAIAKLIKQLSKADEKLSFCYEAGGCGYVIFRQLRELNQDCIVIAPSLIPRKAGDRVKTDRRDSLNLARLHRAGELTPVWVPDELHEALRDLTRGREDIKNMEKRSKQVLLAFLLRHGRTFTEKSTWTKAHFSWLETVKFTHPAQQIMFQEYVDIIKMHKTKLESMDKQILTYAHASTSWPVIEALMSLRGINLLAATTIVAEIGDLRRFATAPQMMSFLGLVPSEKSSGGRIKKGNITKTGNSHVRRLLVEASWTYRHNARKTAHIQRKAKHTTDEVQEISWSAQKRLCQRYRELGDRGKLKVQVCTAIARELTGYIWAIGQVMYPRLPLIN

SEQ ID NO: 148355 - protein, 444 aa, unidentified
MLRFIGLDIHKTVVAVCVVDAQGTVCTRHRFPLTRDTLTAWARQLTAEDAVALEATTNTWAVVALLQQTPARLVVSNPLRTRAIATAKIKTDRVDAEVLAQLLRCDYLPPVWIPDAATLAARRLTTRRAVLVAERTRLKNRLHSVLHHLLLPCPVADLFSRAGLAWLATVELPAAERAAVDADGRLLTAIDQELAALEQTQVVDAAADPRVRLLLTLPGIDVAVATALLAAIGDATRFPTPARLAAYLGLVPSVRQSAQHCYTGHITKQGASHVRWLLVQAAQHLDRHPGPLGAFVRKLQRRKNRSIAIVAAARKLVILAWHVLRTGEPYRYALPRATQEKLARLRRRATGERRRTGPPAGRPRAAAYGTGQRTRGIPALATVYQQEGLPAPGPEPAAEARVLALDPAVHQFVTSLRVTHRHPRRTRQECEPATPAGGHPAQPG

SEQ ID NO: 148356 - protein, 356 aa, unidentified
MEQAITSDAAVTIGLDLGDRMTEGCVMDATGAVVERFRTRTTRARLVPTVTRFPGVRVILEVGSQSPWLSRALTAAGCEVIVANARRVRLIAEHDAKSDRLDAELLARLGRVDPTLLAPIQHRGEQAQRDLSLLRTRASLVGMRTQLITRVRGVAKALGQPLPRCSAEVFPARVRADAAGATLPGIAPLLAVLEHLTATIRQFDRQLATLATTRYPVTQVLRQVSGVGPLTALTYVLTLEDPTRFRKSRMVGAYLGLRPKRRESGAQRPELSITKAGDVFLRRHLVTAAQYILGPFGPDTDLHRWGLALAARGGRAAKKRAVVAVARKLAVLLHRLWMTGEVYEPLGYQARAARAA

SEQ ID NO: 148357 - protein, 357 aa, unidentified
MTTTALTTAAGPILAIDLGKYKCVACSDRADAEPTFQTIDTSRADMARLIGRTRPAAVVVEACSLAGWVHDLCDELGVPCRVANTGAEAWKFKHAKRKTDRDDALRLAQLDRLGQLPEVVVPAKATREWRALIAHRQTLITQRVAAQNRIRSILVGQGLPAPRGARAWSAAGLAGIGQFARPLTECGPEDLWRGMLELALTAYRQAEELVALAEAKLDAIGQADARVRLLDTVPGLGPRTAEALVAHLDDPHRFRSGKQVAAYGGLVPRQYQSGEDDRRGRITKRGPAVLRKLLVQCAWAMIRYNPWAKAVYVRLSRGKARRKQAVVALARKILVRCWAMLRDGTAWRPDPATAPAD

SEQ ID NO: 148358 - protein, 319 aa, unidentified
MPQTIAYLAGIDIAKDTLEVAVRKCHVAFTVENSPAGWDQLGERLRELGVGRAAMEATGSYGHGVMRHLQALGLTVLLLQPKQVKAFATMTLRRAKTDRLDARLIADCAVALEDRAREPVEARFDALAEHLTHIEQIEADLVQQKTRLEHVRDARIRRAIERRIAQLARLAEAERQLLTVRLRQHADLARRLDLVTSIPSLGPRTAMTLIVRMPELGRLSREAVASLAGVAPFLHKSGRWKGETHIGGGRAQVRTALYMAALAGAYRWNPQLIALRTRLIANGKAPCSAIIACARKLLIYANTVLARQTPWQPAHPARA

SEQ ID NO: 148359 - protein, 391 aa, unidentified
MVCVGIDVAKDKHDCCILDSEGTTLVDCFTIPNNMDGFKSLLQTIQDCSQKSDKIKVGLEATGHYSYNILGFLLDNDLPVYVMNPLHTNLYRKSLSLRKTKTDRVDAKTIATMLLSDVDLKSYTDTAYHNEELKSLTRYRFDKVQERAKLKQSVSRLVTILFPELEQLVSSIHGTSIYALLSEYPGAKQISEVHLTRLANILVKTSRGHYRKDKATHIRDAARTSIGSVMPAKSLELKHTIKLIQELTSEINEIEDAIRKIMDELKPPILSIPGMGFHSAAMILAEVGDFSNFNSPDKVLAYAGCSPSTYQSGKLTNCYAHMEKRGSRYLRYALYTATKYVCYWNPVFTEYLTKKQAEGKHYNVALSHATKKLVRLIYALQKSGKAYLAVT

SEQ ID NO: 148360 - protein, 357 aa, unidentified
MWALLRLPRFRGATHAAVTTIGLDIAKSVFQVHGVDAAGQVLIRRQLKRRAVLAFFQKLPVCLVGIEACASSHYWSRELQALGHSVRLMPPAYVKPYVKRQKNDMADAEAICEAVARANMRFVPTKTPEQQSCLMLHRTRHLFIRQQTAVINSIRAHLAEFGIVAPVGRKGATELLHIVADPSDKRVPEVARACLAALGNQLLSLKEQIVEFDRMIMVWHRSNETSKRLHYIPGVGPMLATALVASVADPRTFRSGRNFSAWIGLVPKQHSSGGKDRLGSISKQGDRYLRSLFVAGALAVIRYAKIHGTKHRPWLTALLARRPTKVAAIALANKLARMAWAMMAKGERYRQPVALAA

SEQ ID NO: 148361 - protein, 403 aa, unidentified
MPVLVGLDWGGSSHAVCVLDTAGKILERFMVGHDLEGLAELVARLRRHAPPGETPIAIERPSGLLVDSLVEAGFLVTPIHPNVVTACRPRYRAVAAKSDPGDAYILADILRTDGHRLAPLSPQSDAIKALRALVRGRDDLVATKIQIANQLRSLLDSFWPGPIACFADIASPIALAFLDRYPTPDSAARLGEKRMAAFLAQNQYCGRHAAADVLARLRSAAGSVAAEAEAEAKGELVRALARSLESIVAQIAKLTSRIEHAVAELPEGRIVMSFPRAGKVCAAQITAELGDVRARFQSEDHLAAEAGVAPVTYASGKSRGVGWRWACNKRLRAAVTCFADNSRHASPWAALVYRRARERGCKHAHAVRILARAWLRILWRAWQDGTTYDPDKHPAARALVASG

SEQ ID NO: 148362 - protein, 358 aa, unidentified
MQTQVKNLDFTGQNIYTGIDVHKKSWQVSVFSEALFHKTFNQPPKPEVLHGYLTKHFPNGTYHSVYEAGFCGFWIHDKLQSLGIKNIIVNPADVPTTDKEKKRKTDKVDSNKLARQLRNGDLDAIYIHKRSMLEDRSLLRMRRTLVKDLTRNKNRVKSDLHFFGIEIPEQFTKNPSYWSKRFINWLEELEFQQWTGTLSLRILMSQVKGLREQLLEVNRKVRTLSREDYYQKRVVLLGSIFGVGLITSMTILTEIDDIHRFANLEKLRSYVGLTPTSHSSGDKNLHGEMINRGNRFLKSAIFESAWIAARLDPVLHMDYVNFCKRMKPNKAIVRIACKLLDRVHYVLKNEMPYISGIR

SEQ ID NO: 148363 - protein, 352 aa, unidentified
MTVTNLARSITGGVDTHLDVHVAAALDERGTLLGVESFATTESGYKKLLGWLSDFGTVELVGVEGTGSYGAGLTRHLQGENVRVVEVDRPNRQRRRLKGKSDPQDAITAARAALSGEAAGEAKTRDGNVESMRVLRVARASARKARTQALNQMRTLVSTAPDPIRAELRGLSVFNLLERASSYRPGAKRDIVSLTKFTLRMLARRALTLEEEISEIDAILKPLVKETAPELVATLGIGTDAASALLVAAGDNPERMRNEAAFAHLCGASPLDASSGKNQRHRLNRSGDRQANSALWHIVLTRMVYDPRTTEYINRRRTEGLTKKEAVRCLKRYVAREVFSLLPHDTLGLDSP

SEQ ID NO: 148364 - protein, 450 aa, unidentified
MSPLALDVVTKTDKTPVLGRMLSKYVGRKTSSIENDITKARNHSRQRGNIMRVVFGIDVSKASSEVAILINGEKVHGYTIPNDAIGFNRLLGDLKTVHQPEIVFEATGVYSRRLQAFFEDNSYAYTRLNPLESKKQLDSLRVRKTDKIDAEKLATSQFILNRKPSYVQEALYQELRDLSRFYQNLTEDIVCAKNRLHKVLQVTFPELENILSAPTGEQYWNLVMTFPCNSFVLELDDATLRAIIRQSTSKRISEKRVTYLVDKLTKLANQSYCAVKKTSPMMEEVKYYAGELFRLSERRQGVLEEMVTLAQPLPEYEILLSIPGIAETTATSIIGELGDIRRFHSANQINAFIGIDLRHYESGDFLAKEHITKRGNPYARKILFKCIHNIASASHTNPCHIADFYEKRKRQSQVTSTKPHTIASIHRLIRTMYYLITHNKLYDYTSTQNR

SEQ ID NO: 148365 - protein, 329 aa, unidentified
MKSTTIAVDVAKEVLEVAVSVRPGQVREQHRLSRTAFMKFCTDQPPATFLLEACGSAHYWGRRLETLGHHVVLLPPHATRPCVFRNKTDRTDTRGLLEAYRNEDIHPVPVKSVPQQALTALHRLRSTWLATRTARLNTVRGLLREFGCTIPLGAHHVLPRAWDLLADADSGLPDALRPALADQTPAVARLRSIPGIGLITATALVAFVGDVQRFPSGRHFASYLGLTPRERSSGLIRRLGAISKRGDVYLRMLLIHGARRPLGRQETSHPRPSARLGSAPPEAPRSQQGRHCPRQQAGPRRLGRLEARRRFPGGACRLTHKEGFTNSHR

SEQ ID NO: 148366 - protein, 473 aa, unidentified
MARKKGKDPAGIGGPGLTGEPVEVSDEPAEVIARAAAIDVAKGSGMVCTRVPHESGPRRRVQRIWQVSARYSEIAALMAELAKLGIQRLVLESTSDYWRIWYYLAEAAGLEVWLVNARDAKHLPGRPKTDKLDCVWLCKLNERGMLRRSFVPPEAVRDLRALTRLRSRLAQDQARHQSRIEKILEDALLKISSVISDLMGASGRRFLAALVAGERAPDKLAALGDRRLKASPAQLEEALAGRFRDIHALEIGMLLELIDDITAKMARLDAEITARLARIPGIAPACAGCGEIGGGHAPSCPQAGAPVLSVIERLDELTGIGIDAAQVIVAELGTDKTTFPTPGHAAAWAKLASRTIQSGSTSKDGRTGKGNPYLRAVLGRAAMTAAKTDTYLGERYRRIARRRGKQKAIVAVSRTICEIAWMIITDPSVRFSELGPGYYARLDAGRQTRNKIRELERLNPGMKVTLTPAATAA

SEQ ID NO: 148367 - protein, 368 aa, unidentified
MMGWMAPLRHLGAKVLVGENQPADREPSMSEITTVGLDLAKNVFQVHGVDAEGSTVLRKQLRRAQVLAFFSGLPRCLVGMEACATAHYWARELRALGHEVRLMPAQYVKAYIKRNKNDAADEEAICEAVARPTMRFVPAKTAEQQAAVLLHRGRERLVRQRTMLVNALRGHLAEFGVIAPQGLRNVGRLIAIIRDEKDARLPGLARQVLQVLAVQIEQLEAAIAALEKQLMGWHKSNPVSQRLATIPGIGPIIATAIAAMVAEPSGFRSGREFAAWLGLVPRQNSTGGKNRLGGISKRGNQYLRRLLINGASANLLRSKATNADPWVIGLRRRRPSLVVAVALANKTARIAWAVMHRQENYQRMATAA

SEQ ID NO: 148368 - protein, 388 aa, unidentified
MDVLYQSCAGIDVHQATVVVCILHGPLTSTRPKREMAQFDTTTKGLKACHDFLTQFHVEAVGMESTGVYWRPVWHELCDDFELILAQPAHMKAIPGQKTDKKDAHWIAQLTRIGLLPRSFVPDETIQELRELTRQRKHYVESRNRETNRIHKILQSGGIKLTTYIEDIMGASGRNLLQLLIDETPLTPRMIHQSVYTSLKRKVPQLLEALDGYFSAHHRFMLGQSLEIYDFYQKQIDCLEERINGYLNLYERPVEILDSIPGMDLITASVIIAEIGVDMSQFPTAGHLSSWAGLCPGNNESAGKKRSTKIRHGNSYLKRCLCQAVFAAKRQKGSPLAERYYQIQSRRGPQKATIALAHQLLKIAYILLKENLTYQEFVLQKRLLETSQ

SEQ ID NO: 148369 - protein, 429 aa, unidentified
MKIIYPRVCGIDVHKKFIVAVICISESVEPVYLKKRFSTFHNDLIRFRDWLIQNDCQNVCMESTGKYYIPVYNILESHISNIVVANPKWVRAVKGEKDDDKDAKWIADLFKLGIVKSSFIPQKDFRILRELTRYKYKLVNMRSSEKNRYQNALTSGNCKLDMVFTDVFGKSASNIIDLILSDNPYTDEDILSKVHKNCKASPDMILNSINGTDLTPVQKSRIELVNNHIKQLSSNIQRLDKLIDLMIEPYEDYISFLCQIPGVSRNSAITILSEIGVDMNQFTSTRRLTSWAGLTPSSNQSAGKKKSVRISRAGVYLKPCLVEVAHAAVKDKSHPYYANKFNKISKRRGKKRAYIAIARKILVAAYHMLLTGEIWNPADLAEVETPVEQRIKYVKNNLKSDIKQLLDIGLTVEELTLMIQQNANNIATQ

SEQ ID NO: 148370 - protein, 432 aa, unidentified
MITHRLQAGIDFSQKKADFCLLYPDGRPLEQHRSFDNSLPGYSLAKALMIDALETHQFDGLDVSGEATGFLWLPFFNQLAADPDLQAYDLNLFLLNPRWVKWFKKCFPQDDKTDQKDSFYIADRTRTRRPDTTWSPQLDTLPLRFYTRLRFHLVQNLAREKCYFSAFLFLKASSYRRLKPFSDVFGVTSRRVLSEYAILDELAAIPVEDLAQTLHEMSGHHLPDPFDNARKLHRVAVESFPLPDALALPVHRILDLTLEHIRFLEGQIALVENWITAEVQAHPAIMKLATIPGVGPVFSSGNGAEIGGTQRFLQAQKWDKKRKRYRPRNLRDAEDAVAKIAGLWWPRSNSGDFEAEDRRMAKTGNRYLRYYLIQAANLMRQSIPEYAEFYRRKYREASKHHHKRALVLTARKSVGLVVGLLHRNEAYRPREV

SEQ ID NO: 148371 - protein, 377 aa, unidentified
MITSNKSTSRKRPSEPQAQASALPGTIKAKTIKLGVDAHLGLFVVVRIIDGGTPQPPQRFKRAEFLLWCAKQLTLTEKVFTCYEAGPFGYTLHRQLEKMGITNYVVRPRDWDEYGQKVKTDKRDATALADCLDRYVNGNQRAFCVVRVPTEAQEQERSLSRQRESFQKEKQRLAAQGRSHALYYGCPIQGEWWQKDRWEKLAVQLPPIVVNLLEPLRRLIAAITLELTARTKEVEAAAPSALPVGLGKLTSEILEREVADWDRFQNRRQVSSYTGLCPREDTSSDRRFQGSINKHGNRRLRPVLVECAWRLMVFQPGYLAVKKWKSVLADPKAGKARRKKKAIVALARTFAVDWWRIRTGRCQAKDLGLQLNPALAN

SEQ ID NO: 148372 - protein, 350 aa, unidentified
MEHIGMDIGLRESQLAILTDAGELLDKRIRTERNRLVQFFGSRAKAKILLEASTESEWIARCVEELGHEVVVADPNYAPMYCHRTRRVKTDRRDAHALAEACRLGAYRPAHRPSDEQQRLKGFLAIRDSLVRTRTRWMVLIRSLLRREGIRVPSASGEIFARRVQDLGLPVHLAAEVAPLLALLTPLNEQIKSLDQHLARVVASNETARRLTTVPGVGAVTAVSFLATLDPASRFQGAHQVESYLGLVPMEWSSSETQRRGHITKAGNGRMRWLLVEAAWRVLAGRRNPAAAPLREWAERIAQRRGRSIAAVALARRLAGIVYAVWRDQRDYDPLRVGARGGSSKSVAAA

SEQ ID NO: 148373 - protein, 420 aa, unidentified
MKAYNVDDFAALIGIDWADKKHDICEHPKNTEQYHYTVIKHKPEALHKWAMDLKLRYPEQKIAIVCELKKGPLIYALAKYDHLVLFTVNPSAVANYRKAFTPSGAKNDPTDAFIQTEIIKLHMDKLSVIEPESSSMRALAQLVEYRRSLVQDSVDLSNKITVTLKNYYPQALEWFKEKDTYIFCDFISKWPSLTAVKRARKQTLVDFFNRHNSHYETVNNARLLSIKSALPLTEDEGVIAPNQLLIEVLITQFKVLLKGIEQLDKTIKQMYKKQNDKAIFDSLPGAGPQLAPRLLVAFGHNRERYTDASQMQKYAGIAPVIESSGKKTWTHWRYSCPTFLRQTFVEWAGFSIRYSFWAKAYYEQQKSKGKPHNSIIRSLAFKWIRIVFRCWKTNTPYDESKYLEALKRRGSPLLKFAINS

SEQ ID NO: 148374 - protein, 357 aa, unidentified
MKIVGCDLHARQQTIAMVDTETGEFTEKTLSHEGDAVRAFYAALEGPVVVGIEATGSMQWFLELLEELGIQCRVGHPAEIRAKETRKQKHDRRDARLIWELLIEDRFPEIWMPSSKERDLRTLLRDRHQWVKMRARLQHTLQAIALNHALRQGHALWSAAGQRALEALPLPPYTRQRRDELLALYAQLQKRIQELDKEVEAQARQRPQARRLLTHPGVGPVTALATDVFLGDPSRFASGNQVASYIGMIPCEHTSGKRQRLGKMSKQGNALLRYLWTEAAMSTVRKDPELQRFYRRKLIQKGMGKARIATARKLGIRLWIMMRDQIDYEEFCRRGKLRQTGKAHAGMPDFNSGPAQQ

SEQ ID NO: 148375 - protein, 429 aa, unidentified
MDVVHARCAGMDISKNDAKVCVRIAGRGRVKTSAVVTTWTARSSVILRLADMLAEQQVTCVVMEATGDYWKPFYYLLTEAGLPVMLANARQVRQIPGRKTDVADAVWLADLAAHGLVRGSFVPDLEIKELKELVRTRTGLVRSRGEEVQRLEKLLESAALKLSSVINDINGLSGRRMIEALIGGERDPNVLAALGDGRLKATKAELAEALTGRFSEHHGFLAKVHLDLIDAYTARIGELSTRIDTYFTHDNDEADSAGPIGLGHARDLLATIPGISTRAAEQILAEMGNDMTVFASPGQLASWAGLAPGANESAGKVKTSACRPGNTYLKHTLGIAAMSAARTKNSFLAARYKRILARRGHRRALVAVARTILETCWHLLTTQQPYRDLGGDYYSRRRPGVTIKNALQRLREAGCQITTSNEGILITPA

SEQ ID NO: 148376 - protein, 338 aa, unidentified
MKVELLGIDLAKNVFQLHGTDAEGQCVLQRRVRREGLLGAVADLPPCKIGIEACTGAFFWQRKFEALGHEVRIIAPQYVKPFVRRQKNDRNDAEAICTALRQPNMRFVPKKTVEQQDTQSLHRARRRLVNHRTALVSQMRGILLDRGIGFAKSISRARRMIPAIVADEANDLTQLCREVLGSLLAFMYEIDARIREFEQRIDKLFRESAACRRVACIRGVGPMTATAMIAAVGDAREFKNGRHMAAWLGLVPRQHSSGDRRVLMGISKRGDQHLRTLLVHGARAVVRAATNKADPFSGWVNALRERRGMNRATVAVANKNARIIWALLRHEEEFRPAA

SEQ ID NO: 148377 - protein, 367 aa, unidentified
MKKVSTAAAKQSSNFSQQKLTIGLDLGDRSSWYCVLDEAGGVLLEQKLSTTPKAMKEVFGAMPRSRVALETGTHSPWVSRALSELGHEVIVAHARNVRLIGESRRKDDRLDAQTLARLARVDPQLLCPVKHRSARAQADLTVIRARAGLVRARTALVNTARGLAKSYGERLRGCNVRNMNPEKADGLSPELQTALQPLLAGIELLSEQIREYNERIERLAQESYPQVQLLKQVKGVGTLIALTFVLTLEDAHRFRKSRDVGCYLGLQPGRRNSGQSEPQMHISKEGDPYLRTLLVQGAQHILGPFGADSDLRRWGLKLAERGGRNGKKRAIIATARKLAVLLHRLWVSGEVYEPLHNSSRVAVPAAA

SEQ ID NO: 148378 - protein, 425 aa, unidentified
MSEVESIQPEPEFAAFIGIDWADQKHIWCLQTAGSKQRESGELEHTPEAVASWVANLYQRFAPRPIAVAVEQSRGALVFMLSKYELFHLFPVPAQMAASMRQALYPSGAKDDPRDADLLLDLLLQHRNKLRRLSPDSEATRRVQNLVEERRKLVDEKTAQINRLTDHLKVYFPQVLEWFGRLDSELVCALLERWPALEELQKASPASLRAFLRKHRCRDRERIEHRMEAIRRAIPAIQDRAVIEAKSAAVKVIVQLVRILVEGIEGLDGQIEEAAAAHPDFFIFNSLPGAGPVMAPRLLAAFGSQRERYRSAREIQSYSGIAPVTESSGKRKWVHFRWACPKFLRQSFHEWAGHSIVQSEWARVYYQQQRGKGNTHHAAVRALAFKWIRIVFRCWQDGVAYDENRYLATLVKRGSPIGTAYGKTL

SEQ ID NO: 148379 - protein, 334 aa, unidentified
MNYIGMDIHKQFTVAVAKDKEGNKLCEEKFDNSRDNFEKFLKCFIPEETRIVIESTSVWEYIFDMLDEMCYEVKLANPVRTRAIAEARIKTDHVDANTLCDLLRANLISESYIPPREIRNIRNVMRQRQSLVNGKTQIKNKIHAILLMNGIKIPYRHLCKKAVEWILEDLNALSIKSVMVSFTNLLEQYNFELKIIDEKIREIAMKNREAQLLSTIPGVAEIRAMEIVTEIGEIKRFESPGNLCSYAGLVPGMRQSRTSLHFGRLVKQANRNLKYVFVGASWSIVKTKENNVFKQFYLRLSKKKGKQKAICAVARKLCCAVYAMLRDNREFMLL

SEQ ID NO: 148380 - protein, 342 aa, unidentified
MLLIGCDYHPSVQQIAMLNTETGDYSEHRLKHSDGEAERFYRDLKLHTPKIRVGLEATGHRRWFERLLMDLDCELWVGDAARIATMRVRKQKTDRQDAQLLLKLMIEDRFPRVWISSLEDRDLQQLLWHRHRTVQMRTRILNQLQSIAMNEGIQRRGGLRSVQGRKRLEQIPLGPWGARRRNDLLVHLDQMNQRVNELTAAVQQEAEKRPEAQLLMTHPGVGPVTALAFVLIVGYPERFQCGKQIGSYVGLIPAECSSGVHQRLGHISKQGNILLRFLLVEAAQAAARFDPEWHKKFAHLAMRREREIAKVAMARKLAVSLYWMWRRQRSSQMASQVGSYAG

SEQ ID NO: 148381 - protein, 475 aa, unidentified
MNIKGTKKKNQVVTANIFEQQELLKKAEVIKENLTASTWRELETNGKFDKNKKLSFISDDMLILGCDVGSETHYVRAIDTRGRELSKSAYSFNNDYEGFQSAKEWAVKIAAEHDKSQIVLGLEPTGHYWFCLATWMIANGISVVQVNPYAVKQTKEVEDNSQLKDDRKDPKLIANLVKDGNFGMPYLPEKIYAELRRLSMFRDQLNEDRIRTINRMHREMKIYFPEYKEALGKVDGAFSLELLKEAPFPDELTALGEEGIRQIWHAAKLRGRGYSRAREILQYAKASVGIKDGSIASKAAVKWFVQKIMELDVELAVIENQINQKCQEIPHTGNVLEISGIGENTLSGILAEMGDISRFDDVKEIQKLSGLGLVACSSGKHKGETKISHRGRKRLRYWLFQAAKSAVAHAEEFKELHMYYTTRADNPLKKMQSLIAIACKLLRIIYTILNTGTFYDPKKMLMDIRRPEKKEAIVA

SEQ ID NO: 148382 - protein, 357 aa, unidentified
MPTHTKLAKSNAQIAVIGIDIGKNVFHLIGLDSRGAIVLKCKLSRSQLENRLANTPPCLIGMEACVGSHHLSRRLIALGHDARLMPAKYVKAFLKGHKNDYRDAEAIAEAVQRPTMRFVATKTVEQLDLQALHRVRARLMSERTATVNEIRAFLLDRGIAVAKGIQRLRKALPDILARHAGLLLPRMIRIIEALAADWRRLDDRIEQIGNEIEDLAQKDAPCKRLMTVPGIGPLISSATVATIGSGDMFSKGRDFGAWLGMVPKQLSTGGRTILGKISKRGNTYLRTLFVQAARVVLIKRQSWERYGLKPWIEAAARRLHSNKLAIALANKLARIAWAVLRHGRNFEVIHVDTPQHA

SEQ ID NO: 148383 - protein, 433 aa, unidentified
MNTSAPYDLIIGLDRSDRKADLHLVQTQDGKRTCQTIDTSPEALWEWLLQLRQQHPQARVALCLEQPASHLIAFLQAYEWITLFPINPITLQKYREAFVTSRAKDDTKDARYLAELLLSHHDKLKAWAPEDSQTRAVQQLVFHRRAVVDERTALSNRLKALLKQYFPQALVLCGEDLWRPLATRFLLKWSTLQAVQKAKPEKLKEFYYLNGSRSTKLMDQRLRLIEKAVPVTDQRAILDSFVLRVQLICRQLQDVAATIKTFDLQIAQAFKEHEDHPIFSSLPGAGPVLAPRLLATLGSQRERFDKAANLQHYTGIAPVTKQSGGKCHIHRRYLCPKFHRQSFHEYAKESILWSRWAAAYYLQQRTKGAGHHTAVRALAYKWQRIIWRCWMNRKPYQDQTYEAALRKAKSPLIALLDKVELGKSPFKNNVNKN

SEQ ID NO: 148384 - protein, 430 aa, unidentified
MTRHDLTPNDGVLVAIDIAKARNEVLLQIPGSPRRRRLTILNQRADHDRLVAQLSALGQPVVCGFEATGNYHRPLAWRLLEAGFDVKLISSMALARTREALHNGWDKNDPKDAQVILHMLSIGACQRYYDPLAQGISDIQELSKTYEAISRAKTEVLHRLQTHYLPLYFPEMDRFRQSSRSDWFLAFLDCFPTPASIVILGKEAFIAAAWTIVGRKVAKAQLLGDIYETAATSIGLPIPTDAVAVRMFRMVIAEARSLVRQRAEIEQVADTVLHQHPDYQLLRKIPGIGPINAMAIIAEAGDIRRFGHHRQFLKFCGLDLATQQSGTFRGQTRLSKYGNARLRRIFWLASQVAIQQRENSFRDKFERYIAKDRDNKDLRRKALTAIAAKMARVVHAVIKTGSDYRPFFEGAVPGGRTPLCKGREGATATL

SEQ ID NO: 148385 - protein, 368 aa, unidentified
METKINPINFLYVGVDVHKDQHTAVATDCFGQALLEKEIDNSQEQFEGLIRNIKTLTEARSLKPVFGLEDTSAYGQRLALHLCRENFPVKVVSPVLVLRERKKTTHPEKSDSQDALGVARALISRIGTLPDFSISKTNKMAKDLKDLVTDREFLIKEQTRIKNQLHRLLHRAYNSEYRLKFKNPFAVRALQYWLRNPVPAELKGNLLLKNQIKRKVRRLKDIRKEVTELEEEMKTLLDKMDQKLETLNGCGRVLASSVLAEIKDVGRFRSPSALAKYGGLCPKERSSGKSIRHIKTKSGNRRLNKAVHRIALSQIGRNGNKYAKEYFLRKISEGKNKAQAMCCLKRRIITIVFAMLKHKAAYDYAAKC

SEQ ID NO: 148386 - protein, 341 aa, unidentified
MNEITIVGLDLAKNVFQIHGAGPDGAAVLRKKLSRGRLLEFFTKLPICVVAMEACASAHYWGREIGKLGHEIRLINPSYVKPFVKRQKNDAADAEAIAEAASRPTMRFVTVKSAEKQAASMAFKVRDLLVRQRTQTVNALRGHLMEYGLIVPQGIKHLPSLRELVATHPDLPEAARILCDGLLEQVAFLSEKIAVVEADLRTRARQDDVASRLMTIPGIGAICATAMEALAPSAEIFSKGRDFAAWIGLTPKQNSSGGKDRLGKVSKMGQRDLRRLLVLGATAVVRWTRRYGAPAGSWLARMLLKKPPKLVAVALANKLARTAWALMARGGVYQAPTPGAA

SEQ ID NO: 148387 - protein, 312 aa, unidentified
MESITEPVGVDVSKASLAISIAGRKAFEVPNTESGLESLMLRLPVGASIHLEASGGYERLAKRLLGKAGFTVRVHNPLRVRRYAQATGVRAKTDPLDAKSLASAGPVLKGSLVKGEEREALADISRAVETIKRERSDFKRRLGAAQLESAVVKAYEKVIASLDQQAKELELLFVERVKQSSLANDYKNLLSVPGMGVCAARVLLCELPADFKDRKASQIASYAGTAPFDDSSGKRKGEKHIRKGNVRIKAGLYMGAVSLIQSAPWAKELYAGLRAKGKDHQSAVVALIRRLILRCLAVLKRGTPWQEVPPKP

SEQ ID NO: 148388 - protein, 340 aa, unidentified
MKGTTIGIDIAKNVFEVYVEDEAGQVVERRRLSRKKMVPWFANYPCAVVGMEACGGAHYWGRELAKLGHTVRLIAPQYVKPWVQTNKSDQADARAICRAVQEPGMRFVAIAGEAQQAVQAFHRVRSRLKENRTALVNQIRGILLEYGVALPKGVAAVRKALPLLLAEERWAPLIRQFLLEQHAELLEWDTRIVAVTQAITQENARQPVCQRLEQIRGIGPLSASALWLKAGGQTYQNGRHLAAALGLVPKHTGTGGKIRLGGISKRGDRYLRWLLIHGARSVVAHVGNKPDRLSCWLRSLVVRRGINKAVVALANKNARVAFALIHEDQPYDVMKMCHAA

SEQ ID NO: 148389 - protein, 457 aa, unidentified
MGNARARKVPAQLVEDEDYQLRCERVAGIDVAKAKADVCTRLPPAEPGGRRRSRVEEVPATARDILALAGRLLADGAELVAMESTSDYRRIWYYLLEGAGLRVQLVNPAHARQLAGRPKTDRLDAQWIARLTEMGLLRPSFVPPPEIRVLRDLTRTRLQLVRDRTREWQRLEKLLEGALVKLSSALSSLAGTRTARDVLQALADGETSPRALAGLASARVKGGRQAVGRSLDGMQVQPHHRRLIRVHLDHVAFLDREVSALDDEIAAALDAIPAAAGISADGVPSPDPGPGARVLPAAQRLAEIPGMSPELARAVIAGTGLDMTRFPTAGHLVSWAGLAPVARQSGPRTGKPKKGHGNACLRGYCTQAANGAARTDTFLGERVRRLSRRLGGNKAKCAVARSVLVITWHLLADPEARFHDLGPGWHHRKTSRDRTIRTCLRQLHALGLTVELTDTAA

SEQ ID NO: 148390 - protein, 357 aa, unidentified
MTEITRGEIVRVGVDLAKHVIQIHAVDQVGRTVTAKPLAREKFLAWCTLQLPPGCLIAMEACGGAHHWARRLQEMGFDARLIAGHFVGPYRMQGKSGKNDANDAAAICEAASRPSMRFVPIKTAQQQALLCVHRLREGYKEERTACINRIRGLLTEYGLVFAQSPEVLRLALPDTLEDASNDLPALARMALQRAHLQWAEIECHIARCDERIAAHVRSDTQAKTAAQLCGIGPITASALVASVGDFTQFKTGAQFGAWLGLVPSQNSSGGRASLGRITKRGDDYLRTLLIQGAKSAVMSAHKRSDRISQWLVQLKERVGWQKAVVALANKNARIVWAVLAKGRIFDPNMCPSSRGDC

SEQ ID NO: 148391 - protein, 420 aa, unidentified
MRADEKYLFARRFAVHVGVDTGKAFHKLVARGPEGRRQPPFKVLVNRKGFEEAHAHLREMFPNHGPADFLVGLEFAGHHGYTFAHFLAAKGYHVVSVLPAHTKKAKELEDNSPLKSDDKDARLICKLTGDGVFVPFPFLDTPYVELKVLVTHRHRLTVEQTRFRNRLQTILDLAWPEFLGHFTNLTKRTPLAILERWPLPQDILAASPETVLRLVKKVSRNHIKPTKVRALLASARETVGLMDGADQRRDEMKDLFARWRLLRAQLDELDTQIAALVELCPEAERLMTVPEIGTLCAATIVAELGTPDSYAHPAQVLKLAGMNLVGRDSGLSVSGRRWQSKRGRPMLRRQLFLLAGRWCSPRGLMRNEYVSLKERNGNCKTKAVAAIARKIVPVLFHVMKSGDGFDYERYYRNRRRKDAA

SEQ ID NO: 148392 - protein, 341 aa, unidentified
MYRTKVGVDLAKNIIQVCTLHGKKVTSNVEMSTDEFSLWLAKSKPVTVAFEACSTSNYWYQQAIKAGHDARLISAKLVKAVRQNQKTDKNDALAIAQTLFLPEVSFINGKNIEQQQLQSIQRLRELAIKSQNASQKQIVSLLLELNIRLPNTQAGLLNGLEGVLEDGENNLSDTFRATLLVAKVQLENMISAIREYDKYLEQSIQSLPDCKKLLKLEGVGPVNAVNLYIALGANQSQPFKSGKNASACIGLTPIQHSSGGKEVMGTIGKYCKNGSLRSQLITGAMSVVIKVIKYGAKTKKELWLQGLMQRRGNRCAAVALANKTVRTAYSMLQNNTEYHAA

SEQ ID NO: 148393 - protein, 355 aa, unidentified
MNDTKFIGLDVHKTSISAAVLDQDGKLVMQSIFATHAAAILSFIHGVGGSLRVTFEEGTHSSWLYDLLRPQVSEVLVCNPRKNSLLKSGNKSDQIDARKLAELLRAGLVSPVYHGQTSTVTVKELGRTYTALTEDTTRVMSRLKALYRSQAIATEGKKLYTKRRREQWLKELTQAGRRYRAERMFEQLDALQGFRRQARHDLFVECRKHAATAILTSIPFLGPIRAALLIARVQTPFRFRGKRQFWAYCGLALETRSSADYRLVEGELHRAKKPVFIRGLNLNHNHDLENIFKAAATTASACPGPFRDYYETLLGRGMKPEMARLTLARKIAAISLIVWKKGERFDPEQLKAQAA

SEQ ID NO: 148394 - protein, 355 aa, unidentified
MDSVKYIGMDVHKEAISIAVLNSSGKLVMECTIETKAITILEFFKGLRGSLHVTFEEGTWAAWLYDLIKPHVTELVVCNPRRNALLKEGSKSDRIDARKLAELLRSNMVRSVYHGEHGVRTLKELARSYLAISKDVGRVMSRLKAIYRSWGIPCAGKQIYALRYRAEWLGKIAEAGVRRRAEFYFEEFDALRSLRQGARRELLVEAQKHDAWKLLRQIPFIGPIRAALLIALIQTPHRFRTKRQLWTYSGFGIETHSSAEHHCVQGELRRSKKPASIRGLNRNHNHDLKSLYKSAATVAAAKPGPFQEFYNSLVAKGIRPEMARLTLARKIAAITLIIWKKGVHFDAKHLKPQTA

SEQ ID NO: 148395 - protein, 338 aa, unidentified
MAIVTLGIDLAKNVFALHGVNEAGKPVLLKPHVPRAKLLETIAALPPCTIGLEACGGAHHWARQFQRYGHTVRLIAPQFVAPYRLSGKRGKNDAADAAAICEAVQRPNMRFVPIKSVDQQGRLMVHRARQGFVDQRTATINRIRGLLAEVGIVLPLKADTVRTQATALLDELSGWVNRVIGDLLGELHRLDERIASYDRHIAQMAREDLRAQQLMRLCGIGETTATALVAMIGNGHEFKSGRQLSAWLGLVPGQYSSGGKARLGRITKAGDGYLRSLLILGARAVLNAAKSKTDSISRWAGALAERRGYWKAVVAIAAKNARMAWAILRQGDAFVLPT

SEQ ID NO: 148396 - protein, 344 aa, unidentified
MTEYVGLDVSKEETAFCVKDLAGKVLARGKVATDPAALFEALKAHCLCPERIVLETGTLSGWLARELGRLGLAVDVIDARQAHAVMGLQHNKTDANDAALLAEIARTGFYRGVAVKSEAAQEARILLKARCHLVRQRRDTENTIRGLLATLGIRFPRGSGKLAGRVREALEDAPGLRLMIEPLLSSVAALGRELGRLDEAVTARAKSAPACRLLMTVPGVGPVTALAFAATIDDPARFAKSRTVGAYMGLTSRRWQSGEMDYSGRISKHGDAMLRSLLYEAANSLLTVVRRAHPLKDWARRIRKRTSHKKACVALARKLAVILHRMLITGEAFRWPEKQAATVA

SEQ ID NO: 148397 - protein, 341 aa, unidentified
MTFYCGIDLHSKKSHVCVIDKDGKKVKEENLNNDLALILQFLKPFGKDVHIAIESTINWYWIVDGLQESGYDVRLARTLGLHMITGAKVKTDRRDAFKLAKLLRMGEIPEAYIYPKEKRPLRDLLRRRAGLVQQRAECYSSLRVQFMKYNLNTMSDTEVKQLLPSDFDIVPIPQELKDYCVMILQRIELLSNQIDELNTYLKNVTLEDPTFKILLTLPGVLYVLGLTIYYEIGDIGRFDSVRQFASYCRLVPGISQSSDKVKRGKGSNQGNHYLKWAFTQAANLAVRYYPTLRKFRDKHANRRKGKAAIMIANCILAHKIANATFHMMKEGVPFDEAKLFG

SEQ ID NO: 148398 - protein, 376 aa, unidentified
MSNVRFIGLDVHAETVAVAVAEPDGEVRSMGVIPNRSESIRKLVKKLGPAEQLRVCYEAGPTGYVVYWELTALGVKCEVVAPTLVPVKAGDRVKTDRRDALKLARSYRAGDLTPVWVPDAAHEALRDLVRAREAAKKDQLRARHRLGKFLLRHGRRPSTTMNSWTQTHLTWVKTVHFEHAAQEATLLDYLHEVEHMADRIERLERAIDDAVKTAPERMRAVIEALQALRGIAQVSAVTIVAEVGELSRFPKPRQLMGYSGAVASEDSSGGRIRRGGITKTGNAHLRRVVIEAAWAYRYRPAVGAALRKRQVSVSQDVKEIAWKAQHRLHARYRHLTARGKCKQETVTAVGRELLGFIWAIGVQVEAHGRGAQSVAA

SEQ ID NO: 148399 - protein, 355 aa, unidentified
MRQVKQLNFAGQRIFAGIDVHKKSWKVCIRSESMELKTFSQNPSAEELARHLKQNYPQANYQAVYEAGYCGFRYQRQLSNDGINCIVVHPADVPTMDKEKQRKSDTVDCRKLSQTLSKGELTGIFIPGVEQQDDRGVIRAYQQLIKDQSRCKNRIRAFLNFQSIVIPNDEEYKYWPKRFINVLRELPLTSSARITLDLLIESYEQARKMVLMATRQVRLLSRQDRHKAQIGLLRSIPGIGEITALLFATEIGDINRFQKLEQLCDYVGLVPRIHGSGEKESVLGLTHRGNHVLRESLIEACWVAIRLDPAMTMAFNNFTKRMKKNKAIIKIGRKMLNRIRFVMKNQTKYVTAIVE

SEQ ID NO: 148400 - protein, 341 aa, unidentified
MQITTIGLDIAKNVFQVHGIDAAENVIVRKQLRRGQIIAFFEALAPCLVGMEACATSHHWARELTKLGHEVRLMPAKDVKAYVKRNKNDAADAEAICEAVRRPTMRFVRIKSAEQQGQLMLHRARDLLMRQRTQLINALRAHLAEVGITAAQGREGIKELLAIIAQDEGSRLPVDAHASLTVLAAQLQAVQTTIGSIEKRIVAQHRSNEASKRLETIPGIGVIGATTITAVVTDPKAFRSGRDFAAWIGIVPRQDSTGGKQKLGPISKQGDQYLRRILIVGAHRVPIQAPAAPSAKAAARPRPSAMPPAATTGAGETASTTAGISGIVATVPRTWPPASHP

SEQ ID NO: 148401 - protein, 340 aa, unidentified
MQYKRIAIDTSKSVFTLHGIAANDQPILRRNLRRSDLEAFFAKLPPTEVVMEACGGSHHWGRVLTKLGHRVKLIPPQYVKPYVKRGKNDRNDAEAICEAAGRPGMRFVPVKSAEQQAGAMPLAVRELLVRQRTQLVNALRGHASEFGAVVGKGIENVSGLLAKIATTDSIPDAAREMLAMLGNQIAHLDEQLGTLETRLVAQHRATPMSKLLAGQPGIGPIAALTIVHKVDPTQFKSGRHFAAWLGLTPKERSTGGRQRLGGISRQGNERLRQLLVVGATAVIRHAKPGSKSASAWLLALLERCPRKVAAVALANKMARTVWAMMTSGEAYRMPVASKAA

SEQ ID NO: 148402 - protein, 392 aa, unidentified
MAGKVAGIDVHKKVLMVVVIDADAPAAKQERLRFTTMPSELRRLSTWLKEHGVEEAVMESTAQYWRPVWLELEPHIRLHLAQAFSNRAPRGRKHDFKDAERLVRRLIAQKLILSFVPDGEQRIWRNLTRMKLQLVRDRVRLQSQIECLLEEMRIKLSVVVTDLLGLSGLRIPHALANGETDAKNLALLGDHRLKCSEEQLIEALTGSSQPMHPQMLAMQLERLRLIDEQMAKLNVLIAQAMNPHQDTLIRLAEVPGLGIDSAQQIIAEVGVTASTFPSAAEFTSWVGTCPGKQESAEENSSSRSAKGNKYMRRILNQAANAAARSKGTHFQAVFRRLLPRLGYQFAVWAIAHRLCRLVWKILHEGIRYIEQGIDSEPRLLIYRARSLVSRCT

SEQ ID NO: 148403 - protein, 324 aa, unidentified
MTEPALGIDIAKLKFNVCLINPQGKLRHKVFPNNATGCEQLKGWLTRQGVKQVHACLEATGTYGEALALFLHEAGHIVSMVNPAATKAFAQSRLSRTKTDRVDAELIARFCLAQEPPAWTPLPIEVRELQALVRRLESLIEMRVMEENRLSSGITVDSVRQSVEELLAYLNQQIKRTEELIRNHINSHPGLKQQSQLLDSIPGIAETTAALLLSEITDITQYRSARQVAAYAGLVPRERQSGTSIRGRTRLSKIGNARLRRALYFPAITALRCSPFFQAWAEGLLKRGKSKMSVICAVMRKLVHLAYGVLKSGKEFDPQWAKAA

SEQ ID NO: 148404 - protein, 315 aa, unidentified
MYIGIDVSKGKLDVGCTTWESVEQYTNSSKGVAKLLKRISTATPELVVMESTGGYERLVSKALVGSGIRVAVMNPWQTHNFAKSLGLRAKTDVIDASMLAKFAEVVKPRASEIMSDQEFALKQLVLRRSQLVCQKTQEMNRLEHASPIVAKSIRKMIRSLRLEIKHITKNIELFLAKNEIMTKRAQALQSAKGVGLITAYSLCTLLPELGTLNRKQIAALVGVAPFNHDSGNKTGQRSISGGRPEVRSALYMATLTATRSNPKIKAFYKKLVSRGKKKKVALVACMRKFLVCLNAMLKAEQTWNDRPKSATTAKS

SEQ ID NO: 148405 - protein, 462 aa, unidentified
MTFEVRRADPSLPAVAGLALASGSRAASTEMSVQPSTPGGGSAWKEDAVQAPIHADGQQVFVGIDWGGSHHQLCVVDAAGARRRQVRLTHDVAGLAQLDKELGGLGARLAVAVERAEGLLVEHLQARGHLVYPVSPPIAARARERYRAASSKDDVFDAFVLADTLRHEHARWRPLPLASPALAELRALTRDRDRLLATQQRTEAQLRAILEAYHPAAARLFSSIDRQITLAFIGDYPTPQAAAAVGEQRMARFLARNRYTGRVAPQVLVERLRANLLAGAPGTVTGKAHSALVFAELLGLLNQQLADYDEAISLAVGRHPDAAIFVSFPGVGPVGTAALLAEIGEDRSHYPTVEVLLAEAGLAPVTRASGRSCRVRFRYAANRNLRDACTWWAYNSLKESTWASEVYQQARARGQHPYRALRGLGARWMRVLWRCWTDRVPYDSAKHLKPTAQPAAQEGASA

SEQ ID NO: 148406 - protein, 402 aa, unidentified
MKASKQYLRFCGIDMAKQKHVACIVDQNGRYLVRPKSIRNDADGYQQILNCLKQSGRTKSILTGMEATGHYWYSLHDFLTRQGYTVAVLNPIQTAQQAKQAIRKCKTDKYDAFHIANLLRTGQYKAAVIPGEFAMTCRQITRLRYRIVKQAAMIKQLVNSRLYPAWPEYEGLFSNKFGTTSMKLLQTASTPKELMELDPDDLSELIRKASRGRFGPAHTQKILHSAKNSVGMQRGHYGISIGIKFLLEQIVALEPVRKKLDVEIEKLAAKLPEYLFTLPGATELTIVSLYGEVDPIETFKRPSQLTAFAGLDPKVFQSGQYDAPRRHVSKRGCPYLRRTLWQMAYRALCNEGDLRDFWRRKHRQNKHHLVAVTAAANKLCHIVWRIMTDRRDYIPKDYNHKS

SEQ ID NO: 148407 - protein, 343 aa, unidentified
MQHVAIDLGSRESQVCVRGADGAIQYERKHRTQTLGAFLRTLPRSRVILETSSEAFRVADAAQAAGHEVRVVRATLAKQLGVGERGIKTDLRDARKLSEVSTRIDLPSVHIPTEEARTMRSIVRTRELLVSTRTRLVNHVRGWMRGQLLRVRRGTTATLPDRVRAVGKERLQTFPSHIEQTLVLIETATVQLKSADKEMQQAVRANELCRRLMTVPGVGPVTAMAFVAAIDDVTRFQHAYRVQSYLGLTPGEDSSSERERRTGITKAGSTTVRRLLVQAAWVAYWKRPEEPMVQWAKQIEKRRNKFIAIVALARKLAGVLYALWRDQTSYRADKAAQPLEVNA

SEQ ID NO: 148408 - protein, 454 aa, unidentified
MALPFLNDDGEQAMAARKQEVAVFPNAAGIDVGATSHWAAVPPYLAEEPVREFGPMTTDLNALADWLLACGVDTVALESTGVYWIPVYEVLEQRGLKVWLVDARQLKYVPGRKSDVQDCQWLQKLMSLGLLRAAWRPDGEVCVVRAVARQREVLLTEQASWVQRMQKALVQMNLQLTEVLTDVMGVTGQAIIRAIVAGERDAVVLAQHRNRRVKASKDDVIKALSGNWREEHLFVLGQALAMYDDIGRHLADCDAKLRALLSERSRGVVEMGKPPRAGSRTRAIFDLRQTLADWAGVDLTRINGLDVTSVMKILSELGPDLSRFANVKHFCSWLGLCPATKISGGKVISASTKRSANRVRQTLKLAAMSLSRSQSALGAFYRRLCTRMGKTSANTAAAHKLARLVYFMLTRGETFVDQGQQRYEEQQRERSVAALKRRAAALGFQVAPATTTAA

SEQ ID NO: 148409 - protein, 380 aa, unidentified
MKQVCGLDVHKDSVFVCILNENGVVFQEKYGVLTPELEQMLAKMLEYHVEEVCMESTSIYWMPVWRVLENYVSLKLVNPYFIKQLPGKKSDVKDAEWIATCLLKDLIKGSYVPDDLIQQLRQYDRRISDLNAECVRKLGKFDAALQRCNIRISNYVSTTDSKSYKEVVRLISEGTRDPAELTKVIHGRTVNRVGKDVILASLTGVISNTDIDVIRQLREEVALAEKHKDECQSKMDAICQQYFPEQLKNLQTIPGIKGRSATAIIAEVGTDMSSFEDAAHLVSWCGLKPRNEESAGKIKARSITHGNKYLRKTLIECAWAASKTQGCYFNKFSYHQVVVRRKNKMKVQVAIARKVLTAVWYVMHDSVAYRDFTPDIAPTE

SEQ ID NO: 148410 - protein, 433 aa, unidentified
MEEAEDEPLFCERAAGIDIGKQSVMVTVRVPSETRKGGRAQETREFGTTRRQLLELADWLRSHGVERAGMESTSDYWKPVYFLLEQEGLECVLYQASKVKAQPGRPKTDKLDSAWLAKVTEQGSVAGSFVPPEDIRRLRACTRYRRRLTQAMTAEKQRVEKLLEDAHLKLSSVISDIHGVSGAEMLRAIAAGERSPRVLAEMARGVMRRKLAALREALDCSFFTEEHAFVLSMMLDNIGHYTRQVAVLDEKIAVMCEPYARQLAQLDQVPGFGVKTAQDLIGEIGVDMSAFPTAGHLCSWARVAPRPKESGGRRKGGSATGKGNPYIGAALGEAAVSVGRTQTFLGAKLRRLVRHMPKKKAQVAVMRTQLVAAHALLSDPEAEYAELGPGYYDERAGTARQARGHVRSLERLGWKVTLEPLDPDTGELTAQAG

SEQ ID NO: 148411 - protein, 466 aa, unidentified
MARSRSGAAVSRLRPVALLAHESLYVGIDVGKHQHVAGFVSSTLLERHGRFEGCPALVFDNTREGFRTLAERLETYAPLEQVFVLMEKTGHYHHALLQYLLDLDIADHLIHVQERTAGLLKTDKRDALGLANRLYTQLELGAQVADKSQLVRRAVPPTEAAALVRGLVRHRYELVHEATRRKNKLTAISDELFPEFATLFKDPNAAGALALREACPTPHAIATAALVDLLALRVGHHPSETKLHQLQEAAATSIGTHDLGRQRGLVLEQRQLIRELRLLQAHIAELDAEIGGIVATAREGRILTSIPVIGPLQAATILAAVGHIDNFVSAGALRAYCGWAPQVRRSGETVDQAKLTRGGTRTMKQTLYLVVANAIQRPECEWARRQRYVGTNKVLARIAGQMVSTIYALLKRDAELLARCAPGRLPPEPMLYDPTVHRAHREGHYRASKPQRSRSIITALPAHVDV

SEQ ID NO: 148412 - protein, 345 aa, unidentified
MIIGCDFHPSWQQIAWLDSETGETEERKLVHASGDAKAFYQQLAAPARIGMEATGNSQWFIELVQDLGHEIWIGDAAQIRGSYVRKQKTDKRDAAHILKLVVEGRFPRLWTPDGEQRDLRQLVLHRHKLVEIRSRVKNELQHLALNKGMQRKAKLWSQAGQKLLRELPLRPWAACRREDLLGLLAMLNQQIGTLDQAVQQAADEHPQAKLLMTQPGVGPNTALAYLLTMGDVSRFPRGKQVASYLGLIPREESSGGRQKLGVITKQGNRMLRMLLVEAAQAAVGYDPQFRKEYLHRCHKKPKAVAKVAAARKLAVRLYWMLRTNVAYPEIVRIESSSGLPLVGAS

SEQ ID NO: 148413 - protein, 423 aa, unidentified
MLKIVYPVCCGIDVHKKFVVATIATTNDKNVTSYQTRSFNTFKNDLIALNNWLVENKCKDICMESTGKYWIPVFNVLEDFCTITLANPRYVKNIPGKKTDKRDSIWLADLHKHALVKGSFIPPKPIRELRDLIRYRFKLTKVSSSEKNWVQNSLTVSNIMLANVVSDTFGKSASSIIKHMLENPDLTSFDYSSMLHKSLKKKADEIEQAVAGKFSKEQASKLSVCYEHFNSVEKCIETLEATILELSLPFKEQIDIIATLPGIKQASATAILSEIGTDMSVFTSDKHLCSWAGLTPQSNESAGKKKSVRISRAGVYIKPLLVQCANAAIKDKSCTVFKNRYEAIKKRRGHKRAIIAVARMMLTCIYHMLSKNEPFNPLLYDDNTKSKQRSKEDFQSIEQAILFLQTKGFTVNVSDLVAVKNQY

SEQ ID NO: 148414 - protein, 367 aa, unidentified
MKKVSTVAVKESRNISQPKLTIGLDLGDRNSWYCMVDEAGQIRLEQRVRTNAKALQEVFGAMPRRRIALETGTHSPWISRLLHGLGHEVIVANARRVRLIGESRKKDDRLDAQTLARLARIDPKLLSPVKHRSAQAQADLTVIRARAGLVWSRTALVNTVRGLAKSYGERLRGCNVRNMNPEKAEGLSPELQAALQPLLVALESLSEQIAEYNEGIEKLAQESYPQVALLKQIKGVGTLIALTFLLTLEDPHRFRKSRDVGCYLGLQPGRRNSGQSEPQMHVSKEGDSYLRTLLVQGAQHILGPFGIDCDLRRWGLKLAERGGRSGKKRAIVATARKLAVLLHHLWVSGEVYGPLHNSQRRPLTIAA

SEQ ID NO: 148415 - protein, 419 aa, unidentified
MKEPNIGDFACLIGIDWADRKHDFCETDDQGKTYAYGVISSKPEAIHDWVMTLKERYPNQRIGISCELKKGPLVHALLKYDHLTIFSINPSTVAKYRKAFVHSGAKDDPSDAKFQVDILRLHMDKLRVIEPDSADIRALGQLVEYRRKLVQDRVDLSNRIAGILKSYYPQPLEWFKEKDTIIFCEFISRWPDLASAKRARKSTLINFFNQHNSRYSAVNENRIASIKSAFALTHDEGIIAPNRLMISLLVPQLKLLIEAIDVMDKDIKTRYKAQKDKAIFDSLPGAGPQLAPRLLVAFGSNRARYETAADMQKYAGIAPVIERSGKKSWTHWRYSCPKFLRQTFVEWAGQSVRFSFWAKAYYQQQIEKGKPHNTVIRALAFKWVRIAFSCWKTRTVYDESKYLEALKKRGITTASVCCK

SEQ ID NO: 148416 - protein, 500 aa, unidentified
MVRHCPPVSVVPGHVGDSGESERSDIPFERVSEDDVPAPARHSLFIMEATMTKRKSGLELAFPNAAGIDIGSASHFVAVPPDRDEEPVREFRSFTENLRELADWLSACGVDTVAMESTGVYWIPLYELLDAQGFTVHLVNARHVKNVAGRKSDVLDCQWLQQLMSYGLLAGAYRPTDDVCALRAISRQREMLISYQGRHVQHMQKALVQMNIQLGNVITDVVGETGQKILRAILAGERDGNVLARFRNNHIRASEDEIAKSLVGNWREEHLFTLKQAMDLYDAYGERLRECDARLETMLKRLGGHDGEPDKPRRRSHGKNAPRFDVRTDLFKMCGVDLTRIDSIDATTALKVIAEVGTDLSRFPTAKHFTSWLGLCPGTKISGGKRLSGKSKRTANRATQALKAAAANLRTSQSSLGAYYRRMCARLDKSKAITAAAHKLARLIYAMLTKGAEYVDRGQAYFEERYRERVLHHLKRRAADLGFSLHPITDHENKPVQSAT

SEQ ID NO: 148417 - protein, 316 aa, unidentified
MNDTIVEQFVGIDVSKATLDVCIEPSGSVMQVAYDETGVEQLVAHLKEINPTLVVVEATGGLEVRIASALAGKGLAVAVVNPRQGRDFAKATGQLAKTDRVDAAVLAAFAKAIRPQVRPLKDEESRALDDMVNRRRQLIGMRVQESLRLATAASKPLQKSLKKHIAWLDKQIDQADRDLTSRLRESDVWRAKDDLLNSIPGVGPVTRVTMLAKCPELGTLNRRQIAALAGVAPLANDSGKHRGKRSIWGGRAEIRAVLYMAAISAMRCNDAIKAFAERLKKAGKPPKVVIVACMRKLLTIMNSMLKNNTPWTPKIA

SEQ ID NO: 148418 - protein, 401 aa, unidentified
MTATHNTNGTASSAPVLYLALDLGAGTWRLAFSVGLGQKPRIKTINARSTLSLVMEIRAAKKRFNLPEDAPVVCCYEAGRDGFWLHRFLLDQGVQNQVVDSSSIEVNRRRRRAKSDSLDAAKLVEMLIRWHNGERKVWSTVHVPTVEQEDQRQLHREMLKLKAERTAQGNSIKGLLAGLGLCVIVDETLPTQLENLRQWDNAKLPPLLHQRLLREFQRWQLIDRQIHELEAERMAKIRDDKTPHVEKVRRLLNLKGIGDNGAWLLVYEFFAWRVIKNRRELASLAGLTPTPYASGESQREQGISKAGNRRVRFMITELAWGWLRYQPESELSQWYMRRFGRGNKRLRKVGIMALARKLLIALWKYVEGGEAPAGAEELGWDNKPRFRAVKSKRKQEVLQTG

SEQ ID NO: 148419 - protein, 340 aa, unidentified
MNITTYGLDIAKRVFQLYWVDIKSGEIHNRKFGKQELLEFLSQREAGLIALEACGSAHWWRCKLMTLGHEVKLIHAKFVRPFVQTNKTDAADAKAIWTAIRQPGMRTVAGKTEEQQAMLALHRMRMSLIKFRTVQVNQLRGLLYEFGVTLKGGRLAGLSEMQQRMAEIEETVPGMLFEAMKEQLQRLTDIEADIQDIERRIKAWQKRQEACRKISEIPGVGMLTATALVATMGEANGFKSGREFAAFVGLVPRQSGTGGKVKLLGISKNGDTYLRTLLIHGARAVMFKAKDKGEWCEELLKRRPTNVAIVALANKMARTAWAILAHGREYQKDYVSVMPA

SEQ ID NO: 148420 - protein, 353 aa, unidentified
MPVYVAVDFHAREQTISWCDTADGEVHRTKLRHQHDDVRKFYEQFRGEVIVAFEASGYSAWFEQMLAELGHTVWLGNAAEIRRKAPRKQKNDRRDADLMLDLMMKSDFPRVHTFSTESRTVLRQLRYRHKLVKVRTIAKNSVHAIGINAGLPLRGRLLTQTGMEQLQALPLSPGLSQQRDEWLALIRLMNKQIGAVEESLAQRAKHDEAVELLRTHPGIGLLTALALRYTLDPISRFTSTRCVVGYAGLDCVEEQSSERRRMGSISKQGSRLLRFLLNEAGQTAARKDPQLKQFYRRLLRRRDKPKAKVAVARKLLVRSFIMLRDQIDYTEFVRRGVAARVARETHSPKVTDL

SEQ ID NO: 148421 - protein, 346 aa, unidentified
MTIIGCDFHPSWQQICWVDGETGELMQQKVAHAPGEVEKFYRRFAAPALIGMESTGNSQWFVELLERIGHVVWIGDAAKIRASDVRQQKHDRRDAELLWRLLEEKRFPQIWTPSSEQRDARQLLLHRHKLVRVRAQVKNELQHLAMNRGMQKKRRLWSAEGQQALRELPLAPWAGRRREDLLKLLSMLDGQIASLDMAVKAVAEQNENARLLMTQPGVGPVTSLAFVLTMGDVSRFPRGKQVASYLGLIPREYSSGGHQRLGSISKQGNRFMRMLLVEAAQTAVRLDPQMRSEYLHRCHRKPKGVAKVAAARKLAIRLYWMLRTKRGYPGIVRIESSPRVPLVSAS

SEQ ID NO: 148422 - protein, 424 aa, unidentified
MKVTFQTCCGVDVHKSFLVATIIKTTGGIEPSYQKRRFSTFNNSILEFKKWLLENECLYVCMESTGKYWIPVFNLLEDEINVTIANPKWVKAVKGNKDDTKDSKWIGDLFRLGLVRGSYIPCKKIRILREFTRYRYKLVSCRSSEKNRYQNALTVCNVALDSVVSDVFGKSSTSIIDYLLEHSGTSIDHEVIASKLLKRLKAKEDAVIESIEGYQMTDSQKYRMHLVRAHMDYITAAINDVDSEIESLIASDPDYENAVELLCTIPGVKYDSAITIISEIGIDMSQFCSSKRLCCWAGLTPGSNESAGKKKSVRITRAGVYLKPALVQCAHAAVKSDKSPYYKKKYESLVERRGKKRAIIAIARMILTAIFQMLTTGETWNPCDLYKIDMPEALLEKQKQKAIKQAQKLLIREGLLPPTEPIAS

SEQ ID NO: 148423 - protein, 450 aa, unidentified
MALQAIRPKVAGIDVGSRQHWVCGPARDDGEPNVQVFGTTTAQLQELVEWLARQGTESVAMESTSVYWIPLYDLLEARGIEAVLVNARQMHNVPGRKTDFHDCQWIQLLHSCGLLRGSFRPSVVVTAMRAIHRQFANLVEERSRCVQWMQKALDQMNVQVHKAVTDLTGTTGMAIVRAIVAGERDPVRLSALRQNTCQKSAEEIARCLTGTWRDEHLFNLSSALQLYDAIEKMIASYESRLLKAMTALEPDQRKDSPVPVHPNPTKEKAIKARGDQATRTALWRFAGIDLTRIDGIGVGTTKIILTEVGLNLAAFPSEDNFVSWLRLCPRSPMSGGKTLKKKRNSLGANRIAASLRMAALGLRNTKSALGAAYRRIARHKGADVAVFAMARRLAQLVYRMLRYGQDYIDIGETAYESRFQARRLAGLRETARSLGYSLTPQPTAPAASAG

SEQ ID NO: 148424 - protein, 386 aa, unidentified
MKTVAGLDVHKDSVYLCILRENGEKIERVYGVLTPQLDSMRDFMAENEVSEVAMESTSVYWIPIWRVLVDSFELKLVNPYFIKQLPGRKSDVKDAQWIAECVMKELIRGSFIPPPLIQQLRLYYRRIFELNAELVRKYSKIDAILQRCNIRLSNYVSNTDCKSYKNVVKRISEGVTSPQELLMLVHKRIINKHGEDTILAALTGVVSEAEIDMLAQYVAESALLEDNKNKCIEKMREICNREFEEQMKNLQTIPGVSERSALTVLAEIGPDVNAFPSAKHLVSWCGFNPRNDESNKKIKSNKITHGNRFIRIASVQCAWAASRTKDCYFSKFYAFHTQVRKKFKLKVVVAVARKILVCIWHILKFNVSYKDFEPQKSVAKDCTQLA

SEQ ID NO: 148425 - protein, 346 aa, unidentified
MRQSNTIGVDLAKNVIQVSVVTPSNKELSNKELSRLKFAEFLGRQKPGLVAFEACATAHHWARIAAKCGHQVKIIPAIAVAPFRQGHKTDKNDALVVAEAANRPNIKVAPMKSIEQQAMQSIQRSRELVIQERTALSNHIRGLLLEFGIVIPKGLVYLRKHLPLILEDAENGLPMSYRPTLHRMAMRFRALDQDLAFMDEQIKQVVRANDGCRRLLALEGIGPIGAVLLVATLGSGEAFKNGREFAAYLGLTPKQFSSGGKTNVIGISRRVANKRLRSVLIQGARSYVHAHKQATSGKDEWMLALIARGGTGKAAVALANKNVRTAWAMLTQGTEYNCKPCLANAA

SEQ ID NO: 148426 - protein, 408 aa, unidentified
MERTVARGAGIDVHQGTMVVTVRVPGEDGGRQVTTHTFGTMTTDLLGIRDWLQACGVTHVAMESTGIYWRPLYYVLEGQFTVLLVNMQHLKHVPGRKSDVRDSEWLAQLLEWGLLRSSLVPPQPIRDLRDLTRYRKRQIEDRAQAVNRLVRLLEDAGLKLASVATDVMGVSGRAMMAALLQGQTDPVALAELARGRLRRKLPALRQALQGRFRAHHAFLLTQILAKVDFLEEAIDQLTAQIDEHLRPFEADIARLMTIPGLARRNATTVFAETGGDMTRFPTAAHLCSWAAICPGQNESGGKRRSGKLRDGNRHLRGALIEAALAATRARGTALHARYYRIKRHRGHKKAAVATAHQILEISYHLLRDHVTYRELGADYFDRRDRDRTLRRNVKQLEALGFKVTLEAA

SEQ ID NO: 148427 - protein, 432 aa, unidentified
MKVNRTNQRLEEITVNTLVMGVDIAKTMQWARFVDYRGLEVGKAIYFSNDRKGFETIVAKINEICNSKILTNPFTKVIIGMEPTGHYWKPFANYLIKEGLRVVGVNPYHTKKAKELDDNSQTKSDRKDAITIARLVKDGRYFDPYMPQDIYAELRVLTNTRISIKKRSSAVKNTITAVLDEYFPEIVRAFKNPLKGKASRQILKSCPFPSFILSLGEEGVFAEIKKAVKKTVGMKKVRQLIEAAQDSIGVDYGLESAKLRMSCLIAELDMIESNLNEVETAMEKMLEGTGYAERLLGIKGIGVVSAAMFLGEVGDPLRFGSDRQIAKYAGYNLTEDSSGKNKSGTCISKRGRKQLRGILYKMAFTMVGQNAEMKELYNYLKTRKDNPLKKKQALVVVSKKIITVIYSLLKKQEEYKPELVLGPVRRELLLAA

SEQ ID NO: 148428 - protein, 369 aa, unidentified
MTSIIYVGLDVHTSNYTACCYSVSDDRAFAVVQMKPDYREILEYLNRINSQHGGKCKFVCGYEAGCLGYSLYHQLTRKGVDCVILAPSTMPITPGKKIKTDKRDAEKIARCLAYHSYSPVYIPDEEDNAVKEYIRMRDDGVASLKRVKQQIIALYTRNGKMFDGKNYWTKKHLDWLQGLEFAHPVLKETLQEYLVLYYTLSEKVDIYNTRIEELSHTQRYEEPVKKLCCLNGIGVHTAMCALVEVGDFHRFEKASNFASYLGLVPGEDSSSDRQRRTGITKAGNAHLRRLLIESAQCLSRGRIGQKSKALKARQKEVDPQIAAYSDRANERLKRKFHRIALHSKHNIAKTAAARELACFMWGMMTGNLA

SEQ ID NO: 148429 - protein, 314 aa, unidentified
MQDSPLFMGVDVSKAGLVIATSAAQRLRSIANDALSIGRWLRQVPSHALLAMESTGRYHALLAHLASQAGFKVYVLNARDVYFYARALGTRAKTDGVDALVIARYLAEHHARLHPWQAGSALEQQLQQLLSRRAQLGVSQARLKQLLADTELDARALLGAFESLLQALDAKVQALIAGDVPLSQGYQRLRTITGIRPQTAALLATLLSRFEFANADALVAYCGLDPRANDSGTKRGHRRLSKKGPPLLRRQIYMAGFAASSSKALKPLYRALRAKGFAATEAFIILGRKLLRVAFAIWKGTASFDPARLLPTTA

SEQ ID NO: 148430 - protein, 403 aa, unidentified
MNAVGIDVSKGKSTVTILQPRDKVLLKPCDFIHTKSSIKTLIDTIKGLEGETKACMEHTGRYYEPMATWLSDAGIFVSAVNPMLIKEFGDDSLRTPKTDKADSKKIARYTLDRWNKLKAYGNVDKIRNQLKTMNRQFGFCMGQRTAMKNNLIALIDQTYPGSNAYFDSPAKSDGHQKWVDFARTYWHVDCVRNKSLNAFKDHYKNWCGQKGYNYSVQKAEQIYDASKDIIAVFPKDDITKLLILQAVDMLNATSSAVERLRVEMNNLASKLPEYQVVMAMDGVGATLGPQLIAEIGDVTRFSKRGALTAYAGVDPGKNESGSYAQKSVPISKKGSPYLRKTLYQIMEGLIQRSPDENAVYNFIARKRAQGKPYYVYMTAGANKFLRIYYGRVKQYLLSLSTNN

SEQ ID NO: 148431 - protein, 430 aa, unidentified
MSDQHLLISGTDDMNAEKEIVCGADIHRDFLVATMISRSGLKLQEQFGMDQDGLLAFRSWILDHRCRRVAVESTGNYWYPIFCTLEGHVEFILANAFQIRNIEGKKTDRLDSERIAIYCLNDLIKPSRIYPKDYRELRSITRSREALVNARSKLKNQIHQLLAVCCIKLSSVISDSFGKSGRYIVERLLEGKTIEQIISGIPSKRVRKKADELRKAIRNGLDPVQVLLIKTNLDAIDYLSEKIKLLDAEIAIKVKPFEEDLNIILSMPGIGLISAATILAEMGDYRDFQNADKLAMYFGIVPAVYQSAGKLRTGKITKRGSKHMRRILVQVAKAISKTKKSSKLKRFFLRVLSRSGKKNVAAIALARKVLCIIYHLLMKREDYQEPEVKKKKPKIPNCASPISGMDIDEMIKTISQAGYLVKKGLKEGCG

SEQ ID NO: 148432 - protein, 370 aa, unidentified
MKKNNTCRQSSKRRGSTRTGRLTIGMDLGDKTSRYCALDRNGEVVRERCVGTTKKAMTQVFGAMPRCLVAMEVGTHSPWVSRLLGRLGHEVIVANARQVKLISASSRKDDRLDAQTLGRLARVDPQLLRPIRHRSEKAQGHLMTIRVRAGLVDARTSLVNAARGMAKAVGERLPACDTDQMGVEKMQSLPPELQETLQPLLQSVESLTEKIKACDVKIEQIARSEYPETELLQQVSGVGTLIALTFILTVEDRERFQKSRDVGCYVGLRPKRSESGKSQPQLRITKEGDIYLRKMLVQGAHYIMGYRGPDTDLKRWGVKLSARGGKNAKKRAIVAVARKLGILLHRLWVTGEVYEPLRNSKQGQPVGTAA

SEQ ID NO: 148433 - protein, 415 aa, unidentified
MEIVYPRVAGIDVGKKIVAVAVRTPGDRPGQRHQQLRKFKTFYPVLREMVGWLVAQGVTQVAMEATGVYWKPVFHALCEAEQLEVLLVNARHVKNVPGRKTDAKDAEWLAELCEVGLLRGSFIPPAEIAAVRELTRYRKKLTQARTSELQRLCKVLEDGGVKLDSVASSITTVSARAMVEALIAGERDARVLADLARGVMRKKIPDLAMALQGRFGAHHALLARMHLEHVDQLSGMIQRLDGEIDQVVAPFAEQVGLLRTIPGIGERTAQVLIGEIGVDMSRFPTADHLASWAGLCPGNNESAGKHHRGKTRKGNREVREALVEAAWAAGRTGTYLGARFRRLHRRFGKQGGSKAAVAIAHNLLVIVWFVLHDGAGYQDLGADWFTRHDNPDAKRRRLIRELQTLGYTVDLTPAA

SEQ ID NO: 148434 - protein, 345 aa, unidentified
MTESKIVAFDLAKRIVQACVIDGTGAVIAEERMGPERVLSFTARHPHATVALEACGGAHHWGRALERQGHRVLLLPPQRVKSYGDPACKDDRRDARAIAEAASRSYLRPVPVKSEGQQALQSLDRVAALLARQRTQTVNALHGHLSEFGITLPKGPHLLKRRFTELEASPRWRELPEELRAAMGELFAAFLALEDRLSVLKARLAKGAKQSKLGRLLLEIPGIGPMTAVSLEAAIGDDPGRFSSGRQFAAWLGLTPRVSASGERRQLARITKRGSARLRSLLVVCAQAMLRQYRQGRHGDPLACWARHLLARKRWNVAVVALANKLARIVWKVASSGAAYQARTA

SEQ ID NO: 148435 - protein, 385 aa, unidentified
MGNHTFIARDYDVFAGLDVDKRSSSVTFTDHQGVVKSLRMPYRVEQLVNYVRKHFAEQRVAFVYEAGPTGYGLYDGLVAQEYRCLIASPSMIPKAPGQRVKTNRLDSRGLAESLRGGQLKSIHVPSAVYRELRHLTQLRDTFVSEVVAMKLRIKSLLLLEGIEFPPAPAGSQWSYGVKKTLRALACSPTVRFKLEQLLDSLAFHEQQVLKTTKEIRRFCQRAPELAQCIQYLMTIPGIGWIVASQVLARIGDWRELKNVRQLAGFLGLVPTEHSTGDRTERGSITHTGDGRLRSKLIQAAWSAIRQDDELREFFRSICRTHPRLLASRVAIVAVARKLSGRIAVVLRQQRPYEGRAKVHSAPLTQEETVPQGTTRRLREPGEKTS

SEQ ID NO: 148436 - protein, 428 aa, unidentified
MQMWCGIDWAERHHDVAVIDDTGQLVAKTRIGDDAVGFRQLLDLFATHDDRCVEPIPVAIETAKGLLPAALRAAGFELFPINPLAVSRYRDRYSPSRAKSDPGDAFVLANILRTDRPNHRPLPEDSELAQSIRVLARAQQDAVWDWQQIANKLRSLLREYYPSYLGCFEDLTSMGARAALRLAPTPAAAAQLRRTSLAAALHRGGRTRGIDAEAARIVSALRAAQLRQPPAVEAAMGHQARAYLRALDTAVGNVEALEAALADAFDQHPDKPILTSFPGLGPVLAARVLGEIGDDRGRFTSARGLKAFAGTAPITRASGLKTSITMRVVRNKRLGHAAYLWALPLLAHSTEARAHYDRRRARGDSYSAAARNLANRHLGMLYHCLQTGQLYDPAKAFPPTQHQAAATSCKPRAGHACQETEAPQPIRA

SEQ ID NO: 148437 - protein, 316 aa, unidentified
MEQPPTGTPVFVGIDVSKDRLDVRLRPSGEAFAVPRDAPGLDRLAAELRGLAPALVVLEATGGFETTVAAALAGAGLPLAVVNPRQIRDFARATGRLAKTDRLDAEAIALFAERVRPEPRPVPDADAQALAELVARRRQVVEMIGMEQNRRRQARAPKVARTIAATLKVLEAQLADLDRDIGDTVRGSPAWRAADDLLQSVPGIGAVASRTLIAEMPELGRLDRREAAALVGIAPVNRDSGAMRGHRAIAGGRTAVRNVLFMATLSAIRWNPPIKAHYRQLTARGRPKMVAVVACMRRLLGMLNAIIRTASPWRAA

SEQ ID NO: 148438 - protein, 420 aa, unidentified
MTSQNSIPADAVLVAIDIAKVRNEVLIEAPGHKRRRRLSVLNTRAEHDHLIEILQSYDRPVVCAFEATGNYHRPIAWRLVEAGFETRLVSSLALARTREALHNGWDKNDPKDAQVILHMLRIHSTQVFHDPLRAGINDVQELSKTHEAIANAKTEIQHRILTHYLPLYFPEIERFRGNSRSDWFFAFLDAFPTPSSITILTKEKFVEAAWDVVGRKVSKSQILMDIYETARTSIGLPLPLDAPAIRMFRMVVAEARSLIRQRNEIEAQADELLRHSRDYQILRQIPGIGPINALTIIAEAGELRRFHHHRQFLKFCGLDLSTQQSGQYRGQTRLSKFGNARLRRTLWIAGQVAIRQRENGFRHKFERYIARDRDNPDLRRKAMTAITAKMARVVHAVIKSGSDYRPFVEGRVPGGRTSVS

SEQ ID NO: 148439 - protein, 356 aa, unidentified
MIIVGADVHKRSHTFVAVDTAGRQLGTVTVPATTTGHQTALRWAHATLGTDLVWAIEDCRNMSALLERDLLTANQKVVRVAPHLMAEHRKTGRQPGKSDPIDALAVARAAAREPNLPIASHDEVSYTVKALTDYRESLVHERTSKINRVLWRVHAIDPEHEVKKGGLNRTKHQKLLAAWLQTCDRGAVDVLLAIKEVAAIAALTVEINEVYKQLSALVAVAVPSLVALPGCGILSAAKLLGESADISRFGTEAQFARHAGIAPVPVWSGKSAGKHRLTRSGNRQLNAAVHRIALTQSRMPDSLGHAYYAKKRAEGKKSREAMRCLKRRLVRTIFHRLVTDHAARSHTEILVPGAAA

SEQ ID NO: 148440 - protein, 414 aa, unidentified
MSQRLIVGVDPHRKNNVMQLMDSQGQVVGSPLRVANNRPGTVSFVEHLVEQMEQGDYELIQIASEATSWYWFHFFQTLSQDPLLNQWPVELYLFNPRLTAKFKQSYGEEDKTDLIDAFVVADRFRFGRDLPVPFQYEETYLPLRFLTRYYFHVTHSLAREKAYALALLYLKASEYTHPDQRPFKDIFGATSRAVLQEFASIEEIAAMDFTDLVEFIDLKGKRRFPDPAENARKLLQVVEDSYHLPEAFQDPLNTILTLSFKHISGLQGYQKRLKTAIADQLEPIPHTLQTIPGIGPVFAAGLISEIGPLARFEFNQAKVAKFAGLVWRKSQSDEFQAEHTPLIRNCNRYLRYYFCQAANAVRMRDVEYQAYYDRKYHEVRKHQHKRAIVLTARKLVRLVVRLLTTNQPYRPRRR

SEQ ID NO: 148441 - protein, 431 aa, unidentified
MPLGRLKIVYPICCGMDVHRDFVMACIASTNERGVTEYQTRRFSTYTGGLRDCAAWLEANQCNDVCMESTGKYWFPVHNILEKTCRVVVTHPKFVKAIKGKKTDKKDAMWIADLFKHDVVSSSFIPPERIRQLRDLCRYWMKLTWNASGEKNRAHNCLTVSNLKLDSVFSNVFGKSASAIIDFMLEHPGEKFDVAPFVHGTCKSSTEEIQAAVDGVFSPWQAEKLKIIRAHMADIGKHKEMVENLIIQLAEPYKRQVELVLTVPGISDPMTAIRIIAEIGADMTQFDSSKHLCSWAGLTPQNHESAGKKKTTRIGKAGQYIKPLLIECSIGATNPRSKNHPEMVRKYQQLRKRRGAKKARVAIARRLLTAIYQMLLKDEPYQPYVAPAKEAIPKQRVMTAEDALAMLRRKGYILVDAQGAVIEGNLLPAPA

SEQ ID NO: 148442 - protein, 339 aa, unidentified
MIMQNYVGCDISKAWLDFFDEASGQYHRIDNQADAIAAYVAGLHPSRDFVVMEATGVHDRLLRHVLAKAGVPFSRHNPAHTHHYAKSTRRRAKTDRLDARMLSDYGRRYHPEAEPAPREEGEHLQSLARLRDQMVEIRATLKKQRSEAFGAIVIAEIEELIATFNVRIKGIEGQIAQAIAQAEDMARDNALMISVPGVSKITSFSLLAHLPELGQRSPKSIAALAGLAPFDNKRASSIAGARSRVVDHAYVAHSTWQRSAPSGLVSASELSTPPSQPAQVPRNSPSSPSQESFSSSSTPSFAIKKHSHEHSCHAVILIEGCSDTELCSVFNALTSRHGS

SEQ ID NO: 148443 - protein, 317 aa, unidentified
MSKTSTTAAGIDIAKEHLDIAVHGCGQNWRVANAPEGFADLVRLMRAHQVGRIGLEATGGYERDVVAHLRAEGFTVIVLQPRQVRAYAQLTLRRAKTDRIDATLIAALTADHAIVREAPDPRLAALAERLTWLEQIEEDIARIKVRLEHIRDSETRRISQADLARLTQRRANTIAKLLIALRRHDDLATRLKLVLSVAGIGPRTAIALLIRMPELGRLSRGEAAALAGLAPFNNDSGKRGRQRSIAGGRTRLRTSLYAAALPAAFRWNEALKRLYTRLKAAGKPHKLALVACARKLLAYANTVLARGTPWLSATTNA

SEQ ID NO: 148444 - protein, 340 aa, unidentified
MRVLYGGFDLHGNSNYLGIMDGEGKRVFRERLLNDLPWIREVLVPFKEELVGIAVESTYNWYWLVDGLMGEGYRVHLANPAAIQQYSGLKHADDKHDAFWLAEMLRLGILPEGYIYPKEQRPVRDLLRKRGHLVRIRSSLILSLQNILSRNLGRTVSVNDVKSVREDRIELLLERNEDLALAGRVSKEAIDHLTGQILKIEWAVQKKIRLREEYRYLLRLPGVGKILALTIMLETGPISRFETVGEYASYCRKVPSQWISNGKRKGSGNRKNGNKYLSWAYAEASEFARRLHPEPRAFYNRKMQKTNAAVAHSALSNKLARAAYYIMRDQVTFNAEKLFG

SEQ ID NO: 148445 - protein, 401 aa, unidentified
MTRLPVEEFAACVGIDWADATHHVCLQAAGSLKREFSILAHQPDTIDEWVSTLRTRFTAQPMAICLELTKGPIVSTRRKDDCLVLFPVNPLTLARDREAFTPSQAKDDPTDAALLLELLLKHRDKLSPLQPQSPTMRTLEQLVEHRRRLVGDKVRITNRLTSTLKHDFPHVLQWFHDKETTIFCAFLTPWPPRKAVQLARRSTLERFFRDHHVRYTDVITHRLDAIKSATPLTTDDGIITPHALLVQALVAQLRVTLHAIAAFDTAMAHRAQRHPDFPLFAALPGAGAVVAPRLLVAFGEQRDRDASADELQRYAGMAPVTERRGHKAWVHWRLQCPKFLRQTFVEWAADSTRHAFWAHAYDQQQRDKGAAHQAAVRALAFTWIRMLFRCWQHRTRDEEAI

SEQ ID NO: 148446 - protein, 314 aa, unidentified
MTEPAENFIGIDVSKAHLDIALAAPARTWQVENSESGIAALIPQLQALQPSLVVLEASGGFEVVLVAALAAAHLPVVVTNPRRVRNFARATGRLAKTDTLDAQLLAHFAAALHPEIRPLPTADQEHLSALLTRRRQIVDMLTMEQNRLQTVRAPLRHDILEHLQWLREKLAKLDAEIDDFIHGSPLWSDKDALLQSVPGIGPVTASTIVGLLPELGQLNRQEIAALVGLAPIAKESGKKHGPRRIYGGRAAVRSVLYMATLVATKHNPVIKQFYQHLLMQGKQKKVALTACMRKLLVILNAMLRSHQAWQALPR

SEQ ID NO: 148447 - protein, 439 aa, unidentified
MKKRRERVCGADVHKDLIVATITGDEVPPIRENFGTTKSELKRFRNWLISNKCEQVAFEATGVYWIPIYDALSRTIDTIVANPLQIKTIPNDKSDSKDSKRIATLCLNNQIKRSRVFSDEDRDLRVLTRARTGYVKIRTQFRNRIHKYLSSSGIKLSSSMDDIFCKSGTHILKGLAEDKSIEEILKGIPSGKIRKKQELIREALANDLDDTSRMLVRDALEILDDIESKIEKISHEVLKKIQQRSKDLAIVMSIPGIGFVSGSVILSEIGNYRDFRTPEQLAKWGGLNPGENESAGKKRKCGITKRGSKHIRVVLVQAAQTISNMKNTRLSRFFKRLSKKKEHNVAIIAVARKLICLIHHLLINQELYQEVDCRKRRTSRDKSCQEPSFQEEHLTDKVAAIVDAFYGLSDSNRKKALMRALGDFSVNKPDQKRSSDGGG

SEQ ID NO: 148448 - protein, 412 aa, unidentified
MRIVYKRCCGLDVHKKVIVACLLLLESDGELRREIRKFGTMTEDLLALLDWLQQAGCTHVAMESTGVYWKPIYNILEGHLEVVVVNAQHLKGVPGRKTDVLDAEWLAECYQLGLLKASFIPPAPVRELRDLTRYRTSLIRERARTANRLQKVLEDANIKLAGVVTDIQGVSAWAMLQAIVAGTTDPVALADLAKGLLRKKRPQLLAALAGRVKPHHRFLIAEHLSQIEYVEEAIQRISVEVAERLRPFELEVKRLDSIPGISRQTAEVLLAEMVWDMSRFPTDKNLASWAGMCPGNNESAGKRGNGKTRKGSRWLRHALIEAAHGAARTKNKYLKSQYHRVAAHRGKKKALVAVGHSILIISYHLLTRGQEYTDLGANYFDERDRNAVQRRCVRRLQKLGFQVALQPTAVAA

SEQ ID NO: 148449 - protein, 416 aa, unidentified
MSTEISLPTERYLGIDLHKHSLVIGGVHAKQAIVLPPRRLDLDDWPKWAKTHLTKSDVVVVEATTNAWDFYDVTNPCVQRVVVANAAKIALITKTRVKTDQKDVMVLARLLAAGLIPEVWVPPVEVRELRSLISHRRRVIDTRTSLKNRLQSVLHRHHLVLPSGDPFAAIHRSWWDTLNVSPTERLHLKHELTSVAQLDSQVAEIEVELQRLSCVAPWSERVTYLIQLPGVGLITAMTVLSAIGDITRFEHAKELVGYAGLGASVPDSGQTHHTGRITKQGRKELRTVLVEAAWSAVEYSAFWKAEFERLGRRLDQMKAIVAIARKLLVVVWHVLTEQAADKHAEVKLLATKLMRWSWELTDAQRGGLSTRQFVRLRLMRLQLGENLTHFTYGGMPRRIASVEEVLALNPELRCVD

SEQ ID NO: 148450 - protein, 346 aa, unidentified
MKKEICAGIDLHSNNVMIGIVDESGRRLKHQKLGCDLEQIEGFLQPWKKRLRSVAVESTYNWYWLVDGLRSRGYPTHLANPARMEQYSGIKHADDKNDAFFLAELQRLNILPTGYIYDPALRPVRDLLRRRQSLVRQRTALLLSFKSLYARTTGEAMPLLKVKMMEPDEAKMLYQHPANCLIASVQKEHIDRLSESIGLIEKNALSCARELPCYENLLSLPGVGRILGMTIRLEVGQISRFKTPGHFASYCRTVDSRRLSNDKKKGENNRKCGNRYLAWAFVEAANFAKRHHDHCRQWFDRKAAKTGTIIATKALACKLAKAAWYLMSEGSDYDPKRMCPQLRMKG

SEQ ID NO: 148451 - protein, 339 aa, unidentified
MKYSGIDLHSNNCMVVVSDESDRVLVSRRVPNSVPLVLQTLEPHREELVGVVVEATFNWYWLVDGLQAAGYRVHLANAAAIKQYEGLKRTGDEADAAHLAHLLRLGLLPQGYICPKPLRAVRDLSRKRMQLVRSRTQHILSAENIQARESGCRMNVKQIKRLDTQGVEAAMPELLPEVQLALQANVAVIGELGKQIAKLEHCLRERVRPREEFQLLKTAPGIGETLATTIMLETGTVARFARVGNFSSYCRCVDSERVSNGKKKGQGNVKNGNAYLAWAFIEAANYARRYCPEAKRFFERKKARTNNIVATKALAHKLARACYHMLREHKPFELKRCFG

SEQ ID NO: 148452 - protein, 402 aa, unidentified
MNCVGIDISKGKSMIAVMRPFGEVVVSPFEVLHTDSELSELARLLKSLDGETRVVMESTGNYHAPVAWLLHDAGLYVSVVNAMLVHDYGNNSLRRAKTDKKDAVKLANYGLDHWLTLPRYVPEEDTRLMLKSCYRQYQQYSKVRTMLKNNLISLLDTAFPDANRLFTSPPRADGSEKWVDFVAAFWHCECVCGLSEKAFTAKYQKWCKKHGYNFSEDKALDIYASACGHFGVMPKTDTAKLLVEQAISQLRATSAALAALKQEMQSLAASLPEYPVVMEMFGVGPALGPQLMAEIGDVRRFHSKKALVAFAGIDAPPYQSGQMDIRSRSISKRGSASLRRTLFLVMGVLLQCAPMDEPVYQFMNKKRSEGKPYRVYMMASANKFLRIYYASVKAYLDSLEHD

SEQ ID NO: 148453 - protein, 355 aa, unidentified
MKGELQKRGVLGRGKEVFIGVDVHKESWHVTARAEGEEVFHGGIPSQYHALQRLVDHFKDCKVKVAYEAGPCGFWLYDKLTEDGIEAIVVPPSLIPIESGNKVKTDKRDSRKLAKLLENNMLKRVYVLKEEDRVDRELLRTRRQIVEHRNDVARQIKSKLLFYGIRSPFAPRYGWGRNYLQWLKGLELPREGLRACFESLIELYEYLSDQLMKMNQRVKELSQSLKYRQRLKLLCSVPGIGTLIGMEILVELQEVERFKRAEELASYIGLTPSEFSTGQYVRQGRITRCGNKRVRTCLVESSWILITKDPLMRLKYLRLKSMKGAKRAIIAIARKLIIRIRRILLNNEPYVVGGC

SEQ ID NO: 148454 - protein, 344 aa, unidentified
MDHFAGLDVSVKETSICIVDDTGKIVREVKAASEPQALLKVLGNPTYRFKRIGLEAGPLSQWLFSGLAEAGLPVVCVETRHMQAVLKAQINKTDRNDARGIAQMMRAGLYRPVHVKTLRSQKLRMLLTHRKLLQSKAIAIENDLRGTLRNFGLKVGMVGKMRFEARIKELVESLPDLAELVEPLLIVRRTLREQIVILHRRLLAIVRDDEVCQRLMTTPGVGPVVALTYRATVDVPARFRKSKAVGAVFGLTCARYQSGEIDWSGRISRCGDEMMRVMLYEAAQSMMRSKKWSWLKAWAMQIARRRGMKKAIVALARRLAVIMHRIWVDGTEFRWTREQAAAAA

SEQ ID NO: 148455 - protein, 384 aa, unidentified
MEVLYPHCAGLDVHKDTVVACVRHMANGLVTREVRTFKTTTKELLALSDWLAGEGCTQVAMEATGVYWRPVWHILSDGDVTLVLANAAHVKNVPGRKTDVNDATWLADLLAHGLIRGSFVPDAQTQEMRTLLRTRKQLVRECSRHIQRLQKTLEDANIKLDSVITDIMGLSGRKMVEALIAGESDPGRLAQLAHPRLKATPEALGEALRGRVTRHHRFLLRLHLQQIDAINAAIKQIDREVDAQVEPFRAAIALLTTIPGIDALSARVIVAEIGRDMSRFPTAAHLISWAGLCPRSDESAGKRRSTRMRKGAPWLKTTLVQCAKAAAPQEGQLPASTVPSPARPPRRQKSDRRARRLDPDHRLPHAHQRRALSRSRSGSLRSSG

SEQ ID NO: 148456 - protein, 417 aa, unidentified
MKVVYPVCCGVDVHKSFLVATIITTTKGIQPHYKKKRFSTYNGQLRDLAAWLKENECTELCMESTGKYWVPVYNILEAAGIHITVANPKWVKAVKGNKDDVKDSKWIGELFRLGLVPGSFIPEKPIRILREFTRYRTKLKSIASSEKNRFQNAFTVCNVALDSVVNDMFGVSATKITDYLMTTSSYDPAYCASLIHYKMKEKTEAVLASIDGYLIEPEQKFRMKIIRKHLDQIDALIERLDKKIDSMVRKYDVAIALLTSVPGIQRRTAITILSEIGTDMKQFSSSKKLCNWAGLTPGNNESAGKKKSVKITKAGAYLKPALVEAAHAAVKCTEQPYYKRKFERISKRRGKKRAYIAIARMILTAVYHILSTGVMWSPTDLERTENVIVNMEEISVKRAITLLERKGYSVSLHENTA

SEQ ID NO: 148457 - protein, 313 aa, unidentified
MIHDLPFVGIDVCKTRFDVFVHPAGTRFSCPASQDGIGALVQRLSGLGRCAVAVEASGGYERKLIAPLHAAGMTVYVVAPARVRQLAGALGQLAKTDAIDAAMIARYLAVAQENLTPWRPDAARQRLSAVLAHRRRLVAERSGLASLLDTEDEPLVRSLVQERLDAIARDIEQLDRAVRALLVEHTHLRQRYDRLRDVKGVGPVLASTLLADLPELGFVSAKAIAALVGVAPHARQSGASNRSGRCSGGRKHLRDIAYMAVLSAIKAKDPVLAGFYQRLRGRGKPFKLAMVATIRKLMTILNAIARSQTALSQ

SEQ ID NO: 148458 - protein, 381 aa, unidentified
MSYHRPSIFWVGLDVHKESVTAAVFRNRDPEPLRVDRLPYDLKKIRRWFERLARDGEVRACYEASGAGYVLQRSLTAWGVACELAAPSLIPRRPGEHRKTDRRDAIKLARDFRDDRLVLIYIPTEADEQVRDLVRCRETFQREIIKSRHYILKFMRRRGFVFREGTNWTVRHLNWIRQVLQPGTLAEADRTVLGEYLALLEYKLQSRDELDGRIEELALTPRFKPLVDRICCFRGFKTQAAMVLATELGDVRRFESPRQLMAYLGLVPGEDSSGERRRMGPITKAGNTRVRHVLIQAAWHYRRRPVVGAPLRRRQRGQDPAVIAHAWKCQHRLYKLFHRLAERRPSQVAATAVAREMVGFLWAVLRDVDVARLQEDAREAA

SEQ ID NO: 148459 - protein, 341 aa, unidentified
MKKFIRIGVDLAKNYFQVHALVSDVGPRVTRKLRRSKMHEFFSQIEPSLIGMEACGSAHYWARELKAMGHEVLLMPPAYTKPYVKRGKNDAVDADACCEAMSRPGMRFVPVKSAEQQATLMLHKTRELLVKQRTMSVNALRGHLSEFGIIAAKGIGRVDELLDLVESDTTLPNAARASAKVLAHALEGLDKAIDDLEDEITNAQAQNEMTRLLYKVPGIGKIIASVIAASVPDPSVFKSGRDFTAWLGLTPRQNSSGGKQALGAITKQGNRYIRKLLVLGATSLLNVVGKRKGALRDWIVGLLAKKPARLVTVALANKLARILWAMMKTGESFRTEMFAKA

SEQ ID NO: 148460 - protein, 366 aa, unidentified
MKKRITAVQGIKDRGEVVCGLDLGDRISCACLISKATGEGVAERRVATTPVALRAYFEQVPPMRIALEVGTHSPWVSRLLSELGHEVLVANARKVRLISQNRRKDDRIDAEYLARLARLDPKLLAPIRHRGPQAQVDLAVLRSRNALVKARAGLINHVRGVVKATGHRLPGASAESFAATARTALPPELCQALAAVLDTIAGLSATLRAYEEQLSALATNAYPETALLRQVHGVGLLTSLAFVLTIEDAARFRTSRSVGAYFGLVRAQQRSGDSDPELHITKEGDPFMRKLLVGCAHHILGPFGQDCDLRRYGEALAAGGSRKAKKRAVVAVARKLAVLLHRLWAGHATYDPFYNLHRADRTQHVA

SEQ ID NO: 148461 - protein, 423 aa, unidentified
MEVIHPRCAGLDVHKDTVVACVRLAVGDKVTREVRTFETVTSGLLNLLAWLTEKGCTHVGMEATGVYWKPVWNILSDGSFELILANAAHIKNVPGRKTDVSDAAWIADLLAHGLIRSSFVPEQEIQELRDLLRTRKQLTRGQTRHVQRLQKTLEAANIKIDSAITDIVGKTGRAIIQALMAGETNPAKLAALADPRIKASPEQLREALRGRVTDHHRFLLHIHLQHIDFADAVIQDIDQRVAALIARMDQEVTAGQASFQNLVLLLMTIPGIGQLAAWVILSEIGCDMSRFPTAGHLLSWAGFCPRNDESAGKRRSTRLRKGDPWLKTLLVQCALAASRKKDSYYRAQFYRLRGRHGPKKAICAVAASMLTAIYHMLKDGTQHQDLGADHFDRRSKDVKVKRLVAQLTKLGFDAKLTALAEAA

SEQ ID NO: 148462 - protein, 385 aa, unidentified
MQVMIEGQSHFQPFGLPYWGFTDLNKGVGSMTASYDYHIGVDYHKSYSHLVVQDSSGKTLRSGRVKNDRQSLGGFLERYRENSHAVVEATRNWMVMYDWLDDICDDVVLAHPLKVKAIADAKIKTDKIDATVLAHLLRADLVPQAWAPSERARELRVALRERMFYVRLRTMTKNRIVTVFDRYPEQTAQLKKLGDLFGKAGRVQLAEVNVSEIDRVQINRGLAFIGDIDGRIKQSEATIRTMTKANANVKLLKTIPGIGEFFARLIDAEIDDINRFRNPKKLAAYAGLVPSTYSSGGKTFHGKIIRQGNKWLRWAFVEAVTPAIVSDAQLRAQYEHLKVRGTNKARVAIARKLLTIAFQILRDQRAYEPRGASPTEGASMISRLS

SEQ ID NO: 148463 - protein, 370 aa, unidentified
MSVRRILAKTIDTDLEYEAIGIDLAKNCVSAALLTTDGEVVCIDRLDYSELEKSAQALSPTTFAMEPCTEMNYLVQKLEAWGHRCLVIGGKNVQNYVENHYSGQKTDLNDAQALAFLAQDKQLRTIKAKDIEQQKYASLTTLREQYIKQYRQTIVSLKGICQAWGLNISKGISGKAQLKDLIENHAAFPEELRESLVDMVTHAQTTQKVLNKITKTLEVLAKNDKVCQLIQTIPGLGTICSCRLRATIGDIKRFKNPKDFPAYYGLVPRSIATGHNEKKGKITHRGDRTMRSLMVQGAGCVIRLATCGKLKSKHLTKWILKKQKEKMPWGKLVCAVAAKLLRIVRAILISSKPYNPKIAGVAKCSLSKGS

SEQ ID NO: 148464 - protein, 403 aa, unidentified
MEGPLISLDVSKGKSNYRFFENGTDRKGKKGVIRHDIRGFDSIRDEAEKMEERLQIKPSVIFESTGVYSDVVEKYFTDKGFDVYVISPLLSASMRKEGVRPAKNDSLDTLSIAKVFYSRDDLRKCSENDKKAERLREMSYELDMMNRRIRPMKCQFLRLLDKVWPCLDEVSDYSSRFMPDFIIAFGHPENIKTVKGVLSVIRKSEMGTAGRKDKIAQDLFDYCHTHLSAVSKDSSYVELLKRMAIELKAMAKKKSELIDRMAEEARNKDEFVRLLTIPAVAKTTALKIMARVGDISRFRNAEALVAYCGLDPRVYQSGKMTGEHRTITKKGDCILRSTLFLAVKLMVMLYPDTKVARFVAAKAKNGLSYKQAVVAGSAKLARIIYSMLTHHENYVEFNADIVA

SEQ ID NO: 148465 - protein, 317 aa, unidentified
MSKLSTAEINVGIDVGKWQLDAYIHERDVHLTVDNTTEGIHTLLTRLNRYKLTRVVLEATGRYERRLVDAAFEKGIPIIIVNPLQVRRYAGAIGQLAKTDKIDAGVIAAYAAVIRPEVRPGTHKNVRAIKDLLARRRQLLTMRTMEKNRAHIMPRELRADIQRLIRHLDKQLEKLDKILGQKIEAEEQWRDKRAIMLSMPGIGPAVVNTLLGDLPELGQLTNKQIAALTGVAPYNRDSGSLRGKRRIRGGRHSVRTILFMAALTSVQHNPVIRRFYNHLVAQGKHKKVALTACIRKIVITLNAMVRDGNQWETNLAN

SEQ ID NO: 148466 - protein, 407 aa, unidentified
MDLMYPQCAGLDVHQQTVVACARLVTGVAITHDVRTFGTTTAELLALSDWLAAHGCTHVAMEATGVYWKPVWHVLEGNVTLVLAHALHVRTVPGRKSDVNDATWIADCLAHGLIRGSFVPPAPIQDLRDLTRTRKQLVRETTQHTLRIQKTLENANLKLTGLLSDILGVSGRAILQALIAGETDPERLAALARGRLKASPAQLRAALHGRITAHHRFLLQLHLAQIDALETAVREVEARLGEALAPFRTALDHLITMPGVSETVARVLVAEIGFDMTRFPTAGHLVSWAGLCPRLDESAGKRRSTRTRPSNPWLKTTLVQAAWAAARKKEGYLRAQFLRIKSRRGPKKAILAVAASMLTAAYYMLRDGVDYRDLGADHFDRRDKAKLAKRLVARLHDLGFTVELKAA

SEQ ID NO: 148467 - protein, 379 aa, unidentified
MVRLALLIGVIMRYNGDFNPINIEARRTMNKHIENRDIKVVAIDLAKNSFQLHGVDANGHKVMGKKLTRNKLKVFMVNLPPCLVVMESCSGAHYWGRLFQSYGHEVKLIAPQFVKPFVKSNKNDAADAQAIYEASQRPGMRFVAIKSDEQLDIQAIHRVRSQLVKARTAAVNQIRGLLLEHGIDIPKGRAHVLRKLPGILEDAENGLSGRFRSVVHDLQEELRHIDQRIQRYDTQIQQIVRDSDQARLVLSIPRIGPQTATALLSSIGDIGQFKNGRELAAFLGLVPRQHSTGGRPTLLGISKRGDVYLRTLLIHGARAVLRYVDNKPDHSSRWAKELMQRRGINIAAVAMANKMARTVYALLSKGERYNINHIAAKSV

SEQ ID NO: 148468 - protein, 269 aa, unidentified
MRALYAGFDLHGNSNYLGVIDGDGKRVFRKKLSNDLQWIREVVVPFKEELVGIVVESTYNWYWLVDGLMEGGYRVHLANPSAIQQYCGLKHSDDRHAAFWLAEMLRLGILPEGYIYPKEERPVRDLLRKRGHLVRLRSSLVISLQNILSRNLGRKVNVNDVKALREGRVTPFLESSEDLGLAGRVSKEAIDFLTHQIRRIEGVVERRIELREEYRYLLTLPGVGKILALTMMLETGPIGRFATVGDYVSYCRKVPSQWTSNESVEKVTF

SEQ ID NO: 148469 - protein, 362 aa, unidentified
MEQFIGCDAHKKYSVFVAVNERCEPSQEVRVGHDREQYRRYLEQLPAGSQIAVEASGHYYWIVDEMEAAGHHPRLTHPLEAKKRMGKTGKKTDKLDATGLGILLRNETLPEVWIPPAGLRDQRELLRLRMFLVQQRTRLKNRIQGALARYNIQLGAQDVFSVEGRQCLGTRLTEFPEHTRQSVELELVTVDFLEVQIEEVEKHLEEIMQVTAEADLLKTLPCVGRILSMVMTLEIGRVERFPSAAHLASYAGLVPRVHSSGGHTRLGQICGDVNHYLKWAFTEAGNLVVVHQKHLPGEHVVRLYQRVKRKRNYQKAVVAVARHLAEAAYWILKRQEVYRSPQAHPKAQAKGQSARALSSTHG

SEQ ID NO: 148470 - protein, 357 aa, unidentified
MRIIGCDLHTRQETIAMVDTETGEVVEKTLQHEGEKVREFYSALPRPVQVGIEATGSMLWFLNLMEELGIDSQVGHPAKIRAAEPRKQKHDRRDADLLLKLLMENRFPSIWMPSKELRDLRALLLHRHQWVRTRTRVQNALQAIALTNGLRRGKSLWSQEGQHAIASLPLGPHAAHRRTALQALYRELDADINALDKRVLEQALERPEARRLMTHPGVGPVTALATDVFLGDPVRFEDAKALASYVGMIPSEYSSAGRQRLGGLSKQGNPLLRFLWCEAAIHAVRRDPLLQRFYRRKLVQKGMGKARVAVARKLGIRLYIMLRDQIDYEEFCRRGQMRQKNGAARAGIPEVGYGPSL

SEQ ID NO: 148471 - protein, 405 aa, unidentified
MDVIIERACGLDVHKDNITACIMTSEGKEVQTFSTKTIFLLKLLDWIKENNCTHVAMESTSVYWKPIVNLLESEGIEFLVVNAQHMKALPGRKTDVKDAEWIAQLLRHGLLKASFIPNRNQRELRELVRYRRSIIEERARQLNRIQKVLEGANIKLGSVVSDIKGVSSLDMLRAISHGEDDPEKLANFARGTLKKKKEELELALRGYIQQHQRLMLKTILTHIDFLTNQIEMLDQEVANRVSSYKEDVERLDSIPGIATRMAEQILSEIGTDVGNQFPTAAHLCSWAALVPGHNESAGKRKSSKSKKGNKYLKSALTEAAQSVRGSKNYLGALYRRTAGRKGKSKAAIVVAHAMLRIAYYLLTRKEMYVDLGEDYFDKQRQESIVRHSVRRLENLGYSVSITEAS

SEQ ID NO: 148472 - protein, 421 aa, unidentified
MEVIASRCAGIDIGKETLKATVRVQGGRGRKTRREVRTFDTTTGRLLELRDWLVAEGVTLVGMESTGVFWKPVYYVLENVMECWLLNAQHLKKVPGRKSDVSDSEWIAELVAHGLVRPSFVPPPGIRRLRDLTRYRTALTQDRTREIQRLQNVLEDAGIKLDCVASDLMGKSARAMLAALIAGERDPRVLAELALGRMRPKVGALQEALVVRFDDHHARLCSKMLAHIDDLTATICELTGEVQSEIEPFQHSRKRLKAIPGVSDRLAENLIAETGGDMSRFPTPQQLASWAGMCPGNNESAGKHFSGRTRKGNRWLRGALGEAAAAAARTKGTYLSARYRRLASRRGKKRAMVAIGHDILVAAWYIMRDDVDYADLGADYFDTHAMDPDARQRASPSNSKRWAIGSPSSTSPELRLFSSEP

SEQ ID NO: 148473 - protein, 410 aa, unidentified
MRYYLGVDWADQTHAVWVVNESGTKTAARTVPHTAEGLSEWGRELDEWRAQGIELWAAIERREGRVVDVLLDHGVVVYPVNPKALDRARDRFRQSGAKSDPFDARVLADFLRTDHTHLQALQPSSEAAQELKLLTEDYQQQIRQQTRLVNQLTATLKAYYPRALEIAALPTPLAREFLQAYPTPEAAAALTERQWQRWARAHRLSETRTQALWDVLQQPQLPVPVHVLRAKARLMRSLVAQLTLVVAVVEEYREAIEDFFARMPAAQWARTLPIGKHGITAPTLWARLGDAPGRWESFRHLQAHAGAVPVTKRSGKQQRVIQFRFACDKALRYVIDHVAFLSLHSSVWARAYYDQQRTRGHSHRQALRALAAKWLKIIFVMWQHRVPYDEQYHLATMTRQQLRHGQKHIA

SEQ ID NO: 148474 - protein, 412 aa, unidentified
MKDLLEISCGLDVHKEKIVACILTGPLGKPTRSEIREFTTLIPDMIALRDWIVSQNCHHVAMESTGIYWMPIYEILEDAFSGDITLLVVNARHMKNVPGKKTDMRDSEWISTLLRAGLLNGSFIPEKRIREFRDLNRYRKSVIHDITSQKNRIEKFLQSSGFRLSSFISDIFGASGRNIILHLMEHGQIDKAALDSCLKTKTRNRIDEILMSVNGTLSEHQKAFLKILMTHYDSLKKHLTEIETSLEEDMAPFTLQVEQLNSIYGISTIASCAIIAEIGIDMEPFKTAEHICSWAGLCPGNNESAGKRKSASVTKGNPYIKSMLCEIAWVIAGKRNTYLSAWYWRIKQKKGAKKAIVALARKLLVIIYTMLKQGTLFDESCFETRRKNCEQKQLSRYIRELEKHGYHVEAQS

SEQ ID NO: 148475 - protein, 466 aa, unidentified
MAHVGGRLQAEFMARVRGRDLSRCLVVPVDVGKSMAMALVADHYGEVVVAPFEFALTETGFGTLATAIARAESIRGAEVLRVGVESAGHYHRTLVARLRSGGFEVVELNPAAVKEARSQQLLRRLKSDARDVGAMAELMIRGAGRVPAQRTDALATQAAWVAHRRRKVAARVALANQVIGQLDLVFAGLDGCFTDILGAKAGRLIVAEVCDPDRVRRLGVEGLRRFIARRGVALSRTKATEVVDAARDALRLPGPERAALARVLAADVALLYGLEAQITAAEAALGAVLGDTPAAILTTLPGVAVVRASNYGAGIGDPGRFANAAGAYRAAGLVPTMYQSAKRARPGQHISREGSVELRSAIIELGRGLAQHDGDFRSYRARLLGSNKSPSVAAVAVGHRAHRLAFAMLRTQTPYDPTLWAKSVAAGMTVMAKTTKAHQNDVTCPPPLLSIPEGGGLHNPARRVRG

SEQ ID NO: 148476 - protein, 385 aa, unidentified
MYYVGIDIAKDKHDCAIIDSEGNVLDSFTFGNNKIGFNAFSNSISKFLPLEITIGLESTGHYGFNLIDFIDSLQLPLIVLNPLSVNLYRKSLTLRKTKTDKIDCMVIAQMIRTGEFKPYTPVSYHLSELKALTRHRYRLIKEQSRLKISITRLIQILFPELPHHVWSIHQKSSYVLLSKYPSASLIADVHLTTLTTILSNASRGKYSKDKALEIRDAARNSIGSTRVSFQFELVQNIELIRKFKSEIKILDNEIKKLMLEIDSVILTIPGISYTLGSIIIAEIGDISRFNNSAQLLAFAGLEPGIHQSGGYTSDRQKMVKRGSRYLRYALLESARLIAMRDPVFKEYMKKKLSEGKHYNIAKSHVAKKLVRVIFKLLSTETKFNR

SEQ ID NO: 148477 - protein, 313 aa, unidentified
MAKSERFIGIDVSKATLDVHVLPEGQDFVFANDIDGIKAICRKLCKLRPHLIVLEATGGLQIPVASALGIEKHPVAVINPRQARDFARATGRLAKTDKIDAQVLALFGQQIRPEAKPLKDEQAQELSALMSRRKQLVGMLVMEKNRLSLAIGSIREDIVKNIEWLEERLDDINTRLGQAVRTSPVWREQDDLLRSVPGVGEVLSATLLADLPELGKLGRREIASLVGVAPINCDSGKHRGKRRVWGGRGNIRSVLYMAIMTAIRFNPVISKFYKRLIDAGKPHKVAATASMRKLLTILNTMVRTGQPWAYSPN

SEQ ID NO: 148478 - protein, 412 aa, unidentified
MKLFVGIDVSLKDFKARIFDVEGEEIAKRLRAKNDDPGAESFVKYLVEICSANDVDSLRIGLEATSVYGWHLQMHLAGEPALVPFHPQVYVFNPKVVANFRKQYVDIPKDDWFDCLVIADRLRFGRLPESCQVDFRYLPLQRLTRFRHHLIQTITREKNYFLTNLFFKFNTICQNKVLSDTFGAASEAILTEFLSPEEIAVRPLDELIDILMEKGKSHFSDPEATATALKHAASCAYRLHGSLLEPVNLILATSLQTIRTLEQQVKGIDKAIEKELSHFKNTLQSMPGIGPVCAAGLIAEIGDIHRFDNEAALAKYAGLTWRKHQSGEFEADDTPLTKTGNAYLRSYFVLAANSVRIRDPKFAEFYHRKFKESTTHHHRRALVLTARKLVRVVDALLRSNQLYVPQGQRRVI

SEQ ID NO: 148479 - protein, 427 aa, unidentified
MSVTQNEKIRQVTDTTMVIGVDIASELHWARAFDWRGLELGKAVKFENSAEGFNFFLRWVSELTVEQKKDSVMVGLEPTGHYWFTLAAHLQGGDFKLVLVNPYHVKRSKELDDGHPSKSDKKDPKTIAKLVLEGRYVYPYIPQGLYAELRVAMNCRWRIRKEFASIQNQIQRWLKIYFPEHSKVFGRFTGAGSMALLHSAPFPSDLISLGVEGISGIWKQMKLRGIGRKRAQRIYEAAQTSIGCTTGMEASRMELQILLEDYDAKLQQYERVMQVVENLCSQIPAVAELLKIQGLGRVTVAGLFAEIGDIRRFESPRQIQKLAGLAITENSSGKHKGPTEISRRGRSRLRAILFRAAIPLLAKNREFQLLHRYYTTRQNNPLQKIQSVIAICCKLLRVFYALATKDCAYSPEKMLADIQRNQPLKAA

SEQ ID NO: 148480 - protein, 371 aa, unidentified
MEVLHAHCAGLDVHKDSVVACVRHMADSKVTTVVKTFKTTTQELMALSNWLSDQGATHIAMEATGVYWKPVWHILSDGEFELILANAAHVKNVPGRKTDVNDATWLADLMAHGLIRASFVPDEPTQQMRDLLRTRKQMVRERSSHVQRIQKTLEDANIKLDSVVTDILGLSGRRIIEALIAGQTMPQALASLAHRRIHASTDELEASLRGRVTKHHRFLLKLHLDQIDAFDAAIASIDEEVDTNVEPFRAAIELLSTIPGISALSAQVLVSEIGIDMSRFPTAGHLISWAGLCPKNDESAGKRRSNRMKKGAPWLKTTLIQCAWAASRKKNSYLQTQYLRIRSKRGAKKAIGAVAASMLTAAYHMLKDGTF

SEQ ID NO: 148481 - protein, 312 aa, unidentified
MQSVSNSVGIDIAKDRLDLGFGQEKVKTFSNDFKGVNALIQALPENAEVHYEPSGGYERLLVQALQERGIPAFAHNPRRVRRMADAMGISAKTDALDAKVLAQLKGLGKPTRPKSAKKTQICDLSRTIQSLKNDRTRNLKRLKTPELAKQVQLALKEVIAALEKQIQVLENAFVQSLEQTQHKEDYRRAQTVPSIGKQTARALVSELPEDYQRMSGPQVSSYTGVAPFDDSSGKRNGPRHIRHGNTHLKSAMYMAAISCIRFQPWAKQLYTRLRAQGKPHEVAIVAVMRRLLLRVFAVLKRGSDWETEPPKR

SEQ ID NO: 148482 - protein, 411 aa, unidentified
MGRVIGLDISKRTAEVAILLPGTQELRRHRFTADAPSIVAFAKHLTGADRVALESCTNAVAFHRLLCHHAGEVVVSNPLKTRVIAEAKVKTDKVDAEILARLLAADFLPPVWVPDAATDRLRHLVFHRQGLVTQRTQAKNRIHAILHRNLLAPDLSDLFGKAGRHLLAHIALPIDERALLDADLRILAFFDGEIQAMDQQLAHTALDDPDIRRLLTVPGLAVTSAVALKASIGQVARFAAAPKLVSYFGLNPSVYQSGQTAYHGHISRRGRSQARAVCVEVAHQLVKAPGPFHAFFERLRRRKPYNVAITAVARKLVVLVWHMLTRGEDYRYAPPARTRRKLNALLKLATGHAAPRAPRHSATVDDHQAGREAEHDYQARLQHRFGSAEAPGPSVPPPQKPGKRRTSTKRT

SEQ ID NO: 148483 - protein, 404 aa, unidentified
MDVHRDFCEVAIAEGGEVRSAGRVATRVESLELFAGSLAVTDVVALEATTGADKIVSLLQAQAIRVVVANTRKLRSISEAKAKTDRLDARTLARLLEAGLLDRVWTPDERTRTLRRLTNRRERLVRARTRAKNEAHGVLARNLCERPPVTDAFGKGGRRWLAALELPVDERLTLDGCLRQVDFLDSEIAALDAEIAKQALAWPEVLRLMSVPGVNVQTAATFMAAIGEISRFSSPRKLVSYLGLDPRVRQSGNTAARHGRISKAGASEVRHMLGEAAWKVTLTPGPLHAFFERVRARRGSQIAATATARKLAVLFWHLLNRGEDYAFARPAMTRNKIRKLELLAGAPPQKGRHGIAGGKSKAVFDAERELSRQAEAAYRRLVNDWRSTGPAKAGAGVTPGRASS

SEQ ID NO: 148484 - protein, 370 aa, unidentified
MLDTTTFVGLDVHARSIKAVSLDVMTGEVRAATFGYDAGAVAEWVRSVDPGARCVYESGVTGFDLQKRLSGLGVDCVVGAVSKMIKPSADRRRKNDRNDAEFLARMLSVGNVVEVWVPDDECEAARDLTRALEDARDDLSRSKQRLSKFLLRHGFVFDERTPTGRRKGNWTRAHWSWIESIRFAEGADNDALAYYVDAVRRAAEEKARLEGLVEAEARKPRWRRRVDSLRCLKGVDTASAADLVFEAGEFSRFRNARSFAAWVGLTPSEHSSGESDRRGAITKAGNKHLRKTLVEAAWHYLTCSGRPKDLAKGQAPDRGARRHAAKGVRRLVERREALLARGVHGSKANVATARELACWVWAVGLMAEGA

SEQ ID NO: 148485 - protein, 352 aa, unidentified
MSEKYVALDVHKASVAIGVRDGKGKYIMESIVETKAVTLLDFVKGLSGTIHLTLEEGTQSAWLYDLLKPHVAECVVCNPRQNKLLEAGNKGDRIDVQKLSELLYLGSLRPVYHGDHGTRALKELVHGYESLVRDRTRVKNRLKAIYRGRGISCEGGQVYHPQKQEQWLAQLGEPGVRQRAVSLYTQLESLNVMVTEVQRQMLAESRRHKATAILRSLSTLGPISAAMIIATCDTPHRFRTKRQFWTYCGFAVVTRSSSDHYFENGELRKRRKPALTRGLNQNYNRRLKQVFKSAATSGTRQGPFKPFYEQLLAKGLRPDLAKLTLARKIAAIALAMWKKGVPFDPKKLKVNS

SEQ ID NO: 148486 - protein, 389 aa, unidentified
MGRIWVGIDAGKDFHWAVGLDEDGQVVLSRRVENDEGDVIKLVGEARRQSPEVTWAIDIPGGVAALTLAVLWSKDERVVYLPGIAVDRSRDVYRGEAKTDARDARVIAEQARLRQDLSELRPSEGVLAELTVLTAHRRDLVQDQTRAITRLRAALVGVFPGLERALDLTTKGALLLVRRYRTPGEVRRAGRRRIEAHLRAQGAKGAAALAERAVATAQAQTLHLPAEEVSAAIVSDLAAEVLSLKERLARLDGELERRFFSHPQAEILVSLPGMGPRLGAEFLVAVGDLSSFDSADHLAAYAGLIPVAHDSGKRTGNLRRMHGGNKVLKRVFYQSAFASLRAPQSRAFYDRKRTEGKRHHQAVLALARRRVNVVWAMLRDETMFKPLAA

SEQ ID NO: 148487 - protein, 355 aa, unidentified
MAKKSVTYWDGIVQESNNGVNLWVGVDVHKKSYSVAVLSDNGIWHCFTTPADNQGLIRQFQERDINVSGLVYEAGLTGFGLCRDCHKAGIDAMVVAAVRIPRPVGKTAKTDKIDCMKLAEYLAKGLLKPIYVPTEEQEARRAKVRRRSQMTSEIARLKTRIKSFLTVHGLPEPQGLTVWSRAAVRDLSDMPMNMDLRYVLDSYLRELEFLTSEKSLLEKELKENFLPKTDVLQSVPGVGPITSAAFRAEVIEAGRFQSADKLSGFLGLAPVISQSGASSGTARLVPSGQGQLRSKLVEAALILKTKEVWARNFYNRVLYHSGKTQKAIIALARKLAIILWRLLLEDRPYQAAYSS

SEQ ID NO: 148488 - protein, 340 aa, unidentified
MIINLLGIDIAKNVFQLHGIDVNGKAVLKKRLSRDKLAEYIANTPLCTIVMESCGGANYWARVFQRSGHTVKLISPQFVKPFVKTNKNDAEAITEAASRPSMHFVPIKQVEQQDIQSLHRIRSRLVKNRTALINEIRGLNLEYGITIPTGASKVKTKLCSILSNENNELTVASREFMNNLYNDLVEIEDKLKNLGKKVQQICRKNEDCRRIMKIPGVGELTATAMISAVPNPNVFKNGRHMSAWLGLVPRQHSNGEKQILLGISKRGDRYLRTLLIHGARAALSKYKNLDNKYGRWLTEKECTLSFNKAAVALANKNARVIWSILSTGNEFDLNNQKVAA

SEQ ID NO: 148489 - protein, 386 aa, unidentified
MAHVDDLSRCLTAFDQNTTLVVVVEMSEASWLVAGMVPGLDRQPLKKLEPSAPALLHLIERWRDEAVKAGRMITRIVLAYEAGRDGFWLARWLRVRSIEAHLIHSTSVAVSREHRRAKTDRLDTEMLLRVFLGWLRGERRHCSMVAIPTLEEEDAKRPSRERETLVGECTRIINRLKAALARLGIRGFKPHLRKALKHLDALHTPEGVPIPPNTLAEIRRDMARLAMVREQIATLEQARLERLEQAPVHGPDAMVRLLARVIGVGVETADMLVREVLSRQLRDRRAVARYAGLTGSPDESGSRRREKGLAKAGNARVRRGLIQLAWRFLRFQRDSALAQWYRARTEGPKGRRKTMIVALARKLLIALWRMVTTGTVPEGMVLRPAV

SEQ ID NO: 148490 - protein, 393 aa, unidentified
MNGSTGRWVGIDVSKGKLDVAVLDERDKIKSHVFANDSKGHAALITWLEQRGCGAQLAQVCLEATGCYSESIATALVDAGWQVSVVNPARVKGFAQSELMRNKTDRADAALLARFGQALHPEPWIAPPVEVRQLRALVDRLQSLKEMHQQEVNRLEGATNRSGTRESIESHLQWLQQSIQQLERQINDHIDGHPGLRDDAKLISSIPGVGKATAAKVIAYLGDVRRFKNAKALAAFIGVTPRLKLSGSSVRGRSMISRSGHAEMRRSLYMPALVALKHNPIIKTFGVRLRATGLAPKAVVAASMHKLVHLIYGILKSGTPFTANFMVASLDIQDGILPPGAPPRLSTAALGRPFSLRRRPQAPLRCSRADIACSSVSALSARWARLSSLSPGR

SEQ ID NO: 148491 - protein, 353 aa, unidentified
MKRDKYMGMDVHQATTVVGVLDANGKVIWEKIIPTQAGPILELLESLSGPLHVTFEETTQADWIYEMVRARVAEVIACDPRRNKLLSEGSKADKVDARRLAELLRVGMLRSVYHGNEGARKLKHLARGYQTLLSDMQRTMARIKAMYRGRGIDTPGQGVYQAKQREQWLSRLSDPGIQQRTAWLYEQLDQLGALRRRAKRAMLDESRKHRAVALLRTIPQLGPIRSALLVAILDTPHRFRTRRQLWSYSGLAVVTHMSAEYEIKEGRVVRSRKPIATRGLNRNCNRVLKDVFMGAATGGGQREPYRQYLQGLKDRGMRKEMARLTLARKISSIALTFWKKGETFDPKKLNWAT

SEQ ID NO: 148492 - protein, 352 aa, unidentified
MTENPPDVSLAVIAGIDTHKDTHHAAIIDHLGRKICDREFPATGAGYRALLAWLIGTGIVVRVGIEGTGSYGSALTTVLLAAGLEVVDVDRTDRRSRRFHGKSDPLDAYSAARIAAAGLARTIPKTHDGDVEAIRFLHNARRSAVKARAEAITGLKSAVVNAPEPIREQLRGLTTVALIDACAALRPTAVTPGALTAAIKTALRSVARRIQLLDTDIKALDKNLAVLIDDAAEDLVGRFGVGYETAAQLLITVGDNPHRVSSEAAFASLCGVAPIPASSGKTTRHRLNRGGNRQANRALHVIVMARLKYDTRTQQYRDRRLAEGKSKRDIIRCLKRAVAREMFQHLTQKTAT

SEQ ID NO: 148493 - protein, 324 aa, unidentified
MATQKNEVSFEEVVARGCGLDVHKKEIVATVSGTDIKKETRTFQSTTKFLTQLKEWLLELGVTHVAMESTGVYWKPVMNILEPGGFTIMVVNARHIKYVPGHKTDKKDSAWICKLLRAGLLKGSFVPCREQRDLRDLTRYRRKLVQQQSAEHNRLIRIFEDANLKLSSVFSNIRGKTCTAVIDAVIAGETDPQKLAELCTHPRLKHTQEDIALAVEGHFTEHHKFMIRAIRKSIKNIEEEIDALDKEIDRRMQPLQGRIEQLCEVPGMQQTSVKELLAEIGVDMEVFPTAGHLLSWAGLAPGNNESAGKKKVHTPTTGTKPRRQ

SEQ ID NO: 148494 - protein, 369 aa, unidentified
MSSVASRAGAIHLGMDTSKKTIMVATLMPGEQIPVTERIANEEAAVRRFIARLGDPSQLRACYEAGPGGYDLYWLLTSMGVACEVVAPSLIPKGGSDKVKTDRRDACRQARLHRAGELTPVRVPTRAEEAVRDLVRVRAGLLADRKRAQQRLTAVLMRHGCIWCHGSYWTGAHRAWIAAQRFTEPALTAAIAHYRAALDTREAELAAIEAELAPWAHREPLAGPVARLGCYRGIAELGALTLASEITDWRRFPAARAFMSYTGLVPAEYSSGERTRRGHITKAGSEPVRTTLIEAAWAYQHGPAIGATLRRRQAGAAPGTLARSWKAQRRLHARYRHLTSRGKAPGEAVTAVARELAGFAWAEMTADPA

SEQ ID NO: 148495 - protein, 364 aa, unidentified
MKKFCIGIDIAKKTFDATAIFIESIDSLNEVGYRQFDNCPSGFRALVSWAKKLCKQCSGKLSEDGLFCMETTGGYDRQICMYLHDKGQNVWRESALQIHRSSGFRRGKNDKADSRNISEYAAKHQDKLVLFSPDPTVIMEMKEIVNYRAIMVERRKEAKTRLSEKKFTTVLGKSQTARAINKMSESEIKTLDEIIEKCNQEIERIINSDEDLKRNYLHMTSINGVGLVNAACIIAYSSNFKKITTPNKMSCYAGAHTFYDESGTSVHKKDPSKNVCCKMIKNNLRMAAKSAIIYNREIKAYADRLEKKGKPYSIVLNNVINKLLHITYSLVKNDCDYEYNHELLRKLKTEELVLKTEPSLEAAL

SEQ ID NO: 148496 - protein, 424 aa, unidentified
MKVTYQTCCGVDVHKSFLVATIIKTTGGIEPSYQKKRFSTFNNSILEFKRWLLENNCRDVCMESTGKYWVPVFNLLEDEINVTIANPKWVKAVKGNKDDTKDSKWIGDLFRLGLVKGSYVPCKAIRILREYTRYRYKLVSCRSSEKNRYQNALTVCNVALDSVVSDIFGKSSTSIIDYLLEQSGTSVSHEEIASKLLKSLKSKEDAVIESIEGYQMTDTQKYRMRLIRAHMDYITAEINDIDSKIENMISSNTDYENAVQLLCTIPGVKRDSAVTIISEIGTDMSQFCSSKRLCCWAGLTPGCNETGGKKKSVRIMRAGVYLKPALVQCAHAAVTSNKSPYYKKKYESLVKRRGKKRAIIAIARMILTAVYQMLSTGEVWNPSDLYKVDMPAPLVEKQKAKAIKQAIKLLQKEGLIPSSEPLAS

SEQ ID NO: 148497 - protein, 361 aa, unidentified
MKKPSQHLIAEVPRSITKVGMTIGIDLGDVWSHYCTLNEDGEVVDRGRFRTTPSGVEKWFTDLPKARIAMEAGTHSIWVSEQLQEMGHEVIVANVRELRAISHSDRKSDTVDAEKIARYARLDPKILRPISHRTVAQQEALTLIRARNLMVRLRTAAVNSVRGLAKPCGYRLPASSTLCFAKRCMAVLPPGLAQALGPVLQQIAAMTVKIKQYDRTIKRLTETEYPETQALIQVYGVGQLTALTYVLTLGSKERFERSRDVGCYLGLRPRRSQSGDHDPQLGITKAGNIYLRSLLVECANHVLGPHGRDSTLRQWGLHLASRGGKQSRNRAIVAVARKLAVLLHRIWVTQEPYIPFYAVAA

SEQ ID NO: 148498 - protein, 372 aa, unidentified
MPIVANTYSYVVGVDTHAASHTYTVIECPSGAVIDQATFPTSSAGLGRAMNWIARRALAPTGGDLDAVLIAVEGTGSYGAVLSARLSDAGYRVVEAPTPTRARGRGKSDDLDALAAARSSLSMDLDALRDRRGTTSSNDQLRGALAVLVTAREQLNAERLRAINALTALVRTHDLGLDARRRLTSAQIEQVSRWRARVEPLAATVARTQAVRLARRIIDLDADLVANHDHIADLLTTHAPAQSRALLEARGVGAIVAATVLVAWGHPGRIRSEAALAMIAGTAPIPASSGNTTRHRLNRGGDRRLNKAINTIVLTRLRTDPQTRDYAERRRAEGKTDREIRRCLKRYITRQLHRTLTSATPGTLQAHAPAAA

SEQ ID NO: 148499 - protein, 292 aa, unidentified
MSEDYAGRQVVGMDLHRHRSVLVRMTEDGRKLGTARITNSPAALRAELARAGENPRVVLEATYGWYWAADTLQAAGAEVHLAHPLGVKAYGYQRVKTDARDAVNLADLLRMGRLPEAWITPPQIRELRELTRYRQKLVGLRTSCKDQVHAVLAKLGIAVACSDVFGAWGTAWLDGLVLPQPYAGKVTSLRQLIGELDTEIGMLSEVISDLLAGHPGYRVIQQLPGIGPVLAAVIIAEIGDVTRFRTAAQLASWAGLTPGHRESDIILSFRVSRGCDLRRPVVDSVLDGTAAA

SEQ ID NO: 148500 - protein, 343 aa, unidentified
MQTITTIGLDIAKSVFQVHGVDAQGNAVIRRQLKRRAVLAFFEKLPPCLIGIEACASSHHWSRELKALGHTVRLMPPAYVKPYVKRQKNDAADAEAICEAVTRSNMRFVPTKTVEQQSCLMLHRTRHLFIRQQTAVINSIRAHLAEFGIVAPVGRRGVEELLDVVADSNDDRLPEVARVCLAALGAQLRRLKEQILEFDRMIMAWHRSDETSRRLRYIPGVGPMLATALVASVADPKAFRSGRNFSAWIGLVPKQHSSGGKDRLGSISKQGDRYLRGLFVAGALSVIRYAKIRGTKHRPWLTALLARKPTKVAAIALANKLARMAWAMMARGERYRNPVALAA

SEQ ID NO: 148501 - protein, 391 aa, unidentified
MIFVGIDVAKDKHDCFILNSEGTVLADVFTIANNRIGFETLLSRIQSCSQGESKIKVGLEATGHYSYNLLGFLLDSGLTTYVINPLHTNLYRKSLSLRRTKTDRIDARTIAMMLMSDVDLKSYSNTAYHNEELKSLTRYRFDKVKERAKLKSSVARLVNILFPELEKLVSSLHIAVVYALLSNYPGASDIANANTEELAETLCTASKGRYTKSKTAEIQVAAGASIGSKMPAKSMELKHTIALIRELDKEISEVESAIDKITSQMDSPIFTIPGIGRHMGAMILAEVGDFSNFASADKLLAYAGLSPSTYQSGQLQNCYAHMEKRGSRYLRYALFNAAKYVCLWCPTFSAYLEKKRSEGKHYNVAISHAAKKLVRLIFAMQRSGKAFLADY

SEQ ID NO: 148502 - protein, 425 aa, unidentified
MSYKIAGIDIHKRMVAVVVADVAGEGEYQFERRKFGSGGEQLRLLAQWLVANEIEEVVMESTAQYWKPVWGALERDWQPVSRARGAGAKSGSLLLAQAKSNRAPRGRKNDFADAERLLKRLVANELVLSFVPDMEQRLWRTVSRQKLQLTRARVRLQNQLEALLEQAHLKLSSLVSDLLGVSARRMLQALADGEVDPGRLAALAHCRLRATPEQLCDALGAATKLSAVYRRLLQMLLDELKLQERHMEQLDQELSVLLTAHHAAIQRLAEVPGLGVDSAQQILAEVGANAAAFPSAKNLASWVGVCPGEEQSAEVSKSARSPKGNRNVRRLLNQAAHAAVKTKGSVFEWVFGRLRTRLAYQEAIWAIAHRLCRLIWKILHQGVHYEELGPAVSVKSKRNRATRMIRELRKLGYRVEPVGAIAINV

SEQ ID NO: 148503 - protein, 342 aa, unidentified
MEHIAIDLGGKESQICVRDADGTIIDERRCATTDLGSYLAQRPPSRVIVETCAEAFRVADIASRAGHDPRVVAATLVRALGVGARRTKYDRRDARVLSEVSTRVEVPSVHIPTAVSRDRKSMCATRESLVRARTQVANCVHGWLRMQGSRLPAGNIVNFAKRVRTHVPTRPAHIERLLELLDELHERICAANTELRRLAKRDPVCCRLMTAPGVGSTTAIRFVATLDDATRFPDAHHVASYLGLVPGERSSGAVQRRTGITKAGSPALRHCLVQAAWATKRMRVQGPLQQWGARIARRHGKQVAAVAVARKLSGILYAMWRDGTPYQSGRAAKAPIAPRSHA

SEQ ID NO: 148504 - protein, 357 aa, unidentified
MTSIARSRGDIVVGVDTHKDNHVGVVLDGVGGRLADLTVSATPAGYARLVEWAGTYGRVVAYGVEGTGSYGAGLTSYLRRQGAKVIEVNRPSRKADRRANGKSDTLDAEHAAREVLAGTSTAVPKTADGAIETLRLVKIARDTAVKAHTAAMIALKATLVTGGDDLRAELEHLTDYKLIVACAALAAEDLTSPAGGMRHVLGSLARRWLQLHEEIKVHSRLLKQLTKTTAPALIEAFGIGPDVATELLLAAGDNTDRIRSESAYAKLCGACPIPASSGRTTRHRLNRGGNRQANSALYRTVVVRMRWHEPTIAYVARRTAEGLSKREIIRCLKRYLAREVFLLLPAPVVDNRRLDAA

SEQ ID NO: 148505 - protein, 446 aa, unidentified
MRAVTRRCFGLDVHRDFAQVAIWQDGLVRQAGQIAMTAEALRVFADSLAPTDEVALEATGNTNAIVRALRGRVARIVVGNPQKTRAIAEAEVKTDKVDAAILAQLLAADYLPAVWVADEATQARRRQVARRAHIVRQRTRLKNQVQAVLHRNLIARCPAADLFGHKGRAWLAEQPQPADERQAVSALLRQLDFHGEELRLIDRELARVALGCQDTKRLMTIPGVDVTVAMSITAAVGDFERFCSPNKLVSYLGLNPRVKQSGGQPASHGRITKQGRAHARGMLVEAAWVAVKTPGPLRAFYERVRARRGMQIAVVAAARKLTVLCWHMIARGEDYAFARPSLTAKKLRALELQAGMPARRGQKGHAAGYSLKDVRARERQMAEHAERAYRQLVADWQAKAPQPRVGVAAANGARLSRPSDGATAARQASAPEPALRSGVDHARRRG

SEQ ID NO: 148506 - protein, 444 aa, unidentified
MKGKRSYAATDVEQLDMAALVQRVEVGVIVAIDVAKTKFVAAIATEAGDVLKLVKFEHPRQTAAFLELLRALQQAECKPVVVMEPTGTYGDALRYQCHALGLPVHMMPPKHSHDFAEVLDGVPSMHDPKAATVLAKLQAIKPARAWEPQSETRRDLRAWVDQRHPIARVLAIYQGHLEAMLVRHWPEFGDHFDVYEQRSWFALLKEFPGPQAMTGASEAAGQTLRKASRGQLGPVRVRAIIGSAKSTTGVPMTGGEQERLRVIAEQIELQTHRLDAVDAKLTELVAEDAVLTRMATAVGPACAAAIGSLVGSPLDFPNARALEKAIGLNLKEKSSGNTKGQMSITKRGPGQVRRLFFMAALRLMKDNNTARAWCHARKGYKADQKIKAVVALMRKLTRALWHVARGDAFDATKLFDVRRLDLTAAPTALSARAREPYQGGAAIA

SEQ ID NO: 148507 - protein, 349 aa, unidentified
MKIIGCDFHPSYQQIVMWDKATGEMLERALSHERKEEVRAFYAGLQGPVRVGIEASGQSQWFEPLLAELGHEVWIGDAAKIRASCERKQKTDRRDAELLVKLLDEERFPRIWVPTPAERDARQLLLHRHKLVRMRTQLKNQLQALALNQGVQRKWKLWSETGRKQLEALPLMPWASRRRTELLVLLDQLEASIGELDGAAIEQANTRAAVRRLMTHPGVGPITALAFVLTIGPAQRFRRGKQVASYLGLIPTEHSSGGRGQRLGHISKQGNPFLRGLLVEAAQSAVRHEPEMRREYQRLAQRKCRALAKVAMARKLAVRLYWMLRTEVDYAQLIQGSHAGQLESFRGRS

SEQ ID NO: 148508 - protein, 398 aa, unidentified
MEVMDAAGRRLSAAKLPEGIAGIARFHAMIAAQLDPDADLDAQAGQVLIGIETDRGPWVQALIAAGYRVYAVNPLQAARYRERLGVSGAKSDPADAHLLADMVRTDSHQLRVVAGDSDLAEAVKVVTRAHKTLIWERTRHTLRLRSTLLEYFPAALAAFEDLTDADTLELLAKAPDPASAARLTTTQIMAALKRARRHYRDRRAGEIQAALRTEQLGQPAVVARAYAVAVRAQVAILGVLNEQINLLQEQVEAHFGQHPDAEIYTSQPGLGQILGARVLAEFGDDPTRYGDTRARKNYAGTSPITRQSGKKKVVLARYVHNDRLLDALGGQAFAALTRSPGARAYYDKQRDRGLGHRAALRQLANRLVGILHGCLKTGTRYDEATAWSHAQQDQQVAA

SEQ ID NO: 148509 - protein, 356 aa, unidentified
MRWSPTPCERYAGRVFYFEETIMQNVTLIGIDLGKHSFHVHCQDKHGNALLRKKFSRTQLIHFLGSYQAATVVMEACGGAQFMARRIADLGHEPKLIYPQFVRPFVKSNKNDFVDAEAICKAASRPSMRFVKPRTQDPQAMAALHRVRDSLIRQRVKTTNQMHAFLLEFSVSLPRGIAVIRRLSAVLEENDFPPYLARVLSRLHRHYVYLCGEIDEVDKELKTHLAEDENAQRLLTIPGVGPVTASLLATRLGDGKNYASSRDFAASTGLVPRQYSTGGKTTLMGISKRGDKNLRRLLVQCARVFIQRLEHNPGRLAEWVRKQLANHHSNVVACALANKLARIAWAVTAHQAAFSQ

SEQ ID NO: 148510 - protein, 392 aa, unidentified
MVCVGIDVAKDKHDCFIISSEGEVLADVFTVANNRDGFETLLWKIHTCTNPADEIKVGLEATGHYSYNILGFLLEKGLHTFLLNPLHTNLYRKSLSLRKTKTDRIDARTIASMLMSDVELKSYTNTAYHNEELKSLTRYRFDRIQMRAELKRSVSRLITILFPELESLVPTLHMASVYAVLSEFPGASQIASSNLTRLKTVLLSASRNHYDREKAVEIREAARRSIGSVIPAKSLELQHTLRLIRELDKEINEIEAEIKAIIDDMAPPILTIPGIGYRMGAMILAEIGDFSRFDSPDKLLAYAGFSPSTYQSGKLNVTGTHAHMEKRGSRYLRYALFNAAQCVCKWEPSFKAYLNKKRAEGKHYFVAVSHAVKKLVRLVFALQTSGRVFQPV

SEQ ID NO: 148511 - protein, 362 aa, unidentified
MSESTTIIAFDHHAVTTIAAVLLPGQSTPALHTLASDPSTLVRFVDRLQRQGAVRCCYEAGPGGFELQRALTAHGRSCDVIAPALIPRRPGDRVKTDRRDASQLAVLYRAGALTAIHIPTEPEEAARDLLRCREDIRADLLRARHRLSKFLLRHGRRFTATKHAWTKRHATWLQAQRWPLPALEQTHRAYVRAVDEAVERLQAVDTELRDLLTNEPLRARVERLRCFRGIDDLTALTIAAELGDARRFPSAPRVMAFTGLVPTEYSSGAKQARGTITKTGNAHLRRVLVESAWHYRHHPFLGRALRCRQRGAPPAIIEHAWRAQHRLHRRYRRLAARGKPKQHIVTAIARELSGFLWAALTL

SEQ ID NO: 148512 - protein, 352 aa, unidentified
MEIIALDAHKRYSQVCVQNKDGRFLCEKRINHGKGQILKFLSQWTTGATVALETVGNWYWIVDEIEQAGMKPRLVHAHKAKLMLGSINKTDKLDARGLNKLQRTRTLPTVWIPPSDLRDKRELPRTRMVFANLRTRLKNRIHSVIDKYGLHTDFEGISDIFGKQGRRQMALTIKQLPTETRYTLHCLLRELEMAESQIQRIEKRMKRVFSKTEQVKRLMTLPGIGFILAVAIANEIGDISRFATPQRLASYAGTVPRVHSSGGHTRYGKLRSDVNHYLKWAYSEAGNSTAVNHKRFPFRHASKLYRRIREKKGHAKAVGAVGRHLAEASFWVLTRNEDYKEPEAKSVSPTAV

SEQ ID NO: 148513 - protein, 334 aa, unidentified
MSLFMLAIDIGKLSFHVHGVDADGVIVSRKVSRAKLPSLVEELNPEIVAMEACASSHHWGRLFQSAGREVRLINAYFVRPFVRGSKNDAVDAEAIWDAASRPTMRFVPVKTADQQSLQSIHRVRDRLVHARTSLINHMRGLMAEYGIVLPKGAKRFTSGAEETIAASDLPPLARDLFDELSDELRDVDRRISRVDAKLVAICKENASCRRLMAMPGIGPVIATALVAAVDDARRFRSGRDLAAWIGLVPRQYTTGGKPRLGGIGRRANHYLRRQMVHGARAVASHQRHRAGGRGDWIRALEARRGFNKTIVAVANKMARAAWAMLVREEEYRAA

SEQ ID NO: 148514 - protein, 337 aa, unidentified
MDYFAGLDVSLEKTHICVLDRNGRVVHEATAPSSPDAIAAALTCAPACTRVVFETGRMAPMLYHGLVELGVPVICIESRQAYQALKTLATHKTDRNDARGLAQLARTGFFKPVHVKSLPAHAVRALIIARKKLVGQRVTLENQIRGLAVVFGVRLPRGLTSALVDQVIAMSDGVAGLSGAMRGLVAARDAVLSAIAAIDADMKKLVRASDACRRLMTIPGVGPLTALAFTAAIDDPDRFRRSRDLGAYLGLVPRRYQSGEIDYVGGISKVGDRRVRTLLYEAANVMLTRYKGELKLKDWAFAIAARSTMRKARIALARRLAIIMHAMLRNGTEFQPA

SEQ ID NO: 148515 - protein, 309 aa, unidentified
MTANQKFSRFIGIDVSKAKLDIYDDATGEFLTVENTAKAIEKYVSALSPDPELLIVVDLTGGYEALCVNTFYNRGFTVHRAEGRRVKAFMRSYGEHAKTDRIDAYALALFGRKLHETLRMYTPLPLNLKPVTERISDLKTMLLQEKNRSTAPNLPPDMKKEIVRHIAYLEKEIERLYQKCLDIIKNDPPLAEAFNKIIAIKGIAEKSAVLLLTTLPELGCANRRQIAAIAGVAPYAKDSGTLSGYRRIRHGRTTAKSALFIVTLVAIRHNAQIKEFYERLLKKGKSKMTAIIACARKLLIIVNATLKTC

SEQ ID NO: 148516 - protein, 402 aa, unidentified
MNSVGIDISKGRSTVAVMRPFGEVVISPFEVRHTDSELSELARQLKSLDGETRVVMEATGNYHAPVAKLLHDAGLYVSVVNAKLVHGYGNNDLRRVKTDRKDAVKLANYGLDRWLTLPRYVPEEDTRLLLKNCYRQYRQYSKVQTVLKNNLISLLDTVFPNVNRLFSSPIRVDGSEKWVDFVAEFWHCRCVSEKSQKAFTNKYQRWCRKHGYNFSEAKAHTIHADACGHIDVIPKSETTKLLVEQAVAQLRATSAALAALKHEMQALASMLPEYPVVMGMFGVGPTLGPQLIAEIGDVRRFYSKKALVAYAGLDAPPNDSGDVTGRHKSMSKIGASSLRRTLFLVMSVYLQTAPLDEPVYQFMDRKRAEGKPYRVYMMASANKFLRIYYATVKAYLELLERT

SEQ ID NO: 148517 - protein, 351 aa, unidentified
MMIIGVDYHPSFQTIAFLMEETGECGEQELNHSDGQAEKFYRDLKQRGICVRVGMEATGYSRWFERLLAELGFEVWIGDPAEIKTKRVKKQKTDREDARLMRKLLLENRFPRIWVPDPENRDLRQLLWHRHRLVQMRTRIMNQLQALAMNEGHRWKKKLFSEQGRAQLEKLSLAPWASRRRQELLELLDRLNPTIEELTAAVEREARKRPAAQRLMTHPGVGPLTALAFVLIIGTWERFPRGKQIGNYVGMIPSEDSSAGKQRLGHISKQGNSLLRFLLVEAAQAAARCNPDWRRRYMHLAMRRHKSIAKVAMGRRLAVRLYWMWRNGCEYSPSLEFGSYAGQLGTRHGVK

SEQ ID NO: 148518 - protein, 356 aa, unidentified
MESIALSAPSRKIVVGVDTHKHLHVAVALDELGARLGELTIGADSVGYAALAAWSEQLGRPRIFGVEGTGSYGAGLASFLRRRGYKIVEVDRGDRRGRRANGKSDTLDAEAAARAVLAGSAGAIPKSADGVCEMVRQVKIARDTAVKARTQALITLKCIIVNAPAELREQLEQLADKALLDRCAGFRRGPIDSTTASAKHTLRALARRWLELAAEIAEHDRVLDQLTRTAAPTLREAFGIGADTAAEMLIVFGDNPERIRSEAAFAKLCGVAPIPASSGKTNRHRLSRGGHRQANSALYRVVIVRMRFHQPTIDYVARRSREGRSKRDIIRCLKRFLAREIYHHVMTDRATLNAVT

SEQ ID NO: 148519 - protein, 404 aa, unidentified
MHYIGIDVSKVKLDFALLNGCGKVVAQTEVKNNTTGVNSLLKRWERQSGLEMKSCLACLEPTGHYSDNVLRTLLSMGVPTWVAHPLEIKQRMGMVRGKNDRIDAVRIADFAMRHEDKKRQASASTVAVLELKQLLAFRDRLVVDGVRHNVYNNDLYPCVAKPLRTVFKEYSVQCIQHSKSMIKIMDRMIAAHIAQDPTMLRQYKLLLSIDRVGPVLAAHLLAATELFTRMKKGRQLACHAGVAPHDHSSGSSVRGRARVSHHADKRLKALLHMAALGVIRSNNELSAYYRRKVAEGKNRMSVLNAVRNKILLRVCAVIERGTPYDDRTAQQQPMPPTPQQEVNDGTTNFARRAKRKRALLESIPPGINPMNDGLMPSAGSAKRSPHKSRVPHASKKLPVRLDMS

SEQ ID NO: 148520 - protein, 352 aa, unidentified
MDKGNKLDFTGQHIYVGMDIHKKSWSVSIYTEHFEHKTFTQPPEVKKLVNYLQRNFPGATYHCVYEAGFSGFWIHDLLKEEGIHCMVVNPADVPTKHKEKAGKADKVDCRKLARNLRSGDIKGIYIPSRVQAEDRHLIRTRQSMVRKQTRCKNQIKSILFFYGVLIPEESHWSRKFINWIETISMERASGDLVLKAHLEELKYLRQIIAGLNKAIRALSRTDTYRDKVLLLRTVPGISTLTAMTLLTELCDISRFSSLDKLASYAGLVPDMKSSGETEHTAGITYRRNATLRTVLIEASWVAVRKDPTLIMAFNKFSLRMKKTKAIVHIARKLLNRIRFVLMNQERYVPAVV

SEQ ID NO: 148521 - protein, 435 aa, unidentified
MSDAEQKPELQWFVGIDWATQEHEVCVVDREGKKVGGRSFKHTGEGLATLCSWIAEVTSSAIAVQVAVVVELVRGALVATLLERGYRVFECNPKQTDRLRDRHSVAGAKDDRLDAFVLAEAGRKDLSLLREVPADAEAMVQIRELARMHDELVHDHVRLTNRLREQLHRYYPQMLELGSDVSERWRLELWERAPTPDAALELRPAWVRALLARHRIRRIDAKEVITTLRTRKLHVAPGVTEAAVMHIETLVPQLRVLRDQIHATERKLDAALNAFAATEESSVGQSDEQRDVAILRELPGAGKVVIAALLAEAWPALRARDYHQLRALSGVAPITQQTGKQGKRKGPRPLVMMRRACNARLRDALWHWAASAAQHYERWQRELAALHARGIERPQALRIIGDRLLRITCACLRDGTHYKHVSETNQEQSHAAQAA

SEQ ID NO: 148522 - protein, 343 aa, unidentified
MQVTTIGIDLAKNVFQVHGVDANGKVVFNRPLQRSRVLAFFAKLPPCLIGMEACASAHYWARELKKLGHEVRLMPARDVKAYVKRGKNDSVDAAASCEAVQRPTARTVPVKTPEQQAQLMQHRVRDLLVRQRTQAINALRSHMAELGIVAAQGYDGLKELLAIIADAGDGRLPENARASLSGLVQQIASCQAEIGALEKRLVTQHRKCADSQRLETIPSIGVIGATAIVATVPDASIFKTGRDFASWIGIVSRQNSTGGKQRLGPISKQGDRYLRRILIVGAFAVLRQARAHPEKYPWVAQLLAHKPAKVAAVAVANKTARIAWAVLTKKENYRAHPTTAAAA

SEQ ID NO: 148523 - protein, 340 aa, unidentified
MNINVIGLDIAKLTFHLVGLDSTGKQMLKKKLSRAKLLAYFANLTPCKISMEGCAGAHHWARELKQLGHQVKLLPAQHVKAYVRGNKNDYNDALAIAEAARVPEMRAVAVRTVEQQSIQALHRLRQRAVADRTGLSNQVRGLLSEFGIVFPQGIATCRKRLPEILEDGDNHLHPLFRNALALKYQQLCELDQLVKDLTTAIETDAKQHAEIKRLQSIPGFGAIVSSTYFSVIGDGRAFGNGRDAAASLGLVPRQHSSGGKNTLLGISKRGDKYLRSLLVHGARSVVIHAHKKDDALSRWVTQLVARRGKNKATVALANKLARIAWAVTTSGKPYTENYAL

SEQ ID NO: 148524 - protein, 375 aa, unidentified
MDTIYIGVDFHARQQTICYLKTETGELVFCELKHQDKEVVRAFYAQFSGQVIVGLEASGYSPWFERMLEELGSEVWLGHATEIRRRARWRQKNDRRDAELILDLMLHDEFPRLHRPAVESREVLRMLRYRQKLIKIRTMSKNSLQAIALQAGLAKRSGLFTKAGQQQLGAAEMSPVMHWQREHWLQLMEPLNQQLLETMVWFKAQSKGDDSITRLRTHPGIGLLTSLCIVHTLQPVSRFRNTRKVAAYAGFDPVERSSAERKCFLGISKAGSRLLRYLLVEAAQTAVRKDEDLKRFYKRLAERRGRPKAKVAAARKLLIRAYIMLRDEIDYAEFRRRAVAARLARRGQGPSNVPEVLIGQPASAECQGEPTSAKK

SEQ ID NO: 148525 - protein, 400 aa, unidentified
MLSIGIDVSKGKSTVCGMKPGGEIVYTPFEVQHTREGMSELVSLLRSSGEEVRVVLESTGSYHCPVVAALLENGIFVSVVNSLRMKRFCSQSIRKVKTDRIDAMQIALYGLAYWQELQPARLPEDTYRELQLLARQYYQMTSMLIKAKVDFNAICDQVLPGMQELMNDHAGRHKLSDFVLRYHHTAHILKMGETRFRKDYCKWAEKKGYRNCERMAVLIFATAQNGIPVLPNAPSTQIVITEAIRVLHTVEASRDAILTQMQALAKTLPEYSLVREMPCIGDTLAPRLIAENGDVRRFHSKRALIAYAGIDAPPYQSGKFCANNRHISKRGNRYLRKTGYEVMQSYVMHKPANDPIFTFIEKKRGEGKSGKLAMVAGLNKFLRVYYGKVTELYRSLPTIE

SEQ ID NO: 148526 - protein, 395 aa, unidentified
MFIVGIDVAKRSHEVCMITSDGQTVQRPFSIRNNCTGYNLMLEKIRKHTNIKSQIVFAMESTAHYWLALFTRLRKDGYHVILLNPIQTSAMRDMFIRKIKTDAKDSFIIAELIRFGRYAESNVAQDRLLALKELCRNRFYLVDMAGDLKRKLIALIDRVFSEYEAQFDTIFCKSSVALLKKYPTPQKLSNAHLDKLTELLWNSSNGHFGEWKARELKELARNSFGVEDCDGAYSTLILLMLDQIQSLSGKADALEKEISRLFQSFDTTVTTIPGVGPIIGAVILSEVGDISRFSSADKLAAYIGVDPSVNQSGEFQAAHAHMSKRGSPYLRRCIWMASQVAVQRDPMFRAYYEKKAAEGLKYMTIIGHVTRKMTAVVFAILRDHKVYEPVLPTAA

SEQ ID NO: 148527 - protein, 322 aa, unidentified
MEEGRIQTTAASLGKHFGIEPRMRIALEAGTHSPWVSRLLKSYGHQVIVANPRKIPTLTKSESKNDRNDAEQLARMAAFDPKLLHPIEHRSPERQQDLNLIHTRSVLVRARTMLINSARGLVKSAGQRLPACSSEVFPEKAPAAVPPALKAACTPLLEQITLINQSIAAMDKQIDQLDKKYPEITILRTVPGVGPVVAACYVLTLDSPQAMETNRQAGAYLGLRPRQQKSGDSDPQCKITRMGNTYLRSLLVQSAQHILGRSRPDSELRRWGLKLAASGGKRGKKRAVVAVARKLAVLLLSMWRNHKKFEPFPQSVAQLTTA

SEQ ID NO: 148528 - protein, 316 aa, unidentified
MAAKPVFIGIDVAKDWVDVAVRPAGTAWRTPYDEAGIASLVNKLTALRPTIVVLEASGGYETRLLAALGAAAIPAAAVNPRQVRDFARSLGKLAKTDRLDAATIAHFAQAAEIRPQALAPEEARELAALVARRQQVIQMKVAEQQRRDRALPIVQRRIDRILAALQQEMEELDTDLTTRLRASPLWREKEDLLKSVPGIGPSATFTLLANLPELGTLSRRKIAALVGVAPLSRDSGTLRGRRTCWGGRANVRTALYMPTLVAVRHNPVLRAFYERLLTAGKSKKVALTACMRKLLTILNAMLKQHTPWETHHALTT

SEQ ID NO: 148529 - protein, 347 aa, unidentified
MLHAGLDLSRKKLDVCLLSDRGEHLDQLAVPPDVDSLRRLAGRIEEVHCQPVCAVIESMTGARIVHDTLEQQGWSVEIADAQKVKGLAPLACKTDKIDSKVLAVLSHRDLVPAIWLPDPSVREERELARFRLHLVKHKSALKNRIHSTLINFGKPCPVTDLFGVEGRRLLKRLQVPEPWRGNITASIELIDDLEGQIAEINRRLKECHAEHPYVPLLLTVPGIGWVLAFTIAAEIGEIERFSSPEKLTGYTGLCPRVNQSGEKDRRGPLTKHGPTYLRWALLEATMHALRHPAYSERYQRTKRRLGKQRGAKVAQVDIARRLSHAIWHMLSRKEKFAPRGAAFRLAA

SEQ ID NO: 148530 - protein, 333 aa, unidentified
MVYVGIDYHKKYSFATKMDEKGKILEQQRFNNDSESIQQFVQTLPSDSKIVLEATGGWYYFYEQVEKQVPDIVLAHPLKTRVIAEAKIKTDKIDSQILAHLLRTDLIPTAYIPEREIRDIREILRYRASLIMNQTMLKNKLHSILTKNGILFPYADISSPKGQAFLSTLDLRECYQKEILGYVALLNQLKQEIKTINQTIKSITLEREDATLLTSIPGISYNSALLLVSEIGEIDRFLSAGHLCSYAGLVPSIHSSGDRTYAGRITKQGSKYIRCVLVESVVHVVRKSKHLQAMFERIRRKHGSNTARIAVARELLKIMYSMLRHHRPFYVDC

SEQ ID NO: 148531 - protein, 347 aa, unidentified
MNFYNNIHEYYCGIDLLARSLYVCILNQAGETVLHKEIQAKPDLLADLLDPYIGHIVVGVECMHCWYWVSDFCDNLNIDFILGHALYMKAIHGGKAKNDRIDSYKIAKLIKGGNFPLAYVYPAEMRATRDLLRRRIKIVRHGAHLKAHVANTTSQYNLPPNKVNLKNVCAREQIRTTFSDKVVQKNVDLDMALLDCYAGELSKIEWFIEQQAKQHQPIGYQILRSIPGIGRILGLTIIYEIGEISRFPSVQKFASYSRLVKCKAESAGKSYGTQGNKIGNAHLKWAFSEAAVLYLRGNKKAQDYLMKLQKRMSKAKALSALAHKIGRCVYYMLVNEKIFDEKRFLKS

SEQ ID NO: 148532 - protein, 340 aa, unidentified
MSLVLQSLLPYPNSCQGTSPHQQGWDTKMAMLSFCGIDVSKDRLDVVVLPEGWFFSVSNDTAGWAELVARLRPLTVSAIGLEPSGGYERGIIRALLAAGLSVRRINPNKLRQFARARGVLAKNDRLDARLIAEYVAIMPTRVVQRDAAVEKLAEIVTMRRQLCDEHVAAENQAAHLEDAMLRRLSKRRQMRLEADIRLLDKRLAEMVAANVALAQRYELLTSMPGVGPVLAFTLIALLPELGKMSRKQIAALVGLAPYDFDSGKLKGHRSIYGGRMSVRNVLYMAALSASRYSPALKAFHNRLADADKKSKVIIVAVMRKMITTLNAMLRDNAVWRPQSA

SEQ ID NO: 148533 - protein, 345 aa, unidentified
MPIVGGLDIHRKQITFDYLDTVTGQVCRGQIAPADRVHLRAWLARFHGRDDVAFAVEGCAGWRYVVEELAAAGITAHLAEPADTAFARGRKRHAKTDKTDARHLRQLLAEGRLPECWIPPGHILECRALLETYHDLRAEHTAWVQRIHAVLFHQGAPALGEGTLRTGQGVAALRAAAAEHLSPAGQLQVATALEVTEALEARMHLVRHQLLAAARHLTGAKVLAARLYGVGPVTGLALTCWLAGEGRFSSSRKAVRFAGLDITVWSSDRKGPPGRLSRQGPPVLRWAVYEAGKTHARSSAPDHRYYAAVKDRKNSKRAALSEARKILRQAHHILAELGDDALAAA

SEQ ID NO: 148534 - protein, 411 aa, unidentified
MQVIYQRCCGLDVHKRIIIACVLEWVGSGWEKEIRQFGTMTSDLLALSDWLVHEGCTHVAMESTGVYWKPVYNILEGQFELLVVNAQHLKAVPGRKTDVRDAEWIAELLAHGLLRGGFVPPASVRELRELTRYRTSLVRDRARTINRLQKVLEAGNIKLANVVSDIDGVSARLMLEALVAGERDAQQLAGLAKGRLKDKRAQLVEALSGRLQPHQSFLIAEELAQIDYLDGAIERLNHQVEERLRPFEQEIGWLDTIPGVNRRTAEVLWAETGGDMSRFPSARHLASWAGMCPGNNESAGKRRSGRTRKGSPWLRHCLVEAAHGAAHTKNKYLSSQYHRIGARRGKKKAQVAVGHSILVIAYHLLTRKQPYSDLGANYFDERDRQAVTKRCVNRLQKLGFKVNLEKLPAAA

SEQ ID NO: 148535 - protein, 313 aa, unidentified
MDTPVYVGIDVSKATLDVCISDGETWQTGNDDRSVERLCRQLVAVQPVLVVLEATGSYELRAAATFATAGLPVAVVNPRQVRSYARSVGQLAKTDRIDAYILTRFAEAVRPEARPLPDAETRELDAFVTRRRQLMAMVTAEQARLDTAPAVTRKQITTHIAWLNRQIGRVNSDIDGTVRRSPLFRAKDELLQSVPGVGETTARALMALLPELGTMDRKRIAALVGVAPFNQDSGKLRGRRRVWGGRAPVRTALYMATLVGTRHNPTLKALYTRLRGAGKSAKLALVACMRKLLTILNAILRDGRPWSPTTTLA

SEQ ID NO: 148536 - protein, 356 aa, unidentified
MNHLGIDVGKRICRVALKDDRGKILDEFFFDNNSQGILELIKRTQNYRTKKCNAVLESTGNMWMRIHDTLEDNGIDTILANPYKTKIIAQAKIKSDKLDACILSDLLRTGLVYESYVPVKEFREKRSLVRHRIALSRTKTKLANKVHAILDKYEYRTELADIFGKSGIEWLKSLSVSPIDKIILNTTLTSIESIANQIEIVSKEIARYAWQDSQDVKLLLSITGIDIFSAMLISTEIVDITRFSTPWKLVSYAGLAPSTRESSGKIKTGRITKQGSPLLRWILVQCSLSATRHDHHMRTFYERIKQRKGHGKAIVATAKEMLVVIWYMLTRHQLYRYLNKTRYEQKLESLKKIGSQ

SEQ ID NO: 148537 - protein, 394 aa, unidentified
MLEVKVERCAGIDVGKKVLAVCIMIGLAHQKPTVEVRRFGTNVMELERLRVWLKEMGCTEAVMESTGSYWKPVYNVLEGTVKIILANPMHVKVLRGKKTDSKDSRWLAGLLRHGLVEGSFIPPRDIRELRDLTRRRRTLLSDGAAERNRVQKILEDANVKIGNVLTDVFGVSGQAMLEALVEKKLNAAEIAELAHGRLRQKMPQIAEALEGHRMTDHHRFLIGQCLKHMQYIDEMIGDLDKQIQEKLRSYSKQVQLACTVPGIAPVAAASILAEIGMDMSPEGPFPDCHHLASWAAICPGNNESAGKIKSGHTRRGNRWLRATLAQTALAGAAKKNSRFQTRYQRLKLRRGAQRAATTSYQEQLRQTEDQRRDDQIRHHLRQLTKLGYQLEQGS

SEQ ID NO: 148538 - protein, 317 aa, unidentified
MTKTSIAVAGIDTAKEKLDIAIHGQASHWRVENTQQGWKRLRSDLTKAGVVRVGIEATGGYERGVVRHLRQAGLTVLVLQPIQVRAFARVHLRRAKNDTLDAALIAACTAAMENPRIEPDQRLTPLADLLTFVEQIEEDIARLKTRLEHVNEPRLRRMVLGDIARLRARRLAQIHLIARQLRHHRDLAARLDLVLSVPGIGERTALALIIRMPELGRISREQAAALAGLAPFDDDSGKYKGQRHIAGGRGRLRRSLFAAALPAAFRWNKALISLYGRLAARGRAHNAALTACARKLLIYANTVVARGTPWVESPAAT

SEQ ID NO: 148539 - protein, 410 aa, unidentified
MKIAGIDVHKKVMMVVVLDTSAPEEQPAGRRFVTLPSELQRLRIWLQEQGVEEAVLESTAQYWRSVWLELEPHMRLHLAQAFSHRARRGRKHDFKDAERQVRRLIADELILSFVPEGEQRIWRSLTRMQVQLTRDRVRLQNQMECLLEEMRIQRSILVSNLLGASGLGILHALAQGETDPKKLAELGDERLHCTEEQWVDALTGRVQPLHRGMLALQLQRLQLIDQHMAQLEGMIAQVMKSHQDAVIRLAEVPGLGVDSAQPIIAEVGAQAGTFSSEAELTSWVGTCPGKEESAQQNHSSRSANGNQYLPPVLNQAAHAAVAKKGSHFQVVFRRLLPRLGYKSAIWAVAHRLCRVVWKILHEGVRFIEQGREVGPREKKQRAQMLARALPKLGYEVTITPINQLAAEPAI

SEQ ID NO: 148540 - protein, 343 aa, unidentified
MTIKVLGIDIAKNTFQLHGADDAGKAVLKKRLPRNRLSPYVANLHPCTIVMESCGGANYWARVFQRSGHTVKLISPQFVKPFVKTNKNDANDAEAIVEAASRPSMHFVPIKRPEQQDIQSLHRVRSRLVKNRTALINEIRGLCLEYGVIIAPGAARVKKSLCAVVADSGNGLTPSSRDCMQDLYEELVDVEARLKKLDARNRQLCRQNDSCRRILSIPGVGELTATAIVAAVGDAQEFKNGRHMSAWLGLVPRQSSSGDKRVLLGISKRGDRYLRTLLIHGARAALSHYKTTDNDYGLWLDRKKTTLSFNKAAVALANKNARIIWSLLNSGEEFNYGVQTAAA

SEQ ID NO: 148541 - protein, 404 aa, unidentified
MTAVMIGIDPHKGSHTAVAINAGEAPLGRMRVSACPDQAGQLLAWAQAWPERTWAVEGATGLGHLLAQQLVAAGERVLDIQPKLAARIRVLEAGNTSKNDPNDARSVAVAALRSRACREVTADDHAAVLRMRSRRHQDLGQSRNRVACRLHAVLCDLVPGGLPKEITAAQAARIIEQAAPVGAVGQARHDLAAELLADLRRSDAQMAESKKKLAAVVRASGTSVTGLFGVGPVVAAIVIGDASTVTRFPSRDHFAAWNGTAPVEVSSGGRKIYRLSRRGNRRVNYAIHIAAVTQIRYKHSPGRAYYDKKIAEGKTPKEALRALKRRISDAIYARLLADAQTAAASKDPGGQPGNDSGSSAVGFHPEHRLFGQATPGPQPSLRPAISARPVAALAPPRRKLRKAT

SEQ ID NO: 148542 - protein, 398 aa, unidentified
MFIVGIDIAKLSHEACIIDRSGNIIGKSFKFTNDHKGFAKFLDALYAINFNLSQFEFGLEATGHYWLNLYCKLIELDCTVHVINPVQSDALRGLYIRQTKTDSKDSFLIAELIRFGRYTETVLASPDLIALRDLTRQRFYIVDLISDAKRKVITLLDKAFPEYRQLFTDMFGATSLGILEEFPTPDLLAGLSTDKLTEFLKAVSHGRFGQSKALEIQSAARNTFASFLFADTSAFAIRQFIEQIRLLESQLESLNAYIADYLSKFDSKLTTIIGVGPTLAAVFIAEIGDINRFASAEKLAAFAGIDPTVKQSGQFTGTQAHMSKRGSPYLRRALHLAAVAANLHNPALHAIYEKKRAQGKPHGIALSAVSRKLVNIIFAVMKSCKSYEIVMPDYPSNA

SEQ ID NO: 148543 - protein, 308 aa, unidentified
MNQPKHTYIAIDIAQADLEVLAAGKRMKAANTPAGFRQILGIARDLEAPLVVFEASGGYERALMEHLSGQNVPVAMISPARLRAFARSEGVKAKTDPIDARMILRFAQEKKLAPMRILEGKRRELADLMDRRSHLSEQLTREKTRLQKAPELLHASIRRMIHHVEKEISLIEKQIEELIAADEAMSEEAERIQSIKGMGKVNAWSLMGYLGEIQDLKRNQLVALAGLAPFNRDTGKSSKNRFISGGRAKVRKTLYMAATCAAVHNPVIKAYVQKLRQRGKPYKCAIVAAMRKLLLHVQSLLKNQPLPA

SEQ ID NO: 148544 - protein, 470 aa, unidentified
MKKHRKIKTKSEASNPLHEPEPDAGGIDVGANEIWVAVPPDRTEEPVRTFGAFTRELKAIVQWLRDCGIRTVAMESTGVYWIPLYQLLADAGLKVCLVNARHVKNVPGRKSDVRDCQWLQYLHSVGLLRASYRPDQAICAARSIYRYRQNLLTQSAQHVQHMQAALDQMNIKLHHVIDDLTGTTGLAIVEAILDGERNPRQLAKQRDHRIKASQETIVKALEGDWRSEHLFVLRVAWENWKQTQHQIQKCDQQLLEYTRQLEACTTVAGPIKIVRLSSEVAGSQPVAGPSKPRRKKTSKNEPQGPWREELSRFFGVDLTAIPSISVLTGITLMTELGNDLGAFKTAHHFSSWLCLCPDNETSASKVLRRATRRSQNRVRQALRMAASSLHHDKSYLGDKYRRLRAKLGAPKAITAMAHQLARIIWHLIAHRVPFDLTIFAAYEKANQTRRLKRLSSAARQMGYQLTPIAT

SEQ ID NO: 148545 - protein, 343 aa, unidentified
MQAVTTIGLDIAKSVFQVHGVDAAGQVLIRRQLKRRAVLAFFEKLPVCLVGIEACASSHYWSRELQALGHSVRLMPPAYVKPYVKRQKNDMADAEAICEAVARANMRFVPTKTPEQQSCLMLHRTRHLFIRQQTAVINSIRAHLAEFGIVAPVGRKGVTELLHIVADPSDKRVPEVARACLAALGNQLLSLKEQIVKFDRMIMVWHRSNETSKRLHYIPGVGPMLATALVASVADPRTFRSGRNFSAWIGLVPKQHSSGGKDRLGSISKQGDRYLRSLFVAGALAVIRYAKIHGTKHRPWLTALLARRPTKVAAIALANKLARMAWAMMAKGERYRQPVALAA

SEQ ID NO: 148546 - protein, 319 aa, unidentified
MRCIGVDVSKQELITFDGTQERVFPNTHGLSEFRRFLKRWADAFVVFEPTSTYSRRLETLCRLQQISCCPLNPRVVPHLRQVGKGRSKTDSADAELLYRYGIERGYAEAVQLARDSLAESVQARLVCYRVAQKARVAHLGVLEALSHDPATPSTLLAELKEEIAELKARERHHLVAAQRIAEGEEQAAQQFDSLLSIPGLGPITALTLLALFRKYPGANRSQIVALVGFDPIQFQSGTSVHRKTRISKRGNREVRKRLFEATLPAARYNPSIRTIYRRLREQGKPYKVARIAAARKLLLIAHAVYTSGESFRFPNAKEA

SEQ ID NO: 148547 - protein, 343 aa, unidentified
MSITMIGLDTAKSVFQIHAIDEAGKVQLRRKLRRSELIPFFEKLERCTVVMEACGAAHHWARVLTGLGHEVKLIAPEAAKPFVKKGKKNDAVDAAAVCLGASRPDVKFVPIKSLEQQGMLALHSARSLLVKQQTMLVNAMRGLATEFGLTVAKGRENVEDLAPLIKADKAFPSKARQAFTELFVQREALAESIMTIEAEIVAHARHDEAARRLMTIPGIGPITASLIAVTVPDFSVFKSARYFAAWLGLVPRQHSTGGKTRLGRITKAGNREIRRLLVVGATSMVHRAAQWDSATGAWIRGLLERRPVRLVTVALANKMARIAWALMTRKEVHHAKGRIAAVA

SEQ ID NO: 148548 - protein, 422 aa, unidentified
MSRRETEVRVVGFDCAEEAHEAVLLDASGEEQLKLSVVNRREMVEEALGELLLALPKGAKLVVVVESKRSHGRLVCDVAFGLGCDVWQVNTVALNHYRNVEGQPRKTDSWDAYLAARMVFLRLKGSREVAESLPEERVLCRLTRTHARLKDDRTAITQRLRAILLELAPEVLHRSWNGPKYDSKAMVYILKRWPAFDGLERAQLRSIEKILHRCRYGQAATEVAELVREMGKRISMEPFERQAVSLEMTVLLEQLEVIDSLLVKVDREIEKQVEKHPVGIKLLEMPGIAHLTAGILIGELLPVARHASEGESATYSGVTPLARKSGKSLNRPRLARGVNKRILHGLYLSSVSAVKCSVIDRAYYQKKLNDYAGHPAKNKAAFIALSRQRHKVIFKLLTTDARYDKEKLIADHLNRVHSAKAA

SEQ ID NO: 148549 - protein, 316 aa, unidentified
MTTAGGFVGIDVAKAELEVVVRPSGARWTVTNDGSGLAQLQERLQVLAPSLIVLEATGGYEVAVVAALAMAALPVVVLNARQVRDFARATGRLAKTDAIDAGVLAHFAEVGRPPVRPLADAMTQDLQAWLTRRRQLVEMLLAEEQRRSRAPRPIQRHIDQHVRWLRAQLGAVEKDLARTLRESPVWREKDDLLRSVPGVGPILTTTLLGDVPELGQLNRKQIAALIGVAPLNRDSGTYRGRRAVWGGRARVRATLYMATLTAARYNPAIRVFYERLVAAGKPKKVALTACMRKLLTILNAMIARRTAWKPPVAVSA

SEQ ID NO: 148550 - protein, 367 aa, unidentified
MIINSIAKDFENIIAIDTAKTSFQVYVVNQKINRRRNDKVTRKKFVEHITKLGTGLIFMESCSASQYWAREFEKLGFTVKLIAAQHVKAFLYNKKIKNDAKDAEAIFKCGMQPDTKFVRVKSVEEQTVALLHTLRKGEIKHRVQLCNRIRGVLAEFGIITDKGRNNFDKNMSELRAQCEKEISNLHLKSAIDALFDEYKESLEREDKYTQQILQNRHDELNKLAMSCPGVGEITASAIVAEVGKAKQFKNGREMSAWLGLVPSQHSTGGRSTLGGITKTGNKYIRGLLDQCANSIYRNAKTHLDKGTDNQLDRFALRLKSKGKPAGKIAMALANKIVRILWAVLSSGNEFKSNINFQDKDRDVLCLE

SEQ ID NO: 148551 - protein, 339 aa, unidentified
MFYSGIDQHKHFSYITTVNDDGIIIKQAEIKNNDFDILNYFSSFSKEHLATVETTAGWYWLNDLLSSNGVNLKLAHAKYVKAIAYAKVKTDKVDSHILAQLLRMNFIPEAYKISDSVRPLRDTLRARLRLSQKRTSCLNFMNRMLEKFNINDSASLTDFYKLQYQQFDNQAHILKEQMLILEKSLYPSLIPNEDIQRLLWIPGIGKMNAFTLVLEVGDINRFESEKNFLSYCRLVPSARNSARKTKQCSSKDGNKYLKLVFSDAAVHALQYYPVIKKYHDSKLRKKKKQVAHAIIAKEIARIAFYVLKYKSDFNNHFKGMDLENKNLFSGRALQAPTSN

SEQ ID NO: 148552 - protein, 392 aa, unidentified
MVVSVGIDVSKDKHDCFIVSAEGEVLADVFTVPNNMDGFHCLLQRIRDCTAPQDKIKVGLEATGHYSCNLLGFLLDNGLTTCVLNPLRTNLYRKSLSLRKTKTDRVDARTIATMLLSDVGLKPYTSTAYHNEELKSLTRYRFDKVKERAKLKSSVSRLVCILFPELEKLVPTLHMVSVYALLEEFPSARKVAAAHLTRLKALLETASKGRCKRDMALEIRDAARNSIGSWMPAKSLELQHTIRLIRELDNEIAEIEGQIQAIMDELHSPITTIPGLGFRMAAMILAEVGDFTRFDSPDKLLAYAGMSPSTYQSGQLKNCYPHMEKRGSRYLRYALYNATKYVCHWDPAFADYLAKKRAEGKHYNVAISHAAKKLVRLIFAMERSQKPYLPTS

SEQ ID NO: 148553 - protein, 414 aa, unidentified
MKLFVGIDVSSEELEACFMDPEGDTLETLKVENNLHGASHLRDRIVAAADKLPASEIHIGLEATSVYSWHPAMYLHEDASLQERKTKVFTINPKLINKFREAYADMDKTDRIDAWIIAERLRFGRLTTTIVMQEQYIALQRLTRMRYHLVHNLTREKQYFLQNLFYKCNAFRSEVDSSVFGHAIMEMLSEKFSLDEIADMEVADLADYLKEKGKNRFPDPEHVARCIQKAARASYRLSKVVEDSIDLVLGTSIQAIRSIQSQLKELDKAIERILAGIPGAQCLRSIPGIDRVYAAGILAEIGDIERFSDQAAVAKYAGLTWRKHQSGGFEAENTKRIRSGNRFLRYYLVEAANSVKNRDPEFGEYYRKKYNEVPKHQHKRALVLTARKLVRLVDVLLRNGQLYTPGRKVTTAKD

SEQ ID NO: 148554 - protein, 344 aa, unidentified
MNSTTIAVDVAKSVFEVAVSEYPGQVRERHRLSRGRFSRFLAEHPPATVVMEACGSAHHWAREAQSRGHRVILVPPHAARPYVLRNKTDRTDAKGLLEAFRNDALHPVPVKSETQQALAALHRLRSTWVATRTARLNTVRGILREFGVVIPTGAHHVVPHVRALLEDADAGVPRLLRVPLSEAIREIGELEERILAIERQLARTAEPALLIGRLRTIPGIGILTATALVAAVGDVQRFPSGRHFASYLGLTPREHSTGQRRHLGAISKQGDTYLRMLFIHGARSVLHHAKSKTAPATDRLRTWALQVERLRGHNKAAVALANKLARIAWAVWRSGNDFTAAAAV

SEQ ID NO: 148555 - protein, 344 aa, unidentified
MNQYVGLDVSLEETKIHVLDEAGGRVWRGKCASHPDELETTICKHAPGAVRIGLETGPLTTWLWTELSKRRLPMVCLDARQAQRALDMRANKTDANDADGLAHLVRAGWYKEVRVKSRDAMLSKAVSAARRQLLDISTNLSNQVRGLMKTFGLVVPKGKGRIFEANVRRLLDEEHALAAVVLPLLEAWCAIRNRAAELDRLLLRKVRDDANCRRLMTAPGIGAVVAASYVAAIESPANFKHARDVGAWVGLTPRRFQSGEMDYDGHISRRGDERLRALLYEAATVILTRVRSASALRSWALALKKRLGFKRAAVALARKLAVVLHVMWKTRKNFDPNHRLAARA

SEQ ID NO: 148556 - protein, 340 aa, unidentified
MSEKEAILGIDISKDKFSAALLKGEKKSQVKEFANNLEGFEQLKQWLEQNQLEKVHACLEATSTYGHSVATYLHGLGHIVSIVNPARIKGFAQSRLSRTKNDQADATTIARFCAALKPQAWTPPSPEMAQLQSYSRRLKALEQMATQEKNRLKTTFDESLIEDIEAHLVFLETQIDNVKKRQKELLNEYSSLKNQADLLTSIVGIGEPTAMTILAEIGNINQFSSARQLAAFAGLTPQEHQSGTSVKGKTRLCKIGNPHLRKALYFPALSSMRHCSPMKDLRERFLEAGKNKMQIVGVVMHKLIRIVYGVLKSGKPFDQTKLALPNVVLEEETDFLPVSP

SEQ ID NO: 148557 - protein, 344 aa, unidentified
MKITTVGIDLAKNVFQLHGVDEFGKTVVKKQLRRDQVSGYFVNLPACLIGMEACGSAHYWARKLQGFGHTVKLMAPQFVKPYVKTNKNDAADAEAICEAVARPNMRFVPFKNVEQQAVLALHRVRQGFVKARTAQANQIRGLLGEFGLIVPQGIGYIATRVPELIEDASNELPGSFRVLVQRLLDHLKELDRQVGELEVQIQTWHRSSEVSFKLAKIPGIGPITASALVASIGDAKNFESGRQVAAWLGLVPRQHSSGGKQNLLGISKRGDTYLRTLLIHGARSVIYRAGQKPESCSWINGVVNRRNKNVAAVALANKNTRIVWALLAHDREFRSDYTTAKAPM

SEQ ID NO: 148558 - protein, 250 aa, unidentified
MLSFCGIDVSKDRLDVMVLPEGQRSSVPNDVAGWVELVEQLRGCSIAAIGIEASGGYERGAIRALLAADLPVRQVNPFKLRQFARASGVLAKNDPLDARMIASFVAIMPTRPAPQQAPSAERLAEMLAVRRQLTAEKVAAENASRLLEDTMLQRLSRRRIARLAADIDLLDRQLVKVAGTDAALAHRYRLLTSMPGVGAVLACTLIALLPELGRLSRKQAAALVGVAPYAFESGALKGRRCIWGGRANIR

SEQ ID NO: 148559 - protein, 356 aa, unidentified
MSHDVKYIGMDVHKEAIVIAVLNGSGKLVMETVVETKASSILQFLHGLRGELHVTWEEGTWAAWLYDLLQPQVQEVLVCNPRRNALLKEGSKSDKVDARKLADLLRTGMLRPVYHGENGLRTLRELARSYQTIGKDLTRVMNRLKALYRGWGIPCAGTQVYAPRYREEWLGKIAQAGVRRRAELLYQQLDGLQALRRNLRPEFLAESRKHKAAKLLRQIPCIGPIRAARLIALMQTPHRFRSKRQLCTYSGLGIETHDSAQYRYVGGQVQRSKKPQQIRGLNQNHNHEMKEIFKSTATRASCGTGPFRDFYAALLAKGMKPEMARLTLARKIAAITLTLWKRGERFDAKQLKTQAA

SEQ ID NO: 148560 - protein, 333 aa, unidentified
MNPNSCKGQAPAHKEGTDEMVAQTVQDIGIDVAKGWLDVAVFQTQEQARFDNDKDGWAKLVRWLRGRTVRAIGMEPSGGYERGVAKALRSADLPARNVNPHKLRHYARALGRLAKNDRIDALLIARYTAELPTRPVRCDPIAEQLADLVVARRQLSDDKVSLANQLEQLREPMVKRIFTQRLRRIELDIALLAKRMAELVASQPALAAKDRLIQSFHGAGPVLSHTILALAPEIGQASRREIAALAGLAPYDFDTGTFKGRRVIWGGRHALRRVVYMAALTASRSNPVLKAFHQRLIANGKQPKVAIVAVARKIMTILSAMLRHNQPWYPDKA

SEQ ID NO: 148561 - protein, 502 aa, unidentified
MTAPTTRRKPASPSAAGGRQAQDHRKPWAKLKSEARRPSESARVEALPVQHPHAAGIDIGSRSHWVCVGFTTDADPGSIREFPAHTDGLKAIAAFLREHRVDTVALESTGIYWVPLYELLQAEGFEVLLVDPSYTHQLRGRPKTDRRDCQWIHRLHSVGLLAAAFRPDEETCQLRAYLRQRANLVRQASRHVQHMQKALEQMNLKLTEVLSDVTGLTGRAIIRAILRGTRAPEKLAKHRDKGCKASETEIAQALTGSYREEHLFELKLAYEAWQFTLRQVAEVHGQVALQLGRMRCDRALPPLKPKPRPKRRASSPGFDVRAGLYYVVGLDLTEIEGVSELTALTVVSEIGPGVSRFATVKKFCSWLGLCPNWKKTGGRVRSSRTRRGVNRAAQALRVAAQGLHHSKGALGGFLRRMKARLGAQAALTATAHKLARIVYLALKHGMTYVRQGQEEYEAQMKEKQVRALRRKARQLGLEVVEKTPGSVPTATASPEQGQTSEE

SEQ ID NO: 148562 - protein, 364 aa, unidentified
MKKVSKKQRAIAAQSKPETIVGLDLGDRYSHYCMLTGTGELMEEGRIRSTVVALEKQFGNEPRMRIALETGTHSPWVSRLLESHGHQVIVANARKIPVITASESKNDRNDAEQLARMAAFDPKLLHPVEHRSLERQQDLNLVHTRSVLVRARTMLINSVRGLVKSGGGRLPACSSAAFPGKARGVIPEVLKAACEPLLEQIAQMNRGIGEMDRQVEGLEKKYPEIELLRTAPGVGPVVSACYVLTLDRAEAMESNRQAGAYLGLRPRQQQSGDSNPQRGIAKTGNTYLRSLLVQSAQYILSRFGPDSELRRWGLKLAASGGKRGKKRAIVAVARKLAVVLLSMWRNRKKFEPFPQSADRLNAAA

SEQ ID NO: 148563 - protein, 414 aa, unidentified
MTRRLWVPLHGITISLQEVYTMLFIGIDVAADKHDYCVLSPDGKILCEGSFLNSRDGFEDFLRTAERCRLFKDGDGFKIGMESTGHYSTNILAFLKAKGFNITLFNALTVKNYITSKTLRRTHTDKLSAKHIARMLATNDFDSVCRQHNPLDHLKSFTRALYRLDKEIQPLKNWHRRLIRLLFPEAIGFFGKIDTPTALAVLEAFPSARDIAACNITKLTSILSAASKGHFKREKADTLKHLAKLSIAVYDQGSAFELRQTVRRIKFLEQQKSDFHAEIKSIMLELNSPITSIKGIGYILGAVILSEIGDIRNFATPNKLLAFAGAEPSIYDSGKYSADKTPMAKRGSRYLRKALYLATVKAFILSPSFRAYINLKRAQGKHFYTALSHGMKKLCRVIFAVLTTNMPYVEPKSN

SEQ ID NO: 148564 - protein, 451 aa, unidentified
MSKPQVIDDEEHERVHERVAAVDVAKDSGMVCTRLPHPSRPGARQSTVWTVKARMGAVGKLGRQLKDSGIELVTLESTSDYWRIWFFVLEACGLAVQLVNAAQAKNLPGRPKTDKLDAQWLARLTELGLLRASFVPPAAIRALRDYTRARTRLVQERTRCYQRLEKLLEGALVKLSSVASKLTTESAKDMVKAMIAGQRDPRTLAALARTRMKAKHDDLVEALDGMFDDHHGELAGLLLDQIAFLDQRVAQLTARITAAVAAMPEAWGVDGDGTAGPDAGAGPDAVVLPAAARLAEIPGVSQDLARAIIAETGLDMSRFPTAAHLVSWAGLCPSARQSGPRSRAGKKSQGDTWLRGSLGQAATGAARTDTFLGERYWRIARRRGKAKAQVAVARSILVIIWNLLKDPAARFTDLGTGYYQARTDKDKKIKNHIRQIEALLGHPVTITPKAA

SEQ ID NO: 148565 - protein, 355 aa, unidentified
MNYEKYIGLDVHQATISVAVMDSTGKLIMESILETKASTILEFLGGLRGTLSVTFEEGTWAAWLYDLLKPHVAHVLACNPRKNAALNQGNRNDKIDARELANRLRLNDLKSVYHGENGIRMLRELARSYLTIVKDLTRVMNRLKALYRSWAIPCAGRDVYYTRHRSQWLAKIREAGPRRRAEQLYQQLDMLQHLRQQARRELLSESRKQSIIAKLRQIPALGPIRCALAVALIQTPHRFRSKRQLWKYCGLALETRISGEYVYVQGERRRSKKQLSIRGLNKDHNHDLKGLFKGAATRASVMPGPFQEFYQRSLAKGIKPTMVRLTLARKIAAITLTLWKKGESFDVQKLKSQAA

SEQ ID NO: 148566 - protein, 413 aa, unidentified
MDVLHGRCCGLDVHKSSISACILLREAGRVQKHQRRFGAMTQDLRELAEWLRQFGVTQVAMESSGVYWKPVWNILEREFTIVLANAQHIKNVPGRKTDQKDAEWIAQLLQYGLLRPSYVPREIIRDLRDLTRMRASLSQEASRLSSRIQKVLEDANVKLASVATNVLGKSGRAMLEDVIVEKDDPEHLASLALGHLRVKIPQLKLALEGNIRSHHRFLLRRLLDQVQYVEHEIALLDQRLEDIGCQRPELAQAVARWDTIPGVDRVAAWALLAEIGDNMAQFPTAEQLASWAALCPGNHESAGKRLRGTTRQGGPWLRRMACQCAWAAARTKNTYLSSQFRRLAARRGKKRAIIAVAHTLIVIAYHLQKNQSNYNDLGGSYFDRIHSDGLKRYLVNRLQQLGLKVTLEPMEAA

SEQ ID NO: 148567 - protein, 377 aa, unidentified
MSDVTASIAPTDVRLWVSLDVHKFSIVAATLPPTGGKPEVARIETTEKAIRRFVERLGGPEGLAVCYEAGPGGFALWRLLSGMGVACDVVAPSLIPVRAGDRVKTDRRDAKKLVELQRAGLLRYVMAPSTETEGLRDLLRCRDDLRCARTAARHRVLKALLRHGRIFRDGKSAFTLKHRRWVNAQRLDDPLAQLALEQTLIHLDSIERQLNALDSQLEQIAASERWQGQAQTLTRFRGISTLTALGLIAEIGDFARFSHPRELASWLGVTPSEYSSGDQQHHGHITKAGNRHARRLLVEVAWHYRHAPRRPASGPQPDERAWHAQVRLHHRYRHLTAHGKRPTVVNIAIARELTGFLWAAMTDQPLTTHNQPQENAA

SEQ ID NO: 148568 - protein, 384 aa, unidentified
MNKHNILFIGLDTHKVSTEVAHVEEQRGAKPTHFGKIKTTKAAITKLARQYQSKYPHATLHFVYEAGPCGYWIYRLLTSLGHCCYVVAPSLIPKKPGVQVKTDKRDALKLAKLLKDEELTPIYVPESEDEAIRDLSRARETTMKDLKDAKYQLKALFLRNNITCKVNDNWSLQHLRWLTELVLPHPSQQIVLQEMIHTITERIQREKRLTNELFHQIKQWRFYPVVKALQAIRGIRMLAATGIVAELGDLRRFDHPRKLMSYLGLVSKENSSGDNRRLGSITKCGNGRARRLLVQGAHTYKHNANISTELQKRQEGLPKEITDIAWQAQLRLCRRYNRLMNRGKHRNVVVISIAREMAAYIWAIAREVVISPVNTRLRISRVPA

SEQ ID NO: 148569 - protein, 340 aa, unidentified
MEHKRIAIDTSKQVFTLHGIDQADRPVLRRNLGRAQMEKFFTQQPPTEVVMEACGSAHHWGRTLQAMGHQVRLIPPQYVKPFVKRGKNDRNDAEAISEAASRPGMRSVPVKSAERQAEAMLLSSRDMLIGQRTQLINAVRGHAAEFGVIAARGTANVEKLLQVVADSASGVPARAQTALALYGRKIAELDADIAALDREVAAQHKASEASRRHATQPGVGQILALALTLTVDHTQFESGRHFAAWLGLTPREKSTGGRQRMGGISREGNERLRQLFVLGATAVIRVAKPGSKLATPWLLQLLERKPRKLAAVALANKMARIAWAMMSRGEAYQQPKSVAA

SEQ ID NO: 148570 - protein, 486 aa, unidentified
MNSIVLTANVQPNLDVNYIGMNVHSDNVVVCVRRNTINSSGQLVGKTIKTKKVVIKNSQEPLVELLSKYADGQQHIMTAESTFNWYWLADIAEDHGWNFCLADPCTVSQANIKAANDETDAEYLADRLRTGSLKSTSVLPRQLRGVRDLMRHRLRVMQEVSDKKVRLSNLYHNHCAHPMHGKLLAALQDAYDEINIDAVLESGICNNGSELIIGDLLTGLREAETRLAKIEAAVYGRIDEIDSYKAERMLLKTSMKGCGDVLSAIIVTEIGDISRFRTMGDFVSYCRLAPTSKLSNGKSKGQGNAKNGNAYLSWALTELATLMARFNEPIRRYLERKQEKTGLRGVAVRALAAKLARCVYQVLRKKESFDLGLAFGSKPTHGQMTAAAEAAQTPPEPALPPVPAVAGEHHCPAEESDAPIVVKEPVPVKSKRSTRKKAVSAASSEPAVAAEGRQTARKADRVKARCALTTTPPSCAGTSCVKSRRE

SEQ ID NO: 148571 - protein, 342 aa, unidentified
MEHYAGIDVSLECSSVCVVDANGKIVREAKVASEPQALIAWVGSLGFGLERIGLEAGPLSQWLFAGMKGASLAVELLETRHVRKAFEAMPVKSDRNDARGIAQLMRLGWFRPVHCKSMSAQETRSLLTARKLVQSKLHDVENSLRGILRGFGLKVGKTTGQKFAGRIEELVAGHPHLQTIAKALLAVRAVLRAEFAAFEKQTRRMVRSDMQARLLTSVPAVGPIVALTYASAIDDPARFKSSKQAGAHFGLTPKKHQSGETNYTGRISKIGDASVRTALYEAANVMLTKPVKGGSQLKSWAMRIKRRAGTNKAKVALARRLAVIMHRMLADGAPFNAAAAAT

SEQ ID NO: 148572 - protein, 461 aa, unidentified
MAKQLGKRKKDGAKADATEGLPPLNLHAAGIDVGSAEHYVAVPPDRDAEPVRKFGSFTADLHRMARWLKDCRIKTVVMQSTGVYWMALYDVLESHGLEVNVANARHTKTLPGRKTDVQECQWLQKLHTFGLLNNSFRPPDEIRVLRGYLRQRENLVAAAATCIQHMQKALTEMNIQLANVISDISGTTGLAILYDIVRGERDPYKLAMHKHSRIRASRQEIARSLQGTWRQELLFVLEPSLDLYQTYQQKIQTCDERIDGQLRSMEPRIDPLSEPIPEPRRGKDARGHQSGFDLRGQLYRITGVDLTRIAGIEVQTAQTIISEVGVDMSRWKTEKHFASWLGLCPDNRISGGKVLKRGTRHVVNRASTALRLAASALLRSQSALGAKFRRLRSKLGAPKAITAMAHMLARLLYRMLKFGHDYVDRGIAFYENKYREQQLKRIAKQAAALRMQLVPLAEVVS

SEQ ID NO: 148573 - protein, 332 aa, unidentified
MGQPATISVAVVNADGKLVMQSVIATHAATILDFIHGLRGTLHLTFEEGTHSAWLYDLLARGVARVVVCNPRQNALLKAGNKSDTSDARKLAELLRAGLLAPVYHGEGSTRTLQELVRSYAALTEDTTRVMGRVKALYRSQAIACAGKKPYGRRHRRAERLYEELDALQGLRRAAKRELVLESRKHAAAKLLRTVPLLGAIRAALLIGRVQTPHRFRSKRQFWAYCGLALETRSSADYRFEDGQLVRAKKPVFIRGLNRNHNHDLKNLFKSAATTASALHGPFREFYEGLLAKGMQPAMARLTLARKIAAITLSVWKKGESFDAEQLKPQAA

SEQ ID NO: 148574 - protein, 346 aa, unidentified
MSDIGIDLGRRTSQICILTQEGELLERGVLTERERFAAALKNHSGARILLEAGTESEWVARCLEGLGHEVIVGDPNYAPMYARRQRTVKTNRRDARALAEACRLGAYRPAHRTSEEQRRVRARIAVREALVRTRARHVVLIGSLLRQEGLHMPGGGTATFPARLQAVTVPEPLQQAIAPMLPVLEALNRQIQEADRELAALAGTDPRVRRLRTAPGIGPVTAATFVATVDRVDRFAGPHQLEAYLGLVPRENSTGDQQRRGPITKAGNGRLRWLLIEAAWSIVNYPKPETAALRAWTLRIATRRGRPRAVVALARRLAGILFAMMRDETVYDPNRRTSTMQNVRTV

SEQ ID NO: 148575 - protein, 410 aa, unidentified
MERVLERCCGLDVHKKTVAACIRIPGKKKGQREQEVRTFGTTTRELLELRDWLEANGVTHVAMESTGIYWKPIFYVLEGAFSCLLANAAHIAQVPGRKTDVKDCVWIAQLLEHGLLRGSFVPEAPIRDLRDVTRYRKGLVQERTRVSNRLHKVLEDAGIKLASVATRVLGASGRAMMEALVAGTTEPAVLADLAKRRLREKLPALREALAGSFRAHHAFLVSQLLAHVDYLDEAIQGASVQIETLMAPYAAEIERLDTIPGVNRRTAEVLIAETGADMSRFPSAKHLASWAGLCPGNNESAGKRMAGTVRKGNRWLRTALVEAALSASRSKDSALAARYRRVMRHRGHKKAVIAVAHAILISVYYMLSRQVPYQELGPDYFDRRHAERARRRAVQTLERQGYRVTLEPAA

SEQ ID NO: 148576 - protein, 471 aa, unidentified
MIKRNQSSLGIDLSDKTANYCAMNADDVVVAEGKVGLRVARLAEMWRRYGPVDVVVMEAGTPSTWVQELFEGLGARVIVADPRKLQAVTASVRKSDERDARMLARLGLADEELLSPTYVRAPEHRRTMALLKVRDQQVRFRTATVLEVRSQVKLAGGRMPPCDAADLHEHEDAVPDEIQDVLAPLFGTLRGLAESIGKLDALLEEEAARFPVVSQLTQIDGVGTITALAFVAVVGEPTRFANTRDIGAYLGLVPRRDQSGLSDPSRRISKAGCGFLRRLLTQCAQTVCRARGKDTAQRRWAHRQIALRGKPGKRKVVVAIARKLAVLMLAIWKSGESWNPLHRVPAASPADAPHPVVHDECGSESCASERDTKSAPPSTTRTQPCTEGQPLTKSADGSTGRSGAPRTPAARTTKPSQDGMPGASAPARSATPSAPATPACAGGPADLASASRAGPSSKRGRFAAEGVPPSA

SEQ ID NO: 148577 - protein, 404 aa, unidentified
MYNAVGIDVSKGKSTVAVLQPGGTVIRKPFDVSHTSQNLNELADYLSSLDGTTKIVMECTGRYHEPMVKALSEAGLFVSIVNPHLIKNFGNNSLRKVKSDPADARKIARYTLDNWTELRQYSGMDNTRTQLKTLNSQFSFFMKQKVAAKANLIALLDNTYPGVNKLFDSPTREDGSEKWVDYAYSFWHADCVRKIGLKAFTERYKSFCKKHHYIFQQDKPEKLFNASKELVAVFPKEKTYKLLIQQSIQQSNLASEHVERLRREMNELASTLPEYSTVMGIYGVGKTYGPQLIAEIGDVSRFTHREALTAFAGVDPGVDESGQHKSKSNRASKVGSARLRKTLFQTMTTLLQNAPEADPVYRFLDKKRSQGKPYYVYMTAGANKFLRIYYGKVKECLRNLEQTE

SEQ ID NO: 148578 - protein, 335 aa, unidentified
MLFSGIDLHKRSLVIHTLDADGATAREAELKSDRAAVMAYFGTLAGPHRAVVECVQSWYWLRDLLAPAGVDLRLAHAKYVKAISYAKVKTDRVDARMLAQLLRVGLIPEAHMIGAEHRETRDLLRSRLQLVTRAVRCQHAVGSLLEKYNVTAPAELPELARMQATLQDEQRALLRTHIKRVEATLKQRLLPTPDVQRLVWVPGIGKLGAYALVLEIDDVQRFPTVRHFHSYCRLVPGADNSAGKTRHKRSRDGNRYLKQVFHTAAIRAAQYHPEIRQEYRRLARRKGKIVARALIAKELASIVYYVLHKQEAFNGRFRGHVLTPKPPRWPRLASP

SEQ ID NO: 148579 - protein, 350 aa, unidentified
MSQTLKTSVAVIGVDIGKNSFHVVGQDRRGAIVLRQKWSRGQIEARLANLPPCLIGMEACVGAHHLSRKLQMLGHDARLMPAKYVRPYSKGQKNDFRDAEAIAEAVQRPTMKFVATKTDLQALHRVRERLVSQRTGIINQIRAFLLERGVAVRQGLRFLRGELPGILATRTDVLSPRMLRIIEDLAGDWRQLDERIEGLSNEIETLARHDQACARLMTVPGIGPIISSAMVAAIGSGDVFSKGRDFGAWLGLVPKQISTGDRTILGSISRRGNRYLRVLFVQAAWVVLVRVKQWERYGLKSWIEAAKKRLHHNVLAIALANKLARIAWAVLNKGRAFECVKTDAMASRPA

SEQ ID NO: 148580 - protein, 338 aa, unidentified
MKLYGGIDLHSNNSVVVIQDEEDRRQFEKRLRNDLPTILRALAPFASELEGLVVESTYNWYWLVDGLMEAGYRVHLAHTAAIRTYAGLKHGDDFTDASWLAHLLRLGLLAEGYIYPKPERGLRDLLRKRGQLVRQRTTQLLSIQNQVLRTTAQRLSGNRIKQLTVEEVEGLLPEADVALAVTSNLAVMDCLMEQIRHLEGVVRRRMRPKPGFDHLCTVDGIGPILAWTILLEVGDIGRFHRVGQFASYCRCVDAHRLSNGKKKGENNGKNGNRYLAWAFVEAAHFAVRYNPKIQRYYQRKKAKKNGAVATKAVAHKLARACYYILRENVPFDVDRAFA

SEQ ID NO: 148581 - protein, 405 aa, unidentified
MGRVFVGHDWAEAHHDVFVEDAVGRRLVATRLPEGLDGVRRFHELVAEHVEVPGEVLVATETNRGLFVTALVAAGYEVIAVNPLSTSRYRERLSTSGAKSDPGDARVLAELARVDGHNHRRIAGDSDLAEAVKVLARAHQTMIWTRTRHTNQIRSTLREFYPAALEAFDDLASGDALAVLAIAPTPTLGRSLSRSKIASALRRGGRQRRVEERAAEIHTALRPEHLEAPPVIADAMGASVAALIAVTVELVAQIDRLEQELTDRFEQHPDAKIIRSLPGLGTILGARALGEFGDDPNRFADAKSRKNYAATSPITRASGKHRVVLARYARNRRLADVTYRWAFSALSASPGARTFYDHRRAHGDTHNRALRALANRLVGILHGCLTHRTLYDEHLAWNHRTQAAA

SEQ ID NO: 148582 - protein, 344 aa, unidentified
MKIKLLGIDLAKNVFQLCALNQANKVLFNRTVRRVQLCSTIAKLEPTTITMEACSSAHYWGRTFEAMGHKVLLVPAQHVTPFVRGGKSDARDALAICEAAQRPGIHMVPIKSIDQQDIQLLHRLRQRQVQHSTALANQIRSLGREYGVIFPAGIKSLISQLPEALEDGSNELSPVARYALADQHRCLIEVRHAMTTFLHQIEQLAAQHPAYINLLPLPGIGPMIASAYIAAIGNGRQFKCGRQVSAWLGLVPRQFGTGGNIQLKGMTKNGDRYLRTLMIHGARAVITRGLKNRPELAQWIQPIIDRQGFNKAVVALANKMTRICWVIVTTGEAFDMKQAFKPVA

SEQ ID NO: 148583 - protein, 398 aa, unidentified
MRIETQPQDHPTATTGETARLLVSFELSQSKWVLTVRAPASAKLSRFTVPSRDTEKVSSLLTAQRQQAERRTARPVQIVSIYEAGLDGFWLHRWLETQEVESHVVDAASILGPQRRRNAKTDRIDGEKLLRSLAAWLGGEVGVCSMVVPPSVAQEDLRRLSRERGELVDERTRLSNRVGGLLANQGIAGFKPLKKGARQALQTLRTGDGHELPPHLRTAIERILQRLELLSEQIKAAETERDALLRAAQVAAAPEAATAASPEMAAAPLLLRLRGIGPEFATVLPLECLNRDFDNRRQLGAFAGIAPTPWCSGSVEREQGISKAGNRRLRTILIEAAWSWQRHQPDSALTQWFRKRIKGQSARVKRIAIVALARKLLVALWRYVKHGVVPQGAVLKAV

SEQ ID NO: 148584 - protein, 357 aa, unidentified
MKNNTNTQKSSSIKTAAKAKIIKLGIDVHADSFSVVRQMDNDTPQPAQKFTPEGFLKWVAKQIPLAEKVYSCYEAGPFGYSLHRQLLKMGVQNVVVRPQNWDELGRKVKTDKIDALALVQRLDRYVQGNRHALAVITVPTPEQEQARALGRHREQLVKERQTHEAQGRSFLLYNGRRVQGQWWRPLAWEVLKKMLEPWQCPILENFRAQILLADQQLQQAEKEVVAQAPSPAKGFGALTCQLLRREVLDWNRFKNRRQVASLTGMCPSVHASGGHCRQGSITKHGNPRIRRLLVEMAWRVIRFQPSYPPVQKWRPQLDNKSARGGRKKAAVAIGRHLAIDLWRIETGRSTAVKLKLI

SEQ ID NO: 148585 - protein, 351 aa, unidentified
MYTLGIDLHKKSSVWVLINEQATELWKGNVACHPNNISTAINNFPVPTNEVEVAIEPVCGWRWVVSQLEEVGMKVHVAHPRKVQLIAQSMKKTDMEDARTLANLLRSGYFPEAHRVSDEIYHLRLLLRERTYLVRLCTSAKNQLHGIATTQGLHLIKGGNPLHQRGKSGIMEGDNFVLIELHKLVADLQARIVSFDGVLKREVKNFPIVKLLMTMPGIGIITALTIIAEVDDFKRFKSGKNLASFAGLVPRQRSSGETVRYGSITHQGSEPLRTALVETAMRIRESNAPELFVFLKRLTPTCGAKRARVALARKMLVILWKMVMTNKLYDEKILASSHTMNVSNLDTASGA

SEQ ID NO: 148586 - protein, 386 aa, unidentified
MQKLNDLSRSLTALEPDGTLIAVIEMSQSSWLVAGIVPGIERQPLKKLAVDESALLKLLHRWREEAEKAGRRIERIAVAFEAGRDGFWLARWLKARGIEAYVIHASSVAVSREHRRAKTDRLDTELLKRSFLGWLRGERDHCKMVEIPTMKDEDAKRPNREHDSLIGERSRIVNRMKAALVRLGIRGFNPKLKRASTRLDGLRTPEGEPIPPNALAELRRDMERRRLVNNQIRQIEEERLKRIEQAPCDGPHVMVRLLARVMGVGIETADMLVHEVLSRNMRDRRAVARYAGLTGSPDESGRKRREKGLARSGNTRVRRGMIQLAWRFLLHQKNSALTKWFRSRTENARGTRKPMIVALARKLLIALWRLVREGIVLDGVVLRAAQ

SEQ ID NO: 148587 - protein, 385 aa, unidentified
MASQNDLSRSLVALQQNNTIIAVIELSLNSWLVAGIVPGGERHPLKKLSVDEKLLLQLLYRWRDEAVKAGHMITRMAVAFEAGRDGFWLARWLGARGIEAYVIHPTSVAVPREHRRAKTDRLDTELLKRVFLGWLRGEPDHCRMAAIPSLQEEDAKRPTRERENLVGERTRVVNRMKACLVRFGIRNFKPTLRKAPKRLNALCTPEGDPLPPNTLAELRRDMARLRFIIDQINEIEAARLQRLELAPAEAPHAMVRLLARVIGVGIETADMLVHEVLSRNLRDRRAVARYAGLTGAPDESGNKRREKGLAKAGNARVRRGMIQLAWRFLIFQKDSALARWYRTRTESAGKKRKTMIVALARKLLIALWRLVTIGEVPAGVVLRAA

SEQ ID NO: 148588 - protein, 520 aa, unidentified
MGACGLESGDVVLAAIPIRKMTIGIAQTLLLVIEWRIAMPKRTTGDRPELKTVSVGAAAIDIGSKMHMAAVNPACTDVPVRSFGTFTQHLHDLADWFKACGVTSVAMESTGIYWIPVYEILEQRGFDVILVNARYAKNVPGRKTDVSDAAWLRQLHSYGLLRGSFRPDAEIATLRAYLRQRERLVEYAAAHIQHMQKALMEMNLQLHHVVSDITGATGMRIIRAVVAGERNPDVLATYRDVRCHSSPETIRAALVGNDRDEHIFALTQSLELYAIYQAKMLDCDRKLEVLIAALSNKGEKPVGKPSKPRIKTKQVNTPTFDVRTALYGVLGVDLTEIHGLGPSLALKLVGECGTDLRAWPSAKHFTSWLCLAPGNKISGGKVLSSRTRRSSSRAAALLRLAATTVGRSDTALGAFYRRLSSRAGKSKAVTATARKIAVLFYNTLRHGMSYRDAGADHYEQQYRSRVLANLQRRAKSLGGPDLGIPNRINLTPFRSRPRLPRLIAVDANSKARTKSGLPTR

SEQ ID NO: 148589 - protein, 347 aa, unidentified
MLADQLDYVVGVDPHRDSHALAIVHVVSGAVVFESTVIANSDGYAQALKLVDRHAPGRRAFAVEGTGSFGAGLTRFLTARDERVLEVGRSRRERRSGGKTDALDAVRAARSVLTQQRPATPRAGGERQALQALVAAREGAVNAKRAGLCQLRDLLITSPEPLRSELRPLTRARLLQRLAATRPGGGRDPELRGSMLALRSIARRVLQLTAEERELAREIETITRKLAPQLLEQPGVGPHAAAQLLLSWSHQGRISSEAAFARLAGAAPIPASSGQTIRYRLDRSGDRKLNRALHMILVTRQRSHPATIAYIERRIQEGKTRREANRCLKRYLARNLYRLLEHPPMTI

SEQ ID NO: 148590 - protein, 453 aa, unidentified
MNKIAKKKSKSVVSMPLINPNAAGIDVGDTLFSVAVPEGSDSQRCREFTAFTCDLKAIAAWLKECDVETVAMESTGVYWKQLFSVLIHEGFEVYLVNARHVKNVTGRKTDETDAMWIQRLHSCGLLNSCFLPDEHTETLRTLVRFRRTLTQDSSRFILRMQKSLELMNIKIHTVINDITGKTGTGIIEAIIAGERNPENFIPLIDARIKASLEIILKSLEGNWSKEHLCTLKISYEMYNQLKQKITELEKVIEETLQDYAALKNDGEILPLGKTAEPKKIKRKTKNQPAFNTRDYLHQIHGTDVIEIFGLSEICGLEVLAETGTDLSKWENENKFTGWLNLCPNNKVSGGKLISSHKLKKKPNLATQAFRTAANSLRQSNNWLGDYFRRMRAKGGNKYAIVATARKIAIIYYKMVRYKQTFAPIDLQEYQEKYKAAKIAWLERKLRQLKGEAA

SEQ ID NO: 148591 - protein, 362 aa, unidentified
MRIIGCDLHARQQVLAMLDTTTGEVVSMTLKHEGNNVREFYSSLPRPVRVGIEATGSMQWFLNLMEELGIECRVGHPAQIRACEPRKQKHDRRDAELILKLLAEDRFPAIWLPSKELQDLRSLLRHRHQWVRMRTRIQNALQSIALANGLRRGTALWSQDGQNRIAALPLTPHTAYRRSELQAMYEKFEAEIEKLNQRVEEQACQRSGARLLMTHPGVGPITALATEVFLGDPARFADSKALASYVGMIPREYSSGGRQRLGGLSKQGNPLLRFLWGEAGAHAARKDPELQRFYRRKLVQKGLGKASVAVARKLGIRLWIMLRDQIEYHEFCRRGQKQQKSSDACAGMPETPNGAKSHRPVD

SEQ ID NO: 148592 - protein, 485 aa, unidentified
MAKHRESTFERLQKGQSLNRHQKRELAERLNSADPGFEVVNRHAAGIDIGNESHYVAVPVGRDAQPVREFGSWTADLERMAQWLKACGIESVVMQSTGVYWMAVYEILQSHGFQVHLVDARGSKNLPGRKSDVQECQWLLRLHTYGLLRSCFLPPESIRPLRTAWRLRDQHVKEAGRCVQHMQRALTEMNVQLHNAISDLSGVTGQAIVRALLAGERDPVRLAALRDRRIQASSEELVHSLRGNWKEEALFELQQAVEAYDFYGQQIAQCDGRLQQYLAALPSRESVPQPPADAAPGSRPARKRRLPSKLVKRKGNEPPFDIESEQRRILGVDATTIDGIEVMTVQTVLAEVGPDLSAWKTERHWSSWLNLAPKRDVSGGRVIRHTREHRTNRVGNAFRMGAQSLLRSHSYLGARFRYLRAKLGAIKAVKAMARVLACLFYRLLTQGQTWVDRGTAEFELRRQQREFAALRRKAQDFGMKLVPTA

SEQ ID NO: 148593 - protein, 323 aa, unidentified
MPTTFLGIDIAKLTFDAALITQDGTPKHKKLPNTKEGFAQLDAWLTQNMVTDLHACLEATGIYGDALARHLHAQGHRTSVVNPSGPKAFARAQLSRTKTDKADAIRIARFCQAHQPHLWTPPAEEIATLQALARRLEALRGMHQMEKQRLESTPTSVVASVHAVLATLSEQISQVEQQIKDHIDRHPDLKEQSDLLESIPGIGPATAALLLCELGEWRRFASARAAAAYVGLVPRICESGTSIRARSVLCKIGNSRLRKALYFPAMNAIRFNPVLQAMAQRLAAAGKSKMSILGAAMRRLVHLSYGVLKSGKPFDANIPLQRV

SEQ ID NO: 148594 - protein, 359 aa, unidentified
MTMLAEKDDGIEQVPLWDAVVGGDTHRDTHHLEMLSGQGRLISTISVDNDADGYAEVLAWIAEHAPGPRVLIGLEGTRSYGVGLCRAVQAAGLEVVEAEQPKAAARRGRGKSDPIDAHLAALTVLRMPLDRKVLPRNDGDREALRILLVARNEISTTRTAQINRLRALLLLGDDADRVLCRGSMSKAHLDQIARRRGRQHETCEQEIRRGEARRLAVAIRDADVELAANLKRLRALVKVFAPGLLDRKGVGPVSGAQAIVSFSHVGRCRNEAAFAALAGASPLLASSGRTNRHRLNRGGDRQLNRALHTIMLTRWRDCPITRAYIEKRQNDGKTDREIRRCLKRYIARELFRALTAAGS

SEQ ID NO: 148595 - protein, 355 aa, unidentified
MKQGRQLDFTGQNIFVGMDVHKKSWKISIRSEQMELRTFSQSPSVKILSDHLKQNYPLANYHVVYEAGFCGFGYQRKFAEEGINCIIVHPADVPTSDKDKQRKSDTVDCRKLGQTLSKGQLTGIYIPSIGQQDDRGVIRVYQQMVKDQTRFKNRIKSWLAFQGIDIPGDDEHKYWSNNFVRWLKNISLTPSARIHLDILIQGYEQARAMVLTATRQVRALSQQTRYRGMIKLIRSVPGIGEITALLIITEIGDIHRFKTLDNLCDYIGFVPRVHGSGEKETTLGLTHRGHHALREKFIEASWTAVRLDPAMTLAFNTYCKRMKKNRAIIKIAKKLLNRVRYVLKNKKAYVPAVVK

SEQ ID NO: 148596 - protein, 416 aa, unidentified
MNPEAISRPIDRYIAIDAHKHYVMVGGLNAQQETVLPTRRVDMENYPKWAKANLRPGDAVVIEATTNTWTLYDVTLPYVSKVVVAHPLEVKQIANARVKTDKHDVNCLARLLVADLVPEVWVPPKEVRELRTLIAHRHRLVKMLTMTHNRLHSVVHRNNLVPPEGGFWTDKNRTWWESLTLSRVEKLQVRQDLAMLDHLEAQIGEVGQELARLSTTSPWREHTPYLLQLPGFGLINAMTVLSSIGDITRFPTPKKLVGYSGLGGCVHDSGQAHFAGPITKQGRKELRWALVEAAWIAVEHHPFWKREFHRLTRRMKSNKAIVAIARKLLVVIWHVMTERVADRKADPNMVAFKLMTWSWKLNDLQRGGLTTRQFVRYQLMQLNLGEELSCIRRAHPKSIASVDEILALKPELRPTT

SEQ ID NO: 148597 - protein, 360 aa, unidentified
MQRKINENSFNGQSFYVGIDYHKKSWKVTILGEKYEHKTMSQNPDPKVLANYLKRNFPGGNYQAVYEAGFSGFNACRKLRELGINCIVIHPADVPTNQKERLQKTDKVDSRKLARSLRSGEFEAIHIPDNKLEADRALVRQRFRLVKDISRTKNRVKSLLFQFGIDIPGRFTSQQTRHWSKVYINWLKELPIEQESLKLTLDNYLRIGEIQRKELLTINRQIRKLSKTEYYQNNCRLLLCIPGIGLMTAITLLVELGDIKRFKRLDELCNFIGLVPSMYGSGEKMETGKIIKRGRKALKILLIEASWQAVRKDPALMMKFNELTTTMKKNKAIIRIARKMLSRIRHVLVHQEEYELAVVQ

SEQ ID NO: 148598 - protein, 346 aa, unidentified
MTIVEARVITGGVDTHADMHVAAALDPVGGLLGVEEFPVTPAGYARLLGWLGGFGTVGLVGIEGTGSYGAGLARHVTAAGIRVVEVDRSDRQDRRRQGKSDPLDAVSAARAAQSGRARGAPKGRDGAVEAIRALMVAKRSARSERTQTINQARSLIVTGPDDLRVRFAGHTVTALVSELAALRPRPGDAVGYATRIALRELGRRAEFLDGQLGRLDELIIPLVTARAPGLLALHGVGPDTAALLLIAAGDHPHRLRSEAAWAHLCAAAPIPASSGKVTRHRLNPGGNREANHALWRIVITRMSSHAPTRAYVERRSQQGLSKKEIIRCLKRYVAREVYRHLRTAAD

SEQ ID NO: 148599 - protein, 366 aa, unidentified
MKKGSTAAAKQSSNFSQPKLTIGLDLGDRASWYCVLDEGGELRLEDKLSTTAKAMRDVFGRMPHSRVALETGVHSPWVSRLLSELGHEVIVAHARNVRLIGESRRKDDRLDAQTLARLARIDPRLLCPVKHRSAKAQADLTLIRARAGLVRARTALVNTARGLAKSYGERLRGCNVRNMNPEKAEGLSPELQTALQPLLAGIESLSERIREYNQRIEALAEQSYPEVALLKQVKGVGTLIALTFLLTLEDPQRFRKSRDVGCYLGLQPGRRNSGQREPQMHISKEGDPYLRTLLVQGAQHILGPFGPDCDLRRWGLKLAERGGKNWKKRAIIATARKLAVLLHRLWVSGEVYEPFHNSKLMMVTAA

SEQ ID NO: 148600 - protein, 322 aa, unidentified
MRYIGIDVSKATFVVAYSSDKGGEIRTFNNTTAGIRQFIGTLPKDGSIHCVMEATGNYSALLLYMLNVAGITVSMENPLKVKNFAKAMLSTIKTDKSDARLITLYGEKMNPRPFKVQGEAILRLRQKRTVIRQLTKQITAMSNLRGSLACLPVPDKGATHTVDETIKFLEKKRDRLQSELTDLVEVEFSRQLALLTTIKGIGITLATALIITTGRFSYFDNAKQLTRYLGLSPTYQQSGTSVNVKGHINRNGDSSLRSQLYVAAFSSLRCNTECKACFDRLRSNGKPGKVVVIAVANKLVRQAFAVVTQGKPYVDGFKSEKP

SEQ ID NO: 148601 - protein, 356 aa, unidentified
MDKVIREGAVRVGVDLAKRVIQVHAVDATGHVLTSRALPRARFIDWCVRLPAGCVVAMEASSSAHHWARKLIALGLDARIISAQLVEPYRMEGVSGKNDANDAAAICEAASRPKMRFIPVKSIEQQSMLCVHRLREGLKEDRTACINRIRGLLAEFGLVFPQSPRELQAALSDVLEDAGNELGTLARLTLQRAQAQWRELDDHLAWCDERIDAHRRSNPEVQHAATLIGIGPVTASAAIATVGDFKQFKNGAQFGAWIGLTPRQRSSGGKNNLGGITKRGDTYLRTLLIQGAKSAVMTAHRRQDKISSWVLALRERSGWQKAAVALANKNARILWAVMTRGDVFDPNHLSVKPTAC

SEQ ID NO: 148602 - protein, 460 aa, unidentified
MRPDPVEIDAEAHEQVVERVAAIDVAKASGMVCTRVPHQAKPGQRSTKVWQVPATSNAILELAEQLVAQGIERVVVESTSDYWRPWFYLLEARGLQVWLVNARDVKHLPGRPKTDKLDAVWLAKLNERGMLRPSFVPPAQIRQLRDYTRLRSDLTGERARHVQRLEKLLEDALIKLSTVATDIMGVSARAMIDALIAGQRDPKVLAELARGRLRVKRAALVEALTGRFDDHHAELARILLDHIDALGGQIERLTSRIEELIAAIPAAHPPQGGATPTGGPPSDPATGEGTHQQATQPPLSALARLDEVPGIGPKAAQVIIAELGLDMGQFPTPAHLVSWARLSPRTIQSGAKHRRGTTGKGNPYLKGVLGEVAAAAAKTDTFLGERYRRLVRRIGKLKALVAVARSILVIVWHLLADPTARFHDLGADFYSNRIDTDRKTRNHIRQLQALGFIVTLTPAA

SEQ ID NO: 148603 - protein, 355 aa, unidentified
MNQEKYIGMDVHQATISVAVMDSSGKLIMECILETKAATILEFIAGLRGTLSVTFEEGTSAAWLHDLLKPHVSHLVVCDPRRNGLLKDGSKSDRIDARKLVELLHANKLHAVYHGEHGVRTLKELGRSYLTITKDLTRVMSRIKALYRSWAIPCSGATVYAPRHRDEWLAKIPHPGVRLRAERLYQQLDVLQPVRQEARRDLLVESHKHHAVKLLRQIPSIGPIRAALLVALLQTPHRFRTKRQLWAYSGFAVEIHDSGEYRYVRGKLQRNRERITVRGLNHNHNHDLKNLFKGAAQSASIRPGPLCDFYVALIQKGMRPTMARLTLARKMAAITLIIWKKGVDFDAKQLNRQAA

SEQ ID NO: 148604 - protein, 344 aa, unidentified
MNKYAGLDVSLEETAIAVVDESGRTVREGKVASEIEALDGWLRASGAAIVRLGLEAGPLSSWLYAGLRACGWPVVCIETRRLRAVTQAMPVKSDRKDAEAIAQVMRTSWYRAVHVKSDDSQRLRVLLRHRQILQAKRQDIDNELRGTLKAFGLKLGKVGQTGFAARVMELVAGEPWLERLTQPMLAARAALRQSFAELHKLLLTIVREDTVCRRLMTAPGIGAVNALAYKTAIDDPTRFRHSADVGPHFGLTPRLYQSGETEYSGRISKCGDAMVRSLLFEAATALLHRVKAASPLKLWARRLAKKIGVRKATVALARRLAVIMHRMWVDGTDFNPELGRAAAH

SEQ ID NO: 148605 - protein, 339 aa, unidentified
MNFIGADLHKKMITVCVLNENRTVLVRKTLPCNQPDQIVEFFRQFRPFKVVVEATASYRWFVELVEPLAEKVVLANPKKLRVIAESTKKTDRLDAQILAEFLARDMIPEAYMPTPRQRQHRALVRHRQYLRGRLTSVRCKIRHILSDSNADRKDLFSAQCGTAYLKEVALSDADRFVIKQLWAEFEDHQARLLALAKKIKVFIAKAPKREAEARQIIKTAPGVGAVTAEVVLSELGDVSRFRNAKAVCAYAGLVPAVRQSGGKRSKDLQITKQGSGLLRWALVESAWRLVNQSPKWSAIFCRLRKRSGTKRAIVAVARKLLCVLYAMLKTSTPYKVITT

SEQ ID NO: 148606 - protein, 410 aa, unidentified
MVKENFIYVGIDLHKETHTAVMIDCYNQKLGEITFPNRPAAFPKLVTKVKKCNTDGKEVVYGLENTYGYGRALAVWLIDKGYLVKDVNTAISHRQAKHRGAMYRKSDSDDAKAIALATLNMLDKLPDACPNDAYWSLGQLVHRRDNIMKQRTRLVNQLHEQLCIAYPSYKQFFNDISRPTALYFWEHYPSRKYLKGKSVEDLRAELVPVSHNKCSTKTCEKILDAVASDKVKNNAYQDARDMVTLSIVSDLQHYDSQLTEVDKMLEQMYKMLGCTLTTIPGVNVITAVKILAEIGDIKRFSNANKLAQFAGIAPLHLSSSGKGKDVATKQGNRRLQATIYFLAIQMVQVSSKGTPRNSVVRAYYEKRKAEGKTSQQALICISRRLISIIYGMLKHGTEYRMPVVESAGEK

SEQ ID NO: 148607 - protein, 328 aa, unidentified
MFYLGVDVSKAKLDCCLFKQDTPEKRKSKVVANSVAGVAELLRWLGKQGAQPDNTHALMEATGVYHESAATALHDNGVCVSILNPAQVRDFGKGLGLRTKTDAVDSWLLARFGLLQQPAAWQPPLHHVRQLRALLNRRQALLEDLQREYNRREKAQATETPERIHRSLQDCITFLEHQLAQLQRDIDDHIDQHPDLKKDLALLQSVPAVGPQVGSHLLCVMRSNSFRSAEQLAAYLGVVPVERQSGTSVRGHAHLSKAGSARIRALLYMSAIVGIRHNRHVKALYERLLAKGKTKMAALGAAMRKIVHLCFGVLKNRTPYMENFVSCS

SEQ ID NO: 148608 - protein, 341 aa, unidentified
MTNNIQFSSVCGIDIAKSVMQVYKVTSDGVVSNKAVKRAEFRNIPASLIGMEACGGSQHWARELQSLGHTVRLMPPKLVKPYVTGLKNDKNDARGIYTALVMGVREVPVKSAAIRDLALLQTMRTKRQREKVAKINHIRGILTEYGLVMGKSVNAFLAKAASLIVELKERVDVSPVIVSELIALFQEVKEAIAKIKELETNIESIAKTLKHYDLFQSALGVGPITAATMLVLLCNPEVFKNGREFAAYIGLAPQSTGSGGKNIVTHIPKKYECNNEVRALLVQCAHSICRCRHKSDWVSSILARKPKKVAVIAIANKLARQLWIMAKKGEKFEKRFILAAV

SEQ ID NO: 148609 - protein, 346 aa, unidentified
MGKPIINLSSVTTVGLDLAKHVFQVHCVDASGCVVAAKAIRRNKLLEFFASLPPCLVGLEASGSAHHWARELIKLGHEARMMPPAYVKPYIRRQKNDAADAAAICEAVTRPSMRFVGVRSLANQAALMRHKAREMLVAQRTQLLNGLRGHLTEVGVIAAQGPRHARELAELIEACDETIPFEVCEALAPLVVQLRNLDEAIARLDRTIAKLAQRDETARRLMSIPGFGPITASAMAATIQDTSSFAGPREFAAYLGLTPKQNSSGGKQKLGRISKMGNRNLRKLLVVGAHAVLFHRKPHTDPLRMWAKKLIEKKPFKLVAVALANKMARIAFAILRGKTVYREIPA

SEQ ID NO: 148610 - protein, 454 aa, unidentified
MEKLPKKPKVVEMTLVHPNAAGIDIGDSIHAVAVPVGRDVESVRTFGAFTCDLEAIIEWLTKCRIETVALESTGVYWKNLFNMLVQSGFEVYLVNARHTRNVTGKKTDESDAAWIQRLHSCGLLNSSFLPDDQTETLRTIVRHRRNLTKDSSTCINRMQKSLELMNLKIHTVLNDITGKTGRAIVEAIINGERKATNFLPLVDKRVKASSETICKSLQGNWRAEHLFLLKQSYTMYKFIQEQIVLCNEEIEGVLKLMMACKKERLIEKIPETGSSTEEVSIKKRNKNHPGFNTREYLKGILGTDVIEIYGISSTVALEVLGETGTDLSKWATEEKFVSWLNLCPNRKVSGGKLISSKLLSKKANLASQAFRMAANSLLSSSNWLGDYFRRMRSKGGHKYAIVATARKIAIIYYRMVRYKQPFTPFDYEEYKEKYRQTKIANLERALKRLKDVAA

SEQ ID NO: 148611 - protein, 446 aa, unidentified
MSTLNSAEEKPFYAARIGLDWADQKHFWTMLTAEGKRTRGELKHTPEAIEIWAVELARSFGGRPIALALEQKRGALVAILSKYAHVHLFPLHPTNLSHYRSSVCASGAKSDPSDADLILDYLVKHPEWLRGLRPDTVETRSLQFLVEERRKLVNQHTSQLQILIYWLKQIFPQMLGWFDDMSTPLVGDLLLRWPQLPALKKASQNTLRKFFVQHNCRSEERIQQRLDEIGQAVPATTDAALLNTADLCIRLAVQVLAAQRAGIAEFDRQIEAIYEAHPDRFIMASLPGAGPALEPRLIAALGTNRERFESASGMACCFGIAPVTESSGKSCWVHWRWACSKFVRQTLHEWANCSIRSCGWAREHYDKQRGKGKGHHASVRSVAFKWIRILFRCWRDRVPYCEERYLKALRMHGGAVAAVVGQPMPVPPAVKWESCGGFSKIVELSS

SEQ ID NO: 148612 - protein, 363 aa, unidentified
MNARYVGLDAHSKNCVFAIQDENGRPSGEGTVPTTLAGLTLLRDRHDLPAGTKVALESGNVAFYVSRQLTALGLDPVVIDAHEVRAKALRPNQKSDRRDAIELCEGLRRGIYRTRVHVPPERIETIRETLGRRRHFVRIRTMEVNAVKRILRTAGLPPAPGPKSVKAWERLRKQVEIFPNLLAFVDTHYAMWTCAQEQIARLDESLEAQGEHYREQLDRLETVPGVGPIVALTALAAFSDIHRFPSAKHAASYAGLVPSTYDSGERIRHGRITKRGSSELRSMLCEAAHHASNPNNPLNPFFASICARRGYKMAVVAVAHRLCRMLYAMLRRETNFDLRKLGIEEGRFEQVRVKHYRRIAVTA

SEQ ID NO: 148613 - protein, 334 aa, unidentified
MNNPTLRDSWCGIDVSKLNFDGALENSRNKLSIRRLLNKPCDFPKLVAWAHKTAGPDVEVKFCLESTGDYGDELALYLTEHGYHVSVVNPARVKHYGLYKGRLNKTDKADAKLIAEFAKDSKPEVWAMTDPMKRTLFRLNRRRRQLTKMETAESNRRECPGAVGPECMKSINAILKTIRAELRSIEAQIASLVQSDEELSRDTELVKSIPALAEGSAHTILAEMPPVQGYDSAKSWAAASGMQPVNRQSGTSLKRGKMSKGGRRAVRGQLWMPTLAAIGSMPEIKGLYDRLKAGGKTHKQAMVACSRKLLMIVYAVLKHRKPYQSPERTLVHGT

SEQ ID NO: 148614 - protein, 458 aa, unidentified
MNRNRSKPKIDRAMPMVHPNAAAIDIGATMHMAAVRADRTPEPVRSFGTFTTDLHRLVDWFKECGVETVVMESTSVYWIPIFELLDARGFTVFLVNARDAKHVPGRKTDVSDAQWLQRLHSFGLLRASFRPKGQIAELRAYVRQRERLLEYAASHIQHMQKALTEMNLQLHHVVADITGATGLRIIRAILVGERDPKVLTRLRDYRCHSSAETIEKALTGTYRAEHLFALEQALALYDVYHEKASACDTRIAAVLKELSIGRGSRSDSLPPSGRHRSDQANALAFDVRAALFALLGKDITQIDGLGPYLSLKLIAECGDDLSAWPSAKHFTSWLGLAPSNKISGGKILSSRTRRCGSRSSALLRLAAVTIGRTDTALGAFYRRLSARIGKAKAVTATARKIAVLFYNAVRHGMEYVDPGASYYETRYRTRVVNNLHRRAKAFGFVLQPMEPTPGVVVS

SEQ ID NO: 148615 - protein, 375 aa, unidentified
MEGAPMLDTTTFVGLDVHARSIKAVSLDVMTGEVRAATFGYDAGAVAEWVRSVDPRARCVYESGVTGFDLQKRLSGLGVDCVVGAVSKMIKPSADRRRKNDRNDAEFLARMLSVGNVVEVWVPDDECEAARDLTRALEDARDDLSRSKQRLSKFLLRHGLVFDERTPTGRRKGNWTRAHWSWIESIGFAEGADNDVLAYYVDAVRRAAEEKARLEGLVEAEARKPRWRKRVDSLRCLKGVDTASAADLVFEAGEFSRFGNARSFAAWVGLTPSEHSSGESDRRGAITKAGNKHLRKTLVEAAWHYLTCSGRPKDLARGQAPDRGARRHAAKGVRRLVERREALLARGVHGNKANVATARELACWVWAVGLMAEEA

SEQ ID NO: 148616 - protein, 391 aa, unidentified
MQQHVGFRGIADSGAASAHQIYDGVDAPPTASMCQSGGVDHHLREASVSEVSTIGLDIAKHVFHAHGADERGRAVFSKKISRGKLLDFFAAQPSCTVALEACGGAHHWARQLIQLGHEVRLIPPAYVKPFVKRQKNDAIDAEAICEASQRPSMRFVAVKSEQQQAAGLVFRTRDLLVRQRTQLINAIRGHLTEYGWIAPKGPSHVTMLADRIEEQEMASSLPEAAQVMFRLMLDLLASLNSKIADLDKEIARRAREDEVSRRLMTIPGIGPISATAIAALAPPVETFAKGRDFAAWLGLTPLQRSTGGKQKLGATSKMGERTLRRLLIIGSSAVVQQASKRGAPKGSWLEQMLARKPRMLVTVALANKMARIIWALLVKQENYRAPVAAKA

SEQ ID NO: 148617 - protein, 367 aa, unidentified
MKKVSTAATKQSRNVSQQRLTIGVDLGDRNSCYCVLDEAGRVQLEQRVRTTAKALREVFGAMPRSRVALEIGTHSPWISRLLSKLGHEVIVANARKVRLIGENRKKDDRLDAQTLARLARIDPQLLCPVKHRSAQAQADLMMIRARASLVRVRTGLVNAARGLAKSYGERLLGCNVRNMNPEKAEGLSPELQRALEPLLAAIEEVSARICEYNDRIEALAQTSYPQVALLKQIKGVGTLIALTFLLTLEDPHRFGKSRDVGCYLGLQPGRRQSGKSDPQMHITKEGDPYLRTLLVQGAQHILGPFGIDCDLRRWGLKLAERGGRNGKKRAIVATARKLAVLLHHLWVSGEVYEPLHNSSPVTIAAAA

SEQ ID NO: 148618 - protein, 411 aa, unidentified
MENIFPCCAGLDIHKKSVEACVRRLEPTGQMHHQTRHWGTMTRDLLAMADWMAAQGVTHVAMGSTGVYWKPIYNILESRFAVLLVNARHLKQVPGRKSDVRDCQWIAQLLQHGLLKPSFIPPQAQRELRDLTRHRTQLAEERTRTVNRLHKVLEDANIKLASVATDILGVSGRAMLSALMAGQESPVKLADLAERQLRGKIPELERALQGHVTEHHRFMLRLLWKQLAEQEELIAELDARIEAQTRPFADEIERLDAVPGVDRRVAEVVLAEVGADMNPFPSHRHLAGWAGLCPGNEESAGKRTRRRIPPGNRWLKRSLVQAAWAASHTKHTYLASQYRRLVGRRGRKRALVAVGHSLLVIFYHVLKRRTTYADLGGDFFDRLEPERLTRYFVRRLEALGHKVTLESAVAA

SEQ ID NO: 148619 - protein, 347 aa, unidentified
MDQQHHVGLDVSVKETAICIVDPHGKVVHRATVESHPEVIGQHLIDLGHAYARVGLEAGPLSPWLYAGLVEVGLPAICVETRHMHAALSARINKTDRNDALGIAQMMRVGLFKPVHVKTLASQQRRLLLTSRKLLQRKAYDIESDLRGQLRNFGLKVGVVGAVGFEQRVRDLVLDLPFVAAVVLPLLEARAALRTQLAKLHKMLLEQVRTDPVCRRLMTAPGVGPVVALTYRTCVDNPARFGRSQCVGAHYGLTPRLYQSGETMRVGRISKCGDRMMRAALYEAALVLLTGSRGRWSGLKVWGLAVAKRRGMQKALVAVARKLAIVLHRMWRDGTDFRWSAAATTAA

SEQ ID NO: 148620 - protein, 405 aa, unidentified
MLFAGVDWADDHHDCVVLDAAGKRVGSLRVGHTTDGLEKLVAFLQGAGGEGADLEQLACIVETSHGMLVGALLEAGLPVYPVNPETVDRQRKPSGAKTDAIDAYLLARTGRSDLADLRRLTPDNPLIAELKLLTRDQDGLIQSQTRLINQLTACLKAYYPTALTLFSTLQQASTLAFLRAFPTLQAARAASKDHIVAVLKTAGYGGAEAKAQEIQEKLAQPALQARAEVTRAKTRLMLSLVGQVELHLRDLAAYDEEIARLFLSHSDSKVFASLPRAKTRLAPRLLAEWGDDRGRYAAVASVQALAGTSPVVFASGRFSKVHRRYACSKPFRNVLYQFAWQSVQKEAWAATYYQRKRAAGKSHSMALRALANQWVRILFALWHKQEAYDPAVFLTAQQAHAPRAA

SEQ ID NO: 148621 - protein, 339 aa, unidentified
MNLTTLGLDLAKNSFSIVGTNEHGKIVLRKTLSRKKLLPFIAQCPPCLIGMEACSGAHYWGREFKKLGHRVGIVAAQFVQPYRKGGKNDNNDAEAICEAVSRPNIWFVPIKSADQQAVLTLHRVRQGVIRDRTGLINQLRGLLSEFGIVMAKGRYPAQQAIPRILEDAENGLPMLARRMIDDLWQRIQQSSEQILAYDRELAQLVRDDTRAQRLMTIPGVGEQVATGIVASVSDPRLFKNSRQFAAWLGLTPRQYTTGGHVRLGRITKRGDKYLRMCLVHGARAVVANLRDKQDRVSCWIRNLIERRGYLRAIVALAARNARLIWTLMMKQEDYKVMPV

SEQ ID NO: 148622 - protein, 343 aa, unidentified
MECYVGLDVSLKQTSICVVSRTGSVVREGVVDSDPDAIAAFVRSKAPGAIRVGLETGPTATWLWTELKRLGLPVICIDARHAQAVLKMQINKSDRNDAAGIARIMQTGWFKEVRVKDLDSHSVRALLASRALLVKIKRDLENQIRGLLKNVGLVIGRAKFNVFAVRAEELIEDRPELIAVVGPLLKARKAIEQQTDDLDRKVLKLARYDAQVRRFMTVPGVGPITALCFKATIDDPTRFKRSRSVGAYVGLTTRRHASGEIDWTGRISKRGDAMLRSYLFEAAGVLLTRVPKWSALKAWGMRLAKRNGLRKATVAVARKLAAILHRMWVEGTEFNWSKKEVAA

SEQ ID NO: 148623 - protein, 357 aa, unidentified
MTAPYDYHIGVDYHKTYSHLVVQDSAGKTLRSGRVKNDRQSLGSFLERYRENSHAVMEATRNWMVMYDWLDDICDDVVLAHPLKVKAIADAKIKTDKIDATVLAHLLRADLVPEAWAPTEKARDLRVALRERMFYVRLRTMVKNRGVTVFDRYPEQTAQLKKLGDLFNKTGLQQLATLNVSAIDRIQIDRGLEFIGDIDGRIKQAEATIKAMTKTNGNVKLLKTIPGIGEFFARLIDAEIDDIDRFRNPKKLAAYAGLVPSTYSSGGKIFHGKIIKQGNKWLRWAFVEAVAPAVASDLQLRAQYEHLKLNGTNKARVAIARKLLTITFQILRDQRPYERRGVDSDEGASATISRLSR

SEQ ID NO: 148624 - protein, 421 aa, unidentified
MKKRQRVVGFDCAEDEHVAVLLDSNGEFSRRWSVVNRRNEVEELLAEVILCIGPEAQLVVVVESKRSHGRIVADVAADLGCDVRQVNTVALNHFRDLEGQPRKDDDWDAYLAARMAYMKMRGAREVIETTEDERALTRLTRTHSRLVEDRTQHVAQLRAVLLELAPEILHRSWKGPKPKSKAMLYLLERWPGFEGLERAQLRSIEGILRRCRYGSRTAETAKLIKKVAHGISIIGEERSALTLELDLLVRQIRFCNESLAEVDAKITRRVERNPVGKKLLEMQGNGPVVTGILISELLPVARTSTEAQCATYSGVTPLARKSGKSLNNDKLIQGSNKRVLTALYTSAVAAVQSSAIDRAYYQKKLRDYAGHPKPHVASFIALARQRHKLIYKLMTTDARYDKEILVASHLDRLEQDRVAAA

SEQ ID NO: 148625 - protein, 387 aa, unidentified
MQASTVDTLTVEHCGTIFVAIELSQRSWLVTLHSPDKARMSRHKLEGGDHAGLLALIGRVRERAARTQGAVPAVVSCYEAGYDGFWLHRLLMAAGITNYVFDPASIAVDQRARRVKTDRIDGEKMLRTLMAYLRGEPQVVRIVRVPAPEQEDARRASRERGRLVKEQTAHTTRIKALLRLLGMAVGNPRRRDWLSWLSAQRDWQGQAVPRRMLSEIKHEHARLMLVREQLEALAQTSAEADPAPAAAQMAERNELLLRLKCLGPAFAMTLTHEVFYKDFRNRREVASYFGLTPSPWQSGGTDRDQGISKAGNPRARCAAIELAWLWLRHQPESALTRWFRSRTHNNASKRNKRIAIVALARKLMVALWRYLTTGLVPEGAVLKAVKA

SEQ ID NO: 148626 - protein, 406 aa, unidentified
MEVLHPRCAGLDVHKQTVVACVRIVGNAPPRQEVRTFATTTSGLLALADWLDSLGITVVAMEATGVYWKPVWHVLEGHFELVLANAGHVKNVPGRKTDVNDAMWLADLLAHGLIRASFVPPAAVQELRTLTRTRKQFVRERTAHVQRMDKLLEDANLKLSVVLSDVLGKSGRAMQAIIDGHTDPERLASCVTTRVKASRAQLLEALHGHVSAHHRFMLKLHLGHIDALDQAIAAIQKEVGLGLDPFRQAAKLLSTMPGLSAVGSNVVIAEIGIDMSRFTTPGHLLSWACMCPRNDESAGKRRSTRLRRGGKWLKTTMVQAAWAAVKVKGSYLQAQVHRLRARRGTKKAIIAVAASMLTAAWHMLRNGSEWRELGAAHFDRADAHKTAVRLVRRLQQIGYAVQLTPA

SEQ ID NO: 148627 - protein, 410 aa, unidentified
MSVLDVALDPATVIVAVDPGKVLNRVWVSNGSGLLTAPASLPVSRDGIARLDRLLVEHRATEPVIAIEATGSLHRSWVVELERRHPGSVRLFAPSETKAARIQLGSGRFKTDDRDCAALTYLARQGAGRPHAEESAVDALRAAVRHRRGLVADRRVAQQRMHDQLNALCPGLSAPAGHGRCLPLESSTGLAVLACAVAFAGRPPRLPSLVCRAPGRLSARTAQYWIQRWRGCLPPPADADQRARRLGRDLDRYRCLQSDIAAVGEEIEQLLADTDGQILTTLPGVASIRAAAFAAHSLPIERFPDAEHLYSATGLAPAVYESATLHRRGHISRQGLSEHRDALMGMAWGLSQSSPGFAQRYAELRARGMAPIQARVALARTVCRLAYRLLTTQQPFDEQRYRRGRRSGER

SEQ ID NO: 148628 - protein, 345 aa, unidentified
MNNYKIAQRNGKGNLQSLPEYDHYLAVDWSSKIMAIARLTRRQQQPTVMERPTDLKDLKRYLRSLQGRKIITFEETTTAHWLYLEVRDEVDQILICDPYRNRLLSDGPKTDTIDAAKLCLLLRAGLLKEVFHRDDELYQLRHLVSAYEDVVKAGVRALNQKAALLRAIGSDAKDKTILFILEHVENNITIYETAKAAYENKFALLCRGNKMLKVLQTLPGIGPLGAVKILVTVIDARRFLTDGHYLSYCGLVKLQKISGQRSYGVRSPRYSRRLKAVYKTAVMAALAGANPIRDYYDYLISKGTAEHNARHAAARYLAKVSYGMLKHGTTYEPYRWRKTETTQNP

SEQ ID NO: 148629 - protein, 416 aa, unidentified
MTDDARWFVGIDWASETHQVCLVDAGGKIVGERGFPHGGAGLAEMCIWLLVTTRAEPAVIAVAIEVPHGPIVETLLERGFLVYAINPKQLDRFRDRFTVAGAKDDRRDAHVLGDSLRTDRHCFRHLAAEDAVTVELREWSRMAEDLQQERNRLANRVREQLWRYYPQALKISDDLGADWFLELWAAVPTPAKAARVHESSIDRVLKTHRIRRIAAAEAAQVLRQQPLTVAGGTVEAASAHIRAVAARLKLVNRQIKEAHRRLDALCGKLAAGEEKTASGQAPEQRDVTILRSLPGVGRIVLTTLLAEAAEPVRRRDYHALRTLSGVAPVTKRSGKRCIVIMRQACHMRLRGAVYHWARVAIQHDPLSRCRYAELRKRGHSHGRALRSVADRLLAVACAMLDQQTMFDPGRANKQAA

SEQ ID NO: 148630 - protein, 345 aa, unidentified
MELHTIGIDLGKTVFHLVGLDLRGEVVVHKKFSRKQLLHFTANLQVKLIGMEACGGSHFLGRALREQGHEVRLMPAQYVKPYVKTNKSDYIDAEAIAEAVGRPKMRFVPIKTDEQLDLQSLHRVRERWVMRRTAVINQIRGLLLERGITLRQGRGHVDAALPGILEDASAMLSGALRMLLAQLKLELDHLQMRIDEADAIIKKVAGENEACRRLVAIPGIGPVTATAIIAAIGNGAAFKKGRGFSAWLGIDPGEYTTGGKQKLLGISKRGNSYLRRLFVQGARAVLQQRAKQSSALSAWLARLTTRTHSNVAAVALANKLARMAWAVLAKNEPYRPPMLVGAATA

SEQ ID NO: 148631 - protein, 343 aa, unidentified
MKIAILGIDLGKNSCSVVGLDHAGTVVKRRRMRPESIPAFTRTMPACTVAMEACCGAHHFGRLLRSQGHTVRLISPEYVRPYVKAQKNDDRDAEAIAEAATRPTMRFVELKSEEQLDMQTLHRVRDRLVGERTALINQLRAILLERGCAVPQGRRKLEQHLAAMPDPDNDTSLSPRVRRLIDDMRAEWLELDQRIATFDNEFAARARSDADARRLATIPGIGVLNATALVAAIGNGETFARGRDLAAWLGLVPRQVTTGGKPRLVGITKRGNKYLRKLIIHGARSALPALASGPTPLGEWLRALMKRVHKNVAVVALANKLARITWAVLRRGEEFAATARAAT

SEQ ID NO: 148632 - protein, 345 aa, unidentified
MQSGYTYVGLDVHKKTITWCAKKIDGTRVGHGTIAANRAALSQWLEHLPRPWIGVMEATLFTGWIYDYLKPHAEELKVAHPLMMRAIAASKKKNDKIDAQKLADALRADLVPECYMAPEQVREMRRMLRFRNLLVRQSTRMKNKCGGLLMELGVEYNKKRLHQKQYYSELVGSFDPEIVPASVVSLLGMSRNHVELFRVGQKHLVKQLNNDPRLKERVTRLQTIPGVGEMTALTWALEIADPARFPSIARAVSYCGLTSAQIESAGKMQRAPLSKQRNKHLQTMLIEAAKLAPRHSEQLRALHERELKRGNRNRATLTVARKLVAHLLAVDKSGKDFEEKNMKEV

SEQ ID NO: 148633 - protein, 350 aa, unidentified
MKIATIGLDLAKTLFQVHGVDSQGHIVVRKQLRRADVPPFFAKLEPCVVGMEACGSSHCWGRELTKLGHTVRLIAPQFVRPYVKNNKTDAADAEAICEAVNRPNMRFVPIKTQAQQTMLSLHRARAGLVKSRTALANQIRGLLSEFGIVLPHGIRLLGQRAIEALSNREYEHCEQFRTLIQILVEHLRELGNKAAELEGRIRAMHRTDEAGQLLETIPGVGPLTASALAASIGNPRAFRDGRELAAWLGLVPRQHSSGGKPRLLGISKRGDTALRTLLIHGARAVIRMAATKPEMADSWVMKLCRRRHKNIAAVTLAAKNARTAWALLVRKQLYQVSHVPIRAGVTVSQM

SEQ ID NO: 148634 - protein, 343 aa, unidentified
MQTITTIGLDIAKSVFQVHGVDAAGAVVIRRQLKRRSVLAFFQKLPPCLVGIEACASSHHWSRELQALGHTVRLMPPAYVKPYVKRQKNDMADAEAICEAVTRANMRFVPTKTSEQQSCLMLHRTRHLFIRQQTAVINSIRAHLAEFGIVAPVGRKGVTELLQVVADPSDKRVPEVARACLAALGTQLFSLKKQIGEFDRMIMAWHRSNETSKRLHYIPGVGPMLATALVASVADPRTFRSGRNFSAWIGLVPKQHSSGGKDRLGSISKRGDRYLRSLFVAGALAVIRYAKVHGTKHRPWLTALLARRPTKVAAIALANKIARMAWAMMAKGERYKEPIALAR

SEQ ID NO: 148635 - protein, 368 aa, unidentified
MIYLGMDVHKDSITIAVLPTLAKTPTRLDTLANDLPKLKKWLERIAREGEIHACYEASGAGYVLHRALAEWGYACEVIAPSLIPKRSGVHRKHDKRDAADLARLYRAGELVAVRIPSEADERVRDVVRCRETFQREILKSRHYILKFLARRGFVFRDGTNWCTPHLTWLQHLATDASPLATEDRLIYREYHALLMYKRQRREALDRQIEKLAELPTLAPMVKQLQCVRGISVHSAMVLATEIVDWRRFERPSQLACYLGLVSREDSSGTRHRLGSITKAGNSHCRHVLVQAAWSYRHRPQTSVDLKRRQAGHPPAVIGHAWKAQQRLHARYNHLSYRKRPQIAVVAVARELVGFLWAVMRELEPVQAA

SEQ ID NO: 148636 - protein, 388 aa, unidentified
MPQTPNDLSRSLTALEQTATLVAVVEMSQASWLVAGMIPGLERQPLKKIAPNEAALLSLLQRWQEEAIKICQTIRRITVAYEAGRDGFWLARWLCSRGIEAHVIHPTSVAVSREHKRAKTDRLDTAMLIRVFLGWLRGERGHCGMVAVPTLEEEDAKRPSRERENLVGERTRIINRMKSALVRLGIRGFKPELRRAPQHLEKLRTPEDVPIPLRTLEELRRDMARLAMVRAQIEAIEQIRLQRLEQAPQDVAHAMVRMLANIIGVGVETADMLVREILAKELRDRRALARYAGLTGSPNESGSKRREKGLAKSGNARVRRGLIQLAWRFLRFQKDSALAQWYRTRTEGAKGARKTSLIVALARKLLIALWRLVTIGEVPQGIVLRQAT

SEQ ID NO: 148637 - protein, 412 aa, unidentified
MTAIDQFAAHVGLDWADKKHDVCVQFKNGERIFHVVEHTPEALDIWLTKLHQKVKGRIAIALELKKGPVVYALQKYPFVTVFPVHALSLARYRQTFWPSGAKDDPQDAELALELMLRYPEKIKAIEPDNADIRLLQQLVEQRRLLVEDKRRFVNRLINTLKQYYPQPLEWFSHRGSLLLCELIMRWPSLQQLKRARRDTIRNFLNAKGGRAMALTEQRVASIDNAIPLTTDPSVIEANALMATALATQIKVVSEIIKTYDERIETLFDTLPDAGLFKSLPGMGPCMGPRMLAALGDNRDRFNSAEEIQNYAGIAPVTERSGQKSWVHWRWQCAKFVRQTFVEWTAKTVNSSYWAKLYYQGLREKGKSHQSAIRALAFKWIRIIYRCWKTRTQYDEAKYLQALEARHSPLLKS

SEQ ID NO: 148638 - protein, 410 aa, unidentified
MIEQVTVGVDVGCHRHRVAIAAPDGKFVEEFDIPADSEGFKYFFGRLDFYRKSFDVPVVVAMEGHGGYGRPLDSSVKRSGYTLLNVNNLKLCRFKEIFSSPAKTDAIDARKIALLARMQDVLSPSREVLQEVRDVPQEHQILKRLSRRRRQLVDEKVVVLNRMQVDLQAVSPGLAEMVEYKDGVAFLNLLTCRSNLEDLSRLDKKELLSIGGIGEAFAGRVIKWQKKAYFSREVAYVGPMIIDVKRIIEIKRSINELEEKIEDILKSSKLAETIGSIPGFGAVCTAELVAEIGTMERFSSERSLALYLGMAPLDKSSGKCQGTRTPTQINKRGKAAMMTAVAHNIRKVEESKRYYQKKRDEGESHNQAVRALGRHMIRVIWSMTKRNEVYQIREGENKTCPDKTSAAIPA

SEQ ID NO: 148639 - protein, 325 aa, unidentified
MLHEGPLANDRVALALLLTKYPAATVALEAGTHSPWISRYLTGLGATVIVANPRKLHAISRHERKCDRRDAAMLARLARADVALLHPIKHGSAQAQHDLLGLKLRDALVRTRVNLINTVRFTLKSLGHAVNNPSSEAFHKNILTAVPADCLPVVQPVLAVLTLLTEQIKTLERDLVARSKRDYPVTQRLQQIAGVGPLTALCFVLKIGEPARFGRSRDVGPYLGLCPGRDQSGGTDKQLRISKCGDGLLRRLLVSAAHYILGPFGPDCALRAYGQHLAGTSAREKKRAVVAVARKLAVLLLSLWKHGTDYEPRVPAAPTLVLTPA

SEQ ID NO: 148640 - protein, 393 aa, unidentified
MSAKPVRKMTQQVLKYSVGCDISKDTFNTCLFEVYADMTSKVKASHKFKNEPKGFSEFDLWVNKHKKHEVPISFTMEATGVYYENLAWYLYEQECEVYVLLPYKTKHYLKSLGIKSKNDKIDAEGLSRMGVHQKHKPWKPYSKSIYTLRSLTRQHESVNKLKTQLNNQLHANEYSAFKSAIVRKQLKTTLRLLEKQLEELGAEIAGMIQNDEKLQRKYNHFKPVKGIGKLSWATVIAETNGFETFENQRQLVSYSGYDIVENQSGNHVGKTRISKKGNSRIRRILYMPSLVSVKLKEPVLYNLYQRVQTRTGIKMKGYVAVQKKLLVLMYHVWRNDKPFDRNYTKTFGEEESKSLFPLGSEGTTKKSSPDKRATQDEHSYELSPEVLFPLIQI

SEQ ID NO: 148641 - protein, 324 aa, unidentified
MYLGLDVSKNTLDCCLNKDGFFYACKISNNEKGFQKLKAWLDGHGCDETLHCCCEATGNYYEAAAEYLAAHYKMSVENPRKIKAYAVSELKRSKNDKQDAKTIAEFCEEKSRKLKTWKPKNQTEKELQSITRYIARLKQQKASETVKRQTASDNIKDLIDETIDYLARKIKEAEGRLKTYINQNPELKQKAANLTTIPGIGIQTAAIIMAALSGNNDFKTAKQFTAYLGLDPAEYKSGTSVKGKDRISKVGDCITRAALFSPALVAYRIGTFPRLVANMRQNGKHIMQILTAIMRKLAVVAYTLHKTDTTFEKQRHTRIQQKAA

SEQ ID NO: 148642 - protein, 309 aa, unidentified
MSVFVGIDVSKSTLAIAVRPIGQVFTVANAPDGYRDLLRRLAVLPVGRVVLEATGGYERGVLAALIAAGLPAVRVSPHRARAFATAMGRLAKTDPIDAAVLAHLAEVIEAEATPAVAAEQQALRDLVQRREQLVQWRDDERRRVQQAASPVVRRSLQRSITAAQREIAHCDREIAQALLAVGHETSQRLLAIPGVGPVTTASLMAYVPELGSLDRRKIAALVGLAPYNCDSGTQMGKRRIRGGRPRVRRVLYMATWAVIRTQPDFKARYASLLQRGKCAKVALVACMRVLLIRINAMLRDQSEWKMISA

SEQ ID NO: 148643 - protein, 381 aa, unidentified
MDQKQVTLEKGPTTKFAVLYVAFELGNSTWKMACSDGRKVRQVTVTARDLEQVQGALLRAQTHFGMAEASAVVSCYEAGRDGFWLHRYLQGRGIDNVVVDSASLEVDRRLRRAKTDRIDAGKLLRMLIRYHGGERQLWRVVWVPSREDEDARHLHRELESLKRERTRHRNRIHGILMQQGLRIPNPSKKRFLKDLEALRTWDGHQLPVGMKARLVRTYQQLRLVEDQISALATEKREQLKQVDNAKMRQVAQLLRLPGIGPVSSWAFVMEFFGWRRFRNRREVAALAGLTPTPYDSGRKLREQGISKAGNRRIRTLAIEIAWAWLRYQPQSRLSQWFSERFAGGGTRMRRIGIVAVARRLLIDLWRFLEYGVIPEGALLTT

SEQ ID NO: 148644 - protein, 418 aa, unidentified
MKHSKTEKIGTINKKTLIAALDIGKKVHYGYFRAPSGKDFQPFAFHNTRNGFDKFWERLCNFKEKQMLEEIIIGFESTGPYAEPICHYLRHKSVKLVQVNPMHTKRIKELTGNSPNKTDKKDPRVIADVMSLGHSLTVIVPEGAAAHLRRLTQARERAIERRTAMSNQLQHLVFLIFPELVHIIKPSTKTGMYLIKHYSDPKKLLFVGIDKLNAIIKKVSRGRLGNDRAEQLHGAAKKSVGIAEGKESILFEITHLVSKIESENHYVEDLEKQMGEYLQKIPYSHSILSITGIGRVTAAGLIGEVGDFRKFKTISEVLKLAGLDLYEISSGAHQGCRRISKRGRALMRKLLYFAAINTTRKNGILHGPYQRHLAKGMPRIKALMAIARKLIGIIFALVRDHSNYIADYSSQLVFKKAA

SEQ ID NO: 148645 - protein, 358 aa, unidentified
MDGSELFVWRVPVVTDSPFPAKPEGAGVTPTVLYIGVDISKAKLDVAAMLGHKYRDKTFANTPAGHKALIAWIATLSALNSGGDSPARVHVCMEATNVYWEACAQALAEVTEPLTVSVVNPALVKAHAQSLGLRVKTDRVDARAIASFCREKRPEPWQPLSPSEQALRSLVLRHHALMQMKTQESNRLETVRDAAAESVRLHLQWLEAELDRIEQEIKQSIDDDPTMKGKKALLDTIPGVGERTISVVLSYASFIERMDNAKQFAAFGGLNPALRESGTMRAKAALSKTGHVALRRALFMPAMVTLNRTDWGRRFKTRLQANHKAPKLIIGAMMRKLAHVIFGVLKSSKPFDPALHDC

SEQ ID NO: 148646 - protein, 367 aa, unidentified
MKQVTTTYVGIDAHKKDLFVAMLIGAASVPVTWQLANEPGAVRRMIRKLERDAPGPVHVFYEAGPCGYALQRQVATDRIACDVIAPALMPRKPGERVKTNRRDARKLAELGRAGLLTVVQPPTPADEAVRDLARARDDAREDLQRCRHRLGKLLLRRGLHYVGKNWTQAHRRWVDSLTWTHAAERAVVEDYQLAIDHTEARLLELDARLAELATQAPYREPVGWLRCFRGIDTLTAMLILAELHDFRRFGSARALMAFLGLVPGEDSSGEKYRRGRITKMGNALVRRILVEASWHYQHRPGVGRALKVRRTGQPTRVIAIADKAQQRLCRRFRRMMAEHKPAPKVAVAVARELAGFIWAALQPPVVA

SEQ ID NO: 148647 - protein, 291 aa, unidentified
MNDAKYIGLDVHQATISVAVRDSSGNLVMEAILETKAETILQFIRGLRGSLSVTFEEGTWAAWLHDLLQPHVTRVLVCDPRKNALLKVGNKNDRIDARKLSELLYLNKLSPVYHGEQGIRTLKELARSYITITRDLTRVMSRRKAIYRSWGIPCAGQQAYAPRYRAEWLAKISEAGVRRRAELYYQQFDALAALRQGTRRELLAEARKHPAMRLLRQIPAIGPIRAALLIALIQTPNRFRTKRQLWAYCGLALRTYASGEYRFISSRVRRHERLLPLDLCRTVTKPASPEA

SEQ ID NO: 148648 - protein, 333 aa, unidentified
MSHFWVGIDVAKRKLDVALLDGAGKVKSKVLANDPAGFAALMTWLGERGADATSTHVCLESTGIYSDGCATAFADAGWKVSVVNPALPKDFGKSELKRNKTDATDAGLLARYCSKMEPVAWQPPPPEYRKLRSLVERLQALKDMRQQEANRFEASVEAVARASITEHLAWLDARVSELEKDIDDHIDGNKETLGRDAELLASIPGIGRTTAAKVLGLLGDLRRFNSGKALAAFIGVTPRRHESGDSVRGRSSIGRAGHANIRHALFMPTLVATRHNPKIKAFRDRLVAAGKSKKSAVLASMNKLVNVMHAVVRHGVGFDPRVGHLALDVQDGI

SEQ ID NO: 148649 - protein, 388 aa, unidentified
MIYVGIDIAKLNHFAAAISSEGGILIEPFKFSNDYDGFYLLLSKLAPLDQDSIIIGLESTAHYGDNLVRFLISKDFKVCVLNPLSTSAMRKNNVRKTKTDKVDTFVIAKTLMLQDPLRFISLKDLDYIELKELGRFRQKTVKQRTRLKIQLTSYMDQVFPELQHFFKSGVHQNSVYTLLKEAPTPNDIASMHMTHLTHLLQTASHGHFGKDTARGLRILAQKSVGIHDSSLSIQITQTIEQIELLDSQLFHTELEMANLVTCLHSVIMTIPGIGTTNGGMILGEIGDIHLFSTPGKLLAFAGLDPSVYQSGNFQAKKTRMSKRGSRVLRYALVNAAHNVVKNNATFKAYYDAKRAEGRTHYNALGHCAGKLVRVIWKMLTDEVEFNLE

SEQ ID NO: 148650 - protein, 352 aa, unidentified
MLIIGCDFHPSFSQIAVLDLETGESYERRLRHREGAEQFYRSLAGRQVRVGMEACGHYPWFERLLEECGHELWLGDAAKIRAGVVRKQKTDRRDAEHLLKLLLEDRFPRIWVPTLEERDARQLLVQRHKQVVLRTQVKNQLQAIALSHGVQKKRKLWTEQGRVELEKLPLLPYADARRKQLLQSLDALEAEVEQLTRKVEEEAARRPAAVKLQTHPGVGPVTALAMVLTLGDARRFQRPRQVASYLGLIPAEHSSGGRQQLGHITKQGNSFMRFLLVEAGQTAARFDERLGRFYFRLGVRRHRALAKVAVARKLATRLYLMLREDWDYAQLCRAVMQVSPSHSVAASSKPTV

SEQ ID NO: 148651 - protein, 411 aa, unidentified
METLYARCCGLDVHKKTVVACLLTTGPDGHLQQEVRTFGTMTADLLSLADWLTAAECTHVAMESTGVYWKPIYNVLEGLFSILVVNAQHLKAVPGRKTDVKDAVWIATLLRHGLLQGSFIPPREQREVRDLTRYRSSLVQERAHLVNRLQKVLEDANLKLAGVATDITGVSARAMLAALVDGETDPQVLASLARGRLQAKRVELERALDGRVRTHHRFMLTELLAHLDYLDEAIDRFSTELEDRLKGDDEAIELLDTLPGINRRIAEILIAEVGADLSRFPSAGHLASWSGMCPDNHESAGKQKSGKTRKGSCWLRQALIEAAHGAARSKETYFAALFRRIAARRGKKRALVAVGHAVLVAAYHMLTRKEPYRDLGVNYFDERDRLAVERRTIRRLERLGYRVELVPSQAA

SEQ ID NO: 148652 - protein, 424 aa, unidentified
MNFKMQNKQNQLIERITDQHLVVGVDIAQHVHVARAVNYRGIVIGKPLSFENNEEGFTRLLNWIKELKRMKNLDTTIVGMEPTGHYWINLSKWLVKQNMDVVTVNPHHVKRNKENRDNTQSKSDKKDALVIADMVKNGYYAFVRSTSESFEKLRVLMANRDVIVKRLVSSINQINRWVDVVFPELRQVFKDVSCKGAIATLRLFPTPAELCSLQPQDIVTGWKSCMKRHSGHKKARSLLGLAKRSIGTKQALDAYKLHLGQLLEEYDLASSQLERVTQEVTIVLEQIPFVKQILAIKGISEISLAGILGEAGDLSGFAHGNALLRHAGLHLAEASSGKWKGQIVLSKRGRSRLRRYLFLATMSLVMNNPEFKALHSNNVKVKKIKKMKSIMKLCGKLARVLVGIARNGSAYKPEMIFPLEQLAA

SEQ ID NO: 148653 - protein, 326 aa, unidentified
MTLSLPSDNTFIGIDVGAAALDVAWHRGDSAHYANRPDAIAALVRQLRTQPAVTRIVIEPTGGYEKALVKALRQAELPVEIIHTTRFKAFRALVGVKAKSDTSDARLLAAYAAAPNEVRGRKADHVELPEDAIRDELAELASRRDQLKHMIHAETCRLGTVRLAELREAIAVHLEALRVEDKQMHRMMLALVRRRADLQRDQRLLKTIKGIGMKSALAFLASVPELGRIDNKAAAALVGVAPFVRQSGTMNAPARIHGGRAAVRSILYMAAVAASRHNPVLRPFYERLLAKGKPAKLALIAVLRRLVVFANAVLKSGQPWRGPIAA

SEQ ID NO: 148654 - protein, 370 aa, unidentified
MLDTTTFIGLDVHARSIKAVSLDVMTGEVRAATFGYDAGAVAEWVRSVDPGARCVYESGVTGFDLQKRLSGLGVDCVVGAVSKMIKPSADRRRKNDRNDAEFLARMLSVGNVVEVWVPDDECEAARDLTRALEDARDDLSRSKQRLSKFLLRHGLVFDERTPTGRRKGNWTRAHWSWIESIRFAERADEEVLAYYVDAVRRAAEEKARLEGLVEAEARKPRWRKRVDSLRCLKGVDTASAADLVFEAGEFSRFRNARSFAAWVGLTPSEHSSGESDRRGAITKAGNKHLRKTLVEAAWHYLTCSGRPKGLARGQAPDRGARRHAAKGVRRLVERREALLARGVHGNKANVATARELACWVWAVGLMAEEA

SEQ ID NO: 148655 - protein, 410 aa, unidentified
MVKENFIYVGIDLHKETHTAVMIDCYNQKLGEITFPNRPADFPKLVTKVKKCNTDAKEVVYGLENAYGYGRPLAVWLIDKGYFVKDVNTAISHRQAKHRGAMYRKSDSDDAEAIALATLNMLDKLPDACPNDAYWSLGQLVHRRDNIMKQRTRLVNQLHEQLCIAYPSYKSFFNDISRPTALYFWEHYPSRKYLRGKSVEDLREELVPVSHNRCSTKNCEKILDAVASDKVKNNAYQDARDMVTLSIVSDLQHYDSQLAEVDKMLEQMYKMLGCTLTTIPGVNVITAVKILAEIGDIKRFSNANKLAQFAGIAPLHLSSSGKGKDVATKQGNRRLQATIYFLAIQMVQVSSKGTPRNSVVRAYYEKRKAEGKTSQQALICISRRLISIIYGMLKHGTEYRMPVVESAGEK

SEQ ID NO: 148656 - protein, 312 aa, unidentified
MFTLGFDVAKNYHDVALTNAGGTLIQTWHIANTKPAVIALLRNIGSKHPKLQVGCEATGIYHYTVLEACLQLSVPCRLINPLTTKQYTRSTIRGRKTDQDDALSIARLVARGEGIVVTSALLSPARDYSRLATKISQHVHALKLEARFLSDRGLPIDPVFITAIDELEDLTKRLRQQALGYVDKHSYDLLTSLTGVGPAIAVSLSAEIGDIYRFKSAKQLVAYAGLDPRVRQSGTVLHRNTKLTKRGSAELRHSLFLSANIARQHDRQLKAYYQKKRLEGRTYTEATVATARKVCDRVFAVLTRGTPYVKST

SEQ ID NO: 148657 - protein, 309 aa, unidentified
MNNSNLSYCGVDVSKKKLDINFKSKLSSYDNTVKGIEKLSKEIKNAHFIFESTGGYERMAAWTLMSKGFKVSIVNPKRIRDYARAMGILAKTDKLDAEVIVKYAITANPRETPLPSEDYRHFCAIMDRRHQLKKMKIAERNRLGTCGDPFMRKSINNSLDYLNNEIIVLEKEMKDIIKNDDEMKRKEQIMQIECGIGTISAANILAYLPEIGTLNKKEVAALLGVAPYNRDSGPQKGKRHIYGGRAKLRSELYMATISATTYNPHLRAFYFHLRNDNNCPKKVARIAVLRKMIIAVNSLLKNSDFELAS

SEQ ID NO: 148658 - protein, 371 aa, unidentified
MDHSTFVGLDVHKKRTSVALAEAGRGGEVRFHGEIPSTADAMRRLVENLGRPGRRLAFCYEAGPCGYGMHRLLRGLSQDCIVVAPSLIPSRPGDRVKTNRRDAVALAKLHRAGELTEVWVPDDAHEAMRDLVRARATARRVLGKARQHLQGFLLRHGRVYSGKRGWTQAYRRWLTTVRFDHPAQQIVLQDYIHAVDDGDVRLACLEQQIEELLPSWSMAPVVEAVQAMRGVGLIVAVTVVAEVGDFSRFANPRQLMAYLGLVPSEHSSGASVRRGGITKAGSALARRVLIEGAWTYRMQARVSRKLLDRIEHLPKEVRDTAWRAQRRLCNRYRRLAAAGKPKVVVTTAIAREMVGFIWAIARMVQPIPAIG

SEQ ID NO: 148659 - protein, 342 aa, unidentified
MFYAALDVSLRSVAICIIDHDGKICLERSVRSDVPDVLLCLAGFDQPIHQVGFEAGALTQPITYGLTEAGYDVVCMEARQVAAALSAMRNKTDKHDARGIAQILRSGWYSRVHVKSVESHHTRALLTSRKVMQRKCIDLENEIRGLLRIFGVVLPLRLSRGAFDAAVRETIEVDPALSHALLPMLEARAVLFETFTELDRRVKRAAREDAICRRFMTVPGVGEITALSFKAAVDDPGRFKSSRTVGAHFGLTPRRFQSGETDNPGRISHAGDVDVRAALYAAANAMLMRSITWSSLKAWGVRLMKTKGRRRAIVAVARKIAVVLHRMWADGTDFRLGSEAAA

SEQ ID NO: 148660 - protein, 416 aa, unidentified
MNQPAPPIIERYLAVDLHKAYVMVGGVTARQEVVLPPRRLELDAWPRWAQANLKRTDALVVESTSNAWDFYDQVAPLVGQAVVANPRLVKLIASARVKTDKVDTLALAKLLAANLIPEVWVPPIEVREARGLLAHRRRLVRNRSMVTNRLQSVLQRHNLAGPEGEPFSAANRLWWNGLKLSPTETLRVRQDLATLEHLAGQIAELDAEVQRLSMTAPWADQATYVMQLSGFSVLLTMTVLAAIGDVKRFAHAKKLVGYAGLGASVHASGQTHKNGRITKTGRRELRWALVEAAWSAVRYHPYWKAEFERLARRMPDNQAIVAIARKLLVAIWHVLTERVADEHAEVKMVATKLMRWAWQLSDEQRGGLTSRQFVRYHLMRLKLGDDLTHLTYGNMPRRIASVEEVLALKPELAAER

SEQ ID NO: 148661 - protein, 324 aa, unidentified
MTTHVYLGIDIAKRTFDAVLLQPERTRHRQFANTAAGFAQLHSWLRDHAPASIHAGLEATSRYGDAIALFLHQHGVCVSVINPARTHAFAQSELARTKTDKADAALIARFVASQHPPAWTPPPPEQRQLQAFVRRLDALQAMRQQERNRLDLEEATSLLREFITAHLTQLEDQIRQVQQRLRVHLRAHPVLQQREALLQSIPGIGECTALKLLAELPSPLQCRNARQAAAYAGLCPRHRESGSSVRGKTHLSKTGNARLRKALYLPAVVAMRYNPILREFAQRLLERGKPKMAVVGAVMRKLLHQAFGVLKHGQPFDPNYARTA

SEQ ID NO: 148662 - protein, 400 aa, unidentified
MISVGIDVSKEKSTICILKPYGEIVSRPFEVCHTEKELSELTSMLLRLNDDVRVVMEATGIYHLPVLSYLKEKGLFVAVINPFEMKEYRCQGLRRVKTDKQDAITISNYGIDHWYRLKNYEAEESVYAELKLLGRQYRHYMRMRVESVLELTHLLDYTMPGIKTLLKGWNETNGKDKLGDFAEEYWHYDNITKKSEEQFIESYLKWAKEKGYHQSQDKAVKIYALAKEGIPTVPSDTPSTKMLVQEAVRVLREVDNTLMTILTQMQALAKSLPEYPVVRAMGGVGNVLAPKLIAEIGDVRRFHSGKALIAHAGIDAPPYQSGQFIGTERKISKRGSSSLRKIGYEVMRCLKTHKEPEDAAVYRFILKKEKEGKSKRAAKIAGLNKFLRIYYARVMEVYQN

SEQ ID NO: 148663 - protein, 350 aa, unidentified
MENIALIGIDLGKNSFHIHCQDHRGKAVYRKKFTRPKLIEFLATCPATTIAMEACGGSHFMARKLAELGHFPKLISPQFVRPFVKSNKNDFVDAEAICEAASRPSMRFVQPRTESQQAMRALHRVRESSVQDKVKTTNQMHAFLLEFGISVPRGAAVISRLSTLLEDSSLPLYLSQLLLKLQQHYHYLVEQIKDLESQLKRKLDEDEVGQRLLSIPCVGTLTASTISTEIGDGKQYASSRDFAAATGLVPRQYSTGGRTTLLGISKRGNKRSELCWFSVWYSYKTGTPVWQVGRLGQGVVVSEKQLCRHLCSGKQAGQNSLGTDGATANLRSIKAEIHQFKQSFIWFCEY

SEQ ID NO: 148664 - protein, 339 aa, unidentified
MKYTPVGVDIAKHLIQVHFIDEHTGEVIDKQLRRQDFLMFFCNREPCLIGMEACRGSQHWGRELTKLGHKVRLLQAHFVKAFVMGNKNDVMDARAIWMAVQQPDKDIAVKTEEQQSVLVLHRSRRQLVKFRTMQINSLHGTLLEFGKTIHKGRAAMERELPEALERMKERLPPYLITVLENQYNRLNELDSLIEDIEKKLTSVARQNETCKRLLDIPGVGPLIATAAVATMREASAFKSGREFAAYVGLVPKQTGSGGKIHLLEISKRGNTYLRALFIHSARAAALLPKEPGPWITELKKRRPTSVAIVAMANKLARTVWAIAAHGSKYDKNHVSIRSY

SEQ ID NO: 148665 - protein, 314 aa, unidentified
METAPEWIGIDVAKEQLDIATGGGGDTWSVANDEAGIQSLLDDLRSRSCGLIVLEATGGFEVPAVSALAAAGLPVVVANPRQVRNFARATGQLAKTDRLDARILALFAERIRPEVRALPDDAARLLDALLTRRRQISGMIVAERNRQGFAPAPLEKSIEKHIRWLQPELDSVDDDLSNAIQSSPVWRAKDVLYRTVPGIGPVISRTLIADLPELGRLSRREIASLVGLAPLARDSGTMKGKRMVFGGRATVRGALYMAAVVGVRHNDVVRAFYTRLRERGKPPKLALIACAHKLLTILNSMVSRTGEPWRQQHA

SEQ ID NO: 148666 - protein, 354 aa, unidentified
MKLYVGLDVGLEETSLCVVDSEGQTMRELKVSTEPAAIRAALEGCADRLDRVGIEASSLGIWLYRELQPAGVPIIVVEARHMRVSLSTMRNKTDRNDARGIAQMMRLCWYRAVHVKNIDMQKMRTLLANRKLLKHKLIDIENHIRGALRAYGLLVGAVARGAYEARVRELLERSDPIFAMTIEAMLDARRAIFEGYERLHRVLLQVVQHDPVCRHLMTVPGVGPVAALSFKVGVDDPRRFARSGTVGAHFGLTPRRHQSGTSIDYEGRISKQGDVAVREALCEAAASLLLRVRKWSALRAWGLRIAKRSSMLCAITAVARKLASILHRMWVSETDFHVGFGAKVTQRLRLKPVQ

SEQ ID NO: 148667 - protein, 282 aa, unidentified
MKRVMAGMDLHGNNVMIGIVDADGTRLRHRRLACDLEEVIAFLNPYKPLLDRVAVESTFNWYWLVDGLKAAGFPVVLANPAKIDQYEGIKHADDKNDAYFLAELLRLGILPTGYIYDPESRPVRDLFRRRMGLMRLRTTLLLSSKSLHHRTTGHSLAVGQLKALSPTDLAAFYSHPANRLTAEIQKELIEALNQCIRRIEKMVASEALKKPYYKRLQTLPGIGGILGLVISMEVGEIERFAEPGRFASYCRTVDSNRVSNGKKKGSNNGKGVIKGSGKGVSS

SEQ ID NO: 148668 - protein, 337 aa, unidentified
MELYSGLDLHSRNTYIGILDTDFKRVFKKRVSNNLDLILETLEPFKDQLKGLVVESTYNWYWLVDGLMDAGYGCVCLANPSAIKQYEGLKHSDDQHDAFFLAQLLILGILPQGYIYPKEDRPVRDLARKRMFLVKHKTAHILSLQSLIARCCGQRISTNQIRTLTLADLQQLLKEEYLLLSAQANLNIIAFLIQQIKALEKAIKKKVKLDKAFEQLMTVPGIGFILAMTIMLEVGDISRFAKVGNFASYCRCVSSQRLSDGKSKGSGNRKNGNRYLSWAFVEAAQLGRRYSQRFGRYYDRKAAQTNTIVATKALSNKLARICYYIMRDQVPFKEELF

SEQ ID NO: 148669 - protein, 356 aa, unidentified
MSRTSSTNLAIIGIDLAKRVFHVHGAAADGTVLFRKKLSRSKVLPFFSGQLPCIVAMEACASAHYWAREFAKVGHTIKMIPPIYVKPFVKRQKNDVNDAEAIVEAASRPTMTFVVHKTEEQQARAMAFRARDILVHQRTQLINSLRGLLAEFGVVAPLGRANIKILCDELHDPRSTLPDEVIEVGQLMLDQIDRCQDKAKALEQKNRQIAKTDINAKRLMTIPGVGPITAMAVQAFAPDLKTFENGRHFSAWLGLVPRQKSTGGRSILGRTSKMGQRDIRRLLVIGATSVIKAVTIKGATPGTWLARMLASKPKKLVAFALANKMARMIWAVTIKEEGYRKPELLRQSHVAAAMAG

SEQ ID NO: 148670 - protein, 343 aa, unidentified
MQAIATIGLDIAKSVFQVHGVDAVGQVVIRRQLKRRYVLAFFQKVPPCLVGIEACASSHHWSRELQALGHTVRLMPPAYVKPYVKRQKNDATDAEAICEAVTRANMRFVATKTPEQQSGLMLHRTRHLFIRQQTAVINAIRAHLAEFGIVAPVGRNGVEQLLGIVADPNDKRLPEVARVCIAALGTQLRVLKAQVLNFDRQIMAWHRSNETSKRLDEIPGVGPVLATALVASVADPKAFRSGRDFSAWIGLVPKQYSSGGKDKLGSISKQGDRYLRGLFTAGALAVIRYAKIHGTKHRPWLTALLARRPTKVVAIALANKLARMAWAMMAKGERYKQPVALAA

SEQ ID NO: 148671 - protein, 356 aa, unidentified
MPTMPDQALEVILGVDTHEEEHVAALVDDLGRLLATRSFKATTRGYRGLLAWARTYGPLVRAGVEATGSFGVGLARFLAAEGVDVIEVTRPNRRGRRHLGKTDTVDAEAAARMVLSGEATATAKRRDGAVEAIRVLQIARRSAIKARTQAGQQIRSLIITAPAELNGALAGLTLKRQVTRCARLRRGAGDDASGSPRRALRSLGRRWQQLDDEARELERELATLIKTAAPPLLAEPGVGPDTAGKLLVIASDNADRLRSDAAFAALCGVSPIEASSGKTKRHRLNKGGDRQGNNALWTIANNRLIHHPETRAYAIRRSAEALSRREILRCLKRHLARRLYRLIVADLTAAAALDLT

SEQ ID NO: 148672 - protein, 318 aa, unidentified
MNTIGIDISKEWFDCLCWQRQRNRRFTNNHSGWKAFKDWIIDEKVHVIMEASGPYYLGLASYLYEQGLKISVVNPLVIRRYGQMKLTRTKTDAKDAALLAQYGIDQQPDLWSPPSKARQGLKKLMSMREGLVRQKAILTGQAEAFTQNKEIEPMVNELNGKMQKEIQKNITRIDRRMAALAEEHYQQVMEALLTIPGIGPKTAIELVTVTDGFGRFDSPRKLASYVGICPRIWESGSSVKGRGSISKLGCPQLRKLLYMCSWSAKRSNPACRKMYDRLKKRGKPEKVIKVAIAHKLLRQAFAVGKRCEAFNEKKALAA

SEQ ID NO: 148673 - protein, 367 aa, unidentified
MKDSNTVVGLDVHKNSIQIVTADTDGAMEVRHFGRIGGTMDALDRAVRKLVSRGSTLRFVYEAGPCGYEIYRHLTGKGFSCKVIAPSKTPKKSGDRIKNDRRDAETLARLERAGELTAIYVLREEDEAMRDLTRAREDAVKAQKTARHQLNAFLLRYGQRYPGKASWTPSHMRWLSDIALPHPSQQIVLQEYITTVTVCTERTTRLTDQIAKLLPEWRMFPVVKALQALRGVAPIVAATTIAEIGDMSRFETPRQLMAYLGLVPSEDSSGESTHRGSITKTGNGHVRRALIEAAHAYGFPARVSRHLLKRQEGLPQPVLAIAWKAQVRLCGKFRRLMARGKLKTKIVTAIARELSGFMWAIAREVEV

SEQ ID NO: 148674 - protein, 353 aa, unidentified
MDRYVGLDAHAETCTLAVVGPSGRRLTSKVVETNGQALVEAIRSIPGRVHLCLEEGTQSAWLHEILEPEVLEIVVVSPPETRGAKDDLRDAWSRAEELRVGAIRTRVYKAPKHWAGLRSAATTYRMATQDVVRVKNRLKAVLRGRGILADGGVYEGKKRGKWLKELPTSGHRPMAEWLGRELDQLVPLREEAEGWLLKEAKAHPIIKRLSTAPGLGPLRTAQLAAVVITPHRFRTRRQFWSYCGLAVVTRSSSDWVPGTNGKWTRAVVRQTRGLNRKRQPVLKTVFKGAATTVITQLHGHPLHMDYERMLQSGIKPNLAKLTLARRIAAIVLSMWKHEEVYDPERYKPVMVKS

SEQ ID NO: 148675 - protein, 369 aa, unidentified
MKKIVKYVGLDVHKDSITIAFADDGRDGDVRVYGKIANDLGQIDKVMRKLISQNCEPHCVYEAGPCGYPIYRHLKNKGINCVVVAPALIPKKSGERVKNDRRDAIKLATLHRAGELSCVYVPYQEDEALRDLVRTRQDMQKALRKIKQQINAFLLRHAISYPGKAKWSKAHHNWLETIKMPHLAQQIAFTEYLDALANGEARISRINKQIESFCQTWRMHSVVEALQSLRGISLISAVTVVAELGDLTRFERPAQFMAYLGLVPSEHSTGDHIKKGGITKTGNTHARRALIESAQAYRLPARKSPGIRKRQKGLSQDVLDIAWNAQLRLCHRYRRLVAKGKKHNVVITAIARELAGFIWAIARVVPLAT

SEQ ID NO: 148676 - protein, 359 aa, unidentified
MTQNTTTASRMTIGIDLGDRYSHFAVLDHAGELVEEGRLRTTPAAFKLRFTSCTPARVAIEVGTSSAWVNELLADAGHEVLVANPRKLRFIFQGDNKNDRVDAEQLARVARLDPRLLSPIQHRTRESRVDLSVLRARDGLVRARTRLVNQVRGLVKPFGTRVAGCSTSTFATRVARAIPKELRPAIVPLLRVVQTLTDKIRRMDKRLESMAAKKYPEVAALRQVNGVGIVTATTFVLTIEDPRRFKSSRSVGAYLGLRPKRRQSGNADPELRISKAGDRDLRMLLVQSAHYILGPFGKDSDLRRTGLALATRGNKTAKRKAVIAVARKLAVLLHRLWVSGEEYEPLRNANRREPEAHTA

SEQ ID NO: 148677 - protein, 426 aa, unidentified
MSERDYSKQVARRQRIGGTTLVVGVDIGCASNAVGFMSKEGSVLGSYSYMPNSREGFEQFVKTTEGLKAKHGLTDVLIGLEPTGHYWRKFAYFAKGKGCEVRFVRTTALKHHRELDESSSAKSDQRDALTLTNITREGKYIDTVIEEGRMRQLRTLVKLREKIQKRNVSAKNSLHAVLDDYFPELKEIFWSMHSRGLWALLQRWPFPVDVVTLKVSVLKELIGRASRRGAEASRKAMAVSQAAKESIGLRQIGSADRYRLKMCLEEVKRTELMIKDMEREIKRMLKEIPEAQYLLSIPGIGPISAAVFLGELGNPSYFQSARQIVKYAGYDPQESDSGYRVSRKFISKKGRWLLRKHLFLMSMRVVVLSRYFQEYYQRKLQTKNRFGQLPRKKEILCAVAIKLIKVIFALLRDKRNFEDTVTCSVE

SEQ ID NO: 148678 - protein, 315 aa, unidentified
MLSQMFVGIDVSKAQLDIALRPTGERWAVPNDETGIAALVGRLQAVQPTLMVLEATGGYHRAVVAALAAAALPLVVVNPRQVRDFAKATGQLAKTDALDARAVAHFAEAVRPALRPLPDAQTEELRALLARRRQLIAMRTAEQNRLENASPRLRADIVAHIAWLDQHVATLDDDLDTTLRASAVWRERETLYRSVPGIGPVCARTLVLDLPELGTLSRQCIAALVGVAPLNRDSGTLRGTRTTWGGRAHVRTTLYMSTLVAVRYNPVLKAFYQRLCTAGKAKKVALTACMRKFLTILNAMVKYQKPWQVPEVPSA

SEQ ID NO: 148679 - protein, 320 aa, unidentified
MSQNTSAIMIQNLTTVYTGLDIAKASLQLHLQNKSCDLSNTATGHQQLIKRLATIPGAHVICEATGGYERAVVAALHAAAIPVSVINPARVRQFARASGELAKTDPIDAAMLTAFGQSFAPEPTPKRTTVEIKMAALVARRAQLLELHVAERQRADTCDEPALCKLFTAWLSQLEKQIAKVEALIEALLAEQSLLAGQVRRLDEITGVGRITAVTVLAAIPELGQLNRRQAAALAGLCPYNRDSGQWAGKRCISGGRSEVRRALYMAALSASRSNHLLKPFYQRLIAAGKPAKVALTAVMRKLIVLMNHLLKNPNFTLAN

SEQ ID NO: 148680 - protein, 330 aa, unidentified
MSKNDTLYVGVDVSSKSLDLAVMNDGKWLQTTFSNDDKGHAAMVRYLKKRTRQALVCVEATGIYHLELCLALHGAANIEVMVINPRVGKDFAKAMMQRSKTDASDARMLAEYAGRMVFVSWNPPKASVWELRAIARRMDILSRHSVAEKNRLHSSRNDLVSSDIEVNIRHLKRRMAQLQKKALELIEHDDELLQKFTLITTIIGIAELSAIRILGEILMLPENMNVRQWVAHAGLDPRAFESGSSVQKKVRISKVGNSHLRHALYMPAQSASLYDKQVKIFREQLAQRGKTPMQGVVAVMRKRLHTIYGVLKNKTPYDPNMFYQNVGKIA

SEQ ID NO: 148681 - protein, 341 aa, unidentified
MSVIKAVGIDLAKLVFSIHAIDEHDKCKFRKTVKRNNLLAEIAKLPPCIIGMEACSGAHYWAREFTKLGHDVRIMASKFVIPYRQNEKNDANDAEAICEAATRPKTRFVSIKSEEQQAVLCLHRIRQGAIKDRTARINRLRGLLAEFGIIMPKGRYPAQKAMSEILEDAQNNLPFLARELLNDLWLNIKTLNEEILKYDRKLYALAKQMKDAKRLMSISGIGEITATAVVATVNHAKHFNSSRSFAAWIGLVPRQYSTGGKAHLGRISKRGEKHIRTSLIHGARAVIANCKNKTDRTSMWIKDLIERRGFKRATVALAAKNVRLIWALLHSEKEYQADYVK

SEQ ID NO: 148682 - protein, 315 aa, unidentified
MNQDTTFIGLDVGKAEIEVFIACLEHSQTVANDRSGLTELVRQLRRIPNAHVILEATGGYERQAHERLTKAGIPTSVANPIEVRQFIRGMGRRAKTDAIDAAMLAEFGRVRRPEPTPLPSAEQQRLSELLLYRRQLIDERTRLTNQMPHYRDPVVKRSAASRLKIIAADIRKIEDSMLETVRAMPRLNTLFERISSVPGVGPISALTLIAQLPELGSLTRRQVAALVGVAPFNRDSGTMRGYRAISGGRPQVRMVLYMAALVAMTHNKVMRSFRDSLIAKGKPKKVAIIACVRKLVTILNAMVRDGVPWREPVAD

SEQ ID NO: 148683 - protein, 343 aa, unidentified
MKATTIGIDLAKSVLQVHGVDARGNAVVRKQLKRDQVLPFFGNLAACRIGMEACGSAHYWARKLEKLGHSVKLMAPQFVKPYVKTNKNDAADAEAICEAVSRPNMRFVPIKNGEQQAVLALHRARQGFVTARTAQANQIRGLLSEYGIVIPQGLSHVSKRLPEILEDGENDLPGVFRQLLQRLGDHLRELHRQVGELELQIQLWHRQHDASCRLARIPGIGPLTASALVASVGDAKSFANGRQLAAWLGLVPRQHSSGGKSVLLGISKRGDSYLRMLLVHGARAVIRVAEKKPGYADSWLARLIGRRHPNIAAVALANKNARIVWALLKHDRDYRIAYQPAMT

SEQ ID NO: 148684 - protein, 355 aa, unidentified
MNSSKYIGIDLHKDSISVAVRNPAGKIVMESLIETKAGMILQFIAGLRGDLHVTFEEGTSAAWLYDLLKPHVTRVVVCDPRKNKSMREGNQSDKIDARRLSELLRLNHLNPVYHGEHGLRTLKEFVRSYLTVTKDLGRVMTRVKAIYRSWAIPCTGKQVYAARHRAEWLAKIHEPGVHRRAEFYYQQLDALRVLRLGVRRELLAESKKHKAWKRLCQIPAIGPIRAAVLLGILQTPHRFRTKRQLWNYCGLAIEMHSSADYRNVDGELQRSRKNVLVRGLNRNCNHDLKNLFKGAATVASSKPGPFEKFYAALVAKGMKPEMARLTLARKIATIVLIVWKKGVCFDAQHLKPQTA

SEQ ID NO: 148685 - protein, 415 aa, unidentified
MEVLYGTCSGVDVHKKLLVVCLRRGKKSEIRSFGTTTQELFDAVDWLKNNDCEMVAMESTGSYWKPLYNVLEAMEVPAMVVNAQHMKAVPGRKTDMKDAEWIADLCQHGLLKASYIPDKEQRELRELVRYRKSLIEDRSRELNRLQKMLEGGNIKVSGTIGSIDGKSSINLLKRIINGEKIDGKLYDEMYAKKEISHNLKCSKEQIIADMNGILSELQKRMMNELLRHVEELDAHISNLDREIEHFMTVDEATACKMIQEIPGIGESSAQAIISVIGTDMSRFPSDRHISKWAGLCPGNNESAQKRRSGKTTKGNKVLKTTLVTCAHSAVMVKDSFFKAQFSRISARRGTKRAYVAVAHSMLIAIYHMLLTGEVYKDLGSNYYNQFNKERKANGMIKKLKELGYEVTIATAPEVA

SEQ ID NO: 148686 - protein, 324 aa, unidentified
MQGQIQPEARSTHCPVYVGVDVCKDHLDVYLHPLGQHLRIANDGDGIKCLKRKVAHLDVALVIIEATAKYHRLAHRSLSQSGFAVAIVNPLRARLFAEAAGTRAKTDRVDAKMLAVLGDLLAPQATPPTPEAIEALQELVHARNAATADRTALSNRLAASQTRFLRRELKRQMANLMRHIERLVDEIAARIAADPVLARRYAILVSIPGVGPAVAASLLADLAELGSLDRRAVACLAGLAPFADDSGDSEGQRHIKGGRAHPRRALYWAALSAARHNPDLSAFYKRLIEKGKKPKVALTAVMRKLVVLANTLLKEKRLWLDHRA

SEQ ID NO: 148687 - protein, 308 aa, unidentified
MQIIGCDLHTRQQTVAMLDTTTGEVVQKTLRHETSEVREFYSALPRPVRVGIEATGSMQWFVNLMEELGIECQVGHPAEIRAAEPRKQKHDRRDADLILKLLAENRFPAIWLPSKELVDLRSLLRMRTRVQNALQAIALANGLRRGPSLWSQLGQHTIASLPLAPHAAHRRSELQALYMKFETEIEKLNRRAEIIPKEYSSGGRQKLGGLSKQGNPLLRFLWGEAGAHAARRDPELKRFYRRKLIQKGLGKAGVAVARKLGIRLWIMLRDQIDYNEFYRRGQMRQKNGDACAGMPETGNGANSHRPVD

SEQ ID NO: 148688 - protein, 330 aa, unidentified
MKKISVGIDISKKTLDASIYSGSGGQPWIKTTNSEDGFVKIINWVEKQGFNPQEVMFVMEHTGHYGYALAAFLDAHDMPYTFVAGLEVKHHFPLSRVKNDKNDAKKIAQYFYEVQEREDFRIQTIKASEIYTLSLLLSERNLYVKHRAHLKAQLSETQEYSSANRNERLKTIEKVYSKQIREIEKEITNVIDSTPELKKNYDLIRGIAGIGLVTAVTIIVATANFTRSKNARSFANHICVAPCDKSSGTSVKGGVHTSNIGRKDIKALLSRGVLLAIKYDKGIKSYYERKREEGKHYYCIANAIMFKMVCRIFAVVKRGTPYVETHAYIQ

SEQ ID NO: 148689 - protein, 486 aa, unidentified
MVTPNEKPDKPTNPDKPTKPNPSRKRSLPVPVPVSAAALNVINPDAAGIDVHSDMHMVCVPADRDANPVRQFGANTADLQEIAAWLKKCRVRTIALESTGVYWIPLFEFLESEGFEVNPVEPGQLSRCGARPKTDVLDAQWIQRLHSYGLLRASFRPPDSVLALRAYWRQRQMQVRYAAGHVQHMQKAMEQMNVKLTEVVSDITGLTGMAIIGAILEGQRDPIQLARLRHERCHHSEEQIALALEGTWRPEHLFELRQAHELYQFHHRQITECDQQVQAELANFPNRAGAKTHTVTPRKRGRKSNDVRFEATGPLFQALGVDLTLIEGIDVGTALVILAEIGVDVSRFPTEKHFASWLRLCPPQDESNKTKKRRGHRKGTNPVTLALRMCARSLGKTMTPLGLFYRRIRSRIGGLGAVKATAHKLACLVYRMLKYGKEYVTQSMEEYEAKMEANVLKALKRKAAAMGFELSPLPPQKVSQEAVAMA

SEQ ID NO: 148690 - protein, 390 aa, unidentified
MNFVGIDVAKDKHDCFICNSDGEVLFNAFTIPNSLEGFDNLYQKILSITNDLSKVKVGLEATGHYSYNLIGYLLDKGLPTFVINPLHTNLYRKSLSLRKTKTDRVDAHTIAMMLMSDVNLKSYSNTLYHNEELKSLTRYRFDKVQERAKLKTSIARLVNILFPELEKLVSTLHMKSIYALLSEFPSAHHIAGAHLTKLTNLLYQASNGRYNQDTAIRFREAARNSIGSVMPAKSLELKHTIRLIGELDSEIAEIEDSIKSIMDKINSPILSIPGISYRMAAMIIAEIGDFERFSTPDKILAYAGLSPSTYQSGQLMSTYAHMEKRGSRYLRYALFNAAKFVCNWDSCFSEYLNKKRSEGKHYNVAISHAAKKLVRLIFHLQKTGELYKSV

SEQ ID NO: 148691 - protein, 391 aa, unidentified
MVCVGIDVAKDKHDCCILDSDGTIRADCFTIPNNIDGFKQLLRTVRDCTTKADKIKVGLEATGHYSYNILGFLLDNSLPTYVISPLHTNLYRKSLSLRKTKTDRVDARTIATMLLSDVDLKSYTDTAYHNEELKSLTRYRFDKVRERAKLKQSVSRLVTILFPELEKLVPTLHIASVYSLLSEYPGAKQVSEVHLTKLTNLLATASKGRYRKEKAIQIRDAAKTSIGSVMPAKSLELKHTIKLIQELTSEIDEIEDSIQQIMDELNPPILSIPGMGIHSAAMILAEIGDFSNFESPNKILAYAGCSPSTYQSGKLTNCYAHMEKRGSRYLRYALYNATKYVCYWNPVFAKYLAKKRAEGKHYNVALSHAMKKLVRLIYALQKSGKTYLTAA

SEQ ID NO: 148692 - protein, 342 aa, unidentified
MELHTIGIDLGKTVFHLVGLNLRGEVVVRKRFSRLQLLRFTANRQVQLIGMEACGGSHFLGRALREQGHEVRLIPAQYVKPYVKTNKSDYIDAEAIAEAVGRPTMRFVPIKTDDQLDLQSLHRVRERWVMRRTAVVNQIRGLLLERGITLRKGRCHLDTALPGILEDGTSKLSGAVRLLLAQLKLELDQLAMRLEEADALIQKAAQESEVCRRLDAIPGIGPLTATALVAAIGNGAAFRKGREFAAWVGLVPREHSTGGKQKLLGISKRGNSYLRRLFVQGARAVLQFREKQSSGLSAWLAQLTSRTHYNVAGVALANKLARIAWAVLATGEAYRPTVLACR

SEQ ID NO: 148693 - protein, 406 aa, unidentified
MVRFVGLDVHRDFCEIAICESGRLRSGGRVPTSPEGLQVLANTLGPDDQVALEATGNALAIARRLEPFVDHVVVATRTELRAITEAKVKTDSRDARTLARLLAAGLLDGCWLPDEKTRALRRRLGRRAQLVRQRTRAKNEVHAVLIRTLKGRPPMSDAFGRGGRVWLAELELPTDERETVDGCLRQIDFLDGEIAILERAIAEHALGSDAIKRLMTVPGVSLMTAATFTATVGDIRRFHDPRKLVSYLGLDPKVRQSGITAAKHGRISKQGASQARQMLTEAAFVAVSTAGPMRAFYERVRARRGSQIAIVAVARKLAVLFWHLLTREQDYAFQRPSLTGKKLRGLELTAGAERQPGRRNLATKNAYSQGAERARERELSEHAEVAYRRLVADWKATAPTKAATST

SEQ ID NO: 148694 - protein, 387 aa, unidentified
MSQTAAALIPAPVAYGSTLVLAIEVSNKSWVLAAQVPGLPHTKAKRTIHPEAGALLAAIAGYRARAAATGHTIERVIAVYEAGWSGFWLARWLIRHGVEVYVVQPSSVPVDRRMRRAKSDGIDAELLLRTLLAWLRGEPRVCSMVPVPDEADEDARRCVRERTELISERVGLTNRIGAVLATLGVTDYNPLLRSRCRRLAELRTGLGEPLPANAHAKIKRLLARLELVLTQIAELERERDAVVETEASDKAGKMIQQLISLRGIGVQSATVLVREAFVRRFANGKALGSYAGLASSPYNSGGINREQGIGKGGNRRVRTVMVELAWLWTRYQPSAAQVCWFRERIGPTGRRVRKIMVVALARKLLIALWRFIIDGVVPEGAVLKPAA

SEQ ID NO: 148695 - protein, 407 aa, unidentified
MLFAGDDWAEDHHDIELQDEAGRVLVRARLPEGIAGITRLHALIGQFAGPETEPGEVAAGIETDRGLWVMALHAAGYTVYAINPRQVSRYRERHGTSGAKSDKGDAHTLADMVRTDSHQLRPVAGDSAGAEAIKVAARAHQTLIWERTRQVQRLRAALREYFPAALAAFEDLAAPDALELLASAPDPARAARLTRAQVAAALKRARRRGITGKTGAIQAALRGEQLRQPPPVTGVYAATVSSLTVIIAALNGEIAKMERQVTDRFRRHPHAAIYLSQPGLGEILGARELGEFGDDPHRYASARARKNYAATSPVTRQSGKKKIVMARFIRNGRLADALHRQAQRALRASPGARAYYDEQRGRGLDHDAALRALSNRLAGILHGCLKTSTLYDEATAWSHRVTVSTAA

SEQ ID NO: 148696 - protein, 408 aa, unidentified
MRLVCQVCRIVDLPVYYELETNNGNRDYRIQIGGHYMNYNTVYVGMDVHKESFTLCSCKYEDEKASHYQRTPASYKNVLRYLAFLRTIYGEDTRFVCGYEAGCLGYSLYHQLENFNVECVILAPTTMLEQRSKRRIKTDKRDAEIIARSLAQHNYSPVHIPTETDNQTKEFIRMRDDHKAELKKIKQQILSFCLRQGYQYDGSGNWTAKHVKWLRSLEPAGLYKEILDEYLLTYTILTDKLNRLDQRIEELASKEEYKESVSKLTCFLGIKTHTALSVIVEVGDFQRFVSARKFAGYLGLVPGQHSSGDDRNGLGITKAGNTHVRRLLVESAQSYTRGKIGYKSRVLRSRQAGNSPQVINYADRANERLRRRYYKMVLKDGKKYNIAKTAIARELACFIWGMMTDNIY

SEQ ID NO: 148697 - protein, 321 aa, unidentified
MAYIGIDISKISFVAAYPSTKGYRTQTFPNTAAGVRKFIATLSVAEHHCVIEATGNYGFLLLYLLHQSGIAVSLVNPKQIKHFARMMMAVTKTDEQDACMIAMYGEKMNPPLYKMPSQAIILLKQKKTVIRQLRKQLVASKNLRESLVVLPYRDKACLRALDKTIDFLTKQIEQLEAELADIASSEFDKQLKALTSIKGIGITLATALILTTGGFTYFDNAKQLSRFIGICPTYQQSGTSVNIKGHINRNGDEHLRSLLYVASWTALRYNTACRECYLRLKTNGKPSKVALIAVANKLVRQAFAIATTDSTYIDGFVSTKK

SEQ ID NO: 148698 - protein, 341 aa, unidentified
MGQASTIGLDIAKRVFQAHGADATGRVVFRKRLVRAKVLEFFAGQPRCLVALEACGGAHYWARELSKLGHTVRLIPPAYVKPFVKRQKNDVADAEAICEAAQRPGMRFVPVKEEAQQANTVVFRARDLLVRQRTQCINALRGHLAEYGHVVPQGPAHVGSLVALVEDPKSAVPESARGILQVLIRTLNALEEQLTELDGEIARRAKADPVARRLMTIPGIGPIAATAITALVPAPEGFRAGRDFAAWLGLTPLQKSTGGKHKLGAISKMGERTIRRLLILGASAVVRWASRRGAAAGSWLARMLARKPRMLVTTALANKMARIVWALLVKGGTYRAPAVAA

SEQ ID NO: 148699 - protein, 347 aa, unidentified
MFNTNVIAIDIAKSSFHVCSLNKNNKITTNRSFTRSKLKEWLVRQPPSVVAIEACGSSHYWARFVVKLGHTYMLIPPKYVTPFRKGHKTDKNDALAIAIAAKQPGMKTVSLKSIEQQGLQSIERMRQHHSDSMTATSNMIRGLTYEFGHVIPKGHSALKRDILDILEDGENELPHAFREQLYDMFQFFLTIESALISVEKKLAELIKQQSTCIALMALEGVGPVNALGLSLALGENGDSFKNGREASACIGMTPRQFSTGGVAILGGIGKRRGNNRLRSTLFQGAMSIVKLLINRPPKNSKERWLAAIIERRGARKAAVALANKNIRTAWAMVRYGKSYEAPAALAA

SEQ ID NO: 148700 - protein, 391 aa, unidentified
MICVGIDVAKDKHDCCILDSEGTTLADCFTIPNNLDGFKRLLQTIKDCTKKSDKIKVGLEATGHYSCNILGFLLDNDLPVYVMNPLHTNLYRKSLSLRKTKTDRVDAKTIATMLLSDVDLKSYTDTAYHNEELKSLTRYRFDKVQERAKLKQSVSRLVTILFPELEQLVSSIHGTSIYALLSEYPGAKQISEAHLTRLANILVTTSRGHYRKDRATHIRDAARTSIGSVMPAKSLELKHTIKLIQELTSEINEIEDAIRKIMDELKPPILSIPGMGFYSAAMILAEVGDFSNFNSPDKVLAYAGCSPSTYQSGKLTNCYAHMEKRGSRYLRYALYTATKYVCYWNPVFTEYLTKKQAEGKHYNVALSHATKKLVRLIYALQKSGKAYLAIT

SEQ ID NO: 148701 - protein, 423 aa, unidentified
MAYRIAGIDVHKKKLAVVVVDVEVDDEYQFERRWFGGNPEQLQRLAEWLTEQRVEEVVMESTAQYWKPLWSALERYWKPSCQNREGAGKMSGTLHLAQALSNRGRRGRKKDFRDAERLVKRLVSQELTLSFVPDTEQRLWRTLTRTRYQRTRDKVRLQNQLEALLEEAHIKLSSLVSDLLGVSARRMLHALADGETDPAAVAALAHQRLRATSAELRDALGACTELNPVYRRLIRLALDDLQLIEQQIGQLDQEIASLLREHQDAVQRLAEVPGLGVDSAQQIIAEVGAKAATFASAKNLVSWVGACPGEEESAGVNRSKRSPKGNRQMRRILNQAANAAAKHKGSIFEIVYRRLVLRLGHNKTIGAIAHRLCQLIWIILHNGVRYEERGPSVCEKAKRVRTSRMIRTLRTLGYRVEPVVIPA

SEQ ID NO: 148702 - protein, 329 aa, unidentified
MKGSKSRMQGKITSVGAGDAVYAGIDVCKAWLDVYLHPTGKTFRVANSKEGIQRLRKELAVAKVALVIMEATGKLHRLVHRMLSQAGYPVAAVNPARPREFAKAIGQLAKTDKIDARLLALYGACLSPRATPVPAVTVAELQELVLARQAATADETAIKNRYGAAESGLVKRLLKKQLTACERMLAKLEEAIAALIESDPVLKSRYDILISIKGIGFVGAATLAGCLPELGQLPAAKTAALAGVAPFNADSADSKGQRHIQGGRAHVRSVLYMAAVSAITHNPDLKAFYTRLRAKGKEAKLALTAVMRKLVILASALIRENRTWTEKHA

SEQ ID NO: 148703 - protein, 344 aa, unidentified
MNKLSRVGIDLAKNVFQLHGVDRHGKAVWRRRLTRDKWLKVLLEKVEPGCEIGMEACAGAHHWARQLRAKGFTVKLVAPQFVKPYVKSNKNDANDAEAVCEAMSRPSMRFVAIKTVEQQDIQAIHRVRSELIGHRTAKANQIRGLVAEYGLVAPQQLARLRAAVPDWLEDAENGLTGRFRALLNGLWNDLKTLDHRAAELDHEINMIAQSDPVAKRLQQLRGVGPMVATALVATVGNAEQFANGRQMAASLGLTPKQHSSGGKDRLLGISKRGDAHLRSILIHGARSVIRTAKEKDDRLSQWVTSLVERRHPNVAAVALANKTARIAWAMLRHGTDYQPDRIVA

SEQ ID NO: 148704 - protein, 446 aa, unidentified
MQRLGLRLFHSHAGRELRHLLGVGIDWAESFHDVALGRPGDGIVDQFRIDHTVAGVERLITRCLELEPDPADVRVVLETRHGVLVEALADAGFTVLPVNPDLVARRRGPARKKDDAEDARICCLMALDQFLELRKLIPHGDLAGELRSIARDDERAARDQRRLLNRLRADLLATFPAAVAIAGDNSGDLGSPVMLKLLANWPTHAQLADIDADTIEAFARTAKHGWPDRFAARVTDALAAEHLPVRDYLIRAKATTIALTATQLLALRDARKAWERRMAALLLGDTRYGRAKQPRNPDPGKAVPGGEIYLSFPGLGDILAARIAGEIGDHIEQFDHPNGLQCYSGTAPVTRRSGRSELVIARRLAHNRYLGTAVHQWAFCSLNSSAWAREFYDTKIKAGKAHHSALRALANRWLEILWHCLTKGVRYDENIHIRNRSKALQPPTAA

SEQ ID NO: 148705 - protein, 449 aa, unidentified
MTRAKTGDHPEMKLVNSGAAAVDIGSTMHMAAVSPESCAMPVRAFGTFTRDLHDLAAWFRSCGVTSVAMESTGVYWIPAFELLEQHGFEVILVNARYAKNVPGRKTDVSDAGWLRQLHSYGLLRGSFRPEAEIATLRAYLRQRERLVEYAAAHIQHMQKALMEMNLQLHHVVSDITGVTGMRIIRALVAGERDPEILASYRDVRCHASLETIRAALVGNDRAEHVFALAQSLELYDAYQAKIAECDERLEAAVNALTVRAKTPAPLPKPRFRQKPTGAPAFDVRAALHGVLGVDLTQIHGIGPSLALKLVAECGCDLTAWPSAKHFTSWLCLAPGNKISGGKLLSSRTRRSSSRAAALLRLAATTIGRSETALGAFYRRLSSRVGKQKAVTATARKIAVLFYNTLRFGMTYSDPGAAAYDERHRTRVLANLQRRARTLGYDLAPLPEPA

SEQ ID NO: 148706 - protein, 370 aa, unidentified
MKKHSKSKQERKPLRRRPAGAVTIGMDVGDKTSRYCVLGRNGTVLAEGSVATSAAAMSAQWAGWARCRMAIEACGQSAWIGRLLSGLGHEVIVANARQVKLISQSSRKDDRVDAQTLARLARADPELLRPIRHRGERAQEDLTAIRVRAALVEARTALVNAARGLAKVFGERLPACDTGQMRMERLAALPESLRHTLQPLIEEVESLTARIKASDGKIEQIAREHYPETKLLRQVAGVGNLIALTFVLTVDDPWRFDKSRDVGCYLGLRPKRSQSGESQPQLRITKEGDRYLRTMLVQGAHYILGWRGPDSDLRRWGLQLAARGGKSARKRAIVAVARKLAVLLHKLWTTGEVYEPLRNTQARQARPAAA

SEQ ID NO: 148707 - protein, 319 aa, unidentified
MSERREERFVGIDVSKATLEVAVRPSGERWSVANEEVQVRELTKAIVKLAPTLIVVEATGGMQILVVAELAAAGLPVAVVNPRQARDFAKATGRLAKTDSIDADVLANFGQAIRPEVRELKDEQAQLLSALMSRRRQIVDMLTAEKNRLAAAPKPVRQEIRKHIEWLEGRLKAMDGQISDTIKENPAWREKDLILRSVPGVGPVLSLSLLAGVPELGRLDRQKLSALVGVAPLNDDSGKHRGRRRVWGGRAQVRAVLYMAIVSATRANPVIRAFYQRLILAGKKPKVALTACMRRLLCILNSMIKNGTRWQQREVGAGA

SEQ ID NO: 148708 - protein, 496 aa, unidentified
MSMHYTTNEKIEQVKNRLFVAIDVGKWLLHVKYMDHTRIVFNQKTYRFSNSSKGFKDLLDCTKTMQESIGYDEAVFGMEPTGHYWLNLAIKLESMGLMVVTVNQNHMKKIEEVVDGSQKKDDNKDPEGIGLLMALGDWTPYYRPEGIYAEIRKAYRLLEGCTEDTTRYTNELHGYLDKHLPGYESCFGKGKGVTCALSLAVLKKAALPEDILDLGIEGILNIWKESGLHGTKIRAEKIINAMLDSKGYAIIDGAETARYELGCIIRKLELAIETEEGAEKLVRKTVVLIPGAQHLLGIKGISYRTVAGFFAIVGDLKKRFSNAKQLVKLAGLNIIIRSSGKHKGEARISKRGCPELRTALYRVLTALLENTPAFKPLKDHFMKRTDNPLKPIKANIAMCNKLLRIFYAMVTHDEDFDEKKMLGDIKRMDNTRVSSAVTEAGKLANQLDLVLYGMKGEVITGEGMEMIRKICRAMKGLVASAERGSVKEAVPDAIGS

SEQ ID NO: 148709 - protein, 377 aa, unidentified
MREKLRFLGLDVHAETIAVAVAEANGEVRSLGTIANREDSIRKFIKKLGSPEHLRACYEAGPTGFVLYWQLTQLGVECAVVAPSLVPKKPGDRVKTDRRDALKLARCHRSGDLTAVWVPDEDSEALRDLVRQREAAKQDQLRARHRLTKFLLRTGQRPPLGLKAWTERYMRWLAQVRYRQSAQEVTRLDCMNEVEHMSARVKRLEEAILEVVKLAPQAMQEVIRGLQALRGVAHISAVTIAAELGNISSRFESARKLMGYCGVFPSEDSSGKRIRKGGITKAGNAHLRRIVVESAWCYRHLPRVGEKLRKRHEGIPAEITEIAWKAQNRLHKRYMKLMNAGKDQRKVMTAVARELLGFIWAIGIKVEAMVCKQQMAA

SEQ ID NO: 148710 - protein, 443 aa, unidentified
MTRMLLPFCVELRQLSFDIFDLGEHNRQAVAKRSKGNPSRPHVRLRTGRPVSQYAGSEVAPDWPVPSLMHRRRVVGDRITYVGLDVHKQGIVAAVAEDGLRGEVRDYGRIANTPTALDRLARKLSREGVKLRFCYEAGPCGYGIQRHLSARGHECVVVAPSLIPRRAGDRVKTDRRDAASLARLHRAGELTAVWVPDAGHEAMRDLVRARLDAVHALRRARQQLSGFLLRQGCHYGRPAWTKMHRRWLAGLKFEQAVHHLVLEDYIAAVEAAAARRDRRLTAQIEAMLPDWTLAPIVAALQTMRGMALVNATLIAELGDLSRFANPRQLMAYLGLVPSEHSSGASIKRGGLTKAGNSAARRLLIEASWTYRFPARVSRELLLRQEEQPKPIREIAWKAQLRLCARYRKLARRGKPANVVTAAIARELAGFIWAIARRVPPAAG

SEQ ID NO: 148711 - protein, 341 aa, unidentified
MEHCGIDVHVKSSQVTVVDDEGEVLERATLPTSRTALGRWFGGRPAMRILLEASGSSPWVSRVLKGLGHDVGVVDPRRVRMVAESTLKTDRIDADTLAELARLRMRLRTLVWQRSESSQLQRGHLRIRRALVEARARFIVTVRGLLRSFGVRVASCRADRFAARCEVTAMGPELADIVAPLLAAIRDLNERIAAMDSMVEQVGQGHAAVAGFQEIPGVGPVVALGYVLSIEDPSRFRRSRDVPGYLGLRPRLRASADLIRRGRITKEGDADVRRLLVQAAHAHLRSDTDTALKRWAEGLIPRIGKRKAIVALARKLAVLMHRLWLTGEVYQPFPEEVAKAA

SEQ ID NO: 148712 - protein, 425 aa, unidentified
MTRPQLTPPAGVLVAIDVAKARNEVLIEVPGSGRRRRLSVLNTRAEHDRLIALLSDLGQPVTCGFEATGNYHRPIAWRLLQAGFAVRLISSVGLARTREALHNGWDKNDPKDAQVMLHMIRIGASQVYHDPLAAGINDVQELSKTHDAVSKAKTEVLHRILTHYLPLYFPEVDRFRHNSRSDWFFAFLDRFPTPASITALSKEAFIAAAWDVVGRKVAKAQLLGDIYETAHSSIGLPVPPDAPAVSMFRLVIGEARGLIQQRDAIEATADALLTDSSDYKLLRRIPGIGPINALTILAEAGDLRRFSHHRQFLKFCGLDLATQQSGTFRGQTKLSKYGNARLRRTLWLAGQVAIRQRENGFRDKFERYIARDRHNADLRRKALTAITAKMARVVHAVIKTGADYRPFVEGPVPGGRTPLSRAVRA

SEQ ID NO: 148713 - protein, 316 aa, unidentified
MQEKLRFLGLDVHAETIAVAVAEPDGEVRSLGTIPNRAESIRKVIKKLGPAEKLRACYEAGPTGYVVYWQLAELGIHCNVVAPTLVPVKAGDRVKTDRRDAEKLARCYRSGDLTAVWVPDEGSETLRDLVRAREAAKQDQMRARHRLSKFLLRSGQRPPSGVRPWTRPYLIWVAQLRFTQIAQEATRQDYMHEVEHMRERVARLEQAIMEAVKLASPALQQVINDLQALRGIADISAVTIAAELGQVSRFESARQLMGYCGAVPRCCFDRTGADRRGNRSGRPGRHPESCSAPGGRPSYPRHPGRQFSRTLRSAHR

SEQ ID NO: 148714 - protein, 410 aa, unidentified
MEVLHAHCAGLDIHKETVVACVRHMTGAKVKTEVRTFATMTGTLLDLSAWLATEQITHIAMEATGVYWKPVWHILSDGEFQLVLANAAHVKNVPGRKTDVKDAEWLADLQAHGLIRPSFVPDEPTQQMRDLLRTRKQLVRERSSHTLRIQKTLEDANIKLDCVVTDILGLSGRRILEALVKGETVPQALATLAHRRIHASTEELGAALRGRVRSHHRFLIKLHLDQIDAMDAAIQSIDKEVDGNIEPFRAAAELLTEIPGISQLAARIVLSEIGLDMSRFETGGHLVSWAGLCPRNDESAGKRRSNRMKKGAPWLKTILVQCAWAAARTKGSYFQTQYHRLRSRRGSKKAICAVAASLLTTVYHMLKNGTCYQDLGANHFDQQDKARHIKRLVGRLENLGFEVKILPKAA

SEQ ID NO: 148715 - protein, 465 aa, unidentified
MKGHRRRPSPKPRTSPAALERLHPHAAGIDCGSAEHFVAVPPDRDATPVRSFATFTGDLHRLADWLSACHVTHVAMEATGVYWIPIFEILEARGFQVILVNARHVKNLPGRKSDVSDCEWLRDLHILGLLRGSFRPADGIVALRGYLRHRATLIECAGALVQRMQKALVQMNVQLPLVVSDITGVTGLRILRDIVSGHRDPVHLAQHRDYRCRASVAEITAALTGNYRAEHLFVLQQNLELFDAYQRQLAACDTAIDAHLGRLTAAATKPTTPLPAARRRHKPRDNEPRFDLRTPLHQLTGADLSQIDGIGPYNALRLLAEIGTDMTRWPTDKHFTSWLTLAPNNKISGGRLLSSRTQPSANRAAAILRLAAMNLGRTQTALGAFYRRLAFRVGKAKAITATARKLAILIYRTLKDGLVYADPGADTYDAHHRTHVLRRLRQRAHNLGFGLIDLSTGEVVDATVS

SEQ ID NO: 148716 - protein, 356 aa, unidentified
MSRDIKYIGMDVHKEAVVIAVLNSGGKLVMESIVETKASSILQFIHGLRGELHVTWEEGTWAAWLYDLLQPQVARVLVCDPRRNALLKEGNKSDKIDARKLADLLRTGMLRPVYHGEHGLRTLRELGRSYQTLSQDLNRVMNRIKALYRGWSIPCAGTQVYAPRYREEWLNKIEHAGVRRRAELLYQQLDGLQGLRRTLRPELLAESRKHKAAKLLRQIPCIGPIRAARLIALMQTPHRFRSKRQLWTYSGLGIETRDSAQYRYVQGQLQRSKKPQQIRGLNQNHNHEMKEIFKGAATRASCGVGPLRDFYVALVAKGMKPEMARLTLARKIAAIALTLWKKEERFDTEQLKPQAA

SEQ ID NO: 148717 - protein, 353 aa, unidentified
MKPKTESDTALPMVIGVDIGKEVFHLVGFGGDGKIVFRRKIKRLGFAAVFEKVPPCIVGMEACLSAHFVSRTLRTLGHEPRIIPAIYVKPFVKGQKNDYNDAEAIAEAALRPNLRFVQEKSQDQLDLQACHRVRARLVSRRTATINQIRAFLIEQGIAVRSGPRALRTSLCAILENRKDEISPRMARLILDLYKDWCHLDERIDTVTGEIEELSRVEAKCQRLMTVPGIGPVISTGLVAAIGSGEAFERGRDFGAWLGLVPRQYSTGGRSVLGRISKRGSKYLRTLLIQAAKVLLMRPRNWPRYSFGAWLKTASERLHRNKLAVALANKLARIAWSVLRHDKAFDTHLETAAI

SEQ ID NO: 148718 - protein, 336 aa, unidentified
MEITTIGLDVAKSVFQVHGLDRTGAVVLHRQLRRRQVERFFAGLPPCLVGIEACGTGHHWARRLSSLGHDVRLIPPLYAKAYVRRNKTDAADAAAICEAVSRPSMRFVPIKSEAAQAAAAVHRVRDRLIAQRTMLQNALRGHMAEFGIVAPAGCGHVKPLVARLAEPDSIPAPLRAALLSLVALLTMLDRQIAVVDKQILDWHRGDARSRRLATIDGFGPILSSAMSARVVEPERFRRARDFAAWLGLTPRQNGSGGKMRQGGISKRGDGYLRRLLVNGAQSVLNSKRGRRDPWIARLLERKPRMVVAVALANKMARIAWAVMVRKTDFRRAAVPA

SEQ ID NO: 148719 - protein, 409 aa, unidentified
MRRVIGMDIHRTFAEVVVWEDGRLRHHGRVDMTRSGLEGFGRSLRRTDEVVVEATGNAMAGAGSPYVGRVIVANPMQVKAIAHARIKTDKIDAGVLAQLHASGFLPEVWIPDERTERLGRLVARRNQVVRHRTRVKNEVHGILQAHLVPKCPHADLFNRRGRAWLERQVLPDDERAAIARHIREIDRLAEDLADLDRDIAREAVDDVQVRRLQTITGVNAIVASGIIAAVGDIRRFRGPQRLVSYFGLNPRVRQSGLGLAQYGRISKHGRSHARAMLVEAAWAAAKAPGPLPAFFLRIRNKRGHQVAAVAVARKLAVLIWHLLTKEQDYFWARPALVAAKLRQLALKAGAPGERGVGRRGSAYAYNVKELRNSEKAAAENAERAYELMVRHWRPRGPKRRTDATKEERL

SEQ ID NO: 148720 - protein, 462 aa, unidentified
MSKAKSKRPPWHKANFDVLEQIQRNAAGIDVGATEVYVCVPAGRDDERVRSYATFTADLHRLADWLVHCGVETVAMESTGVYWITLYDILEARGLRVYLVNARHLKNVSGRKSDVSDCEWLYQLHTYGLLRGSFHPPDDIRALRALARHREMLVSYRAAHIQHMQKALELMNLKLTYVLSDITGETGMQIIRAILTGERDPQVLATYRHGRCKQSEAEIAKALSGNYRQEHLFTLQQALNLYETYGQQIAAEDAEMERLHKALPPPDDGHASQAKPPQPKSRKRRKNQAHFDLTQALYQVTGVDLTQIDGIEALTAQTIITEIGWDVSPWRTEKHFTSWLGLCPNNDVTGGKVKRRSTRKTSQRVATALRVAAQSLARSESALGAFYRRIKARHGAPKAIVATAHKLARIVYYLLKHRTDYQDPGVDYYNQQQRERTINRLRKIAAKYDMVLQPQAGFSGAT

SEQ ID NO: 148721 - protein, 379 aa, unidentified
MMTPTIAATCFVAIDLSKSKWLVALDAPQLAKIKSVRLDGFDTAGLIDLVRATVAEAIELCGPDQRPIVCFETGYDGFWLQRLLSNEGIETLVVDPTSFLVNRKARRVKTDRVDAEGMVVLLKNYCFGDRKAFRTVRVPTVAEEDAKRFHRERKRLMSERTGHINRIRALLALQGVRHINPAMVTWRKKLEGLETADGRPFPDQLMREIVRSFERLELTNKMIKALAEERDEALAAESEQFPEHEKAVLLEGLRGVGRHSAMLLSAEVFGREFKNRRHLSSYLGLTPSPYSSGDVERSQGISKAGNRPARTLGIELAWCWLRYQPQSALARWFRKYTAERPGVRKKVAIVALARKLIVALWRYVETGLVPSGAVLKAEV

SEQ ID NO: 148722 - protein, 361 aa, unidentified
MDDTISSESPATTILALDLGKFKSVACVYEPVSGTHRFQTIATSPSAVHDLLVEAAPQRLVIEACSIAGWVADIARTLSIDLQVANVTAEAWKWQRVKRKTDRDDALKLAKLSMMNQLPMVHIPEPAVRQQRALIKYRHALIDRRTGIKNTIRSLLDSQGLSWPARSRGWTIAAIKELSKLSRPLAECDALNLWRGELHLELRMLEQVSALIAEADRKLNALSAKDTRVLKLKTIPGVGDRLAELVVSTIDDAHRFSNGRQVSAYAGLVPKQYQSGTMDRRGRITGQGPGLLRRMLVQVAWGMQRRQGRGKAVFEQLCHGSQTRRKQAVVALARKILIWCWAMLRDGSVWDPNRASQPSSA

SEQ ID NO: 148723 - protein, 388 aa, unidentified
MNVGADKSEPLTAIHTDLGAIFVSLELSRSSWLITSLSPRGGEKMSKHSIRGGDFAGLMERFAQLQEKARLRTGQSFRIIVVQEAGLDGFWIHRALQNEGIESHVVDAASIATSRRRRRAKTDKIDGETLVRVLLAYKRGEPRVCAMVKVPTPSEEDRRHLCRERKALTAERVRHVNRIKGFLFSQGVSGYQPLRRDRRQRLEELQTGDGRAFPQHLKALINRELDRLELLLKQIKSVEAARDALLAVKQTAKPAPAAMLLAIRGIGPEFAAILWSEGLFRHFENRRQIAAYAGLAPTPWQSGAVDREQGVSKAGNPRLRTTLIQLAWLWLRNQPRSALSVWFHERVSRNGGRLRKTTIVALARKLLVALWKYVTAGVVIEGVTMKVA

SEQ ID NO: 148724 - protein, 345 aa, unidentified
MQTMYYIGLDVHKRTISYCVKDGSGTIHAEGTIPATRFDLDRWMKTLPRPWSAAMEATVFTGWIYDHLQPHAAALKVAHPLMLRAIAAAKKKNDRIDARKICDCLRCDFLPECYMASTAIRERRRTLRYRNLLVRQMVQMKNKIGMLLMEAGVSYNKQRLHKAGYFRELLATNPDIDEGLRSLLRLCRETVVRLERTESALVRSLERDRLLLDRVERLMTIPAVGPITALTWALEVGEVQRFSSIKKAISYCGLCGEEKSSANTVQRTPLSKQRNKHLQTTLIEAAKMAPRYSPGLAMLYDKEKQKGNVNRATLAVARKLVAYLMAVDRAQRNFQVIETSSCIAA

SEQ ID NO: 148725 - protein, 359 aa, unidentified
MASNEGTEHMIVIGADPHKRQHTVAAVDAATGELLGSETVKATSAGHGDLLAWGRALSPERVWAIEDCRHVSDRLERFLVARSERVVRVAPKLMAGQRRSSRQAGKSDPIDATAVARAALREGLGTLPAAELDERALEIKLLLDHREDLVRERTAIQGLLRWHLHDLWGEDGVPVGGLDRAKWLDRLARRLARCEQTVRVRICREEVARLRMLARRSKELEREIALLVRAHAPRLLELPGCGALTAAKLVAETAGIERFATDARFARHAGIAPIPASSGRSDRFRLHRGGNRQLNCAIHRIAVTQGRVHPPARDYLARKQAEGKTRIEALRALKRHLARTVWRTMIANANAPAPTLVLT

SEQ ID NO: 148726 - protein, 431 aa, unidentified
MTNRLQVGIDFSQKRADFCLLFPNGQPLEPHQAFANSCSGYSLAKQLLLDALDSYQFDGADVSGEATSYYWLPFFLQLAADPDLEPYDLNLFLLNPRWVYWYKKCFAQDDKCDEKDPYYIADRTRTHRPDVVWSPQMDTLPLRFYTRFRFHLVQDLAREKCYFSAFLFLKASAYRRIEPFSDIFGATSRLVLTQLPSLDELADLPVEALADHLHELSGHHLRDPADNARKLQHVAHESFPLHPALTLPVQRILELTLDHIRFLEGQIQQVEDWITAELASHPAIPQLATIPGVGPVFSSGIGAEIGDTQRFLRGTKWDKRRRRYRSRNLRDAEDAVAKIAGLWWPRSDSGDFQAQDRRMAKSGNRYLRYYFIQASDRMRHNIPDYADFYARKYREASKHHHKRALVLTARKSVGLVVGLLHRNEPYRSKEG

SEQ ID NO: 148727 - protein, 450 aa, unidentified
MGTEPVEIEAEEHEQVVERVAAIDVAKASGEVCTRVPHASLPGRRVTKVCTVEATTDAVVELAERLARDGIERVVVESTSDYWRPFFYLLEARGLTVWLVNARDVKNVPGRPKTDKLDAVWLAKLNERGMLRPSFVPPVEIRRLRDYTRLRTDLTRDRTRHVQRLEKLLEDALIKLSSVASDIMGASGRAMIEALIAGERDPRVLAELSRGRMRVKRPRLVRALTGRFDDHHAELARLLLDQIDALTAHIDQLTLRIEQLIAEIPAAQAPTAPDDDRPRDPDRAPLPVVERLDEITGIGVTTAQVLIAEVGLDMHQFPTPGHLVSWAKVAPRTIQSGTKTKPGKTGKGNGYLKAALGEAAIAAAKTNTFLGERYRRLVKRRGKLKALVAIARSILVIVWHLLADPTARYHDLGADFYTKRIDKNRRRRHLTHQLEALGYAVTLQELPTAA

SEQ ID NO: 148728 - protein, 425 aa, unidentified
MRSIGLDIHRDFCEVAIAEAGAVRSAGRVAMTPETLELFGASLAPDDRVALEVSGNAWEVARIVSPHVAQLVVVSPADTGIRSARARTDRLDARALAKLLAAGSLDGVWVPDDQTRAMRRRLGRRSQLVRVRTKAKNEIHAALMRRLIAKPAVSDLFGLEGRRWLAELELPAHERETVDGCMRQVEFCEQEIAAVERVIAADALRSPEIRRLMTVPGVNVICAATFMAAIGDIGRFPDRKKLVGYLGLDPKVRQSGTTAASRARISKQGSASARFVLVEASLERRPPAGPDPRLLRAHPHPPRRGHQAAIVASARKLACLFWCLLTRGEDYAYQQPSLTKKKLRRLELTAGAKRGDVEPGIWSTNKALRQAEQELARQAELAYKRTVADWHATTKKSADATPGRASQGRQNGKQRGKATVPNPAL

SEQ ID NO: 148729 - protein, 361 aa, unidentified
MFIERTSVGLDVHARSVVACGLDTATGQVMRRRLAPSAGAVLDWLRELSGPVAVAYEAGPTGFGLARQLTAAGVRCVVAAPSKLQRPAGDRIKTDARDALLLARLLRMDEIVEVRVPSVEQEAARDLVRAREDTRADLMRCRHRVSKLLLRHGIVYCGGHPWNGVHETWLRGQRFGQRGIQLAFDADLEAMLLTLDRRDRLDKAITEMAATGEYAAVVRRLGCLRGVSTLTAFGLAVEIGDWHRFTGATIGAYLGLVPTESSSGQQRCQGSITKAGNTHARRLLVEAAWHHRRDYRTPGATMRARWRLASPAATARGNAGNHRLHQRWQTFVARRKKPVVANVAVARELAGWCWSLAILDD

SEQ ID NO: 148730 - protein, 402 aa, unidentified
MNAVGIDVSKGKSMVAVMRPFGEVVASPFEVGHTASELKKLAGFLKSLNGETRVIMEYTGRYFQPIAYFLHKEGLFVSVINAILVHDYGARTLRRGKTDKKDAIKLANYALDRWIDLVEYHPEEDVRQTLKTYNRQYNQYMKLKVMLKNNLIALLDQTIPGVNTFFSSPPRQDGHEKWIDFAMKFWHCECITELSEKIFKERYLKWCQKNGYQYNAKKAEDIYVEACGHVNTLPKNDCTKLLVTQAIHQLNTVSETLSVIMGEMRRLSAMLPEYSVVMAMHGVGDSLGPQLMAEIGDVRRFYCKKALVAFAGLDSPPYQSGSFEAQSRSISKRGSPLLRKALFQVMSCILRSSTGEEPVFQYLDKKRSEGKHFYIYMMAGANKFLRIYYARTKEYLDRLEAA

SEQ ID NO: 148731 - protein, 355 aa, unidentified
MKLHQSRTQFNCGIDLHAKNMYLCIMDKEGNKLLHKNIKTHDQKCFLELVAPYRHDLTVACESTFNWYVVSDMCEDAGIPFVLGHAFYMKAIHKAKVKNDRADSETIASLLRGNLLPTGYVCRRQNRSVRDLFRRRTYMVRQRAALESHLTEMGHLYDFSATSKDFKRRSERLLTYAKRLPDDFGVQMSAAADIRLIEALRVEILSIERAVMQHAKGVDRELLELLQTIPGVGPIIALCILYEVDDFSRFADCGRFISYCRLITPPQESGGKVTGAGHRKNGNPYLKWIFSELNATCRRHSDELNAFAQRLVSRHGPRKAACMLTHKLGRAVFYIATERVPFNLEKFIGGPMKKR

SEQ ID NO: 148732 - protein, 429 aa, unidentified
MNSTQNKKIEQVKETTMIVGIDVGSEKHYFRAFNWRGIELTRKPVAFSNSMEGFNSFYNTIVELMQKSELEEALVGIEPTGHYWFDLGQFMGEKSIKFVMVNPHHVHKTKELDDNSPSKNDRKDPRVIAGLVRDGRYFYSYMPTGVYAELRNASNRRFVLVEEQTRAKNRLQKWIAVYFPEYKGIYTHIDAKGGLLVLKQAPTPEEIVKLGEEGIIKIWKDAKLRRNGNKKALKILNAAMRSIGLRTGLTEARMEIQDLIEDYELQTKRLERVNDLIKELCQQIRYADKLLEIKGIGITTVAGFIAEAGDITRFDSTKELQKLAGLELVADSSGKHNGKTKISKRGRKRLRYLLFEAAISVVGKNEEFKEIHRYYTTREKNPLKKMQSLIAVACKLIRVFHVILTKGVSYDASKMLEGIRHPGEQLKAA

SEQ ID NO: 148733 - protein, 345 aa, unidentified
MPIVGGLDIHRKQITFDYLDTETGQVRRGQIAPADRTHVRAWLARFAGREDVAFAVEGCAGWRYVAEELAAAGATAHLAEPADTAFARGRKRRAKTDKTDSRHLRMLLAEGRLPECWIPPGHILEGRALLETYHDLRREHTAWVQRIHAVLFHQGAPALGAGTLRTGQGVAALRAAAAHLSPAGQLQVATALEVLEALEARMHVVRHQLLDAARQLTGAKVLAARLYGVGPFAALALTCWLAGEGRFSSSRKAVRFAGLDITVSSSDRKGPPGRLSRQGPPVLRWALYEAGKTHARTSAPDHAYYAQVKDRKNSKRAALSEARKILRQACHILTELGDDALAPVT

SEQ ID NO: 148734 - protein, 350 aa, unidentified
MSVDPAYKVVRSGALAKEAKWKGCRVVIDGVLGIDVSKNTLDASMSSCNKVRSKSFANSPDGWRHLLGWLIGQKIRRVHACLESTGRYSLGIACKLNEAGHVVSIVNPAQIRDFARTKLGRNKTDAVDASHIREYCELFKPPPWAPPSHAHRQLGELQTIRAGIVAGLTEWKNRKNSGMVDAMAQSLADATISHFTSQLGAVEKAIAQAIDNDSDLRRKRDLLLSISGVGETLAGVVLAELPGPDVLRSSAEAVAYTGLNPRRHQSGTSIDRLTRISKIGNAVLRAALYMPAMSAMRYNPAIVALVTRLKAKRRLNPKQIVVAAMRKLLVLCFGVLKTGRPFDPALAMGC

SEQ ID NO: 148735 - protein, 353 aa, unidentified
MKRIVKQAVGIDVAQDELVVCMGRMHEDLTLELYSHKTFSNTAKGFELLTTWVSKLSNADVELNYVMEATGVYHESLAYYLSDRGDHLSIVLPNKISNYSRTLDVKTVTDKTASEAITRFGLERKLDNWEPPKGVYRSLRQLTRERDQIVATRTIAKNQLHAEEAEAYPNKRSIARTKKHIAFLDKQEQEIKEELAQMIKEDEEVKRIVVLLCSLPGIGLLTAATILGETNGFDLIRNKRQLASYAGLDVKEKQSGTSVKGKPRISKKGNRYLRKAMHLPALTAIRHDERFKAIFARIVSKHGIKMKAAVAIQRKLLEIAYTLYKRQEKYDSQYLNKSEDKIAVEITELSIKN

SEQ ID NO: 148736 - protein, 340 aa, unidentified
MPLYGAFDLHAKTNHLGIIDGSGKRVLMKKLPNEALVILEALKSMKRRIIGLVVESTYNWYWLVDLLMEAGYRVHLANPSAIQKYSGLKHADDVHDAFWLAEQLRLGVLPVGYIYPKEERPIRDLLRKRGHLVRLRTSLILSLQNIIIRNVGVQVDVNEVKRLREDRITPLLGMNEDLALAGRTSKETIDFLTRQIKHIEKVVETRVQLKEPYRYLLTLPGVGKILGLTIMLETGTIGRFPGVGDYASYCRKVTSKWTSDGKAKGKGNKKNGNKYLAWAFSEAAECARRYDEQARAYYNRKARKSNFMVAHSALAHKLARAAYYLMRDQVPFIPEKLFAL

SEQ ID NO: 148737 - protein, 348 aa, unidentified
MTLVGCDLHSRKQQVAVLDTTTGEVLEQELAHDGDAVERFYRALRPPVTIGIETTGYTQWFHALMHRLGHTVLVGEAGKIRAMVVRKTKTDRRDARHLLDLLKHDRFPTVWMPDPDMRDLRALVAHRVRLVRMRTMVKNGLQAIALNQRLALRSALWTQRGLAQLRGLALPPHTARRRDDSMELLAWINVRIDQLDAQLAAVVDADPRARRLLTHPGVGPLTALTTVLVLGPVTRFPDGKHVVSYVGLAPAINASADKQHLGAITKQGNALLRWVLGQAAPQAARADDELRRRYFAVLHRRGRPKAKVALARKLLVRLYVMLRDQVDYEEFRRRGRAARASRAPVTVT

SEQ ID NO: 148738 - protein, 340 aa, unidentified
MKKVFIGIDFSKLKFDAAIYIVDRKSIVSEEVFENGPSGYAEFLKWVSSTACCQKSCLLFCGEHTGYYSANLSTFLHESGYDMWLVSGLEMKLTQGIKRSKTDRVDACKIAEYAYRYQDKSVLFQPVSKELEEIRELLSYRERLVETRKVLSTSAKEMKRVKDNASCDFIYLDSLAYITTLSESIRNCEKRIVELLNQDTSLRVNYKLVSSVVGIGLVNAALILVSTANFTLITNPRKFGCYCGVVPFEHASGSSVRGKTRVSKLANKHIKTKLTLAAQNSIRFDPELKEYYQRKISEGKSHWLVLNNVKNKMIHRIFAVVREGKMYEKQYIHPLKLQAA

SEQ ID NO: 148739 - protein, 371 aa, unidentified
MSTPVASQEEVLLMSMEIGNKEWKLRFSNRKREREVTMPAREMDRLRQLVEQAKEKLGMGAACRVVSCYEAGRDGFWIHRCLEKMGIENVLVDPASIEVNRRKKRAKTDRLDAKKLLAMLVRHVIHEEQGMWKVVRVPTEAEEDERRRHREQEHLKGERTTCLARIRSLLVLQGIAPKRLNPDVDQYRDWAGKPLLVALKAELMRHFERLELLEKQISQLDADRKERVGSGETAGDRATAKLSRVKAIGLETATVLGYEFFGWRKFKNRRQVGALAGLTGTPYESGDLKHEQGISKAGNPRVRHKMIEVSWLWLRYQPQSELTKWFWAHYGPESHRSRKAGIVALARKLLVALWKYVDFDEVPAGAVLKAA

SEQ ID NO: 148740 - protein, 342 aa, unidentified
MKLHVVGIDLGKTVFHLVGLDSTGKVVIRKRCSRRQLLIFTANLEVQLIGMESCSGSHFLGRALREQGHEVRLIPAQYVKPYVQTNKSDYIDAEAIAEAVQRPRMRFVPIKTEEQLDLQALHRVRERWVMRRTAVVNQIRSLLLERGLTLPRGRSHVEELLPRILEDAELKLSGSFRVLLSQLRMELGQLGERIAEMDAVIEQRAREDEACQRLTTIPGVGPVTATALRAAIGNGAAFRKGRDLAAWVGLVPREYSTGGKQKLLGISKRGNLYLRRLFVQGARSVLQYHHKQAPALASWLKQLLARSHQNVVIVALANKLVRTAGAVLCSNQPYRATEAIPF

SEQ ID NO: 148741 - protein, 450 aa, unidentified
MSTTYAGVDWASEKHDVLIADETGERILAATFAHDEAGVRGLCRALVRHEVTLVAIERPDGLLVERLLDAGLRILPLHPNQVKATRDRFRASGGKSDRFDAFVLCELARTDHHRFRVLEPDSDQTKALRALTRAREDLVGTRTALTNQLRAQLAGFWPGPLGLFRDLHSRISLAFLERYPSPQDARGLGPARLQAFLARQRYTGRQKPAQLLAKLHRAPIARVGELELAARRALILSMVATIKTLNEQIKQSERQIATAIREHPDGHIFLSLFKKANSVICAAELLAEIGDCRARYLTRDTLAADAGQAAVAIESGKRKAACFRWACNKRLRQAFVTLADTSRHHNPWAHDLYAAAQARGHDHPRAIRTLGRGWCRIVWRCWQDRMPYDPARHRALQRHVTVTIPTSSGPVPDTAATQRMLGTAVTRRAGRRTEREALDGTPTSANALGG

SEQ ID NO: 148742 - protein, 321 aa, unidentified
MEKFSLYVGIDVSKDWLDVAIVSPQNEIMGTYKIDNTVTAIKGFVEGLPRKEQILFCLENTGRYCNAFLEVTGWLNLNTWVEHPLQIKRSQGMARGKTDKYDAIRIAQYAHRFSDKAVLWLPEEKTISQLRILQSKRDILVKTYRQIKQVSEGKSDPDLKPTLTALLEAIDKIEEKMKAIIHTDEKLLKQYELLQSVPGIGNVIAVSLLVTTKGFTKLTDPRKLACYIGIAPFPYRSGSSINYKDHVSMLGNQRLKALINLSAWNAIRAVPSLKIYFDRKVTEGKHKLSAINAVRNKMIAMALSVVRRNQPYSKYYSCVRT

SEQ ID NO: 148743 - protein, 331 aa, unidentified
MFPVGIDVSKNTLDLCMLYDGIKGRIKTRNIQNNRHLVENILRWLRLQHCGPEDVHVVMEATGVYHEQLATELHDAGFRVSLANPHRTREFARGMGIMTKTDKVDAYVLACYAFLKKPHRWEPPAPEIRYLGALLRRRDVLLGDALREENRLEKYLSTDTPADIISSCRRMAQLLREEVSNIERQIKAHIKASPALRRDYTLLTSIKSVGPQLGMHMLVVLRSHNFASAEQAAAFLGVVPIEKRSGTSVRRRPRMSKIGPPQLRAKLYMSALCGKIYNKRMRNIYDEMCLRGKPKMVAIGALMRKLVHWCYGVLKTRTVFNDEDLKPVLST

SEQ ID NO: 148744 - protein, 340 aa, unidentified
MDATTYGLDVAKRVFQMYWVEVETGEILNRRFGRDELIRFLAQRPPGRVALEACGSAHWWARKIKALGHEVVLLHARFIRPFVQTNKTDAADARAIWTAVQQPGMRTVATKTEDQQAMLSLHRVRALLVKFRTMQVNQLRGLLYEFGATFRAGRAAGLAEIRARTAELEDALPGTMMCCLQDQLRRIDELQRDIDLLEKRIGVWQKHDAACHAITAVPGIGRLTATALVATMGDAKSFRSGREFAAFLGLVPRQSGTGGKVRLGPMSKRGDPYLRTLLIHGARSVMYNAKVPTPWQRDIQARRPANVAAVALASKIARTAWAILARGQEYQRNYVSVRPA

SEQ ID NO: 148745 - protein, 429 aa, unidentified
MTNPQSTPEAVVWVAIDVAKDRHEALIEAPGWKSRKKFRVQNTAEEFRAFAEFLHGLALPVRIGFEATGNYHRAIAYFLHSEGFHLELISSVALARTREAMHNSWDKNDPKDAQVILHLLKGRLTQHYHDPMVHNLNDLQELSKTHHHVSLEKTRTQHRLLTHHLPLYFPEIARYHSSSRSEWLWNLLIEFPTPRSVTRLSRDEFVRKAWNLVGRKVAKERILTDIYLTAQSSVGLPAEEHSEAVAMLRFVLRQLLTLCQLRATIEERADDLLSSNEDYQRLRRIPGIGPISALTILAEAGDLRRFSHHRQFLKFCGFDLATEQSGQFRGLSRLSKRGNARLRAVFWMAASVAVRMRENSFRAKFERYTRSDPGSADRKRKAYVAVAAKIARVTYALIRSGADYRCFHEVAVPGGRTRSARAVEANLTS

SEQ ID NO: 148746 - protein, 346 aa, unidentified
MQYIAFDAHKHYTWARVERADGTVVRERKILHERGALRQFLTGSEPGSPVAVETVGNWYWIVDEIEAAGCQPQLVHARKAKLMLGTVNKTDRLDARGLVRLQRTGTLPVVWIPPRELRDARELPRTRMVLVAQRTRLKNRIHASLNKYGILLPDVSDLFGQRGRQELRARMSELPPHTGFVVSRLLEQVEGLDREIAGLERRMKALFAVDDAMRFLMTLPGVGFILGTVIGTEIGDVGRFGRHEQLAAYAGTVPRVHESGGRRHYGPVRSDVNRYLKWAFVEAANGVCRTRRLHRERHTSRLYERIARRRGHQKAIGAVARHLAEAAYWMLTKGEPYRDPGLSRGA

SEQ ID NO: 148747 - protein, 393 aa, unidentified
MICVGIDVAKDKHDCFILSSEGEVLADVFTIPNNAEGFDTLLQTIRRCARPEDKIKVGLEATGHYSYNILGFLLNEGLDTYVINPLHTNLYRKSLSLRKTKTDRVDARTIAAMLMSDVDLKSYTDTAYHNEELKSLTRYRFDKVRERAKLKQSVSRLVTILFPELENLVPTLHMASVYALLSEFPGAKQVAGTHLTHLKAVLHDASKGRYGRDMATTFRDAARCSVGSVMPAKSLELRHTIRLIHELDAEIEGIGVAIQSMMDEIQSPITTIPGMGVRMGAMILAEIGDFSRFDSPDKILAYAGISPSTYQSGQLSLSGTYSHMEKRGSRYLRYALYNATKYVCLWNPTFAAYLAKKRAEGKHYNVALSHATKKLVRLIYALEKSKRPYSTAA

SEQ ID NO: 148748 - protein, 343 aa, unidentified
MKLIRVGVDLAKSVFQVHGVDRSEKVAWRRKLGRAEWIKAMQQNVSLEAEIGMEAGGSAHHWARQLRALGYSVKLIAPQFIKPYVKSNKNDTTDAEAICEAMSRPGMRFVSVKTIDQQDVQAAHRIRSELMNQRKAKGNQIRGLSSEYGLVAPREIVHLRRAIPLWLENRENGLSQRFRRLLTGLWDDLRVLDKRIAELDEEIASIAASDPVAKRLQQLRGVGPLIATALVATVGDATQFGNGRQMAASLGLTPKQNSSGGKERLLGISKRGDCYVRCVLIHGARSMINSAKTKTDPLSLWVLRIAATRHPNVAAVALANKTARIAWAMIRHATHYQPDLATH

SEQ ID NO: 148749 - protein, 439 aa, unidentified
MILIREVADAPVIMGISKPADLKSPCGEVKIVNPLFVGIDVSNRSNVAYLMKPDGSKHSSFSVQNNLGGAKLLSERIVSALSSMRLSDVVIGLEATSIYGNNLVYTLREDGSLGQFQRKIHVLNPKQVKKFKEAYPDLPKNDFVDAFVIADHLRFGRIAKEVYMDDYRYQALRTLTRARLDVIQNLTREKQRFANYLFLKCSGIAQEKDIQNTSATTIALMEHFETVDDLANSDLDELTAFIAETGRGRFVDPNAVAKVIQAAAKGSYRLPKTVNDTVNQAMSVSIASMRALKEQVKVLDKAIEQQFEIIPNTLTSIPGIGKVYSAGIIAEIGDIHRFASQASVAKFAGLVWTQHQSGEFEAEHSRMIKSGNRYLRYYLLEAANSVRRCDSEFRRYYDLKFKEVNKYQHKRALALTARKLVRLVFRLLKDNRLYIPPEG

SEQ ID NO: 148750 - protein, 377 aa, unidentified
MKKVVMCGADVHENSMTTRIAVNKEKPQTREFRYTVQGRRNMFKHLKFVARKHGADRIVVAYEASSLGFGLCDECSDAGIECHVLAPTKMPQSEQQRKRKTDKRDAQKILEQLRGHLLAGNELAKVWIPDPQLRDDREVVRMRLDIADKLTAARTQVRSLLKRNKLQKPKTVGKAWTVSDRHWLERLIQQESELPSGAVAALASLLRQIEALQQELKELDKAVKVLAESERYRLAVEALVGTLTGVAVLSAMVFLTEIGDLRRFANRRKVGAFLGVVPSSNESGEGAKDRKGHITRQGPARVRKVLCQAAWTRVRLDPQESKVHARIVQKNPNKKKIATVACMRRLGVRMWHIALEAQLKAGVYESKELPQHKRVAA

SEQ ID NO: 148751 - protein, 421 aa, unidentified
MDFEVKHLICAGLDVHKKTIVAAVCMTDPVTLEAAYKVKSFSTNNSQIAALRDWLLSYNCHDVCMESTGKYWIPVFNILETHMHVVLTHPKYVKAIKGKKTDKRDAKWIANLFRFDIVKASFIPPADIRALRELSYMRSAEKNRFQNSMTISRIRIDCVLTDPFGKTASSIMDYLLSDVPFDETECAKLIHGRVKASNEEIFDSIRGFEILSEQRFKMSHAKQHMELLSSYMDDIETELFRLSRSYDEVIKRISGIVGFTERSALFVISEIGADMGVFESAKHLCSWAGLTPANNESANKKKSTRCSKAGQYLKPLLIQCALAAVKSKKNPYYAIKYKRLAKRRGRKKAVIAIARMMLTSIYHMILNNEEWKPDDYEAIIHPSKPVKVALTLDNVIQFLGEQGADPETLKLLQQQCAVTPG

SEQ ID NO: 148752 - protein, 347 aa, unidentified
MLADQLEYVIGVDPHRDRHALAVVRAPSGEVVYETDVVASTGGYQAALETARVHAPGPRVFAVEGSGSYGRGLSRFLSGSGERVVEVSRVRRDRRGGKTDALDAVRAARGVLADRKSAAAPRAGGRREALRALLVARQGGQAAKRAALNQLRALIVTCPEPLRAELSELSRARLLTRLSAARPAARRDPELRGTLIALRTIAGRIHYLTRDERQLTREIEQLVQELAPDLLTEAGVGPICAAQAIVAYSHHGRLRDEAAFARLAGTAPIPAASGLNNRHRLDRGGDRQLNQALHTILVNRRRIHQPTRDYIARRTSEGKTTREAIRCLKRYLARHLYRQLTKAPMPT

SEQ ID NO: 148753 - protein, 424 aa, unidentified
MNQNQSFAAFIGLDKSDKKINVTLQRCSTARSQRSIIQGSAEALHAWVAALCARFLHQPVAICVEQPAAGLIHALMGYDFVVLFPINPVTLARYREAFTPSRAKDDPTDADLLCELVAQHRDQLKVWQPDDICTRKLRHLTQARRSSVNMRTRLSNQLKALLKGYFPQALELCGEDLTTPLACAFLQKWSSLQQLKKARPETIRRFYYAQNARRGDVIEKRLTLIAQAIALTNDPALIESSIVTVQALTLGLRAAHTAIARFDREIARTFTQHPDASLFAALPGSGTVYSARLLAAFGSRRERFESAEALLNFSGIAPVVKRSGQATKIHRRYARPIFLHQSFIEYANESIRHSLWARAFYQMHKAAQQSHWVIIRALAYKWIRILFRCWQERTPYDELRYLKSLQKHGSPLLQYLAQPNTQTV

SEQ ID NO: 148754 - protein, 392 aa, unidentified
MIIVGIDAHKQLHKALALNDAGTILDQWQGPNSPEGWHSLHQWATTFAGPRQWGIEGAWNYGRGLAQYLVAEGETVYEINPRWTAERRRKARKPGKSDKLDALAVAQLVREDSSTLPQVTADDETAILDLLVTEREGALTEATRLRNQIHQLLLQIDPEYKAHLPGLKTQAGLRMVTSYTTTSQHALDQQRAAVIRRTAERLELALRQAKDLADQIRKSAQLHYTPLTQLRGVDLLTAGALAGILGPGRRFLTDAQLAAHAGVAPLEASSAGRVRHRLNPGGNRRLNAILYRIALTQARCCPAAQIYLARRQSEGKTRREAIRALKRYLVRAVWRLWQECNPKSAHHACLKRAQVPTYEQAAWSGAGAGGPPAPAPLQAKKAARHHSLAGGS

SEQ ID NO: 148755 - protein, 379 aa, unidentified
MKKHNKKTNTRAANLARFKGEEVGRLVVGIDVGDRFSEICVLDQAGNVVERGRVRTEAHTLYEQFGELSRQRVVMETGTHSPWMSALLEGCGHEVIVANARKLRLIAENDNKSDAVDAFELADLGRTNVRLLHPIRHRSLGAQQDLAMVRGREALVETRTGLINHVRGVVKSHGGRVPKCYSSRFGVVAQESIPVPLRAGLSGVLEALDAIEEEIYRYDCELEQLAARKYPEVARLKQVNGVGTLTALTFRLTLDDADRFADSRTVGAYLGLVSRRRQSGERDPQLGISKAGDEMLRKLLVNCGHYIIGPFGNDSALRRWGLRLLARGGRKARKRAATAVARKLAVLLHHLWVSGEVYEPLRGCAAESSAVPPAPRVAA

SEQ ID NO: 148756 - protein, 309 aa, unidentified
MKEELVYLGVDIAKSYLDAAIGDERRRFANERIGHRELIKWVKQLKAPVQVICESSGGYERALVQALVGAKLKVSLVQANRVRQFARAAGILAKTDRIDAEVLCEFGRRMRPQTVTAARLEQERLRELESQRRHLTHLLVMEQNRGARVSDASVQRLNRRLINQIKKQIEHLDLLIKVYIDQSHELSAKAAKLTSISGVGARTAALLLAQLPELGQLNRREVAALVGVAPFNRDSGKMRGKRAIYGGRRPVRHGLYMAALVAAHHNPILRAFYLRLRAAGKPGKLAITATMRKLLIVLNSALKPDLNYT

SEQ ID NO: 148757 - protein, 344 aa, unidentified
MVVLGTDAHKRTHTVVAVDEAGRQVGEVTVAAHSEGHLRLVRWAAQWEQRRWAIEDCRALSRRLEADLLGVGERVVRVPPKLMAGARRSARTPGKSDPIDALSVARAALREPDLPVAQLDGPSRELRLLVDYRESLVRDRTAAQNRLRWRLHELEPGYDPPAGSLNRYKTLTVIDEVLDSHDSVVADLARREVSRIGDLTREVNALERDIAARVAGLAPSLLTVPGCGALSAAKLVGEAADISRFKNRDAYAMWAGVAPIPVWSANNQRFRLNRGGNRQTNAALHRIAITQIRMHPDAQAFINRRLQTGNTKREALRLLKRRLANVVYRTLLADTQQPPIAKAA

SEQ ID NO: 148758 - protein, 448 aa, unidentified
MFIMHYKRLLTLIDSVSSYLSVGLDVGADFTWMSIALPNGSFIGKPFKIVHSDPRSRDLAVAKIKEAQETYSLKSRCFLESTGIYHIPLLCFLRDKGFDCSVINPIITKNSTNINIRKLHNDKFDSKKAALVGLNVSLKTSILPDDSVVDLRNLVRDYYYFKDLQSAVALKLTAELKVSFPAYAKVFSKVTTQSSLKLLSSYPLAEDMLAASKDDIVKIIRSTARFGEAYALRKYDAIISAAQDAAVFGRALPSNAVRIRLYIDTYQEYQKHLDALLKALHETVEKLQDTLIYDQICLLQSLYGIGFLSAVVLVAEMGDFKLFSSPKKLYAYFGLDPAVKQSGKLNGDKVHMSKRGSSLARRVLHMAALNNVKVAKGSGTPVNPVVYDYYTRKCSGKKKTVAMGAVMHKICNIIFAMLRDNKPFEIITPEEHCRRFAAEPPDKIRKAA

SEQ ID NO: 148759 - protein, 427 aa, unidentified
MLKHNTEPNSAEEFAAFLAIDWADEEHAFHLQVVGQSKIETGTLEQKPEVLGPWVAKLRERFGGRPIAVGLEQSRGALIHGLMAYDFLVLYPIHPTTVAKYREAFKSSGAKSDPLDAGQILEILTKHQDRLHRFNPDTVETRLLGRLVEDRRKAVDLRTTHIQALGANLKEYYPQALELANGNLSSRLAGDLLIKWPTFEDFQQAKPSTIKRFHYGHNVRSPEVIERALALAEKSQALTTDPAIVESGSRLTQMYVRLIQALNPVIEQYEQRIQRVFDAHPEVKLFSGLPGAGPALAPRLLAFFGTDRSRYAAALNVQSFTGIAPVTKSSGKSQVVYARAACPKFDRQTFHEFSRLSVTHCQWARNYVQYYTDKGKKYHTIIRALAYKWIRILHKCWQERTPYNEDLYMEILKKRGSIFATLHLQTK

SEQ ID NO: 148760 - protein, 344 aa, unidentified
MEHYAGLDVSIKETSVCVIDSTGRLVREVKVPTEPEAILAVLSDEDFNIKRIGLEAGPFSQWLYGELAEAGLPMICVETRHMRAALSAQVNKSDRNDARGIAHMMRVGLYRLVHVKTPASQKRRMLLTSRQLLQAKARDIENDLRGTLRNFGLKVGIVGAIKFESRIRELVANHPDLATIVDSLLVARRVLREQLSVLHRHLLAVVRDDEVCRRLMTMPGVGPVVALTFRATVDVPARFTNSKTVGAIFGLTPRRHQSGEIDRMGGISKCGDAMMRTVLFEAAQAMLTRTIKWSWLKAWGMKIARHRGMKRAVVAVARRMAVVMHRMWMDGTDFQWKREEVAAA

SEQ ID NO: 148761 - protein, 467 aa, unidentified
MTPHKDYCLDPCPPVLTPMLPPSPILSDALQVCHPHAAGIDIGEAEHWVAVPPGSDPQPVRRFGPFTADLDALADWLIDCGVTTVAMESTGVYWIPLFELLEARGVQVLLIDPRQAKRAPGRPKTDRLDCKWLQRLHAYGLLAGAFRPADQVCVLRGYLRHRQMLLTYAAHHIQHMHKALEQMNLKLTQVVSDITGVTGMAILKAIIAGERDPVTLAKLRNPHGQHSEDEIAKALQGTWRAEHLFALQQAVELYQFYHQQLTTCDQRITAHLETFADQSAGQPLPPKARRHKKTNEPRFDARTPLYRLAGVDLTTIEGIEENTALILLSEIGTDMHRWPSVKHFCRWLGLCPQHQSSGGKVLSRRVRPGAHRVTVALRLAARSLHHSQSALGAFFRRMKARLGTPKAITATAHKLARLVSHLLKHGSAYVQQGLENYEAQYHERKVTTMAKQAKALGYTLVPLAAQG

SEQ ID NO: 148762 - protein, 457 aa, unidentified
MMETKRRREQRSMLPVHPDAAAIDVGATVHVAAVGPARDPEPVRSFGTFTGDLHRLADWFAQCGIKTVVMESTGVYWIPIYEILEQRGFEVRVVNARDAKHVPGRKTDVSDAAWLQRLHEFGLLRSSFRPQGAIAALRAYLRQRERLLDYAAAHIQHMQKALTQMNLQIHHVISDITGATGMRIIRAIVAGERDPDTLASYRDIRCHSSADTVRQALIGNYREEHLFALAQAVELYEVYQAKVATCDEKIEGVLERLKQPGRAPAKPLRAARHKTRQPNAPAFDARGALYAVLGVDLTQIHGLGPYLALKLISECGTDLSAWPSAKHFTSWLSLAPGNKISGGKILSSRTRPSGNRAAALLRLAATTVGRTETALGAFYRRLSARIGKAKAVTATARKIAVLFYNAVRHGMDYADPGASYYEERYRRRVLTNLQRRAKAFGYVLQPTEIKVVSMAVS

SEQ ID NO: 148763 - protein, 447 aa, unidentified
MKRKQIPKPQEILDAEHELVIGRVCAIDVAKAFGKVCMRTPRERRRVSKVWDVEATTGAVTELAVQLTELGIEKITIESTSDYWRIWYYLLEAAGLDVQLVNARDVKNVPGRPKTDKLDAVWLAKLTEKGLLRPSFVPPAPIRQLRDYTRLRVDLTRERSRYWQRLEKLLEDALIKLSSVASTLDTLSARDMIEALIAGERNPHRLADLARARMKTKRTALIKALDGRFDDHHAELARILLDQIDTLTAQIDTLTTRIDELLVAAEPGKDDSGGNPTGDTVSGSGLSAVERLTEIPGIGSTGAQAILAEIGLDMTQFPTPAHLVSWAKLCPRTIQSGPITRGGKTGKGNPYLKGALGEAAAAAAKTDTFLGERYRRIVKRRGKLKALVAVARSILVIVWQLLSDPSARFHDLGSDYHTSRINIERRMRNHIAQLAAMGYRVTLEPAA

SEQ ID NO: 148764 - protein, 377 aa, unidentified
MTKAVPGVVVGVDAHTDTHDAAVLDDCGRLLATATFAANSAGYAQLLAWARRFGAIGVFGVESTGSYAAGLVRYLRGADVEVREVNQPHAHTRRRRGKSDPIDAEMAARHVLADNRPVTAKDTTGIVEAVRQLRVAREGAVKARSAALNALTGLIVTASEDLRQQLTARKTIRARATLCARFRPDPSRLHEPEQAAKAAMRSIARRVVELDSEIALLDRQLTQLVTQAAPLTISRLAVSTGHAGTLLVTAGQNIDRLRHEASFAALCGASPIPVSTGRTDRHRLNYGGDRDANRALHMIAVCRLRYCERTRAYAERRTAQGKTKTEIIRCLKRYIARELYHALVEDLLQQPDSSRRHDPTISISCGAGPIGHSITTT

SEQ ID NO: 148765 - protein, 361 aa, unidentified
MQSTTLIAFDQHAATTVAAVLGPSQRTPALQSMPSDTGTIVRFVERLRRQGAVRCCYEAGPCGFELQRALIAHEVPCEVIAPALIPRRAGDRVKTDRRDAAQLAILYRAGALTPIHVPTDQEEAARDLLRCREDIRADLLRARHRLSKFLLRHGRRFTGTKKAWSKQHDAWLRTQTWPLPALDQTHTAYLRTVDEAVARLRTVEDDLRGLLTLEPLRPRVERLRCFRGMDDLTALTIAAEVGDPRRFASAPRAMAFVGLVPSEHSSGSKHARGAITKTGNAHLRRVLVEAAWHYRHRPFVGAALRRRQQGAPAATVAQAWTAQQRLYRRYHRLRARGKPNQHVITAVARELTGFVWAALTQ

SEQ ID NO: 148766 - protein, 326 aa, unidentified
MTSLPSPISDDRVTVGIDVAKATLEVAISSQTKTLAFANDEAGCTALLAELSDLRVGLVLFEATGGFELACATALQLAGLAVAVVNPRQARDFARAMGYLAKTDRIDAGVLAEMARTLLARGDLSSLVKPLPDAQQLELQGLVTRRRQLMAMKLAEDHRMKMPGVRQRRSLNTIIKALDREIARVDKDLQAFVGANHAELAALLDSVKGVGKATISTLLAEVPELGKLSGREVSALVGVAPINRDSGTMRGKRSIFGGRPDVRRVLFMAAVVASRHNPVIKAFYQRLLAAGKPKKVALVARMRKLLTILNAMVRSGKPWDQALHLG

SEQ ID NO: 148767 - protein, 355 aa, unidentified
MNDAKYIGLDVHQATISVAVLDSTGKLVMECILETKAAIILQFFHGLRGSLHVTFEEGTCAAWLHDLLKPHVTEVLVCDPRKNALLKAGNKNDRIDARKLADLLRTGLLSAVYHGENGVRALKELARSYLAVTQDLTRVMNRLKALYRSWAIPCTGQRVYAPRYRSEWLAKITEAGVRRRAEFYYNQLDALQALRREVRHDLLAESQKHNARKWLRQIPSIGPIRAALLIALMQTPHRFRTKRQLWAYSGLALKTSTSGEYRFVEGQLKRSRKFLAIRGLNANHNHDLKNIFKGAATRAAAVPGPFHEFHAALIAKGMKPPMARLTLARKIAAITLLVWKKGVRFDAEYLKPQAA

SEQ ID NO: 148768 - protein, 313 aa, unidentified
MKALQSNVFIGVDVSKERLDVAVAPSGETIGFANNEDGIALLADFIKPQAPALVLFEATGGWEMNAVNHLATQRLPLVVLNPRQVRDFAKATGQLAKTDAIDARILARFGEAVRPEVRPLKPVELRKLEALNTRRRQIVEMITAEQNRLVSAPEWVRPDIKELLEILKKRLAAINRDLNKLIRKSPLWREKDKILQSFPGVGPVMASTMIAELPELGNLNRREIAALVGVAPLNCDSGTHKGKRKIWGGRAALRSVLYMCALTATRCNPVIREFYQRLRRAGKPFKVAITSCMRKILVILNAMMRSRTCWQTP

SEQ ID NO: 148769 - protein, 410 aa, unidentified
MRSFRYFVGIDWGGAFHQVCWLDSARPDQPPAQATFAHSGEGLSGIVQWLLDQCQGDREQLAVAIEVTRGAVIDTLLEKGFRVFALNPKQLDRFRDRHTAAGAKDDRRDAFVLADSLRTDAAAFRALSSEEPWLIRLRELTRIEEELKDEVRRLSNRLHGQLQRFYPQLLQLVPGADEPWLWRLLELAPTPRQAQRLTRSKVQRLLQEGRIRRLTAEQVLEQLKRPAVFVTVSAAEAAAEHISLILPRLQLAHDQLLQCQRRIQRLLDEISQGQQREHRDVEILLSLPGAGRFVAATMLAEAWRPLVQRDYHALRCHAGAAPVTRQSGQRKLVCMRVACNRRLQNALFQWSLHAIRFDPRLRELYAGARRRGHGNARALRTVADRLLALLVTLLRTGRPYDPAFRLARTA

SEQ ID NO: 148770 - protein, 355 aa, unidentified
MNQEKYIGMDVHAATISAAVKNAEGKLLMECVLETKAATILEFIQGLRGTLALTFEEGTLAAWLHDLLKPHVSRLVVCDPRKNALMRDGNQNDRVDARNLAELLRTNQVKGVYHGKHGTRALKELGRSYLTLTKDSTRVMNRIKSVYRSWAIPCAGTSVYSRRHRAEWLDKLVEPGVRIRAEHLYQQLDSLEPVRQAARRELLRESRKHAAVKLLRQIPAIGPIRSALLVALLQTPHRFRTKRQLWAYSGFAVQTYDSGEYRFVRGKLQRNRERITVRGLNHNHNHDLKNLLKGAALSAIERPGPLQDFYAALVEKGMRPSMARLTLARKIAAITLTMWKKGVSFDPQQLQRQAA

SEQ ID NO: 148771 - protein, 341 aa, unidentified
MSIITVGIDLAKNVFAVHGVDEIGKAVLVKPKVPRDQLADLIANLPPCLIGMEACSGAHHWARLFRQYGHTVKLMAPKFVTPYRMSGKRGKHDAADAAAICEAVTRPSMRFVPIKEEHQQIILCLHRTRQGFVAERTAVYNRVRGLIAEFGIVLPQKVTHLRQDIGACLEDLPGYANQCIGDLLAHADQLDQRIDGYDRIIAQAARDDARGKRLMHLPGIGPTTASALLASIGGGHDFANGRQVAAWIGLTPGQYSSGGKARLGRITKAGDPYLRSLLVLGARAVLNSLGEKQDRFSRWARSLQERRGYWRAVVAIAAKNARLAWAVLHYGEDFRLMPSAD

SEQ ID NO: 148772 - protein, 361 aa, unidentified
MFSERTSVGLDVHARSVVAASIDGVTGELFKAKLTPAHDHVRSWVRGLPGPVAVTYEAGPTGFGLARVLNADGIRCVVAAPSKLQRPVGDRVKTDARDALHLAKLLRLGEIVEVTVPSVEQEAARDLVRARDDVRGDLMSARHRVSKLLLRQGIVYCGGKAWTGVHNTWLGQQRFDQRGLQMAFETAYETMIATVDRRNRLDAAIAEMAADSEFTPVTHRLGCLRGVATLTAFGLAVEIGDWHRLTGRSIGAYLGLVPTESSSGGSRSQGGLTRTGNGHARRLLIEAAWHHRQHYRPTSVIIRRRWELASPAARARGHAGNQRLNRRWETFNARNKKSVVANAAIARELAGWCWSLAVLDE

SEQ ID NO: 148773 - protein, 387 aa, unidentified
MEVVKKNVGIDISKDDFVATLVTLMANQEIVYHGNNKYKNNPEGFKKFYLWVNSIFVDDDLPVHFTMEPTGVYYESLAYYLFEKEQIVHVVLPNKAKKFAESLNIKSKTDKLDSKALGRMGAERKLDRWVLSSKIYRKLKILTREREMLQKDKTRTQNQLHAENHSAEPIKRTITRMKNRIKYFEKQIKTVEKDISELIENDEFVSQKVKKITTTPGIGLLTAAVVIAETNGFCSIKNQKQLTSYAGYDILLKESGKWKGKSKISKKGNSHIRRALYMPSLSSINHTETYKNIYTNLYEYKQNGLIAGTAIQRKLLCLIYTLWKNDTCYIENYQQMKSKNITSGNDETKSSFCAFAKQKKVGEKLPLNKIDFGLTNQLKPSFCALQN

SEQ ID NO: 148774 - protein, 347 aa, unidentified
MLHVGLDLSRTRLDVHAMNEAGAPVSVMTAAPDAEGLASLVHRLGEFGQPVTAVIESMNGARFIHDQLELRGWTVEIADAVKVKGFAPLACKTDKIDAWVLAELSRRDLVPAIWLPTPGVRGERERARWRLHLVRHRTALKNRIHATLMAFGHPCPVTDLFGAAGRRLLDSLELPEPWAGDVTAALRLIEVLDGEIDDCEAALRKAGADHAYVPLLMSAPGIGWVLGYTIAAEIGDITRFPAAKKLVGYTGLCPSVDQSGGHDWRGELAKNGPKYLRWALVEAATHAAHHPVYAARYQRTKTRLGRQRGASVARVDIARKLTEAIWHMLTTNKPFAPAGATPPTLAA

SEQ ID NO: 148775 - protein, 355 aa, unidentified
MNDAKYIGLDVHQATISVAVRDCTGELVMEAILETKAETILQFFRGLRGSLHVNLEEGTWAAWLYDLLQPHVTRVVVSDPRKNALLKDGNKNDRIDARKLAELLYLNKFNAVYHGQHGLRTLKELARSYLTLTRDLTRVMARIKAIYRGWGIPCAGQRVYAPGHRAEWLGKLSEAGVRRRAEFYYQQFDALALLRQEARRELLVESRKHSAVKLLRQIPSIGPIRAALLVALMQTPYRFRTKRQLWAYIGLALTTHTSGEYRFERGQLQRSKKVLAIRGLNRNHNHDLKNIFKSAATWAAANSGPFKDFYEACVARGTKPHLARLTLARKIAAITLLVWKKGACFDAEHLKPQAA

SEQ ID NO: 148776 - protein, 413 aa, unidentified
MRRLIDRCAGIDVGQALLVVCIRVFDESGRLAQEVRSFGATTPDLVALRDWLTSRGVTHLAMESTGVYWKAPYYMLEDDFEVLLVNAAHLKHVPGRKTDVIDAQWIAEVLSYGLLRPSFVPTRPFRELRDLTRYRKALIRARTSEVNRLHKVLEDAGLKLATVATDVMGVSGRDMMRALIGGVADPQVLADLARARLRAKLPELRKALTARFREHHAFLLARMLAHIEALEQDIDVLSERIAELVEPWQGQVMILDSITGVGLRAAEVILAEIGPDMSRFPTAGHLASWAGRCPGQRESAGRRGAATPRKGSPWLADVLTECAWAAVKTKGTYLSAYYRQVMRRQGKQKAIMALTHKILVIAWHLLSNGALYDDPGAAAVRKTTDEQQRRRAIRQLEALGLTVTVQPREGDAA

SEQ ID NO: 148777 - protein, 342 aa, unidentified
MDAGMVNSHICELREGGEVAERQIRTERKRFQDVFGNRPKARILIEASTESEWIACCLEELGHDVIVADPNFAPMYAHRSRRIKTDRRDAHALAEACQLRAYRPAHRTSPPQRDVRALLGMRELLVRTRTRWIVHIRTLLRRDGLRLAPGRAENFVTRVNDLLLSPQLAAQIAPGLELLAPLNAQIAALDTEVASRAHDDERTRRLMTVPGVGPVTAVAFVATVDRVTRFRNAHQLESYLGLVPREWSSSETQRKGSITKAGNTRMRWLLVEAAWCVMRRKKKPETARLREWADGIALRRGSHVAAVALARRLAGILYAMWRDQTEYDPKELGRRGHVRHVA

SEQ ID NO: 148778 - protein, 326 aa, unidentified
MTRVTWIGVDLAKASFVAARRQQGKCITEEFANDPAGLASFGAWLPRRSRVCVVFEPTGPYGRRLEAWLGQRWPRMSYVLANPRRVRHFARAAACASKTDVIDARRLLEFAEAFQPPARPRPTPITLELRALWRHQLELRKLLDGLRDRRQKAQVDPYIPAALVEGLGELADRLAAELAKIQAQALTLARTERSLRPRFELLVSIPGVGPLTALALLAEYGPQLAHASPRQLTRYAGLDPVLRQSGSSVRGKTRISKQGSSRLRKALYMAALVGVRWNPVLRSFYERRLRKGLTPKPALIAAMRKLLHICYGVLKNDQPFVAVATP

SEQ ID NO: 148779 - protein, 347 aa, unidentified
MNFYNNTHPYYCGIDLHARSLYVCILNNEGKTLVHKEITASPDKLHDLLQPYLGNIVVGVECMHCWYWVSDFCELTNVDFILGHALYMKAIHGGKAKNDRIDSHKIANLIRGGNFPLAYTYPKAMRATRDLLRRRTKIVRHGAHLKAHVVNTTSQYNLPPNAINLKNACAREQLRSTFTDPVVQKNIDLDMALLDSYSKELSKVEWFIEQQAKLHNPHHLSLLKTVHGIGRILALTIIYEIGDINRFESVQKFASYSRLVKCKAESAGKSYGIQGNKIGNANLKWAFSEAAVLYLRGNDEGKKYLLKLQKRMSKAKALSVLAHRIGRCIYYMLKNGTVFDAERFIKS

SEQ ID NO: 148780 - protein, 351 aa, unidentified
MLSQTTAIPKLFVGMDVHKKSWTVHFRTDLFDHKTVTMPADPFALLNYVSKHFGDHQVHCCYEAGCCGYWIARQLQEHQWNVSVVNPADVPRSGKQDWQKTDKIDSRNLSKQLQSGTLKSIFIPGEEQEQLRSLFRRRVHLAGQLRTIKNHIKSQLLYYGIKLPEQYDNPNWSRDMKSWISSVEWKFISGSECLKSRLKQLEFVWYEELHISNELRSYCRKYYRKDYYLYKSVPGIGGITAAALLAELGDMRRFNRLDELASLVGLIPGMYQSSDTNINLGLSRRSNRQLRSLLVEASWVAVRSDMALQQYYRQHAEKEPNKAIIKVAHKLLSRLRAVIQTGVPYQCGLVK

SEQ ID NO: 148781 - protein, 402 aa, unidentified
MKLCIALDVSKGSSHFQSFKGLDEPISKVNYIEHTVDGFDTILNEIKRIKNEYNDIPMVLFESTGIYHFPLKAFLDEYNLNYIIISPLLSAKVRKSDIRGVKTDIKDCASIASVYYIKKLIVHRKYENLYDILREKSRYYDYLSNNLKKWKVEFRRLLDIVFPRLDEEFENIYTDYMLNVLLKYSHPELIKATPSDELLKYLLDKTNHRPSFCLRQIERLKEYCLNFRSGCESNSFYVRQLKRIVFILQKEIIDKDEAMLELVKDASKHPNYECIRSIPGISDNLGSRILAEIGDISRFSNYKKIIAYAGIDPMIYQSGERNGEHLNISKKGNKKLRYLLFIAVVSMVKTNRETPIVDFFFKKRSQGLKNKEALVASMNKLLRLIYCLCKNGMIYKKIVFEI

SEQ ID NO: 148782 - protein, 350 aa, unidentified
MTTIARRITGGVDTHLDTHVAAALDERGAQLGVQSFPATAKGYRELLDWLEEFGTVELVGVEGTGSYGAGLTRHLLSHQVTVVEIDRPNRQRRRRTGKSDPHDAVAAARAAQGGDATGSAKTRDGNVEAMRVLRVARRSARGNRTQALNQMRSLISTAPDELRAELRDLSIYKVLQLASAFRHTGKTDVTTVTKLTLRTLARRALSLEEEVKEIDRLLKTLVAETAPELNAVDGVGTDVASAILVAAGDNPERLKSESTFAKLCGVSPLDASSGKQERHRLNRSGDRQANSALWHIVFTRMANDPRTTHYIERRMKEGRTKKEAIRCLKRYVAREVFAALPRSEFALDSP

SEQ ID NO: 148783 - protein, 339 aa, unidentified
MRYFIGLDVHSNNTVIAVLDEKGKRIYSRRVKNFIKLVLEDLEPFKGKIQAIALESTFNWYWLADGLRDQGYEVHLANPSANKQYEGIKYTNDFSDAFFLAELLRLGILEEGYIFPRRERAIRDLLRKRLMLVRQRTAHILSFQSLYNRVRGCSFGGVMYVKRLKEDEMDDYFEDEDFALAAKTNIASIRFLTTQIEKLEKTVLKKIEILPEFEKLKTITGIGNILALTIMLETGNIRRFPKVGNYASYCRCVPSERSSNKKKKGENNRKNGNKYLAWAYVEAANFARRYCSKAKRFYQRKSAKTNNIVATKALAHKLARASYFVMRDRVDYEPERLFG

SEQ ID NO: 148784 - protein, 347 aa, unidentified
MVEITRIGMDTSKSVFQLHGVNAAEEVVLRKKLRRQDLLRFFAKLPPCRVGMEACGGSHYWARELQALGHQGELIPPQYVKPYVPRGKTDAADAEGICEAMSRPKVRQRLVPVKSAESQAALMLAGLRERLVRQRTQLINTIRGYASEFGLVAAKGPAKVTTLLRRIEDGPTVPETARALFAELACEHARLEAQVEAADARLMAWHRQDEASRRLAEIPGIGPVGATVLVLRAPEPQRFGSGRDFAAWIGLTPKNHNTAGKQRLGGITRAGDEALRSQLVVGATSVIRQVRRGTSRWAPPWLLDLIARKPPKLAAVALANKIARIAWKLMVSGERYRPQPAAATLGA

SEQ ID NO: 148785 - protein, 376 aa, unidentified
MKRILKIGMDVHSTNYTLCALEPVLGAEDRVFANIQVTPDYKNILMFIQNLKCKLGMSDDYSIECGYEAGCLGYSLYNQLTSAGINCVILAPTTMLTQQGKRVKTDARDALMIAQCLAYGGYHPVYIPSETDDSVKEYLRMRDDHKLALKKVKQQIIAFCLRHGHHYIGTKWTHKHISWLKKIELPALYRETVDEYLATYDEQTAKIERFDKRIEEISNQKEYQKKVKELGCLLGIKTHTALSLIVETGDFDRFAKGNTYAAYLGLAPGEKSSGDHINRTGLSKAGNSHLRRLLIESARGICKGAIGHKSKELKSRQEGNKADVIAYADKANTRLRSRYYKMIRHGKKKNVAVAAIARELACFVWGMMTDNISMRA

SEQ ID NO: 148786 - protein, 324 aa, unidentified
MFYLGIDVAKAKIDCCLILENSANKKKIKTFSNTPKGFEQLQTWLKQHAATSTQTIILMEATSIYHELLVKYLFDAGYQVCVTNPARARYFAQSMSKLNKTDKVDSEVLARFAMTADLHFWQPLPKHIQLLNALLDRRAILCEDLQREKNRLEKAESTFTMEPVLQSIHKSIEQLNKHIQGIDQQIDDHINQNPDLKNDKELLSSIPAIADRTSLLMLSFLRSHTFERASQAAAFVGLVPIQKQSGSSIHGRSRLSKAGSSKIRAGLYMAAIVATRHNPHIRAMNERLLANGKTKMIAIGAAMRKLIHLCYGVLKHQQPYQADY

SEQ ID NO: 148787 - protein, 337 aa, unidentified
MKYSGIDLHSNNSVVVVSDEADRVLVRQRLPNDLAKILAVLAPHREELAGVVVESTFNWYWLVDGLQAEGYRVHLAHTAAIKRYEGLKHSGDEADAAYLAHLLRLGLLPTGHICPPAERVVRDLARKRMQLVRTRTAQVLAVENILARQTGSGTTNRVVQQLTARGVQALKLPEDVARALCANVAVIQTLSQEIDKIERRLRQCVRLRPEFRLLKTTPGIGEILATLIMLEVGTIKRFADVGNFASYARCVDSTRLSNGKKKGQGNVKNGNAYLSWAFVEAANFARRFCAEAKRFHERKKARTNNAVATKALAHKLARACYHMLKEQKPFDVGRCFA

SEQ ID NO: 148788 - protein, 365 aa, unidentified
MTKSIKYVGLDVHKNSIAIAVADFGRTNDVRYWGQIENNMDQLNKVLQKLVENGAELSCVYEAGPCGYGIYRHLTGNGIDCSVIGPSKIPRNSGDRIKNDRRDAISLARLHRAGELTPVYVPRPDDEALRDLVRAREDAQIALRKSKQQLKAFLLRHDIVFSGRSMWSKAFFNWLSTIGMDHPAQQFTLQEYIDTVEHCTSRILRFIEQIKYLSEQSCLYPLIKSLQAMRGVSLIVAATMVAELGDLKRFESPDKLMAYLGLVPSESSSGAKVKRGSITKTGNSHVRRVLIEGAHAYRFPARISRVIRKRQEDLPEKICQIAWQAQVRLCKRYKQLFARGKNANVTKTAIAREMAAFSWAIAQVI

SEQ ID NO: 148789 - protein, 333 aa, unidentified
MNYAGIDVSHKELVIVVSVKGKAHKAKTFENTASGHKAIIQLLSKLKGESKVCIEATGVYHFDLAVALSRAEGIEVMVINPKASHNFAKVLMKRSKTDAVDAEILAIYCERMPFEAWQRPADENIALRAIARRIAALTKLKTQTKNQLHALKATEETPVLVIEYTEELIEVVDKQIQVHRESARQLIQQHDELADAFALITGIKGIAVASAVQMLGELMILPKDMSAKQWVAYAGLDPRQFESGSSVTKKPRISKAGNKFVRRALYMPALVATCHEPHIKGYYTHMIQDNGLKKIQAVCAVMRKLLHAIHGMLKAKKEFDGTRFYTFPVEANS

SEQ ID NO: 148790 - protein, 420 aa, unidentified
MRNAGIHADSLLEVRRMYNAVGIDVSKGKSTIAVLQPGGTVIRKPFDVSHTSQSLIELAHYLGSLEGSTKIVMECTGRYHEPMLKALYEAGLFVSVVNPHLIKNFGNNSLRRVKSDPADARRIARYTLDNWAELRQYSGMDNTRTQLKTLNSQFSFFMKQKVAAKANLIALLDNTYPGVNKLFDSPPREDGSEKWVDYAYSFWHVDCVRRIGLKTFTERYRAFCRKHHYIFQPDKPEKLFHASKELVAVFPKEKTYKLLIQQSIQQSNLASGHVERLRQEMNALASTLPEYSTVMGIYGVGKTYGPQLIAEIGDVSRFTHREALTAFAGVDPGVDESGQHKSKSNRASKVGSARLRKTLFQIMTTLLQNAPVDDPVYRFLDKKRAQGKPYYVYMTAGANKFLRIYYGKVKECLRNLEQAE

SEQ ID NO: 148791 - protein, 424 aa, unidentified
MRAIGIDVHRDFCEVAISEGGRLRSAGRVPSTPEALELLGASLSDDDEVALEATGNALAIARILEPHVPRVVVASARELHAISGAKAKTDRRDARTLAKLLAAGMFAGTWLPGEEVRALRRRLAQRAQLVRARSRLKNEVQAALMRNLVGAPSATDLFGAAGRRWLADLVLPADERETLDSCLRTIAFLDGEVERFEVAIARYAMHSVEIRRLVTIPGVGLISAATLVAVVDDVHRFRSARKLVGYLGLDPRVRQSGSTPARMGHISKEGPAAARAALCEAAHAAMRTPGPLRAFGERVAARRGRQVAIVAVARKLATIAWRLLTSGEDYVYANPGQVRLKWRRVELLAGEPSQKGRRTGVSLASQHERELALAAERAYQRLVADRQAAGSRRKGAGAAPGRAPDGSSQDQAARQAQQPHRSAL

SEQ ID NO: 148792 - protein, 404 aa, unidentified
MIFVGCDWSRHKHDLLVMDAKGSTLLEFTIPHGAQALDDLAQQIATLETDASQVHVGIELHDGALLAWLLDHGYTVYGINPKSAQRARDRYRPSGAKDDRKDAFILADILRTDRGYLRPLGTDSDACQELRAWVRFRARQVQDRTAACQRLRALLAEWCPALSALCDNFNRHWQRDLIRTFPLHADLCAAHGNRLRAFARKHRLRPASYDRILATRSHRPMPIPASRLRALRAEILALLERIEQLGQSVKEIEAELRRLVADHRDAGIFQSLPAHGTATTATLLSAFGEDREGAPSWRQRAARWGVAPVTVQSGRSRHIKRRRACDHVINQALLFFALRTAFTPGCWAADFYQTKRRSGVDHYTALRCLAQRWVKIIHRLWHDRTAYDEHLHQTNRQRQSLRAA

SEQ ID NO: 148793 - protein, 459 aa, unidentified
MSVIFGGKEERGGNVPLFGLYARGGVCSRLPDSVQVDWAHNARVIQKNGVEGYPPLSSKNKKGASPMQSKITFIGIDVSKNHFNVAISNSKGTVTSQMQFPMSLKGYRKFLELFNSLFDIETTIIGIESSGPYHINLLDFLIENNLKVILINPLMIFNLRKSFSLRKTKTDKLDAAYIARAMASYPLGASYISPKVISLRKLSRCYEEILHEITAIKNRIRQSVAILFQALEKKSYLFSLTCLKLLERFPSALSVLRSDSEEIDRVLNEVKGGSGKSSTLTSEEFIRLAEESHEVDMPAEEINLKLSIRRLLFLLEQARDVRGKVVRLAWEYFPKEMEILTSVRGIGELSAGMFMSEVGDIRRFRGGRQLVAYAGIDTVVYESGRYRARMGISKRGNRHLRWILYLMMANVVIKGDREYVGYFLKKRREGKAYKVAIFALANKFLRRIYAKVRDAYRVA

SEQ ID NO: 148794 - protein, 324 aa, unidentified
MNLPPLGLDVAKLKFNACLMRAVGKLRHKVFPNNPDGFTRLCDWLKKQGVTRVQACLEATGTYGDSLAAYLHEQDHLVSIVNPAAIKAYAQSHLSRTKTDRVDAALIARFCVERKPPAWHPPAREVQELQALVRRLESLVEMRTAEENRLSSGISVGAVRESVEELIVHLSEQIKRTGARIREHIDNHPDLKRQRELLDSIPGIGETTAAALLAEVPDFSQYKSARQVAAYAGLVPRERQSGSSVRGRTRLSKIGNARLRRALSFPAITALRCSPFFQAWAEGLRQRGKCKMSVIAAAMRKLIHLAYGVLKTGKPFDPEWGKIA

SEQ ID NO: 148795 - protein, 447 aa, unidentified
MKELAEDHDDGSVARIAAIDIAKTSGMVCLRVPHHTVEGRRVQQVWNVASTTNAILELGDKLICQGVQRVVMESTGPYWRPFFYLLEVRGLECWLVNARDVKNVPGRPKTDKLDAVWLAKLAERGMVRASFVPPKPVRQLRDLTRTRTVFVQERTRHKHRVDKILQDAQIKLSSVVSDLFGVSSRAMLDALVAGERSPRTLADLARGSLIEKKSALIESLTGQFDDHHGRLLGMLLETVDHLTAQVRELDRLIALALEQITAPLDNSGTNPPDAGATSPTTARTARDLVERLDAIPGVGPTAARIILAEIGADMSRFPTPEHLVSWAKLCPRTTQSGAKNTAGPTGRGNPWLKGALGEAASAAARTDTFLGARYRRIVKRRGHSKAVVAIARSILVIAWHLINDPDAAYQELGADWHQRHLNPARKTRDLVRQLQALGHTVSLAPAS

SEQ ID NO: 148796 - protein, 406 aa, unidentified
MDVIYPRCAGLDVHKQTVVACVRIADDGPPTQEVRTFETTTSGLLRLADWLESFGVQHVAMEATGVYWKPVWHVLEGHFELILANAAHVKNVPGRKTDVNDAMWLADLLAHGLIRASFVPPVAVQELRTLTRTRKQFVRERASHVQRIDKLLEDANIKLGTVLSDITGRSGRAVLQALIDGHTDPKRLLSCIGRVKASRTELLEALRGRVSAHHRFMLKLHLSHIDALDRAIADIEKEVGLGLQPFRQAAKLLSTMPGISDVSAHVIVAEIGIDMSRFATPGHLLSWACLCPRNDESAGKRRSTRLRRGGKWLKTTLVQAAWSAVKVKGSYLQAQFHRLRARRGAKKAIIAVAASMLTAAWHMLRDGTEWHDLGAAHFDRADAAKTASRLIRRLQQIGYQVTAVPA

SEQ ID NO: 148797 - protein, 415 aa, unidentified
MKTFAELTHFAGLDWAKDHHDVVIVDRQGLIVAQFTFPHSAAGWQQWRQCVSSYPALGVALETSSGPAVEQLLDSGVTVFPMNPRSAQSYRQRKAPSGTKTDQLDGWSFADGLRTDGQGWRPLAPLDPLVQELRLLCRDEVELTQQRTALVNQIQQALGEYYPAALEAFDDWTAPYTWEFVKAFPTPADLVKAGRRRWQNFLHAHKLYRPQTVDARLEAFAQATALTASPAITRAKSRLVLTLAATLLTLEKHLEQYRAAIAQLFAEHPDHDLFGSLPGAGEKLAPRLLSEVGQDRHLFEDAQGLQCLAGTAPVRFQSGQVDRARIRWHCNKHLRYAVHLWADCSRKYCTWAQTYYQAHRAKGASHASALRRLGQRWLKILWTMWQEHKPYDPERHSRNQQKHGSWLLKLEPAKS

SEQ ID NO: 148798 - protein, 309 aa, unidentified
MKQSVVYIGVDVAKEYLDVAWQKQSRRFGNNKSDHAALVGWIKQSPTVVQLICEASGGYERGLLESLERNAVKVTLVQANRVRQYARAAGILAKTDKVDARVLAAFGAAMQPKPTVPASAKQKRLREYDAQRRHLSRILLAEQNRLAQLGCVQLRSLSRSLISKIKKQIATLDTSISDLIAQDQELRLKAQKLTSVTGVGARTAALVLAQVPELGQLNRRQTAALGGLAPFNRDSGTLRGKRAIFGGRRALRSGLYMAALSAARRNHILSPFYQRLRAKGKPHKLALTAVMRKLLIVLNQILKPIPSPA

SEQ ID NO: 148799 - protein, 347 aa, unidentified
MVYIGVDQSKKYSQYTIGDERGNIIKRARIMNEEEKIQELMESLPEGPKMAALEASRTWGWLYDQLEKYTEETLLGNPLQMKAIAYAKVKTDSIDSQTIYDLLRADLIPACYVPVKEIREIKDQLRFRGFAVMLRGMVKNQIHTLVDRNHVLQPNTRETKDLFSKKGLKALQEVALPERERAILDALLLLLEHLEGQINRGNDWVEALYEDSPEARLIDGVPGLGHFLAVLIRYEIGQIERFRQAKKLCSYAGLVPSVYASGGKVFYGKITKRGNTHLRWALVEAVTPAIASDRVLRSEYERIRARKGVKIARVAIARKLLEWVYRVWKSGKSFQELILSQTALVSP

SEQ ID NO: 148800 - protein, 422 aa, unidentified
MQTLLSQKFTAYVGIDWADIKHDVCLQVAGETRRHFSVIDHTPQSIDRWAKSLFERYGAPIAIALELNKGPLVAALQKYEFFCLFPINPSTLAKHRKTFIGSGAKDDPTDAQWALELLLTYPLRFPQLMPQSPAMRVLASLTEHRRALVNERVRMGNRLICTLKQYYPLALELFSDHDTVMFCDFLMCWPTLDHIQRSRQSAFLKFFNEHNARRSQLNQARWEIISKAIPLTQDPGVIRPSQLYATALASQLKGLLAIIKDFDREIEETANTLADYPIFKALPGAGQHLAPRLMVAFGEQRDRFNDASAMQRYAGIAPVTQRSGKKKLVYWRYQCSTFLRQTFVEWAAHSITQSTWAEAYYRQQRAKGCSYQATLRGLAFKWIRIVYRCWKTSTVYDEKAYLQALIRRGSTLIEIPMEEASG

SEQ ID NO: 148801 - protein, 426 aa, unidentified
MNRSRNERINQVNENTLVIGIDIAKKNHYACAVDLRGRELTKVWRIHQSKDGFIHFEQAVRQLMETHNKSNVLIGFEATGHYWMNLAAMLEAFEFPFVIVNPMHVKQSKEMDDNSQTKNDAKDARVIAKLLPNGYFSIPRKMTTAEHHMRHGSAIRERLRKDISSVKNRIQRWKDLYFPEFNQVFSELGQQALAVLKLTPLPQDVPHLSVEEMVRQQKKAGAKYAGKPKIVTLIEVARHSIGVTRSQEMSRLEIRSLVQQLELLESQLEEVTSQMVEQAQSLEEFQYLVSIPGISENTVSELLAETGSMRNYRHPRQLIKLAGLTLRENSSGQHKGTKKISKRGRKRLRALLYKAILPLIQNNASFRQLYMHYHSREQNPLTKKEAMVVLCRKLLQVFHGLSKKQAMFDPERMLIDSSNYPQNKAA

SEQ ID NO: 148802 - protein, 420 aa, unidentified
MSKQNVELAAFIGLDWADQTHVVTLQEAGGDRRRENFTLDQTPEALQTWIHQVRIRFGGRPVAIAVEQVRGALIYALMHVEFLHIYPVNPQTLAKMRQAFYPSGAKDDPRDADLLLEVLLTHRQHLRVWVPDDVLTRSIQLLTEGRRHLVDERTALTNQLTAALKTYFPQALDWFGDMHTARACAFLHRWPSLQQLKRATSSSIRKFYQSQGYRGHDKLEQLLGNIKQAQPLTEDGAVLLASTMMVQALVTQIPSLTESIERHDQQIASRFAQHDDSTLFGSFPGAGPALSPRLLAAFGSDRNRFEFAAEMQQLSGIAPVTEKSGKSCWIHWRLACSKFLRQTFHEFAGQSILGSVWARAYYDHQRQRGKSHHAAVRALSFKWIRIIFRCWKNRTLYDETLYCKSLQLRGSSLAVALTTK

SEQ ID NO: 148803 - protein, 338 aa, unidentified
MTHITTIGLDLAKNVFHLVGCNSHGKVIIKKRLRRVQLTRFIVNLSPCLIGMEACSGAHHWARQFRAMGHQCKLMPAQYVKAFVRGNKNDYNDALGISEAVRQPEMRFVAIKTEAQQDTQALYRLREQRIKERTGLGNQLRGLLAEHGIVVGRGINVLRRQLPELLGATDNGLSPLFRELLNQGYQQLQQLDKHIIDYTKILTRLSQQNEACQRLQTIPGFGPINASVFASVVGNGSAYRCGRDVSASLGIVPGQHSTGGKNTLLGISKRGDSYLRCLLIHGARAVVIQAATKTDRLSLWINRIRAERGYNKATVALANKMARMGWAILRNETTYQIA

SEQ ID NO: 148804 - protein, 403 aa, unidentified
MNAIGIDVSKGKSMVAALQPGGKLLARPFEVLHTKSGIQELVSFIRSLNGDTRIVMEHTGRYYEPMLQRLAVSDLFVCAVNPKLIKDFGGNSLRKVKTDKADAKKIARYALDNWCDLRQHTGMDTTRTQLKTMNRQFAFCMKQKTACKNNLIALIDQVYPGANTYFESPARADGSQKWVDYVSTFWHVDYVCAMSLSAFTERYRKWCHRHGYNFQPDKPALLMEKAKDLIAMLPMDKTTKMLVQTSIAQLNVLSKTVEALRTQMIALAEQLPEYPVVIDMNGVGPTLASQLIAEIGDITRFPRRGSLTAFAGVDPGAKQSGTMQLKSNKTSKAGSPHLRRALFQIVSGLLMRSPDDPVYNFMDKKRSEGKPYYVYMTAGANKFLRIYYGRVNEYLASLSKEQE

SEQ ID NO: 148805 - protein, 320 aa, unidentified
MNKRNQMLNRIGVDVSKKKLDIAFNETDFVTIDNNEKAFQELLKTITMPLKDVHFIMEATGGYESKFADFLLSQNIAVSIINPKRVRDYAKAMGKLAKNDRIDAHVIREFANIANPVLLNKKSPEEQKLRNLIKRRRQLLKQQTIEKLYLETTSEREALDSIREMLKQLEIQIESMDAKIQTLMSADQSYRKKKELLIEVEGIGSQSVATILANLPELGTLNNKQIGALVGVAPFCNDSGERKGKKMIWGGRKQIRTALYMPMLSAIQYNKPIKAFYDRLIKKGKIRKVAVIACMRKLLTILNSMLKNNTRWDPNFSEKY

SEQ ID NO: 148806 - protein, 339 aa, unidentified
MKLYAGIDLHSNNNYLAIIDEHDERIFQKRLPNEPDVLLAELAPFQEKLVGVVVESTFNWYWLVDALMDNGYTTHLANPAAIQKYQGLKYSDDRHDAFWLAHLLRLGILAKGYIYPKEDRPMRDLLRKRGHLVQLRTSLINSLQGIISRNCGCRLSGNKIKQTKENHIAPLLAGQEDLELSGEVSKNTIDYLSKQIVKIENVVLDRVKLRKRFLGLQTIPGLGKILSLTIMLETGAIERFSKVGNFSSYCRKVPTKWTSNDLKKGKGNGKNGNKYLAWAFSEAAEFARRYDEVAKAFYNRKVSKTNRMIAHSALAHKLARAAYYIMRDDIKFDHRKLFA

SEQ ID NO: 148807 - protein, 348 aa, unidentified
MDKITRIGVDLAKNLIVVHGVDSMEHVAVRKAIPRQKFLEWFANLEPCLVAMEACSAAHYWGRKLRALGHEVRLIAPQFAAAYRKGGKHVKNDRLDAEAICEAASRPHMRFVALKTADQQNVLVLHRMRSGFVEERTALVNRLRGELFEFGVFLPQGIDAFRDHFVEALEDGTTELDGIARAALLAGWHHIHALDEQIAWCDSQIAARVKHDTNAQRLMAVVGIGPLTASAAVATVGDARVFRNGRQFSAWLGAVPKQASSGGKTRLGHITKQGNTYLRTLLFQGARSALTSAHRRTDRLSRWIVQLHARVGWYRTLVAIVNKHARILWAILAKGERFDPSYTPIRPS

SEQ ID NO: 148808 - protein, 373 aa, unidentified
MSSIGCVESVGVDLGDRFSYACVLSPQGQIVGRFRLRTTRDAFMGRFSGRPPARLVIETGTHSPWVSRLLEECGHEVIVANARRLALISQNKKKTDREDCEILARLGRADPDLLAPIRHRGERSQADLAVLRARSSAVRARTQLINTVRGLVKATGERLPSCSAASFHKKVRSHVPQPILPAAAPLLSLAEALTASIKAYDEQIVALCKRHPATEHLQRIDGVGPIVSLAFVLTIEDPHRFRRSRQVGAYLGLVPRLDESGDSKRQLRITKAGDVDLRALLVNSAQYVLGPWGPDSDLRRWGLALAERGAKNGKKRAVVAVARRLAVLLHHLWRTGEIYDPLFDARLRGEADDPDKARPHRQRQKKTQDLVAA

SEQ ID NO: 148809 - protein, 402 aa, unidentified
MTDAPNRYIGLDIHKEYFVAVGVNEKLEAVFGPQRVSNYQLDDWILRCLTPEDAVVLEMSTNTYQFYDALLPHVHSVMAVHSPNVAMVTNVRVKTDKKAALALAQLHAAGLLTGVWIPPYPVRDLRSLIARRDKMVRLSTMAKNRLHSMLHRHHLVAPEKPFAFEQRTWWESLPLSANEQLLVRSDLDTLDFAEKQVEQIEECLKQESAEDERIPLLIQLPGIAMLTAITILAAIGDITRFPSAKKLVGYAGLGTRVHDSGMTHSSGRITKAGRKDLRRAMVNAANHAVEHHVHWKKELERLQPHLGRSKAIVAIARKLLVAVWHVLSKQVADRFADPRDVASSFIRYAYRIGVRNLPDQQPALAFARDQLDRLGVGKDLKEIPWGSKRCKLPPSKIRLEKE

SEQ ID NO: 148810 - protein, 312 aa, unidentified
MTQIICGVDVSSKHLDAHVHPAGIFRRFSNDIDGIGALAGFCRTHGVTLVAMEATGGYEREVLYLLAAEGFALALANPRHVRRFAEALGYLEKTDRIDAAVIAQFAQIRRLPRWTPDGENLRRLSAQVLRLRQLTEMRAAEMNRRRLVKDEQVLASFTQVMALFSREIKTLEASIAALIAADSVWSKLDAAFRTIKGVADRTVARLMADLPEIGTLSSKAVAKLVGLAPMARDSGKSTGKRPVRGGRSSVRDILFLVASITAKYDPELKAFYERLSKAGKPKKVVLIAVARKLLVRLNAKAREVLTKTPLCS

SEQ ID NO: 148811 - protein, 416 aa, unidentified
MFNPLLALSKWKDDYVQKNAYFQIHSLFVILSLWSDWMEVFIERCAGLDVHSETIVACVLIGSKDDELIKETETFPTLTKDLFRLLKWLEDHDVTHIAMESTGVYWKPVFNILEDFFDITLANAQRIKNVPGRKTDVSDAEWIAKLLRHGLIEKSFVPPVDIRELRDLTRLRKKWIGHVTSEKNRIQKVLEASNVKLSTVISDVFGVSGRKLLNRLIEKGYVDVKDVEERIHGKMASKKQQIADSLFGTINEHQLFLIRQSWQHIEYLESLITEIEQRIDVLLQKYQEELQLLLTIPGIKKDTAAVIIAEMGVDMSQFPTSQHLASWAGVCPGNKESAGKRYSTRTVKGNPHIKSAMCEAAWAVSRCRNRWLAAKYWSLAARRGKKKALVATSHRMLRIIYSMLINKEAFKEKQIN

SEQ ID NO: 148812 - protein, 357 aa, unidentified
MEVQVTSQVTGGSIMNATTKTVVGVDTAKQVFQLHWIDVETGEVFSKQLKRAKFLEHFVNKAPCLIGMEACGGSQHWARRLQEMGHEVKLMPGKAVKAFVTGNKNDVADARAIWLAVQQPGVRAVTVKSEAQQAVLALHRMRQQLVKFRTMQSNGLRGLLGEYGEVMPVGRAALNRGMKDALARLAERLPAVLIDTLREQWEMLTRLDEQIVRIEQRLLAWMRQDRASKTIAAIPGVGLLTATAAVATMGDAKAFRSGREFAAWLGLVPAQTGTGGRVRLLGISRRGDTYLRTLLIHGARAVLMHAKEPGRWLQDLGKRRPPNVVTVALANKMARTIWALLAHGREYEKEHISVRPI

SEQ ID NO: 148813 - protein, 344 aa, unidentified
MVVLGTDAHKRNHTVVAADEAGVELGSTTVTATPEGHLKLVTWAARWPERRWAIEDCRQLSRRLEADLLRVGESVVRVPPKMMAGVRRSARTRGKSDPIDALAVARAALREPDLPVAQLDGPSRELRLLVDYRESLVKDRTAAQNRLRWRLHELEPGYDPPAGSLNRYKTLDEIDELLTVHTSMVAELGRREVVRIRELTREANQLERDIARRVMELVPSLLEIPGCGGLTAAKLVGEAADITRFKNRDAYAMWAGTAPIPVWSANNQRFRLNRGGNRQTNAAIHRIAITQIRIHPDAQAFIKRRLETGSTKREALRLLKRKLANVVYRTLLNDAQQPALANAA

SEQ ID NO: 148814 - protein, 362 aa, unidentified
MCGDWQRVPRWEVRSLINSLGRGSHGHFERWDRSRQERVALHGVNERGQVDLRRPSVPRAKLHALVAALPPCTIGMEACSGAHHWARLFAQHGHTVKLMAPKFVAPYRMSGKRGKTDAADAAAICEAVQRPNMRFVPVKTAEQQSRLMVHRARQGYVEARTALFNRIRGLLAEFGVVLPQKAEVVRREAARHMDTLPGYGKTVIEDLLAEVRHLDERVAQYDVHVRAMARDSASAQQLMQIVGIGEVTATAIVATVGNAREFSSSRQFAAWLGLVPGQYSSGGTTRLGRITKAGDAYLRGLLVMGARAVLNAAGNKTDSISRWATNIALRRGYWRAVVAVAAKNARLAWAALTKGESFTLPA

SEQ ID NO: 148815 - protein, 354 aa, unidentified
MSQKLDAAIAVIGIDIGKNSFHVVGHDARGAIVLRQKWSRGQVETRLANIPPCLIGMEACVGAHHLSRKLASLGHDARLMPAKYVRPYSKGQKNDFNDAEAIAEAVQRPTMKFVATKTAEQLDLQALHRVRERLVSQRTGIINQIRAFMLERGIAVRQGIGFLRTELPTILATRTDALSPRMLRVIEELAGDWRRLDQRIDGLSGEIEALARQDQACSRLMTVPGIGPIISSAMVAAIGTGDVFSKGRDFGAWLGLVPKQISTGDRTILGKISRRGNRYLRVLFVQAAWVVLVRIKNWEHYGLKSWIDAAKRRLHHNVLAIALANKLARIAWAVLAKGRAFELTRTDDAGIRPA

SEQ ID NO: 148816 - protein, 419 aa, unidentified
MSFKILKFNCCGLDVHKTWIYACIGITDSNNRTEYKQARFSSFTKGLNELCDWLAKYNCNDVCMESTGKYWIPVFNILEQRKVWVTLSHPKYTKPMKGNKTDRKDAKWICDLYMCGMVKPSFIPPADIRALRDLVRYRFKLTCMITSEKNRAQNCLTVSNLKLDDVFSDVFGKSSRSITEQILQRPGEKFDVSPFVDGRCKTPIEEIQAAVDGAISKEQAVKLRQCLDHIDELQKHISEVEQEILRLSDKYEAALNLIRTVPGFDKNPMTAIQVLSEIGGDMSVFPTAKHLVSWAGCCPRNDKSDRKIKSTRISRAGSYFKPVLVQVANALIKSKKHPEFTTRYKRIKTRRGHKKAIIAICRMILTAIWHILTDLTPYTPEGFLESRPVNKEKVLTILQALNLLKQRGYFIKDDPSPVS

SEQ ID NO: 148817 - protein, 424 aa, unidentified
MVENEYRIYVGIDWATEAHQACVLDSRGRILAERSFAHTGDAIAAFAQWLHEVAGDEPGQVAIAIEIPRGAVVETLVERGFHVYAINPKQLDRFRDRHSVAGAKDDRRDAFVLGDSVRTDRACFRRVRLDDPLVIQLRELSRVHDDLGREANQLTNRLREQLHRYYSQALALCPSADEPWLWALLELAPSPSVARHLRPQRVERLLRQHRIRRLSAHEVVAALRACALQVAPGVVEAASEHIALLLPRLLHTQRQGCGVRLEALLDKLGAAEDDDGQQGEHRDVESLRSLPGVGRVVAATVLAEASAALAERDYQALRAYAGIAPVTKQSGKRRMVLMRYACNGRLRNALYHRARVAAMRDPSSKTYYAGLRQRGHSYARALRSVADRLLRVLIAMLKNGSLFDSARTRPSARAAAPEELVCTS

SEQ ID NO: 148818 - protein, 368 aa, unidentified
MEKAVGGIDPHKNSITVGLVDGFGADLAVASFDNTGEGLQQALRWLTDRPGEIVRIGIEGSSGHGRHVAELLAAAGYDIREVPTRRTAERRRARRRAKSDQEDALAIARATAGEPGLGPVKQNGLDVVLDELAAVRRHRDLLVQRRTMMLNHAEAVLVALPRPVADLLPRGRSVAPRLATAVHVNAISMSPAVRSDLQLLRDLFDDISVVSGRVTSLERRLAQLVKASGSTLTEEVGIGVVAAATLLVEIGNPGRFRHESAFNRWWGGAPVAVSSGEGDGQPVRHRLDRLGNRTVNSTLHIMSVTQARCHEPAKNYLTRKRTAGATSREARRAHKTHLGRRVIRRMWADQRRHATAAAGSDSSPLVAA

SEQ ID NO: 148819 - protein, 453 aa, unidentified
MTKRKTGDHPDIKLVNPNAAAIDIGSTMHMVSVNPGTDAMPVRAFGTFTHDLHDLAAWFRSCGVTSVAMESTGVYWIPVFEILEAHGFEVILVNARYAKNVPGRKTDVSDAGWLRQLHSYGLLRGSFRPEAEIATLRAYMRQRERLTEYAAAHIQHMQKALMEMNLQLHHVVSDITGATGMRIIRAIVGGERDPEALAAFRDIRCKSSMETIKAALVGNDREEHVFALTQSLEHYDFYKAQIETCDHRLETAVGALTVRADDNLAPLPRARNKGNQHNAPSFDVRAALYGVLGIDLTQIHGLGPSLALKLVAECGTDLHAWKSAKHFTSWLCLAPGNKVSGGKLLSSRTRRSSSRAAALLRLAAVTIGRSDTALGAFYRRLSARIGKQKAVTATARKIAVLFYNAIRHGMTYQDQGAAAYDERHRQRVLSNLQRRARMLGFALAPIPEDRAVS

SEQ ID NO: 148820 - protein, 390 aa, unidentified
MRTTHDIVIGVDPHKASWTAAVINREQRVLGKIRVPTSPDGYRQLRRFTATWPRAAWAVEGATGLGSPLTVRLLDDGDTVIDVPAKLSARVRMLDRGHSRKTDEADAVSTAAAALANDSLHPVRLDPAAQALRLLSDRRDDLIAARTLVINRLHAALTHLVPGGAPTSLNATAASRLLASVRPRDQVNRARREIAKDLLADLRRLDTQITTLDKHILQAVRDTGSTLTALFGLGPVLAARVLGRVGDINRFPSEAHFASYCGAAPIEASSGDTVRHRLSRAGDRTLNHALHMMAITQVRSHPEGRAYYQRKRTAGKSHNEAMRCLKRRLVSVIYRTLRADADREAAGPGGQAGASLTSSAASPTLRASSSEKSQPEPTDRHLTRPTTPAS

SEQ ID NO: 148821 - protein, 430 aa, unidentified
MMEEVDDAELVVERIAALDLGKAGLEACVRVPSPHRPGRRMQELRGYGTTTAQLLEMVAWLRQWGVQRAVMESTSTYWKGVYYLLEAEGFECWLVNAREVKNVPGRAKTDRADAIWLAKVAERGMCRPSLVHPAEIRRLRDLTRYRRALVQDRTREQQRIEKLLEDAQIKISSVLSELHGVTARAMMDALIAGQRDPRALAQLAKGRARKKTAQLEEALRGFFTDHHAAILRMMLDNTDRISAQIAALDARIEKEIGPFSGQAARLAEIPGVDAVAAAELIAEIGVDMTRFPSDAHLVSWAKFCPQTHQSAGKSKSKGRGRGNPWLAGTLGRIAFANSRADTFLGARYRRLARRRGKQKAIVATGNSVLTVVYYLLSDPMATFCDLGPGYYESRINVHRRARDLVTQLQALTGQHIVIRDGKAVITDAAA

SEQ ID NO: 148822 - protein, 453 aa, unidentified
MGKQSGKGRSLSLDCIEPNAAGIDVGATEIYVAVPPDRDGEPVRHFKTFTSDLREMACWLLQCGITTVAMESTGVYWIPPYEVLEEAGMRVCLVNSQHVRHVPGRKSDVSDCQWLQYLHSVGLLKPSFRPDAAICALRSLSRHRSSLVESAAVHIQHMQKALTQMNLQIHHVLSDITGISGMAIIDAIVAGQRDPGQLATLCHAKVHSDRQTVIKSLTGNYRTEHLFTLKQSLAAYRNYQLLLAECDQQIQRLTGTMAGKMESGGPAPQQNRRKRRKNQFHFDMGSELHRLFGVDLTAVPGINALTAHALLSEVGTDLNCFPSAATFANWLTLCPGTKKSGGRILSSKTRPTNSRLSHALRVAAQTLARSRSHLGNFYRSMRARLGAPKAITATAHKLARILYHLITTGSAYDETVFDREQQKQNLRLHKRLSKQAKLLGLQLVPINAGESCS

SEQ ID NO: 148823 - protein, 412 aa, unidentified
MEAIYECVSGLDVHSKSVQACVRRLIGGGRTKQEVRTFGTMTRDLVMLADWLSEEGVTHVAMESTGVFWKPIYNILEGRCTVLLVNAHHVKHLPGRKTDVKDSQWLAQLLQCGLLQGSFIPERAQREWRELTRQRAQLVNQHSSVINRIHKTLEDANIKLGTVASNILGASGRDMLRALIEGRQTPTEMADLARRKLREKIPALQEALYGHVTDHHRWLLGELLDQVEDLERRIERFSCRIEELSGPFEDAIKKVDAIPGFDRRGAENVLAEIGVTMKQFPTGGHLAVWAGICPGNNKTGGKSKSGRTTKGNRWLRTALVQAAWAASHAKGSYFHAQFRRLVGRRGKKRALVAVAHSLLVVIHVLLSTGAEYEDLGADYFNRRDEDRIVRSHVNRLERLGYKVTLETYEEAA

SEQ ID NO: 148824 - protein, 339 aa, unidentified
MSKRSIQVQETMYCGIDVSAKSLTVAIQRMHQPVEQRSFPNTSVGHKALIVWLRKAKLPVRVSLEATGIYSLDLAFALDAAEGIEVAVLNPKVANRFAQTIRRSKTDAADAELLAEYARRMPFTAWVAPSPGSLRLRSIVRHVESLSVQSAQNQNRLHAAHGSTSTPGCIVQDLKRSVASLELRIHKLRREAMTLVRQDDLLRKRFELLVSIPGIAQVSAMQLLAELSTSPPDLTVREWVAHSGLDPAHEISGSSVRKASRISRAGNRHLRRALYMPALVASRCDPHAKAFFESLLARNKARLQALIAVARKLLHAIYGIFRSGLKYEGTKLFPRITLS

SEQ ID NO: 148825 - protein, 401 aa, unidentified
MDPQIRVGIDVGCKAHRVGISKPDGLILEEFDISHTDAGFCDFFRRIDHHRQKLDLPVAVAMEGFNGYARPLDRLIQEHGYILYNVNNLKLARFKEVFPGAAKTDPIDTRKILELFHLKDHLPLAKDVLQKVVAAPLVNDKLKRLSRRRRQLVNEKVRVANRLQSDMQAVCPELLAITNNASNLRFLRFLTCRDDLTQLARLQRTTLLKIASVGQKYACIIQEWQRKASFSAEVEYVGPMIIQDARRILELRKQIHALDEVMAELADQSELACRIGSIQGFGKTCVAELAGEVGTTERFAGERSLSLYVGMSPLSRDSGQHHGSKCPRQVNHRAKAAMMTAVARHINCVPESRAYYEKKRAEGKSHNQAVRALGRHLVRVIWSMLKNERDYELREVIPSVT

SEQ ID NO: 148826 - protein, 340 aa, unidentified
MKLYAGIDLHSNNSYIVVIDENDKILFQKRVANDLPTILSSLDSFKEQLVGVVIESTYNWYWLADGLQLAGYKIHLANTNAISQYNGLKHTDDKSDARWLAHLLKLGILAEGYIYPKEERGLRELLRKRMSLVKEQTRCILMTQGLLSRYVNCFVNSYHLLRGDLTQEVLREKIADKNVRQTITSQLVLLKHIRLEVNEHEKSIKTQLKKDALFLLLKSIPGVGDILAMTIRLETGEISRFSKAGKYSSYCRCIESKRISNGKKKSENNRRNGNAYLGWAFIEAANFAIRTCEPIKQYYQRKQAKTKRVIALKAIANKLARASYFIQRDNVEFDMKKAFG

SEQ ID NO: 148827 - protein, 348 aa, unidentified
MEHYAGIDVSLEYSSVCVVDASGKIVREGKVASEPEALIAWFGSLELSVERAGLEAGPLSQWLYAAMRDAGLAVELLETRHVHDAFKAMPVKSDRNDARGIAQLMRLGWFRPVHCKSMAAQETRAVLTARKLVQSKLRDVENSLRGILRGFGLKVGKTTARGFAARIEQLVAGHPNLETIARALLAVHAVLSREFNGFEKRVRAMARLNLRAKLLMTTPAVGPIVALTYACAIDDPGRFKSSKAAGPHFGLTPRKYQSGQTDITGRISKIGDAAVREALYQSAHVMLTKAVKGCPELKSWAMRIARRAGMRKAKVALARKLAVIMHRMLADAKPFNPAAKATTMAAAA

SEQ ID NO: 148828 - protein, 401 aa, unidentified
MQIRSVGIDLGKTTFHLVALGASGKVLVKKKFTQKQLLAFTANMQTSLVGLEACSGAHFLGRALKQQGHDVRLIAAQFVKPFVKSNKNDFVDAEAIAEAVERKNMRFVPIKTDDQLDLQAMHRIRDRLVSRRTAVINQIRAFLLERGMVFAQKPAKLKAAMADVLENAENALTPMMRNLIGTLWDEWKTVEEQIDELTDMLEQIAASDAGCCRIRQIPGIGPIVATAIVAAIGNGAAFRKGRDFAAWLGLVPRQYSTGGKAKLLGISKRGNIYLRKVLIHGARAAAMRIKRDRFPIGTWMNALEARAPRNVLVVAMANKLARIAWAVLSSGEDYRPVANMAGYEIERKRRLRLGSASRSHFPALRRLSPPRSAQESKDERTVTTAYLKPAPDNGLQRPTDL

SEQ ID NO: 148829 - protein, 399 aa, unidentified
MLAVGIDISKSKSVAAILNQDGSMHTSPFEFHHTQPELDAFIKYILNSNQSATILMENTGHYHYPVLKAFQEAGLPVCMVNAYQIKKFGDMDLRKAKTDKKDAVRIARYALEKSYSLVPYTSMEQKYEDLRFLARQYNQRMLTLKNNKVFLLNLLDETMPGITNILPLTTRTPETSLSVLFINRFKSYDRIKKMGKSRFLDAFEKIARKSRNRQTKTYGLAIYEAALRNITTRGENEYTLAAQDQCLELVCESQKAADSIILKMQTLAETLPEYAVLRSMAGVGDRLGPLILAEIGDIRRFHSGKALNAYAGNDAPPYQSGTFESHNRHISKRGNAALRKYCFEVMQALKLTRPQDDPVYLFLLKKEQEGKPYNVAKMAGVNKFLRIYYARAMETLKQQ

SEQ ID NO: 148830 - protein, 353 aa, unidentified
MASQQNSFANVATIGIDIGKTTFHLIGQDRRGAIIMRAKLSRTQLMRRLVNVPQCVIGMEPCAGAHHIARRLSELGHDVRLVPAQYVKPFLKGHKNDYRDAEAIAEAVQRPTMDFVAIKTPEQCDLLSLHRVRSRLVRQRTGTINQIRGLLLERGITAPRGPAPLRKTLNGIFAEPPADLSSRMLCLIGDLALDWRTLDARIEAVSREIEMLAENDEACQRLMTIPGIGVIISSAVVGAIGNGGAFKQGRDFAAWLGLVPKQDSTGGKTKLGGLSKRGNKYLRTLFVQAAHIVLIRKPAAAQRALWSWIERASQRLPHRNLLAIALANKLARIAWAVLARDHDYHPTANTDAA

SEQ ID NO: 148831 - protein, 350 aa, unidentified
MSKKNISYVGEKVSIGIDVHRDFFVISAVYKGALLKRSRIASTGEAVLGFIRGHFPETEIQSCYEAGFSGFWLHRYLVKSGIDNIVVNPASIEVEANNRIKTDKRDSLKMALQLDANRLRGICIPSEEQERRRLLHRTREQLMRAQNRARIQIRMKLHQFGLFPRGLRSVLTSQLAKDLIEGVQITELRIVLEALYSQWQNLRLELRKLEKELLRQGEEDEFDPIYRSVVGIGVLIARVLSNELGDMSQFANEKELFSYTGLTPCEYSSGESIRRGHITRQGNSRLRYVLVEAAWRAIRKDVGLRAGFERIAKRRGKKIAIVAVARKLVGRIRAVLKARGRYELEHNKAA

SEQ ID NO: 148832 - protein, 370 aa, unidentified
MQFIGIDLHTNRFTCCYRNGNTSESGKDEKQTESFELTDYGLAQFYQTLTKETYVLIEATITTFWFARLIQPLVKEVIVANTYELKQISLARKNTDKIDADILCKILKMQVLSGVQVISPVTIPPVEIQDLRSLFSSYRLLKKQTTQVKNRIHSLLKEKLHGFTQEEIFSKRDRKMISSLEGDTAMSFQIIEFLDLLEYMETRIKSLEEKIMECAAPFMREIDILTSMKGIGVFTAIAIIADIIKVDRFKNSKAFTSYLRSAPAVSSSNTSTKNKGTNKKGRKLAATLLTQSLTHVLSASQKLSNWYDRLTELKKRGLVRTGLRRRVFAEIFQMLKKGEYHYGRVARLHEAKMLHYQRFLKKRKILFEIA

SEQ ID NO: 148833 - protein, 391 aa, unidentified
MIYVGIDVAKDKHDCFITNSDGEVLFQVFTIQNNREGFDGLFSRIQSVSHDMSNIKVGLEATGHYSYNLLGYLIDKGLPTFVINPLHTNLYRKSLSLRKTKTDKVDARTIAMMLMSDVNLKSYSDTSYHNEELKSLTRYRFDKVQERAQLKQSVSRLVTILFPELEKLVPTIHIASVYALLSELPSAGKIASCHLTHLTKLLENASRDRYSREKAIQIREAARVSIGSNMPAKSLELKHTLKLIGELDSEISEIESEIKRIMDQIDSPILTIPGIGYRMGAMILAEIGDFSRFDSPDKILAYAGASPSTYQSGQLESSYSHMEKRGSRYLRFALINAAKYVCHWDKTFGAYLQKKISEGKHYNVAITHATKKLVRLIYAMEKSGKPYIKAE

SEQ ID NO: 148834 - protein, 440 aa, unidentified
MSKRAYRATRVNDVNWDQLAQGKDGLDIALGVDVGKYSLWAVCRWADGRFERPWRVQNPGEIPTLLTLLKRVSAGRKLVVAMESSGTYGDALRQALADNQIEVQRVGGKAAHDYAEVFDGVPSQHDGKDAAVVAELAALGKAMPWEYQPADPWEQELAYWVEWMVAHRQMLTIWQGRLEGLLARHWPEATQVLKLSSGTLLRVLKRYGTPQALAADGEAAKLLARWGGAFLAPEKIEQLLAGAGASVGVRLGEWQQRQIQNYAQQALAARQEANRAQRRLRSLAAGHAVLQAQGKVVGVPTACVLWVSTGDPRKYHAAGAYRKAMGLNLVERSSGTYQGRLRISKRGSPRTRQWLYFAVLRLVQKCGVRPWYEAKKAHDEADARRVVVAVMRKLAVALYYVGVHNEEFQPGRLFGRIRRRRDSPGEQKSRTKRRSRAEQI

SEQ ID NO: 148835 - protein, 348 aa, unidentified
MRNITTIGLDLAKNLFQVHGVDDRGKTVLRRALKRAEVMSFFAKLLPCLVGLEACGSAHFWARKLSELGHTVKLMAPQFVKPYVKSNKNDARDAEAICEAVARPNMRFVAVKTVAQQSLLGLHRARQGFVSGRTAQSNQIRGLLTEFGIVLPKGISCLERRMPEILEDAGNGLLGTSRELFARLYAHFKELSRQMGELERQIKAWHRESVASRRLEAIPGIGPLSASALAASIGDATAFKNGRQLAAWLGLVPRQHSSGGKEQLLGISKRGDTYLRTRLIHGARSVLLSLKRHGGAAEGWLARLAARRNPNIAAVALANKNARIIWALLAHGRDYQSGYVAAPAQAAV

SEQ ID NO: 148836 - protein, 349 aa, unidentified
MIVIGIDSHKRTHTAVAADGNGRKVGEVTLAATGAGHLDLVRWAARFPGHGFALEDTRHLSRRLAADLLRAGETVTWVPTRLMAGARRHGREQGKSDPIDALAVARAALANPDLPIATLEGEERELRLLVDHREDLVAERTRAQNRLRWHLHELDPGNEPGPRSLDRTVVLNALDERLAGLPGTVARIARDLVTRIRELTRTIRDLERELERLTATVAPTLLALPGCGPLSAAKLVGQVAGAGRFRSAAAFARHNGSAPLPVWSGNDERHRLSRKGDRQVNVVLHRIAITQMRLGDRGRAYYEHRRTVGDGKAEAIRALKRRISDEVYRRMRHDEHLRATPRAALAAAA

SEQ ID NO: 148837 - protein, 353 aa, unidentified
MDSKKYIGMDVHKESISIAVRNAAGKIVMECVVETKASVILDFIHGLRGELHVTFEEGTWATWLYDLLKPHVTKLVVCDPRKNSRQGNKNDRIDARELADRLYMNKLSSVYHGEAGVRALKELARSYLTISKDLSRVMTRVKAIYRSWGIPCAGKQVYAPRHRAEWLAKITEVGVLRRAEFYYQQLDALRLLRHEVRRELLAESKKHKATKLLCQIPSIGPIRAALLIALIQTPHRFRTKRPLWKYSGFAIETHSSADYRNVKGQLERTKKQVSVRGLNRDCNHDLKNLFKSAATIASVKPGPFQEFYAALVAKGMRPEMARLTLARKIAAIVLIVWKKGVSFDAQHLKSQTA

SEQ ID NO: 148838 - protein, 338 aa, unidentified
MKLYGAIDLHSNNNVTVLIDEQDQVVYQKRLANDLPLIAQQLSGYRDRLQGIVVESTYNWYWLVDGLMDQGHKVHLANTAAIQQYEGLKYTDDHSDARWLAHILRLGVLPEGYIYPKQERAVRDLLRKRGQLVRQRTANLLSIQNLITRNTGSSIRSNRIKTLDAEAVDALLPNEDLALAVKANLAMIQCADKQIDILERTVTERIKLRAEFSFLKTVAGIGQILALTIMLETGEIKRFLSVGDYASYCRCVGSQKLSNGKKKGSGNTKNGNKYLSWAYVEAANFAVRFNAKIKSFYQRKKSKTNGIVAIKAVAHKLCRACYYIMKDQVAFDVSKAFA

SEQ ID NO: 148839 - protein, 371 aa, unidentified
MKQSTMTYVAMDTHKKAISVAIAEGRRQGEVRFIGEIPNRPEAVAKMVDRLAAKHGKLAFCYEAGPCGYGLYRQIAMLGHECMVVAPSLIPTRPGEHVKTDRRDAVTQASLFRSGELTPVWVPDDAHEAMRDLCRARQAAMEALRGARQQVLSFLLRHGRIYSDSGHWTRKHRLWLCAQRFDHPARQIAFEELVKAVEEAQARRDRLAQQMQELLPSWSLAKVVTAIQALRGVALIAAITLVAEIGDFHRFANPRHLMAYLGLTPSERSSGAKTRRGAITKAGNTRARRMLVESAWTYRLPARIGAEILKRNESLPQQIKDIAWKAQLRLCARHRRLARAGKPVNVVNVAIARELSAFVWAIATNEHIAIA

SEQ ID NO: 148840 - protein, 340 aa, unidentified
MGTVTIIGLDIAKSVFQVHGVDAQGEAVVRRRLPRGRLLKFFAGLPPCLIGIEACSSSHFWARELVALGQEVKLMPAQYVKPYVKRGKNDAADAEAICEAVTRPTMRFVGIKSPEQQSAMMLHRVRLILNRQRTQLSNAMRAHLAEFGIIAPAGRNGLERLLDVIADPDDLRLPADARLCLEMLVSQLRMVKEQILENDRRILAQARETDVGRRLMEIPGVGPLLASAFVATITDPAVFKSGRNLAAWIGLVPRQNSSGGIARLGGISKAGNRYLRQMLIVGAMAVIRQAMRYGDKYPWLSQLLARRKAKVAAVALANRNARTIWAMMMSGEHYRNPVAR

SEQ ID NO: 148841 - protein, 325 aa, unidentified
MDIVGIDISKATFDAALLLGKRVRHAAFSNTEAGFAQLLAWLARHRPDPVASLHACMEATGNWGLELADFLHARQVRVSVVNPARIKAYGDSELARNKTDRLDAGLIARFCRAHVPPAWVPAAPYLRELRELVRRCGALKSARVQELNRQTSGFASPAVARSIAAHVEWLDRQIEAVTQEARALIAADATLSKNLTLLRSITGFGEISATIVLAELPNIAEFTPKALAAFVGLSPSEHSSGTSVRRPGKVSRIGTERLRSTLYMCALSAKRSNKPLAAFVARLSAAGKPPKVILVAVARKLLVYAHAVIRTQKEFDSSPDAPLPA

SEQ ID NO: 148842 - protein, 374 aa, unidentified
MKNSVTYVAMDTHKKQHKVAVHYPGDEQIVQFSVKNNARDIKKMVKKIKKHALSEIEFCYEAGVCGFTLKRWIEKQDCRCEVIAPSLIPRKPGERIKTDRRDALKLLQLFKAGLLTAVHAPDEQDEADRELTRLRETAKENLKRSRHQILKFLTRHGYVYSDGSHWTQKHIAWLRSVKFIEPELNKVFESYFDEMVYCIGRLDNLDKEVELLANSEKYKEVVGLLCCFHGIRTLTAITILTEIFEFGRFETARQLMSYLGLTPSEDSSGDKQRKGGITKTGNKRVRRLLNEAAWHYRYRYVPSNVLKKRREGHPSWAIEIADTAGRRLSQRHRHLLNNGKIPCKANIAVARELAGFIWAIMTQLQARKNINDAA

SEQ ID NO: 148843 - protein, 428 aa, unidentified
MVKEENTRIKEFRQLKKEIRGSEKYLIIGIDVAKEKHHAFFGTATGKTLLRRLIFENSMDGFEKLHAHMEAIKVKHCLDKVVFGLEPTANYHKPIAECLIKCGFVVVLVSGVAVSNNREMLDGRWDKNDDKDSANIADLISQGKCLYYYYPSQSLRDLRDLLSLKRRLKKQEHGTRIRIRNHLIAQYFPEFDRYFGKGCSESLSVVKWCLNPSKIAGMEYDEFVDLVMPGVKTIGQEKRLKAIWDLSIESIGCNAGDALDFEAKLMVKDLQQIKESIRAVDDHIKDICLGFPEYGHLLTIPGFGPDVSSKVLGAIGNPFRFDNARQVLKLAGYDLGANRSGKTSDSAVPVISKRGNAYLRYALYQAAFIASTRNRHFMIYYTNKLRGREREKGIKTKMKVKLAAKMLIIAWTLMKKKEPFDPEYLNID

SEQ ID NO: 148844 - protein, 411 aa, unidentified
MRRVLFVGDDWATEHHDVELQDEAGRRLGKAKLADGIAGIARLHAMIGEHVDEDAGPVEVVVGIETDGGPWVQALVASGYTVYPINPLQVARFRETERSSGGKSDAADAHTLTDMVRTRRHTLRPMAGDSGRAETVKVLTRAHKTLIWERTRHTLRLRQMLREFFPAALLAFDDLAAPDAVELLGRAPDPVLAARLSAAQITAALKRARRRQVSAKAATIQASLRSRQLAQPSAVAGAYAATVRAQVAILTTLGTEITTLEGQVEAHFGQHPDAEIYLSQPGLGVMLGARVLAEFGDDTTRYADARARKNYAGTSPITRQSGKKKTVLARYVHNDRLIDALNRQAFAALRASPGARAYYDQLRARGVGHHAALRQLGNRLVGILHGCLKTGTTYDETTAWAHHQQDLHTAA

SEQ ID NO: 148845 - protein, 405 aa, unidentified
MKLYIGIDWSQGKHDICFVNTKGVIQSQLVIPHSQTGFWKFEQRRKKLGVPAENCLVGLETSYSILVDFLWDRGYANIFVLPPTLVKGSRTRMRSSAAKDDPGDAYLIADILRTDHGRLQTWQPDSGLTRQIRTKVRFISFLTRNIVRMTNRQRAVLLRYYPVAAELFSSLSTLISQHFILAYPTPQAAAALDLDSFRKFARQHGYTHKSKLASILAKLDQDDPLADMDIIVACQDEAQGLAHVLLDMIRLKRDNLKQLQQLLDLHPDQNIFASLPGTGVYLQAALISKFGDDRGRFPTPGRVQAIAGTSPVTIRSGKSKYVRFRKSCDYEFRHIVQQWAKQSLRSSVWANAYYARVRPNCDSESHAFRCVANRWLAILWRLWQDHTLYDETYHLKQRALRSQPR

SEQ ID NO: 148846 - protein, 342 aa, unidentified
MTPAIVGIDLGKNWFHVVGLDEGGATILRKKLNRAQLAEYAATAPRCIVATESCPGSQYWGRVFTAAGHEVRILPAQFVKPYLKANKNDFNDAAAIAEAAGRASMRYVPLKTTEQLELQALHRVRRRFIVERTALINQMRALLLEHGMVIPVGRAAFVRRLPNIFTDAEHRLSPRLVELLHRLRQRWLALDVEIVQATRDLAEWADQSPLCRRAATIPGMGPIIATAVVAAVGDGRMFVRGRDMAAWLGLVPRQHSTGGKPTLGSISKRGNTYLRELFIQGAQSSFVYLKRDQSSLGQWLRQVEMRRQRQVAIVALANKMVRICWKVLTSEEEFRAYPARIV

SEQ ID NO: 148847 - protein, 341 aa, unidentified
MKVSTLGIDLAKNVFQLHGVDHEGHIILRKELTRAKFVQFVIQLEPCLIGMEACSSSHYFARLFTRYGHEVKLIPPQYVKPYVKTNKTDAADAEAICEAVTRPNMRFVQIKTEEQQAVLALHTERGILIRERIACANSLRATLAEFGITIAAGQSHLTRELPAILEDSENGLSPFVRTSIYRQSKHIRELEEQVKQVEEALASWYRTQEACQRMAKIPGVGMLTATYVVAAVGNARQFSTAKQFASWLGLTPKEHSSGGKQQLGGISKRGDGYFRYLLVHGARALTAWVNRNGAVEENSWLQGLLERKHYNVAVVAMAAKTARIMWSMLSHNTEYQPRQLA

SEQ ID NO: 148848 - protein, 455 aa, unidentified
MARKKTIPHPELKAVNDNAAAIDIGSTMHMAAVNPEHCDAPIRVFGTFTHDLHDLAEWFASCGVTSVAMESTGVYWIPAYEILEQHGFEVILVNARYAKNVPGRKTDVSDAAWLRQLHSYGLLRGSFRPDAEIATLRAYLRQRERLVEYAAAHIQHMQKAMMEMNLQLHHVVSDITGATGMRIIRAIVGGERDPDVLAAFRDIRCHSSTETIRAALVGNDRAEHIFALTQSLEFYDFYQTKMQECDRRLEAVLTELAADKDHDAATLPRARTKTKQVNTPSFDVRAALYGVLGTDLTQIHGLGPSLALKLVGECGTDLKAWPSAKHFTSWLCLAPGNKISGGKILSSRTRRSSSRAAALLRLAAVTIGRSDTALGAFYRRLAARAGKAKAVTATARKIAVLFYNTLRYGMTYKDPGASHYEERYRNRVLGNLQRRAKAFGFVLHEDPTPDELAVS

SEQ ID NO: 148849 - protein, 426 aa, unidentified
MPIFVGDDWAEDHHDIEVVDEGGRRLTRRRVPEGVEGIGQLHALVVACLDKVAGRDPGGDDGDDPGQVIVGIEVDHGPWVQALLAAGYRVYAVNPLQVARYRDRHSTSGAKSDPGDAHVLAELVRLDRAHHRPLVPDSALAQQLKVLARGHQNVVWTRQRQANALRSMLREYYPAALAAFGSDAAAGGPLDGRDALAVLTVAPGPEQGRALSLSKIEAALRRGGRKRNVTATATAIQTALRSPQLSVPAGLTGAYTASAEAMIAVLAELVRQEHILAEQVAQDFGQHPDAEIYLSQPGLGAVLGARVLSETGDAPDRFADAKARKNHAGTAPITRASGSRRVVKARIARNRRLGDAHFQQAFSALNVSPGARAYYDARRARGATHAQALRALANRLVGILHGCLKHHTRYDEATAWASHNINKAAA

SEQ ID NO: 148850 - protein, 371 aa, unidentified
MTSIIYVGMDVHTTNYTLCCYRIEKDTVFATVTMEPDYMNIVKYLEKVKRNHDGDCHFLCGYEAGTLGYSLYHQLTGQGLDCVILAPTTMATTRKKKGVKTDKRDAANIAKCLAYNTYSAVYVPTGEDNAVKEYIRMRDAAKEILKRIKQQLLAFCTRHGKRFTEGRNYWTQKHISWLGKLDLGDAILNETLREYITLYHQAVDKVEVFDKRIAEMASSERYEEKVRKLECFIGVKDHTALATIVEIGDFARFPAAQRFASYLGLVPGEDSSGDSVQRAGITKAGNTHVRKLLVEAAQSYSRGVVGTKSRALKERQAGNDPKVVAYADRANERLKRKCYRIMFKSKRNIAITAAARELACFVWGMMTDNIA

SEQ ID NO: 148851 - protein, 320 aa, unidentified
MMAHNNPVVVGIDVAKDKVDGCIRAFKLRQSWPSTAQGQRRLVGWLRKHQVNKAVMEASGGYERDWARVLREAGIEVRIVDPKRVRSFAQSAGRLAKNDAIDAEMIAWFAETFSEAPSQVHDAALEELQTLVKARLSLIDLRMRLVSQSEHAAPGLVQKAHAHILKSLASEIAKLEVAISAKIKSTPDFVERAEIIESVPGLAATSSANLVAGMPELGRVSAEIAAALIGAAPYDDDSGKRRGERHIKGGRRWVRNAIYMPCVGAATLNNPVLKAYYQRLIAKGKEPKVAIIACMRKLIIILNTMIARRQKWDPSRYVLG

SEQ ID NO: 148852 - protein, 485 aa, unidentified
MKTKRREGAQEAKKASCRATVGKWHDMNRKQRREMMRKIQSEDLSLAVIHPDAAGIDIGNESHYVAVPPSRDSQSVQRFGCTTAELKAMAAWLKQCSIHTVAMQSTSVYWIAVYDILEQAGLEVYLVNARDTKNLPGRKSDVQESQWLMKLHTYGLLRNSFRPSQEVRTMRTYWRQRNDLVRAAARHIHRIQKALTQMNIQLANVLSDVSGMTGQAIIKAVLAGERNSLKLAAFRDPRVKASEEQIARSLEGNWQQDLLFVLKQEQDGYEFCQRQMAECDQQLNQYLEQREDRSQAAPLPEEKRKERLKKKKGNKPQFDLRAGLFRMTGTDLTQIDCVDVMTATTIFSEAGWDMSKWKTEHHFVSWLRLCPDNRISGEKIIGKGRLPTNNRVTTALKIAANNLRLSNTYLGAQFRRLRTKLGAPIAIKAMAAKLARLVYRILRYGIKYVDRGATFYDAQHRQIQIKYLKWKAAKLGLKIIEAPAA

SEQ ID NO: 148853 - protein, 374 aa, unidentified
MEWSGRAPAPPAREAGKGTKDEEHAMSAKFNSEIAVIGIDIGKNSFHVVGLDRRGAIVLRQKWSRGQVEARFSNLPPCLIGMEACVGAHHLSRKLTSLGHDARLMPAKYVRPYSRGQKNDFRDAEAIAEAVQRPTMKFVATKSAEQLDLQALHRVRERLVSQRTGIINQIRAFLLERGVAVRQGLRFLRAELPRILARPCDALSPRMLRVIEDLAGDWRRLDERIEGLSSEIEVLARQDAGCERLMSVPGIGPIISSAIVAAIGGGDAFSKGRDFAAWLGLVPKQISTGDRTILGKISKRGNRYLRVLFVQAAWAVLIKPKSWARHGLKPWLEAAKKRLHHNVLAVALANKLARIAWSVLAHGRVFEATKIQAA

SEQ ID NO: 148854 - protein, 324 aa, unidentified
MPVASKVVYAGIDIAKKKLDAFTPEGGHKCFANEQTGLQSLTQWLKGHGVTHIVIEPTGGFERALKQAAQSASLHVLEPNASWVRHHAQAAGRLAKTDKIDARMLHDYALTYGDKLRVKEPDSKAQAQLRALGRRRQQLIDTLRKERNRLAQVSDAYVREDLNLHIEYLKNRLDALDDKSEQSAEADPQLKVKKAAMMQVKCVGPVLAKTLLAFMPELGTLSRRQVAKMVGVAPTDHQSGEHDGPCPMTGGRIEVRNCLYMACLSATHWHAKIAKRYQHLLCRGKPAKVAIGACMRHLLIEINAEVRKALTDPALTHQQIASET

SEQ ID NO: 148855 - protein, 405 aa, unidentified
MKVYIGIDWSENQHDICFMHESGEVLRILQIKHTIAGFRELDLARQSLGVEAWECMVGLETAHNLLVDYLWDQGYTQIYILPPNAVKSAQTRFRQSGAKDDPWDARLIANILRTDQSRYSPWRPDGPLTRQIRAEVRFANQLGQELVRNGNRLRSTLLRYYPAATQTFSSLNSLVSLAFLQAYPTPQQAESLSFEDLKTFLREHHHTKTRSWATIYARLHEDHPRSNPEVQAAYAPLALAQARILEQLVKSHNECLARLGKLYIQHPDHEIYDSLPRVGVLLGPALLAKLGDDRGRYPTPAILQAVAGTCPVTNRSGKHVHIYFRAACDHEFRYYVQQWARLTLESSPWAVAYYRSVRPHCKTENDAIRRLANRWLEILWRLWVNQKPYDEALHLKQHALRSKPR

SEQ ID NO: 148856 - protein, 348 aa, unidentified
MQAITIGLDIAKNVMQVHGVDASGAVVARKRLSRAKTLDFFRSLSPCLVGMEACGGAHHWARQIAALGHEVRIIPPIYVKPYVKRSKTDAADAAAICEAVSRPHMRFVPVKSEQTQALALIYTTRSLLVAHHTALSNALRSHLSEFGVIAAKGEAGLAALLAIVSCGDPRLQELAREGLNALVDTMSATHKQIGKLDGRIAKIIKGDAACRRLQAVPGIGPVSAGALVALSGDLGRFASGRDFAAWLGLTPRQDSSGDKVRLGRITKAGDKGLRTLLVMGALAIVRYVRGNAAKKIKPRDSAGRASQWLRGLLARRPPLVAAVALAAKTARIVWAMITRGEKYRPAAA

SEQ ID NO: 148857 - protein, 346 aa, unidentified
MLYAGLDLSRQRLDVHVLDEAGQTVEVTAVRPDADALATLARHVARHGQPISAAIESMTGARFVHDQLELAGWEVEIADAQKVKALAPLAAKTDKIDARVLAELSRRELVPAIWLPDPAIRAERERARFRIFLVHQRTALKNRIHATLITFGHPVPVSDLFGVAGRELLAGLALPEPWASDVATSLALVDELGQQISGIEAELRALGADHHYIKLLETVPGIGWVLGYTIAAELGDIGRFASAKKFVGYTGLCPRVYQSGATDRRGALAKNGPKYLRWALIEAATHAARSERYRAHYERTKRRLGKQRGSKVARIELARELATAIWYMLTRQEPFRAAGPAICLVA

SEQ ID NO: 148858 - protein, 319 aa, unidentified
MGTVMNQTSSSLYIGIDVSGSTLDVAIHDTTEHFSVDNETAAIEQLVQRLIALGPTLIVMEATGKLELAVLRALCQAGLPAVAVNPRQVRDFARATGKRAKTERIDAFVIAHFAAVIKPVVRPLNDVQTEQLQALLLRRAQLIDMLVAEKARLERAHAAAKESLNDHIKWLKQQLTVADRDIDSFLRASPAWRQKEDLLRSVPGIGPGAAATLIAFMPQLGSLNRREIAALTGVAPFNSDSGKHTGKRRIQGGRAIVRRALYMACIPALRFNPTIRAFYDRLRQAGKPFKVAMTACIRKLIVTLNAMVHNSTPWNPSTN

SEQ ID NO: 148859 - protein, 347 aa, unidentified
MRFYTKQHQFYCGIDLHARSMYVCILSQDGEVVLHRNMPASPDTLLKAIAPYRDNIVIAVACILTWYWLADLGAQEGLPFVLGHALYRKAIHGGKAKNDKIDSQKIAVLLRGGMLPQAYGYPAEMRATRDLRRRRLHLTRQRAERLAHIQHTNRPYNLPEIGKKLAYKANRDGVVERFSEPAVQKSVEVDLALLGSYDPLLSDVELTSVQTAKQHDAHTLYRRPSVPGIGKMLRVVLRYEIHAIRRFPRGQAFVAYCRLVTCAQESAGKRDGTSGAKLGNAYLTWAFSEAAVLFLRHNPVGQKYLTRLEKKHGQGQAFTVLAHKLARAVYDILRRDPVCEMDQLLRG

SEQ ID NO: 148860 - protein, 347 aa, unidentified
MQNVATIGLDLAKQVFQVHGADAEGNTLFNRKLKRAEVKTFLQKLPPCIVAMEACGSANYWAREIGSFGHEIRVLPAQLVKPFVPRGKTDANDAAAICEAARSKNIRSVPVKSTAQQAAAIVLRTRSLFVRQKTKAINALRGHLAEYGLVAEVGAFNVGRLIAAMHNQPETSIPALARFAINEICDEIDRLNERIQRIDGEIAAQAKQDEDVRRLMTIPGVGILTASTIKNYVSDPGGFKSARHFAAWLGLTPKVNSSGGKSRQGSISKMGNPELRSLLFVCATAVIRHGRRTGRMETWLRKLLDRRPYKVAAVALANKIARIVWALLNEGSVYRSPNLRNSAISDT

SEQ ID NO: 148861 - protein, 319 aa, unidentified
MEKTPAADRFVGIDVSKSWVDVHVRPDGIAFRCDSEAQGSVELVQRLRRFDPRLIVLEASGGYESLPAVSLAEAGLPVAIVNPRQVRKFAEALGQLAKTDAIDARVIAHFAEAVRPPPRPMPDAAMTQLRELLARRRQLLVMINAEKQRLAKAESTITQRSCKAMVKSLEAERERIGRAIDKLIKASPLWCAKLELLTSVPGVGDIVARTLIAELPELGTVDRHQIAALAGVAPFSRDSGRRKGRRFVRAGRVQVRAPVYMACLVAIRHNAQLAAFYRRLRAAGKPARLALVAVMRKLLTILNAILRDRRPWRMLAGVA

SEQ ID NO: 148862 - protein, 317 aa, unidentified
MDSKTQPDRFVGIDVAKGHVTVHVRPDAIAFNCKTDAQGLADLLGRLRPLAPKLIVLEATGGYEAVVAASLAEADLPVAVVNPRQTRKFAGALGRLAKSDTIDAADIAHFAEAIRPEPRPMPDEQTVQLRALLARRHQLVVMAGAEQQRHDRAETALARRSCAAMLRSLTAEITRIERAIDKLITASPIFCAKQDLLKTIPGVGDVVARTFIAELPELGTVDRHKIAALVGLAPMNRDSGKMRGERHIKGGRPQIRSPLFTACLSVIQHNPPLRGFYQRLLKAGKPKRLAIVAVMRKLVCIANAMLRNQQPWAHAQS

SEQ ID NO: 148863 - protein, 364 aa, unidentified
MNKCHSNTELSSHEGTRCQFKGGRCAIKLGIDVHQDFYVVVMQEDLANPKPPQRFAKEAFLHWAAKLKSRGGEVYAVYEACGFGFSLQRQLSALSINCYVVCPQKLDEANKRVKTDGLDAKALCLRLDRFVQGNSDALAIVRVPMQEEEQLRAIHRQREQLLKVRQQLEAQGRSLMVNHGLEPVQQWWKERAFSKLPVPGWMKELLGNTQPILIALQQTIAALTLQLQSAASAEQPRGLGKMTSVVIDREIGDWHRFNNRRQIASYTGLCPGEYSSGNSRLQSCVTKHGNPRLRAALVELAWRMVRFQPNYRAVRKWKQLLLRGALTTGAARKKAIVAVARQLAVDLWRVRTGRCKAQALGLVI

SEQ ID NO: 148864 - protein, 343 aa, unidentified
MEYYVGLDVSLKQTSICVVDQTGSVVREGVVDSDPEAISVYVRSKAPDAVRIGLETGPTSTWLWTELKRLGLPVICIDARHAKAVLKMQINKSDRNDAIGIARIMQTGWFKEVHVKDIDSHSVRALLASRALLVKIKRDLENHVRGLLKNLGLVIGRAKFNGFAVRAEELIEGRPELVTAIRPLLEARNAVEQQVSELDRKVMKLARHDAQVRRFMTVPGVGPITALAFKATIDDPARFARSRSVGAYVGLTSRRHASGEVDWTGRISKCGDAMLRSYLFEAAGVLLTRVPKWSAVKAWGVRLAKRNGLRKAKVAVARKLAVILHRMWIDGTEFNWLKKEIAA

SEQ ID NO: 148865 - protein, 335 aa, unidentified
MSELATVGIDLAKSVFQIHGVDENGLVLVRRQLRRSQLLAFFQNRPRCLIGMEACAGAYDWGLRLQEMGHDVRLMPPSYVKPYVKRGKTDAADAAAICEAVTRPSMRFVAIKSGSCSLVMVLHRTRDFLVRQRTQIGNAIRAHMTEFGIKTAKGAQNVKRLKEQVDQLPQAARMPLILLFEQLSEADMRIERLTGEIEETYSQSETSQRLAMIPGVGLSATIIAATTPNVDNFDCARDYAAWLGLTPKPHSTGGKQRVGGISKMGNRYIRRLRYLGAMAQIMLRRRLKRESGSDRLSGMLMRKKTKIVAIALAHRMARMIFAVLRDGSRYEPQAA

SEQ ID NO: 148866 - protein, 333 aa, unidentified
MRRENYLYAGVDTHKESHTACVVTCWNELLLTVTIPNKPGEFHKLAKRVSKKANELGISPVYGLENVSGHGRALAVWLIENGYQVKDVNPALSYNQRKSAPTMEKNDEYDAYAVATVLINQLHKLPDAKPDDAHWTLSQLVTRRSTLVREGVRLKNGLHGQLSIAYPSYKQFFSDIDGKIATYFWKTYPSPVHLRYKTADELDGEFKVVAPRGTRGGRGSRILECVQIDGDTHREYQESRDFITQSFARGLERHTQELGLIEAQIEIMLKEFDYKLTTLPGVRTVTAGKIIAEIGDISRFKNAGKLARYAGIAPVTFSSAGTQAPENYSVVGD

SEQ ID NO: 148867 - protein, 385 aa, unidentified
MQASTQTSTICTPTREQSATFFVAIELSLKGWLVCIHSPDRDRLSHYDIGAGDCDKLLALIEQARARVTRALGVKPEVVSCYEAGYDGFWLHRVLVAAGVKNHVFDPASIAVERRGRRVKTDRIDNESMIRTLMAYLRGEPRVVRVVRVPSPAQEDARRLMRERERLVKERTAHVNRIKSLLRTQGLAAGHPKRADWLTWLEAQCDHRGRPLGQCLVAELKRQHQRLRMICQQVKALEDERASAMPQALVTKATALTRLKGIGPNFATNLTGEVYWKDFENRRQVASYVGLAPSPWQSGGLSRDQGISKAGNRRARCTAIQLAWLWLRHQPDSELSQWYRARVGDARGRLRKIMIVALARKLVVALWRYLETGLVPTGAVFTKGK

SEQ ID NO: 148868 - protein, 316 aa, unidentified
MEVLFDSCCGIDVHKKTLTACIMIGKDGKITKKEIRTFSTMTEALEEFRDWLKSEGVTHVAIESTGIYWRPVYNILENDVEVILANARHIKNVPGRKTDVADSEWLCKLLRNGLIQGSFIPPRHIRQLRDLTRYRSRLNNNIAAEKNRLQKYLEDANIKLSSVATDTLGVSGRRMIREIIRGNRDRDSLSELAKGRLRSKIEELKKSFNSRITEHHRMLIEMSLKHIEYIEEMIEKLEMEMDGLIKERKLDEDVELLDTIPGVDKIGASIIIAETGADMSKFPSASHLASWAGMSPGNNESAGKKKAEGPHQETSG

SEQ ID NO: 148869 - protein, 422 aa, unidentified
MLEQTQDEQEIIARVAALDIGKAELMCCVRVPDPKGGSRRVQEVKSYSTMTRSLQVMADRLMDLGVTRIVMEATSDYWKPPFYLLEAHGFDVWLVNARDVKNLPGRPKTDRLDAVWLCKVAERQMLRPSFIPPVPIRRLRDLTRYRIGLVSDQTREKNRVEKLLEDSQIKLSVVASDIFGVPGRQMMAALIAGERNPQVLAQMARTSMRTKIPQLEEAFVGHFTDHHRFLLTKMLARIDALDSDIADLDTQIEAHLAPFADPMARLDQIPGVGATAAAVIIAEVGVDMTRFPTPAHLSSWARFAPSVKESAGRKKGTGSTGHGDRYLARVLGEAAVGASKTNTFLGERYRRIARRRGKKKAIVAVGRSILVITWYLLSDPEVDFHDLGSGYYDSRINPERRKRNYIRELEALGFKVTLEPAA

SEQ ID NO: 148870 - protein, 358 aa, unidentified
MEKLIRVGMDTSKSVFVLHGVDAAEKVVLRKKLRRQQVIEFFGKLKPTKIGLEACGAAHYWARELEALAHEVVLLPPQYVKPYVKRGKNDAADAEAICEAMSRPTMRFVPVKTAEQQAALMLAGTRDRLIRTRTQLTNAIRGYAAEFGLTAAKGLDKIEPLLARLAAATELPKLAKELFAAHAREYAQIKVAIQKIEAKLMAWHKHNELSRRLVEVPAIGPIGASLAVMKVPDPHAFRSGRDFSAWIGLTPKDHSTAGKTRLGVITRAGDETLRSTLILGATAVIQQVRRGKGHPSPWLIDLLKRKPPKLAAVALANKTARIVWKLMVSGESYNPMRLRDTRGPSARYGSKATAITQA

SEQ ID NO: 148871 - protein, 345 aa, unidentified
MEYYTGIDVSLEQSSVCVVDATGKVVKETKVESEPDALVALLKGLDFPVTLIGLEAGPLSQWLHAGLMDAGFETVLLETRHVKAALSAMTVKTDRRDARGIAQLIRMGWFRPVHAKSIGSQEVRALLTARKLLQGKLKDVELCLRGILRGFGLKVGKVTVRTFEGRIRQLISGQATLEQIAGAMLSARATLLSQYDKLHKAVLKIVRQDKVCRQFMTVPSVGAIVAITFKTAIDDPHRIKKSKAVGPLFGLTPKKYQSGEVDVTGGISRVGDVMVRTALYEAANVLLTRITRFSALKRWGMEIAKRRGMKRAKVAVARKIGVILHRMWIDGTTFRWTRDPVAAKA

SEQ ID NO: 148872 - protein, 429 aa, unidentified
MKIIYPRVCGIDVHKKFIVAVICISESVEPIYLKKRFSTFHNDLIRFREWLIQNDCQNVCMESTGKYYIPVYNVLESHISNIVVANPKWVRAVKGEKDDDKDAKWIADLFKFGIVRSSFIPQKDFRILRELTRYRYKLVNMRSSEKNRFQNALTSGNCKLDMVFTDVFGKSASNIIDLILSDNPYTDEDILSKVHKKCKASPDMILDSVNGTDLTPAQKARIELVNDHIKQLSSNIQKLDKLIDLMIEPYEDYISFLCQIPGVSRNSAIIILSEIGIDMNQFTTSRRITSWAGLTPSSNQSAGKKKSVRISRAGVYLKPCLVEVAHAAVKDKSHPYYANKFNKISKRRGKKRAYIAIARKILVAAYHMLLTGEIWNPADLSEVETPVEQRLKYVKNNLKSDIKQLLDIGLTVEELTLMIQQNANIIATQ

SEQ ID NO: 148873 - protein, 322 aa, unidentified
MSMSNQRCAGIDVSKSTLDIAISNIAQSFTVPNEDGGFNQILKELKRNETQLILMEATGGLESGVAGYLQSEGLDVVVINPRQARDFARAMGYLAKTDQIDARVLLQMAKVINQHPEREKYIRPLPDAHRQLLAAMVVRRRQLTIMLTAERNRLHPSHPQNHESIRLIISVLKSEMARIEAEMSAYISKNFSELSALLSAVKGVGAATVAVLLAEVPELGTLSRREISALIGVAPVNRDSGTMRGRRTVFGGRASVRTALYMSALVGTRHNPVIKEFYTRLVAAGKPKKVALTACIRKLLTILNAMLKNNEAWDPLYHQHAS

SEQ ID NO: 148874 - protein, 466 aa, unidentified
MHKDTQQQQQKSKRKKTKIDVKLPKHLEHINKMAAGIDIGSKSHFVAVPEGCAEVIVREFKSFTTDLYELANWLGQCGIETVAMESTGVYWIPLYELLESRGFDVKLVDARKVKNVSGRKTDVLDCQWLQQLHTYGLLSGAFRPNEQTCVLRSYMRQRSMLIQQAASHIQHMQKALSLMNLQLHNVLSDITGDTGMKIIRAISAGERNPKTLASYRNRGCKNSVEVIEKSLTGHYRDEHIFSLTQAVELYDTYKDKILACDIEIEKQLGEFEKSTIEKAESESNVTKRKSKSKCKNALSFDLKSHLIRITGVDLTAIPGIEASSALKIISEIGLNLSRWKSSKQFASWLGLCPGNKVSGGKRLSSKSKRTSNYASCILRLAAGALHKSDSALGAFFRRLRARLGAPKAITAAAHKLATIIFNMLRNGVEFIESGQDYYETQYRDRLVKNLNKRAKMLGYELVAVLC

SEQ ID NO: 148875 - protein, 402 aa, unidentified
MNCVGIDVSKGKIMIAVMRPFGEVVVSPFEVRHTASELSELARLLKSLDGETRVVMESTGNYHAPVARLLHDAGLYVSVVNAMLVHDYGNNSLRRAKTDKKDAVKLANYGLDRWLTLPRYVPEEDTRLMLKTCYRQYQQYSKVQTMLKNNLISLLDTAFPDVNRLFTSPPRADGSEKWVDFVATFWHCECVCGLSEKAFTAKYQRWCRKHRYNFSEEKALDIYASACGHFGVIPKTDTAKLLVEQAIFQLRATSAALAALKQEMQSLAASLPEYPVVMEMFGVGPTLGPQLMAEIGDVRRFHSKKALVAFAGIDAPPYQSGQIDVRSRSISKRGSASLRRALFLVMGVILQCAPGDEPVYQFMNKKRSEGKPYRVYMMASANKFLRIYYASVKAYLDSLEHA

SEQ ID NO: 148876 - protein, 355 aa, unidentified
MNQEKYIGMDVHQATISVAVMDGSGKLIMECILETKAATIVEFIAGLRGTLSVTFEEGTSAAWLHDLLKPHVSHLVVCDPRRNALLKDGSKSDRIDARKLAELLHGNKLHAVYHGEHGVRTLKELGRSYLTITRDLTRVMSRIKALYRSWAIPCSGTTVYAVRHRAAWLAKIPEPGVRLRAERLYQQLDLLQPVRQGARRDLMVESHRHQAVKLLRQIPSIGPIRAAMLVALLQTPHRFRTKRQLWAYSGFAVETHDSGEYRFVRGKLVRNRERISVRGLNHNHNHDLKNLFKGAALSASTRPGPLCDFYVALLEKGMRPTMARLTLARKMAAITLTIWKKGVEFDAKPLNRQAA

SEQ ID NO: 148877 - protein, 331 aa, unidentified
METRKEPDMITSGVDAHKGVHAASAAHPRQWGIEGAGNYGRGLAQHLVAADKTVYDINPRWTAGERRQARRPGKSDRLDARAVALVVRREAATLHPLQAEDETAVLDLLVTEREAALAEAPRLRNQLHALLLQLDPQYKEVLPPLDTEAGVAALVAYHGPERTPLHQAQAASVRRLAHRLRLAVEQAADVRRQIEARAEAGFPPLTRLKGVSLLTAGALAGILGPGRRFMSEAQLAAYAGAAPLEASSAGRVRHRLNRGGNRRLNAILYRIALTQLRCWPPAQDYVARRVSEGKTKREAIRALKRYLIRAIWRLWQECVSHQASSSVVQAA

SEQ ID NO: 148878 - protein, 324 aa, unidentified
MDAWIGIDVSKDTLDVCLLRPTGKSKDRKFDNDTAGFQKLLGWANSLVGPDRHFCMEATGAYSHAIASFLVEKGELVSVENPARIKYFGMGEGILNKTDKVDARVIAKYTKEKNPEPWRLSRPEVLHLTALMRRVQVVETHLGQERNRLGEPVIDPEVACSINTIVKALEQEIHRLEAQVREHIDQHPDLRKDKELLTSIKGIGEKLAHWIMAEMPDPGQFQSAKSASAYAGLSPMEYTSGRTVKRRTRISKAGNNNLRRALYMPAIAASRYNPIVADLYKRLIERGKCKMVALCAAMRKLLMLAYGVLKTRQPFNPEFANSKA

SEQ ID NO: 148879 - protein, 400 aa, unidentified
MISVGIDVSKGKSTVCILKPYGEIVSKPFNITHTQKDLSELSSMLFRLNDEVKIVMEATGIYHLPVLTYLQEKGFFVSVINPYLMKSYRNESLRKAKTDKIDSRIIANYGIDHWFKMKEFQTSGEIYEELKLLGQQYRHYMKLHLLSLAELTHLLDLTMPGIKNLLASWNETNRKDKRSDFVERFWHYDVITSMSEQEFTEEYILWAKEKKYVPSQEKAKVIYTLAQESIPTLPSETSSIKMLVTEAVRVLKEVDATLGLILSRMQEIAKTLPEYSVVREMGGVGNTLAPKLIAEIGDVRRFRNGKALVAFAGIDPPPYESGQFVGCNRKISKRGSASLRKVGYETMRSLKMRSRPEDPIYRYVVKKESEGKSKKSAKIAGLNKFLRIYYARVTELYKNI

SEQ ID NO: 148880 - protein, 422 aa, unidentified
MLEETQETEEIIQRVAALDIGKAELTCCVRVPSPGKRGRRAQEVRSYQTMTRWLLVMADRLRELGVTRVVMEATSDYWKGVFYLLEAHGFEVWLVNARDVKHLPGRPKTDTLDAVWLWKVAERQMLRPSFVPPRPIRQLRDVTRYRVDLVAARTAEKQRVEKLLEDAQIKLSVVASDIFGVSGRAMLAALLAGERDPKRLAQLARARMRAKRSLLAEAFTGFFSDHHGFLLARMLDRIDALSADIVALDARIEALIGPFAQTVDRLDEIPGIGQTAAHLLIAEIGVDMTRFPTAGHLVSWAKFAPGVKESAGKRKGTATTGHGNPYLARVLGEAAVAAGRTDSFLGERYRRIARRRGANKAIVAVGRSILVIVWHLLADPNARFCDLGAGFYDTRVNADRAKRNHVRQLEALGYKVTLQPAA

SEQ ID NO: 148881 - protein, 357 aa, unidentified
MGKFIGNSGVVTRVGLDLGKNAFQVHAVGAKGEVVVARKLARGRLVAFFARLPPCLVAMEACGSAHHWGRQLAALGHEVRLIPPAHVKPYVRRNKSDAADAAAICEAAGRPGQRFVPLRSIDNQAALMRHRARELLAGQRTALLNALRGHMAEIGLIAPQGAQHAYELKRLAADGFDENGEIVVPDCVRAALSRLVAHIDALDEAILAIDQELAASVKADATAKRLTTIPGVGPVAASAIVATIQDMSAFASGRDFAAFLGLTPRQSSTGGKPRLGRITKMGDRYLRKLLVVGACAVLGRRKGHKDALRVWASALLDRKTVKYKFKLTAVALANKLARVVYVLMTRGGEYDGRPVAG

SEQ ID NO: 148882 - protein, 412 aa, unidentified
MDVLVERCAGLDVHRDSVMATVRLPGERSRQREQHTRGFGSTIAELHALGDWLQGFGVTLVGMEATGIYWRTVFDALEPRFQCWLLNARHLRNVPGRKSDVIDSAWICQLLEHGLVRPSFVPPREIRRLRDLTRLRKAQIEERTRAIQRLEKVLQDAGIKLTSVASKAYSVSARAILEALLAGVRDPAELAELARGRLRAKIPQLQEALRSRFDLAHHGVLVAGLLGHLDSLELAIDNLDQRIAYETEPIAELVELVCTIPGVGLRTGQVLIAECGIDMSIFPSVAHLTSWAGICPGTNSSAGKRYSGKTRRGSKWLRQALSESAQAAARSKGTYLASHYAQIRGRRGPHKAIGAIRHDILVAYYHIVSDRLPYRELGPDWLARRYSPEHRARRLLRQIETLGFNVTIEAAA

SEQ ID NO: 148883 - protein, 339 aa, unidentified
MKKRYMGVDLHRNCFTVYTRQANGSGESREWSIHQLKAFAKTVKANDEVAVEATGNVRLFTQALKERGCRVVVVNPHQFQVISRSVKKTDEHDAKVLAEFLSKGMLPEVRMKDEVYARMASLTQTRDKLVKLRTTLKNKVNNLLAARGILLRKESLASEKGLVGVLASPVSELERVELEVLVGEIRHLNESIKKLEDLLHDQGPNLPGWKNITSIKGIGDTGASILLSTIGNIADFADEGKLAAYFGIVPRVSNSNETERSGRITKQGCKLGRTALVQCALIAARYSPYLQAYYRRIAATRGTGKAIIALARKFLGVIYKTLKNNWIFEDFPRFVLVNG

SEQ ID NO: 148884 - protein, 424 aa, unidentified
MTYRIAGIDVHKKMLAVVVADVASEGEVPFERLTFYTAPEQLKVLAEWCVEHGVQEVVMESTAQYWKPVWEALERYWQPVVGKAADAHPMTGSLHLAQAQSNRARGGRKNDFGDAERLVRRHVAQELVLSFVPSAEQRLWRTVTRQKQQRVVARVRLRNQMEAFLEEAHIKLSSLVSDLLGQSGRRMLRALAEGKTDPAEIALLGDQRLHATQAQLRDALSAASELHPVYRRLLNQSLEELRVLDEQIQELDQEIAALLKQHQDAVQRLAEVPGLGPDSAQQIIAEVGATAAVFPSPKDLASWVGVCPGDDISAGKSHSTKSPKGNKNMRRILNQAAHAAVKAKGSIFEVVFQRLRRGLCYKEAIWAIAHRLCRLIWVLLRRGVPYEERGPAVSAASQRMRASRMMRELRRMGYRVDPPEPQNA

SEQ ID NO: 148885 - protein, 313 aa, unidentified
MHSELYVGVDISKQHLDACLQPSGRTWRETNDASGRTRLVTHLKELTPALIVLEATGGLERAIAAELAAENLPVAIVNPRQCRDFARATGRLAKTDRLDSITLALFAQAVKPTPRALPDEATRHLRALTTRRRQVIEMITSENNRLLACDDERVRERIREHIKYLSEERDDADEEITRALKESGVWREREQLLLSVPGVGPVLARTLLAELPELGRLAGKQVSALAGVAPMSKDSGAWRGKRFVQGGRGEVRAALYMGALVASRHNPVIKSLYERLREAGKPGKVALVACMRKLLVILNAMLRDNTPWNPHTT

SEQ ID NO: 148886 - protein, 388 aa, unidentified
MLFVGIDVSKDKFDACGIGEGGKKVFALTSTMDRNGFEKLVLHLKNHARLLGLESTACYHLALFSYLTAQGYRVVIINPLLISNFVKLQLRKTKTDKKDALTIAQFLMLKREALEERVCSADVMELRDLARRRERLTDQVTKLKGNMKRILSVTFPELEHLTGVFAKSILQLLIRFPSAAALRNATVDEVASIVVPRSWGRKSKAWVETLVATASSSIGVSSPAKELVLKQDAEQLLYIQEQIKEVTKLLMSLCTESMKKDIQILTSLQGIGASTALQFLIEMGGDIRLYKNDKKLIAAAGLDPSTYQSGTYQGKSRISKRGNRHLRRVIWIMAKNVIFSNELFRSYFYKRRGEGLPYKMAVLATAHKLIRVMFSMLMHQTYFKEGGK

SEQ ID NO: 148887 - protein, 438 aa, unidentified
MGKNTRFVGLDVHAETIAVAVAEGRNQVRSLGTIGNRPEAVRRLLGKLGKLTEVKVCYEAGPTGYALYWELTRLGVQCEVIAPSLVPMKSGDRIKTDRRDTERLARSYQAGDLTAVWVPDSKHEALRDLVRAREATKEDQLRAKHRLLKYLLRYGQRPADDGRSWTAAWWQWVRALRLPHPEQNATLLELVLEVDHQGQRIERFDSAIDQAVAAAPEQLRAIVDAPQALRGVAQMTAVTLATEFGCFSRFEKAGQVMSYTGVVPSEHSSGPKTRRGAITKTGNSHLRRVLVESAWHYRHQPKLCKRQKELQSALAPKVAAIAWGAQQRLHRRYWALQNKSKPSAKIVTALARELAGFVWAIGVETERSLKWARPHDRDCLAPRDTNQSTRSERVSGRAGQWWRILDYVVRSRPACPVRGSSRRIVTMKAAKADPRISA

SEQ ID NO: 148888 - protein, 340 aa, unidentified
MNATTYGLDVAKHVFQMYWVEAETGEIVNRRFGRDELIRFLAQRPAGRVALEACGSAHWWARKIKALGHEVVLLHAKFIRPFVQTNKTDASDARAIWTAVQQPGMRTVAAKTEDQQAMLSLHRMRALLVKFRTMQVNQLRGLLYEFGATFRAGRAAGLAEIRARTAELEDALPGTMMCCLQDQLRRIEELQRDIDLLEKRIGVWQKQDAACHAITAVPGIGRLTATALVATMGDAKSFRSGREFAAFLGLVPRQSGTGGKVRLGPMSKRGDPYLRTLLIHGARSVMYNAKAPTPWQRDIQARRPANVAAVALASKIARTAWAILARGQEYQRDYVSVRPA

SEQ ID NO: 148889 - protein, 343 aa, unidentified
MEVAIGIDTHKASLAAAAVDTLGRVLDVREFANDPTGHRSLLRWVMEQAQPRTIGIEGSLSYGSAAARMLLGHAEDVREVAPSLTHLERRRRSKGKSDPVDAVAIARVVAADETLPSARRTTLLAELKLLVDYRDQLVHARTQVANRVHADLVVVRPGYEQVVPNLRAKRHVAKARSLISRDRSVQAELVRRRLEEILRLEAQIAEADRRIVLTLEQADTTLTQIPGVGPFIAAKILGEVGEISRIRSKASFAMLSGTAPVIASSGQTHRHRLNRRGNRQLNWALHYIALVQSRTSPEAKAYLIRQREAGKSHKEAMRCLKRHLSNVVYRHLLLDASRLERVA

SEQ ID NO: 148890 - protein, 424 aa, unidentified
MKVTYQTCCGVDVHKSFLVATIVKTTGGIEPSYQKKRFSTFNNSILEFKKWLLENECRDVCMESTGKYWVPVFNLLEDEINVTIANPKWVKAVKGNKDDTKDSKWIGDLFRLGLVRGSYIPCKKIRILREYTRYRYKLVSCRSSEKNRYQNALTVCNVALDSVVSDIFGKSSTSIIDYLLEQSDNSINHEEIASKLLRRLKAKEDAVIESIEGYQMTDAQKYRMRLVRAHMDYITAEINDVDKQIESLISSDPDYEKAIQLLTTIPGVKHDSAITIISEIGIDMSQFCNSKRLCCWAGLTPGSNESAGKKKSVKITRAGVYLKPALVQCAHAAVKSDKSPYYKKKYESLVKRRGKKRAIIAIARMILTAIYQMLSTGEIWNPSDLYKIDMPANLLERQKAKAIKQAKKLLQREGLIPPDVPVAS

SEQ ID NO: 148891 - protein, 358 aa, unidentified
MNVGVDVHKRICQACLKDERGSIVEEFRFPNNQEGASRLAMILRKHGDARVALESTGNLWVRLYDRLDEEESIDVILTNPKKTRVIAEAKTKNDKLDARLLADLVRADLVARSYVPPKEMRMRRALLRERISLVESRTMIKNRIHALLDKYEIQPTYTDIFGKQGREWLRSLNLPSIDQTILEVSLQRLDELEAHIDAFTGKIAQEAVESPQAKLLMSFTGIDYYSAMLLASEIGDVKRFPSAKKLVSYAGLAPGTRQSADKTIHGHIVREGNKRIRWILVEAAQHASRHDPRLRGFYLRILKRRGYQRAIVAVARKMLVSIYHVLSKNEAYYGMRGELFERKLKRLEWTATHSPQAP

SEQ ID NO: 148892 - protein, 351 aa, unidentified
MNIIGCDLHTRYQVVAWIDQETGEIRTRRLEHESGEARAFYASWPRGARIGIEATFPALWFERLVAECGHELWVGDAARIRASEVRQQKTDTRDAEHILDLLRTDRFPRIWVPSLAERDLRQLLVHRMKLVRTRTAVKNQLHALAMSQGVCRKRKLWSVRGRAELESLALLPWASRRRKELLELLDQLQAAIEPLDQAVEQEARARAEAVRLMTHPGVGPVVSLAYVLTLGPVERFPNRRKLVSYLGLNPREHSSGGRQRLGAISKQGNSMMRWLLVEAAQTAARHDPELRRAYQRLKFRRVSGVAKVAIARRLAVRLYWMLRARVDYAQLVRMSGSPSSAVVPPAAGSNV

SEQ ID NO: 148893 - protein, 356 aa, unidentified
MTQETPSRSGHVVIGVDTHKHIHVAAVMDTIGGILATLTIATDTAGFKQLLAWAESFGKVISFGIEGTGSYGAGLTSFLRRQGHKVVEVSRPDRRLRRLNGKSDTLDAENAARAVLAGFATATPKTMDGAVEMIRQLKVAHDTAVKQKAATMVTLKAMLVHAPEQLRIETARKTQRTLARYCAAFRPRGLESPEDANRHALRSLAKRWLLLDEESKELTSMIEELVLQRAPHLLDEFGIGVDTAAEILIVAGDNPERIKSEAAFAKLAGISPIPAGSGITSGKHRINHGGHRQLNAAIYRTVIVRMRFHQPTIDYVARRTAEGKSKRDIIRCLKRYVISELYHLVKVNPRTGEIVS

SEQ ID NO: 148894 - protein, 323 aa, unidentified
MNKDIKYFGLDISHLVFDVTDSDGNYYQFKNNEFGFKKFTKLLNDNSHCVMEATGYYHYQLAYHLLESGIKVSVENPLSVKRFIQMKLSKIKTDKSDSKLICDYAQQVELKLWQGNSKVEMECLQITRALAIYTKQSTMLKNKLHGEAVLGEPSKAVVRSIKRSLKQVVNEIKTLEVKLLVLVKQVHQDLLIRLKTIPGIGPKTAIMLIVLTGGFDRFTSASELCSYAGLTPVIRQSGSSVKGRPRISKIGNQKLRNLLFMCSFNACKCNKACRDLYERIVAKGKSKKLALIAVCNKLLKQAFAIAKSGLIYDDAYRSTFVKN

SEQ ID NO: 148895 - protein, 347 aa, unidentified
MTIVENHTQITGGVDTHLEFHVAAAVDANGGVLGVETFATRGAGYAQLVAWLQRFGPIERVGVEGTGSYGTGLTRHLRSEGITVVEVDRPNRQARRRHGKSDTVDAISAARAALTRTATGEAKHRDGNVEAIRVLMVARRSAVDERIAILNQIRHLVICAPDDIRARFDGLPPAALLNQTSSLRPRDHGDVVDYTTLITLRELGGRAKNLHDENLRLNKLLRPLIRRTAPGLLDVFGVGYDTAAKLLVAAGDNPERLRSEAAWAHMCGVAPIEASSGKTQRHRLDRGGNRQANSAIYHIMLTRLSYDQRTRDYLARRSNEGKTTGEICRILRRYIAREIYKQLPRPA

SEQ ID NO: 148896 - protein, 412 aa, unidentified
MQVIHDHCAGLDVHKKTVVACVWITPPDGRATHDTRTFGTMTADVLALSDWLKSQGVTHVAMESTGVYWKPIYNLLEGNFVLLVVNAHHIKAVPGRKTDVADAEWIGDLLRHGLVRASFIPPRPQRELRELTRHRTNLVGKRAQAVNELQKVLESANVKLASVASDITGVSATAMLRAMLEGQSDVRELAELARGRLRSKKEPLRQALAGTLRAHHKLIVAQLLADIDFLEEQVLEVSLEIERRMKDDQPTIDRLDDIPGINQRLGEIIVAEIGTDMSRFPSADHLVSWAGLCPGNQESAGKRRSSRIRPGNVALKTALVEAAHGASRVTRSYLHALYHRLLPRRGKKRALIAVARTILESIYHMLVRGANWLDLGADYFERRNPLQLLTRLTHRIEKLGYQVALSPLQKAA

SEQ ID NO: 148897 - protein, 457 aa, unidentified
MAKKTKSKAKGNCRMLPVMHPDAAGVDIGAEEIFVAVPADRDVESVRSFDTFTRDLHQLADWLQSCRVRTVAMESTGVYWIPLYQILETRGFQVFLVNAQHIKNVPGRKSDVSDCQWIQYLHSVGLLKASFRPPDEICVIRSLWRHRESLVQMAAEHTMHMQKALSQMNLQLHHVLSEITGVSGLAILDAILAGERDPAKLASLCNWRVRSSRETVAKSLEGDYRSEHLFALRQSLVGYRFYQKLLFEVDQELERSMRDLPRAVGAPVQMPPRTKTCIYQRAGNEPAFDLKAELFRIAGVDLTDVPGISTITAHTILMEVGPDMSRFRNASAFASWLGLCPEKQVSGGKVLSTRSRKVKNRAAIALRLGAHCLYRAKNYLGEFHRKMKWRLGAPAAVTATAHKLARIVYHMLSTKDPYSESVLVQCDRQASTRAEIRLRRQAANLGFQLTPVSEFDS

SEQ ID NO: 148898 - protein, 351 aa, unidentified
MSHKLNSAIAVIGIDIGKNSFHVVGHDKRGAIMLRQKWSRGQVEARLANLPPCLIGMEACVGAHHLSRKLQMLGHDARLMPAKYVRPYSKGQKNDFRDAEAITEAVQRPTMKFVATKTAEQLDLQALHRVRERLVTQRTGIINQIRAFLLERGVAVRQGLRFLRAELPRILAAPCDALSPRMLRVIEDLAGDWRRLDERIEGLSSEIEALARQDKGCERLMTVPGIGPIISSAMVAAIGTGDAFSKGRDFGAWLGLVPKQISTGDRTILGSISKRGNRYLRALFVQAAWVVLVKVGQKHWERYGLKSWIEAAKKRLHHNVLAIALANKLARIAWSVLAHGRTFEASKMQAA

SEQ ID NO: 148899 - protein, 343 aa, unidentified
MNVSIGLDVSLASTAICVLGPQGRIVEELQAESEPEALVHAVKSLPYQIDAVGLEAGPLSQWLSKEIEKAGFDVVLMETRLVKAALKAMPIKTDRRDAQGIARLLQMGWYRQVHRKSVSSQEIRALLTARKSIQQAIINIELSMRGVLRNFGLKIGQVTAIRYEARVRELIDQNELLSAAALPLLRARNHLRTELAGFDTKITGLAEHDDVSRLMMTMPGVGPIVALTVRSAIDDPARFARSKDIGPWVGLTPRRTQSGEMDIVGQITRAGDRGLRSALYQAAMILMHRGAPNWLQAWALRVAHRRGKKRALIALARRIGVILHRMWVDGSPFRFTQSSSPAT

SEQ ID NO: 148900 - protein, 362 aa, unidentified
MRIIGCDLHARQQTLAMLDSATGEVVNVTLTHEGGNVREFYSTLPRPVCVGIEATGSMPWFVNLREELGIECRVGHPATIRAAEPRKQKHDRRDVELIRKLLVENRFPAIGMPSQELQDLRSLLRHRHPWVRMRTRIQNALQSMALANGLRRGPGLWSHDGQNRIAALPLAPPTAYRRSELQAMYEKFAAEIEKRNQRVEEQSWKRPGARLLMSHPGVGPITALATEVFLGDPARFADSKALASYAGMIPREYSSGGRQRLGGLSKQGNPLLRFLWGEAGAHAARKDPELQRFYRRKLVQKGLGKASVAVARKLGIRLWILLRDQIEYQEFCRRGQKQQKSREACAGMPETPYGAKSQRPVD

SEQ ID NO: 148901 - protein, 362 aa, unidentified
MTDTSKEQPKMTAGLDLGDKYSYFFVLDNESGKMIEEGRLRTTPDDLRRRFDSEEQMKIAIEVGTHSTWVSRILHDCGHEVLIANPRKTRLIYSDKRKTDKLDAQKLARLARVDPELLYPIEHRGEESQAHLALIHSRDVLVRSRTQLINHVRGVVKSFGARLPKCSAESFHRRIRNQLPQELEEALVDVVETIGSLTERIRDYERRIERVCKEGYPQEAELLQQVAGVGVLTSLTFVLTLEDPDRFKKSRTVGAYLGLVPGKDQSGEQDPGKRISGEGDEMLRRLLVSSAHYILGPFGPDSDLRRYGEKVAGSGGKNAKKRAVVAVARKLSVLLHRLWITGEVYEPLHNARLSGALGEEVA

SEQ ID NO: 148902 - protein, 316 aa, unidentified
MVGIDVASAHVDVAAIGAALPAALSHVGNDADGHSALADGLARLKPELVLMEATGGYEAALACALQAAGLRVAVVNPRMARDFARAMQRLAKTDRIDAATLAEFAGVLARRPDCERFIRPLREPEQQDLAALVTRRRQLVSMQLSERQRLRLARPVARPSIEALLEAIARQLDDVEAEMARHVEQHYAQMTKLLQSVAGIGRVAAATLIAELPELGRLNRRQICALVGVAPYAKDSGASRGRRRIGGGRFEVRRALYMATLAATRYNAPIRAFYQRLVAAGKLKKVALIACMRKLITHLNAITRDHLNAQTRSHIA

SEQ ID NO: 148903 - protein, 406 aa, unidentified
MRVVHERCAGLDVHKSSVVACALLPEGKQLRTFGTMTWQLEQLADWLRSLEVPVVAMESSGVYWKPVFNVLEAAGFELLVANARHIKAVPGRKTDVKDAEWIGDLLRHGLLKPSFIPGREERELRELTRYRRTLIEERAHEVQRLQKVLEGANIKLEDIISNVVGLNGRRFLGALIAGDYDPQAVAATANYGLQRKRELLAQGLRGSIGSHQRFLLDQLLSHIDFLEQRITALDRELKQRSLPFEAAIAHLDQIPGVGTRAAEEILAEIGTDMSRFPTHRHLASWAKVCPGNNESAGKRRSGYAGKGNRWLRSILVECAWCASRKKDSYFKAQYHRLAARRGRKRALLAVGHSLLTLIYHLLREGVLYQDLGSNYFDQRDRSQIARQAVRRLERLGFQVALTEGAA

SEQ ID NO: 148904 - protein, 367 aa, unidentified
MKQVNTAPPGQSRNFSQQKLTIGLDLGDRNSWYCVLDEAGEIQLEQRVRTNAKVLREVFGGMPHSRIALETGTHSPWISRLLSALGHEVIVAHARKVRLIGESRKKDDRLDAQTLARLARIDPQLLCPVKHRGAKAQADLTVIRARAGLVRARTGLVNSARSLAKSYGERLRGCNVRNMNPEKAQQLSPELQPALEPLLAAIEELSARICQYNERIEGLAQSSYPQVALLKQVKGVGTLIALTFLLTLEDPHRFHKSRDVGCYLGLQPGRRNSGQSAPQMHISKEGDPYLRTLLVQGAQHILGPFGVDCDLRRWGLKLAERGGKSGKKRAIVATARKLAVLLHHLWISGEVYAPLHNSNRAIVATAA

SEQ ID NO: 148905 - protein, 385 aa, unidentified
MSAHPTPIQAAAQLQANTLFASLELSKARWLVTVSAPGSDKLARHQVPGGDGQALLELLWRLQAAAARRTGAPVMIIVIQEAGLDGFWIHRLLVQNGITSHVVDPASIAVNRRHRRAKTDKIDGVKLLRTLMAWMRGERQVCTMVQPPSPEDEDRRRLARERARLLKERIQHTNRIKGLLSGQGIPDYDPLHRDRRRCLAALTTGDGRPLPERLKAEIGRELDRLEMVVSQLTVVERERDALVARTAEADACAAPAALARLRGGGPELAALLWLEALFRRFDNRRQIAAYAGLTPSPWQSGGIDREQGIAKSGNPRLRRAMIELAWFWVRHQPGSALSRWFVERVGTARGRVRRIAIVALARKLLVALWRYVTQGVVPQGAVLKA

SEQ ID NO: 148906 - protein, 457 aa, unidentified
MSKKRNIKASRKIVKLDSLKQLNLNAAGLDIGDEEIWAAIPEGRQETSVRQFPTFTSDLHALANWLEAAQVNTVAMESTGVYWIPAFEILEERGFEVLIVNARHIKNVPGKKSDVLDCQWIQQLHTYGLLRGSFVPTAEIRSLRSYIRHRDSFIRHRSAHIQHIQKYLQLMNIKLTNVLSDITGLTGMLIIKAILNGERNPQVLARFRHGKCAKSEEVIAKSLHGNFKPEHLFALRQMVEMFEFYNHQIAICDTQIETLFSVFKPQVDLVVQPLPKPKYAGRRTRNEPAFDLRTALYKSVGVDLTAIDGIHVLTAQTVISEIGLDMSRWRTVKHFTSWLGLCPHNDISGGKVQKRYSKKSTNRAAQALRNAARALSRSQSSLGAYYRRMRSRKGVMQANVAAAHKLARIIYFMLKYKKPYHDPGIHAYEAKQSALRIKYLQRQAARLGMKILPISSD

SEQ ID NO: 148907 - protein, 309 aa, unidentified
MEIVVGIDVSKERLDVAILPQEEVFAVGNDHAGIDELAERLKGIGVDAIALEATGGFEMLAVAGLSAAGLTVLVVNPAQVRAYAHAIGRRAKTDPIDAAVIAAFVLATKPEIRPLRDAETQALSELVARRRQIMQMIVAEENRLRMALAKQAQKSIKRLLTALRRELESLDADLDSHIRKSPVWRVREALLTSVPGVGATTARTLLAELPELGSLDRRQIASLAGLAPWTRQSGKWKGKSFIGGGRGKVRAVLFMAALVASRYNPDLKAFRDRLVAAGKPKIVATVATMRKLLTILNAIIRDGRPWQNA

SEQ ID NO: 148908 - protein, 413 aa, unidentified
MSLTPASIPVRVCAGLDWASVDHAVCILDVDGTVLDRFFVVHDAAGLKTLVRRLLKAGVDEVGIERGNGPVVEALLQAGLTVLVIAPGQVKNLRSRYGSAGNKDDRFDAYVLADVVRTDRARLQPLVRDSAATSAMRTTVRARRDLVAHRVAAANQLRAHLQLVFPGAASLFAAIDTAISLTFLERFSTQTQADWLSVKRLDSWLRSVAYSGRTDPAVLHARLLAAPRGTTGTDASVNAATTSAYVAILRVLNTQIAVLEDNLTTQLTTHPDTHIYASLPCVKTLRTARLLGEIGDARGKFPTPQSLAALGGVAPSTRQSGKVKAVTFRWGCNKQLRDALCDFAAGSRHDNAWAADLYNRAIARGHDHPHAVRILGRAWAHIIWRCWQDNLSYDPSQHRALQNLLAQTNAEAA

SEQ ID NO: 148909 - protein, 409 aa, unidentified
MQVIHERCAGLDVHKKSIYACALWWDEKGERHQQIRSFGAVTAELLRLGDWLQQHQVSHVVMEATGVYWRPVWAVLEGQFELMLVNPHHVKAMPGRKTDVKDCEWLADLLQHGLIRGSFVPPTDIQDLRDLTRYRTELTQAQNRVANRIQKVLEQANIKLSSVASDTLGVSGQRMIEAIIAGEDNPESLADMAQKRLRQRIPELQMALMGRVRDHHRFLLREHLDEWKALANRIRRVEQEIDRRIVPFEHAVTLWKTIPGINHVTACTLVAEIGVNMQQFPSAQHLASWAGLCPGQNESAGKRMSTTTRDGDRWLRRALCQASWAASHKKNCYFSGQFKRIAARRGIQRALIAVAHALLIVIYTMLKTGSSYQELGGDHLERIRKDQLQKYYIRRLQRLGLTVSVQPAA

SEQ ID NO: 148910 - protein, 339 aa, unidentified
MELYAGLDLHSRNTYIGIMDNAFNRVFKKRVPNHLELILQTLDPFRDQIKGFVVESTYNWYWLVDGLMDAGYSYAHLANPSAIKQYEGLKHSDDQHDAFFLAQLLILGILPQGYIYPKKDRPVRDLARKRMFLVQHKTAHILSLQSLIARCCARKVSANDIRNLTVEELELWLEEEHLVLSAQANLDSVNFLKQKIKQLEKAIIQKVKLNKAFKYLLTVPGIGNILAMTIMLEVGNINRFPKVGNFTSYCRCVPSRRLSDGKSKGQGNRKNGNRYLSWAFTEAAQLGRRHNERFRRYYNRKVAQANTSLATKALGNKLARICYYIMRDQVPFREELFCH

SEQ ID NO: 148911 - protein, 329 aa, unidentified
MKKLFVGIDVSKDVFDFCALNENGEIETSKEVFENSKKGIFTFCKSLKRWDDYDVWICLEHTGHYGYLLASEFSERAIKYTFLNPLEIKNSIGMTRGKNDAIDAYRIAYYGLTHVRKLKRHIIPVRDIQKLKTLMSMRDGYVKINVQLKNSYKALEIIHQSINIRPQLNDHHLLIKRHEKAIVKVETQIMEIINGNEELKTTFKKVNTVIGVGMLTAVKCIIETDNFTKFKDGRKFSCHCGLAPFDYQSGSSVRGKTRTSPLSNKGLKSILFKAASTAIQHDPQLKNYYSRKVGEGKHKLSVLNAVANKIVLRIFAVANRDEPFVKLVA

SEQ ID NO: 148912 - protein, 358 aa, unidentified
MRIMGVDLHTRQQTIAMLDPETGELVEKTLKHEGETVREFYAALPHPVLVGIEATGSMYWFLELLEELGIERQVGHPTEIRAAEPRKQKHDRRDAALLLKLQVENRFPSIWMPSAELRDLRALLRHRHQWVRMRTRVQNTLQAIALSHGLRRGHSLWSQAGQQTIASLPLAPHAADRRTELQTLYCQLGKQIDELGEQVMDQALQRPGAKLLMTHPGVGPVTALATDVFLGDPARFDDGKAVVSYVGMIPSEYSSGGRQRLGGLSKQGNPLLRFLWCEAGIHAVRRDPELKRFYRRKLPQKGLGKTRVAVARKLGIRLWIMLRDQIDYQEFCRRGQMRQKSGGARAGMPERVHSPARS

SEQ ID NO: 148913 - protein, 487 aa, unidentified
MMHGREKSDSAIVAGKPTNKAGQPAAEPVEPRVEAKGNASQQSTRRTQSRVSVSHALERIRQNRNEKRFAVTHPRWEKLWGGAAEVVAPSSSIRTDGGCPVPQVNDLSRSLAAFDPISTLVVIVEMSKTSWLVSGVVPGVERQPLKKLEPDATALLRLIERWRIEAVRAGRPIGRIALAYEAGRDGFWLARWLIARGIEAHVIHSASVAVSRERKRAKTDRLDAAMLMRVFLGWLRGERGHCGMVAIPTMEEEDARRPNRERESLVNERSRIVNRMRSALARLGIRGFKPHLRKAPERLAGLRTAEGTGLPANIIEEFRRDMARLALVREQISSIEKTRAERLERAPDTGPHAMVRLLARVIGIGIETADMLVREILSRNLRDRRALARYAGLTGSPDESGLKSREKGLAKAGNARVRRGLIQLAWRFLMFQKDSALARWYRTRTEGPSGARKTTMIVALARKLLIALWRLVTTGEVPDGVELRPAA

SEQ ID NO: 148914 - protein, 367 aa, unidentified
MQFIGIDLHTNRFTCCYREGNSPADGKRTETFELTAQGLAQFYTTLTKETYVLLEATITTFSFARLINPLVKEVIVANTYELKQISLGRNKTDKIDADKLCRILKMQVLSGEKTISEVTIPPAEIQELRGLFSTYRLLKKQTTQLKNRIHSLLKEKLYGFTQEQIFGKGSRKMLRQMQGDPTLGFQINHLFDLLENLEAGIHVLEDEIKEHAEPFIREIEILTSMKGVSVFIAIAIIADIITVERFKDSKTFTSYLRSAPRVESSNTTKGNKGTNKMGRKLSATFLTQILNHVLDASPKLNRWYQRLTQYKKAGSVRTGLRRRVFAEIYQMLKKGEYHYGRDPKNHEEKMEHYKKFLEKRKNILKSA

SEQ ID NO: 148915 - protein, 347 aa, unidentified
MNKSETFDPCGIEVSAEKLHVLWRRGSQQARCVFANDAAGHAALCEWLRTGSQTVRVCLESTGLYGLDVTLALSAQECVQVMVANPRAVRHFASALMRRSKTDPLDSEVLADFASRMPFRPWTAPSLAALQLHALARRIATLVQMQTAEKNRQHAAGLSPALPAAVRRDLARSVRAQQQAIVRLTGEARRVIASEERLAARYALLLTTPGIADASAVQILAELAVLSDDLQVRQWVAYGGLDPRQYTSGSSVQKKTRISKAGNSRLRRALYMPALVAAQHQPHLRAFYRRLLGRGKSKMQSLVAVMRKLLHAIFGMFRSGRPFDGAVLVPLAETETTPASLAEAPCR

SEQ ID NO: 148916 - protein, 454 aa, unidentified
MRKPQVIPDEDHEVVYERVAAVDVAKASGVACMRLPDPARPGRYANQIWDNVSATRAGITELGRELIRHQVQMVTLESTSDYWRIWYYVLESTGLAVQLVSASQAKNLKGRPKTDRLDAMWLARLTQRGMLRPSFVPPAAIRAVRDFTRARTDLVRERTRCLQRLEKLLEDAMVKITSVVSDGMKAKSAVAMVAALIAGERDPRKIADLAKGPLRGKRDALAEALDGMFDSHHGVIAQVLLDQVAFLDQRIARMEAGAIAALAQVKESWGVDATGDTGPHAGTSPDSPVLAAAYRLAEIPGISVWLAIVIIAEIGLNMAVFPTPAHLVSWIGLCRSAAQSGTRHGKGKQKKGNSYARAAAGQAAIGANGTATFLGERYRRIARRRGGAIAQVAVARSIMIIVWHLLSDPAARYRDLGPDWHDTHVNRDKKIRNHIRGLQALGLTITITADEQAA

SEQ ID NO: 148917 - protein, 402 aa, unidentified
MIFINCLGIDISKSESVVAHYKDEVLVKEMVIQNNQNGYRYLKNYIKHLDSLFILFESTGIYSRGMKRFCEIHKIDYLEMNPLEAKFKTSSLRSWKTDKSDAHKLALLAFRMKDSKVQRQSEEIYFELRERARFHLEMEINQNRLKVELVETLHQTFPGLEKLFTNRYSKIALNIAKAFPHPDFVSTLTHDELVEKVLHSTDKGISVNKAHKYVQKLIEIQINSFPNVDKSSFLLQKVQYLCDKLLIGIEEMKEFDQEMIDLAKNTTEFENIISIPGIGELTAALLIGELGNIREFKTNKQLNAFVGIDIKRYQSGTSKSRDTINKRGNKKARRLLYLIIMNIIRGRNHYQSHIVDYYYKLREQPHGKTHKTAVIASINRLLKTIHYLIVNNKLYDYQKAPH

SEQ ID NO: 148918 - protein, 354 aa, unidentified
MIVIGSDPHKRNFTFAAVEHATGELLGQREAAAQAEQFDRVLRWARELDEQRVWAIEDCRHVSGRLERFLLARGERIVRVSPKLMAGARKSTRQPGKSDAIDALAVARAVLREGVESLPCARLDERALEIRLLLDHHDDLVAARTKDQGRLRWHLHDLDCPIEVPVGGLDRRVWLQRLSRWLARQPQTARVRVARRLLSAIRAATRQITGLVGELGGLVAAYQPELLEQPGCGPLTAAKLIAEIAGAERFKTDAQLARTAGVAPIPASSGRKDRHRLDRGGNRQLNLALHRLAVNAGRHDAPTAAYLARKQAQGKTRMEALRCLKRHLARRIFHLMTTNTPTPGKTPTPALALT

SEQ ID NO: 148919 - protein, 360 aa, unidentified
MTTAEKRQIMFVGVDVHKDTHTAVGVSPFGETLFEMTVGNYEKDFKSLAKKVEQMKGGLSPYFGLEDCHGYGERLAQYLVLQYPVIHVPSILVDRERQNAPHPEKSDSLDAYGVAKVMLTASDTLLPHTVSEESKRAKQIKELSMDREYLVEERTRLKNHLHTILHQIWNTEYRTKFKDPFTLKALAYWIKAKPSCDPFLLRMMKRKAKRLVDLFHEINELEKEMRALLEKGKYTIQTASGCGVAVASTLVGEIGDISRFHSPASLAKYAGCAPRECSSGKTKRFKKTRSGNRRLNCAFHRMALSQISRSGSDKAKTYFKRKVSEGKSKSQALVCLRRQMVNIIWCMMKHKTVYDIHRND

SEQ ID NO: 148920 - protein, 388 aa, unidentified
MIYVGIDIAKLNHFAAAISSDGEILIEPFKFTNDADGFQLLVSKLESFDKNSIIIGLESTAHYGDNLVRFLINKAFKVCVLNPIQTSSMRKNNVRKTKTDKVDTFVNAKTLMMQDSLRFMTLDDLDYIELKELGRFRQKLVKQRTRLKIQLTSYVDQVFPELQYFFKSGLHQNSVYALLKEAPTPTAIASMHMTHLAHILEVASHGHFGKEKARELRVLAQKSVGVNDSSLSIQITHTIEQIELLDSQLFHTELEMANLVTCLHSVIMTIPGIGFINGGMILGEIGDIHHFSEPKKLLAFAGLDPSVHQSGNFQAQRTRMSKRGSRVLRYALINAAHNVVKNNATFKAYYDAKRAEGRTHYNALGHCAGKLVRVIWKMLTDEVEFNLE

SEQ ID NO: 148921 - protein, 368 aa, unidentified
MKNVTTYVGIDAHKKDLFIALLKGTEAAPLTWTVPNEPTAIRRLVRKLEREAPGPVQACYEAGPCGYALQRQLTTDRVACQVIAPALIPRKPGERVKTNARDARKLAELHRAGLLTEVRPPTPEAEAVRDLGRARDDAREDLQRARHRLGKLLLRRGLHHAGRNWTKTHRAWIESLTWTHVAERVVVDDYLLAIDHLEARLIELDARLGEVADAEPYRERVGWLRCFRGVDTLTAMLVLAELHDFRRFPSARALMAYLGLVPGEHSSGEKHRRGRITRAGNALVRRLLVEAAWHYQHRAGVGVALARRRKGQPSRVIAIADKAQQRLCRRFRRLSEQPKPASKVVVAVARELAGFLWAALQPVATATK

SEQ ID NO: 148922 - protein, 372 aa, unidentified
MGEHSEVFIGLDTSKLKISVALADGERNGEVRFYGDISSDPGSVSSLVAKLAKGGARLHFCYEAGPTGYDLHRQIVGLGHECVVVAPSLVPKRPGDRVKTNRRDAVSLARLHRAGELTAVWVPDEAHEAMRDLVRAREAASDALKRARQQLQSFLLRHSRIYTGRTPWTRAHMRWLACQTFAHPAHHIVLAEYCQAIEDAGVRLDRLTRQVAETAANWSMAPVVAAYQAMRGVAFMTAVTFVVEIGDVRRFDTPRQLMAYLGLVPSESSTGERVKRAGITKAGNMRARRVLVEGAWTYRFPARVSPTIQARLDGLPRTVREIAWKGQIRLCGRYRKLSMAGKLKTVVVTAIAREMAAFLWAIGQEVEPATQG

SEQ ID NO: 148923 - protein, 365 aa, unidentified
MSQDTTLFVGVDAHQETLSIATLRPDAGEPDPARTIANRPDRIRALFRRLLKQGPVVAVYEAGCLGFVLYRQLTELGVQCVVAAPSHLPKIPGDHRKTDRLDAQRLAIFLRAGQIVHVRPPSPRTEALRALTRTRQAIREDIVRARHRISKFTLLRGKVFRDAGNWSAKHFRWLRELELEVEDDRLTLDFLVDELEHRLGALALLDERIERRSQQEDVRDDVSTLVAFRGVKTLTALSVIAELGDPRRFRTGRQVAAYCGLVPSEHSSGAKIKRGGITRGGNGRLRRLLVEATQHYARPFPNRSAVHRRRATAPPRAQRIAQRADRRLKTRYRRLAVRKHTNVAKTAIARELIGFLWSAINPDHD

SEQ ID NO: 148924 - protein, 349 aa, unidentified
MIRNTPRGATVYGIDLGKNIFHVVGTDPAGNVVQRLKFRRDTLLIFFARANPALVGMEACPGSQWLARKLQAIGHSVRIIPAQFVKPYIKSNKTDTIDAAAIAEAVTRPTMRFVSIKQPEQVELQALHRIRDQMVASRTRLICQMRAFCLEYGVAIRQGAGLFKSDLPRVLANESNDLTPTMRRLLSELFDDLKRSEKRIAQVTREIEALDAKDEKARRLMTIPGIGPLGATAMLAAAGDGQQFKKARNMAAWLGLVPQQYSTGGKPQMLGISKRGNRYLRRLLIHGARSCMMHLDRSRDRLGTWLQQLQSRMHVNKVIVALAAKIARIAWVILTRPGAVYERRDPAFA

SEQ ID NO: 148925 - protein, 374 aa, unidentified
MSSNVCHQIIYLAIELSSSSWVIAYRVPRNDKAKLHRLEAGDGAGLLAFIAGLRHRLDPPDDASMLVVSCFEAGRDGFWLQRLLTAHGVINHVVEPTSILVTRGARRAKTDRLDAVGLLRVLAAKFAGDPGACRTVVVPSVEEEDAKRPHREREFLVQERVRIENRIAALLATQGVRERPSLRSWDADMRALRTGDGRPLPTHLVAELNRLRRRLSLTLEMIRELDAVREQALEAQHDSASRMVKALCTIRGIGVNFASVLTREVFYRTFDNRRQIASYLGLAPTPFQSGGMDRDRRINRAGNSRARKTLVQLAWLWLRYQPESSHAAWFRDRVGSLQGRIRRITIVALARKLLIAIWRFVTLGLAPEGAIIAA

SEQ ID NO: 148926 - protein, 407 aa, unidentified
MSYYIGCDWASTAHQFCAIDAQGQIAWQDSVPHTTDGLTALRRQLQRFGAAADVSVAIERPSGLLVDVLLEWGYRVVPIHPNALKASRPRYRMSGAKTDASDALILADLLRTDGHRFRPMQGPADETRALRALVRTRDDLVATRVGLANQLRALLESFWPGAAQIFADVDSPIALAFLERYPTPESAAHLGEKRLAAFLGRNSYTGRRSAPELLDRLRRAPTVTTGEAAAEASGDAVRAVVGVLGPLVAHIQKLTNAIAQAMQVHPDGAIIMSFPRAGCTNAAQILAELGQERLRFQSAEHLAAEAGVVPVTLESGKHRGVTFRWACNKRLRQAITMFADNSRRASPWAAQIYQRALARGCDHPHAVRILARAWLRVMWRCWQSSTPYECGKHRATLHLNPAEPVGA

SEQ ID NO: 148927 - protein, 363 aa, unidentified
MTDGICFAGLDVHARKTAAAAVQLGSGEVFRAQLAGSPAAAIEWLRSLPGPVRAVYEAGPTGFGLARAGRAAGIEVMVCSPGAIPRQPGDRIKTDTRDALKLARLHAAGQLRPVVVPAVELEALRDLVRAREDLRGDLMSARHRISKLLLRHGHVFNEPGETWSTRHLRWLSQIGFEAPLVETVFGEYLAHHEVLLARRERLDGLIVEQSGHGSWAPIVARLRCLRGVDTLTAVGLVAEIGDVAAFEHPKQLTSYLGLVPSEQSSGTRRRQGAITKAGSSHARRLLIEAAWHYRRPPRVSLTLKRRQTGQPPAAIDAAWRAQNRLHRRWAHLDAARGKKRTTVAVAVARELACFVWEIANQPD

SEQ ID NO: 148928 - protein, 449 aa, unidentified
MMEPQEIEDGEYEQILERVAAVDVAKASGMVCTRVPREDQPGKRRTRVWQVDAATSAILELADHLVGEGIEKVTLESTSDYWRIWFYLLESAGLSVQLVRAQDVKQAPGRPKSDKLDAVWLAKLTERGMLRPSFVPPVEIRQLRDYTRLRTDLTRERTRHYCRLEKLLEDALIKVSAVASKLDTLSVRDMLEALIGGERDPQVLAGLARGRMRAKHDRLVQALTGKFDDHHAELAQMLLDQVDALSAQIGKLTTRIEELIAAIPAAQGVDADGTTGPTAGLGARAPVLPAVDRLDEVTGIGREAAQAIVAEVGLHMSVFPTPAHLVSWAKISPRTVQSGARSRAGRTGKGNPYLKGILGEAAAAAGKTDTFLGERYRRLARRRGKLKALVAVARSILVIVWHLLADRTTRYHDLGAGYYTSRIDKNRKTRNHIRQLEALGYTVTLTQAA

SEQ ID NO: 148929 - protein, 371 aa, unidentified
MVWTAPDGINCARLRSVADLRHRRPSVEQIIRIGMDTSKHVFQLHGVNAAEVPILRKKLRRKEMVAFFEKLAPTVIAIEACGASHHWARLLQSFGHTVKLIPAQLVKPYVKRGKNDAADAEALCEAMSRPTMRFVPVKTSDQQAALMLVGVRDRLIRNRTQLANTIRGHAAEFGLTAAKGMAHLVPLLDRIQADESLPALARELFALQAKEYLQMQAQIKEIDGKLTAWHRADECSQRLAKIPGVGPIGAVLLRMKTPDPELFRSGRQFAAWIGLTPQDHSTAGKTRLGVITRAGDEGLRSVLVVGATAVIKQAQRSGKASPWLAALLKRKSPKLVAVALANKMARIAWKMMVTGETYMANSAPAVVANVA

SEQ ID NO: 148930 - protein, 322 aa, unidentified
MVKAVLGVDIAKRKFDVALLMNDKLKHKVFANTQEGFAELSAWLKKQGVDHVHACLEASSIYGVGLATFLYDAGQNVSVVNPARIKGFARSELLRTKNDKVDAGLIARFCATMHPESWVPLAPEIRTLQALVRRVDALLVMRTQELNRVEATHETVASSVQEHIVYLDQEIKKLKKQIADHIKQHPGLRTKRDLLGSIPGIGETTIATILAELALFEKCDRVQKVVAYIGLAPREFTSGSSIKGKPRLCKVGNARMRKALYMPSLVAMQCNPVIISFSRRLTERGKNGKVIVCAVMRKLVHIIVGVLKSGRPFDPNIALRIA

SEQ ID NO: 148931 - protein, 353 aa, unidentified
MKKVDFTGQDIYVGMDIGKKSWKVCILTQELEHGLISQPPRTEVLVHYLRKNFPGAKYHCTYEAGYSGYWIYEELKKEGIECLIVNPADVPTTHKEKTRKTDRVDARKLARELRNKELIGIYVPEHSTLEDRSLVRSRHSLVKKQTRCKNQIKGLLNFYGVKIPEELASSHWSRRYIGWLEQLIMGRPSVTHVVRTLLEELKYLRQMIAEVTKEIRKMSKQEEYNKNARNMVTIPGISMLSAMIFLTELERIDRFERLDELASYVGLVPGEHTSGEKKVITGITSRRNPFLRGLIIECSWVAAQKDPALTLAFNQLSKRMLRNQAIIRIARKLLNRIRYVLIHQEPYVPGVVS

SEQ ID NO: 148932 - protein, 467 aa, unidentified
MEKHQQERNKTTEFRTMHPHAGGVDVGASSHFVAVPPGSDAEGRRVREFEAFTCGLRSIAQWLRACGVETVVMESTGVYWIALFELLEAEGFEVLLVDARHVKNVPGRKSDVRDCQWLQELHSYGLLAGAFRAPEQICVLRSYLRQRGMLVQHAGQHIQHMQKALTQMNLKLQQVVGDISGVTGMKIIRAILGGARDPQKLAQLRDARCKHTAAEIAKSLAGSYRAEHLFALRQAVDLYDTYQRKITECDVQLEAHLKTLDPQDGQIPPAETPAHRKAQGNAPQFDLRSSLCRILGVDLTEVDGLDAYTVAKVIAEIGTDMSAWPTIKHFISWLGLCPANKISGGKVLSSRTKPCANKAATALRIAAQTLYRSHSALGAFLRRMKTRLGPQAAITATAHKLARIIYSLLRKGGKYQDSGEAAYEERYRDRMLKSLQRKAKQLGYKLVSMAVETAPTATAASALVAGG

SEQ ID NO: 148933 - protein, 394 aa, unidentified
MEVMVETCCGIDVHQKSIVCCILDGPLDTNRPKKIEKTFGTRTYELRQARNWLNDHHVSDVFMESTGQYWLPIFNIFSDAPFRMILANPQHIKNVPGRKTDTKDAEWIAQLGRCGLIQASYIPDHDVMELRLMTRRRQSYMQKRTQAKNELHNILQRSNIKLTGYLSDIFSKTGQALLQLFIDGEKLSIDRVKACMHKHVKASAEDILTAMDGKISGVNRRLLEDSLEEYRFYSRKIKQMEDDIEGYILDHFPEEYGLLMEIPGVKKQSAAVILGEIGPHVEAFKTAGHLASWAGVSPGSNESAGKKKSSHTTQGNKYLKTVLFSSGGMAGRSKDPAFSSLYYRICARGSKMKAVVACGHKLLRIIYKILAEGVHYDREKALGLRQQSKDLISI

SEQ ID NO: 148934 - protein, 366 aa, unidentified
MLIYVPPERTVLAMDVHKNSISVAVLEPGSRSPVVDKVGSDDESVRRLIGRFADRGRVWACYEAGPTGYELARTLRGAGLRCEVIAPSLIPTRPGDRVKTDRRDAGRLAVLFRAGQLSSVRVPMPAEEAVRDLCRARADMVIDRTRARHRLGKFLLRHGRVWRDGENWTLKHHVWIRAQRFDEAALTATFGHYQATLTAREAAVDAIDADIHQWHSRAPFADPVARLSAYRGITELGALTLASEVCDWRRFPTAAMFMGFCGLVPSESSSGERTHRGGITHAGNTHLRTQLVESAWAYKARPAAGAVLKKRQVGLDPAVVARAWAAQLRLCGKFGRLDARKTNRKIVVTAIARELAGFAWAEMTAA

SEQ ID NO: 148935 - protein, 450 aa, unidentified
MGNASGVSRGDCNRNARLARLRSLVPVTNAIVGIDLADAKQMVVVTDHDSKVLARKTFRCRAWDLGAALGWAAERAAAKGLSGVTVACEPTGHRWRVLGQLAADRSMPFVCVQPMLSSWARRSEDLTSDKTDEKDAVLIARLTAQLRCYVPEPVDETWGRLRHLGARREQVIVEMVSQIQQMRALLECVWPAALDTAKQPFRSKTWVAAMSAICERDGGDLDRTRRLGPARFEQAVRREILKRGGQKPSLRIARRLFAALTDPTGVIAHRPGALERVAFLLVDWHTAGDKLTDTEARMISVLGELKLTALATSIPGLSPVGAAAILAETGDPNRFASGRALVKHAGLAPREKLSGTFVGRTKLTGAGRPGLRLAAWRAVWGTQRGNTVYAARYRHLTSREQNKLTATQAQTVIAAAILRQLHAVITTGQAWDPDIATHGTGHRKQMPIAA

SEQ ID NO: 148936 - protein, 343 aa, unidentified
MHISSIGIDLGKTTFHLVALDEHSKVVIRKKFSRKQLLTYTANLQSSLIGVEACSGAHFIGARLRDQGHQVRLIPAQFVKPFVKSNKNDFIDAEAIAEAVTRQNMRFVPIKTDDQLDLQALHRVRDRLVHRRTAVINQIRGFLLERGITFAKGPANLRNRMPDIVEDADANLTPRMRTLLDRLWQEWKQLESGIETANYEIEQIASQDEACQRLRQIPGVGPLVSTATVAAIGNGAAFRKGREFAAWLGLVPRQYSTGGKARLYGISKRGNNYLRRMFIHGARAVLMRVKYDTAGLGQWVHQLEARTTRNKVIVALANKLARIAWAVLFKGEAYRHAAVCAQA

SEQ ID NO: 148937 - protein, 331 aa, unidentified
MFPVGIDVSKNTLDLCILYDGIKGRIKTRNIQNNRHSVENILRWLRLQHCGPEDVHVVMEATGVYHERLATELHDAGFRVSLANPHRSREFARGMGIMTKTDKVDAYMLACYAFLKKPHYWEPPAPEIRYLGALLRRRDVLLGDALREEKRLEKYLSTDTPADIISSCRRMAQLLREEVSNIERQIKAHIKASPALRRDYTLLNSIKSVGPQLGMHMLVVLRSHNFASAEQAAAFLGVVPIEKRSGTSVRSRPRMSKIGPPQLRAKLYMSALCGKIYNKRMRNIYDEMCLRGKPKMVAIGALMRKLVHWCYGVLKTGTVFNDEGLKQVLTT

SEQ ID NO: 148938 - protein, 456 aa, unidentified
MAKRKEKAVHRSALLEPNAAGIDIGAQEIYVAVPPDRDEHATRRFTSFTCDLQALADWLQGCRIRTVAMESTGVYWIPLYQILEQRGFEVYLVNAHYLKSVPGRKSDVSDCQWIQYLHSVGLLRASFRPPDAICAVRSLWRHRSSLLQMASEHTLHMQKALSQMNLQIHHVLSDITGVSGLAILDAVLAGERDPVHLAQLCHAFVKSPREIVAKALVGDYRPEHLFTLKQSLDGYRFYKKLITELDEETARLMQAVPSAGKQLAPMPTRTKHTVYQRNGNDPSFDLRSELYRIAGVDLTDVPGVSAITAQVILTEIGPDVSRFRNASAFASWLGLCPEKRVSGGKVLSCKTRKVKSRAALALRMGANSLCRAKGYFGEFFRRLRAKLGTAQAITATAHKIARILYHVLLSKQPYTESIFHLCDEQAQFRAEKRLRKQAALLGFQVVPIPAVPELVP

SEQ ID NO: 148939 - protein, 374 aa, unidentified
MHVAVGQPTQEVKETPMNSVGLDVHKTRCVACVKTQEGRILEEFAFQNNPHGHEELITHLKAYPETQVAIESTGNLWIPIYNRLEDEHIHITLTNPKKTRLIAEAKIKTDKLDARILADLLRANLLSASYVPPPEIREQRSIIRERARLTQLRTIIKNRIHTLLDKHAYKSPFTDLFGKHGLEWLAKLELPAGDRILLEVNLEQLNSLNHSIHRLTETIAVSAVDNPEVKLLMGFTGIDYYSAMFLINEIGPVARFSSPKKLVSYAGLAPSTHQSGNHTTHGSITKEGNSHIRWILIEAAHQAARHDPRLSQFYLRIMKRRGHNRALVAVARKMLVTIYHVLNHHSQYRGLRPELFENKIRRLERITNSSLQTA

SEQ ID NO: 148940 - protein, 358 aa, unidentified
MRTIVVEEDQIFVGVDTHKWQHVAVAVDGLGRRLAEVTIPVTSAGYKDMLDWARAIGPHRTFGIEGTGSYGSGLARFLRRAGESIVEVSRPPRKGERRLSGKSDPIDAEHAARAVLSGKATAIPKVGEGAIETIRLVKIARDGAVRIQTQTMLTLKSVLVTAPDELREQLEQLSDFKLVTACAAFPGVFDGNDSVAAVRHLLQVLGQRWLQLHREVLGHTTVLKELTAATAPDLVAAFGIGPDIAAEMLVTAGSNTSRVRSEAAFAKLCGACPVPASSGTVQRHRLNRGGNRQANAALYRAVVVRMRWHEPTQVYMQRRIAEGLSKREVIRCLKRFVAREVFRLLPTPSTARSSQKAA

SEQ ID NO: 148941 - protein, 457 aa, unidentified
MSKKAKPQAQGNFQLAIINSHTAAIDVGSMLMTVAYTDKNNQQYLMETNGFTESLEELVVTLKEAGVTHVAMEATGVYWMALYELLEKAGLKVTLVNPKHFKNVDAQKTDVKDSQWLHQLHAHGLLRSSHVAPELYRELRSYVHERNNYQAQKSDILNRIHKALSQMNIKVQHIISDIEGVSGMKLLRGIAEGITDPEELLSLVTTNLKASRDELLKSLKGVYKNQYVVILRSHLKAYDFLKRQMKEYELFIEDVLKQMLPPVQENKPVQILPKTTHVRKNQYSINLSAYLREIAGVDLTKIDGLEEISILEIISVTGIDMSKWKTADHFTSWLNLSPRPKITGGKVVGFDKRITKNNASQALRTAAQSLWNSKSSLGKLYRRIAAQKGSAKAIKAIARKLAVILYNMLKNKTEFDPVKVHPDTEMEQKRKLSYLAKEAAKHGYLTISDYTDPPISE

SEQ ID NO: 148942 - protein, 423 aa, unidentified
MFKRGADMTEQQRWYAGVDWASENHHVLITDGDGSKIGEKIFRHGGEGLAGMAVWLMATSGAADASQIQIAIEVPHGPVVETLIERGFKVHAINPKQMDRFRDRFTLAGAKDDSRDAETMASALRTDPRCCRLLAVGDPIVIELREWSRIAEDLGAERNRLTNRMREQLWRYFPAILELDGDLGAEWLMELWEAAPTPAKATRVREATIAKLLKRNRIRRFDAPHVLAVLRQPQVTVAPGTTQAASAHIATLVARIRLLNGQLKQAHERLDSLTSRLAHNEEAGSGQKQQHDVEILASLPGVGRIVLATLLAEGFDALQRRDYAALRSLTGVAPVTKRSGKSLIVIRRQACHQRLSNAMYHWARVAVQHDRISRAKYAALRSRGHSHGRALRSVADRLLNVACAMLKAGTTFNPSLADQKTSC

SEQ ID NO: 148943 - protein, 433 aa, unidentified
MEEVTDEPLYRDRVCGIDIGKAGLVATIRVPSDRDPARRAQETRSFGTTRKEVLALADWLRCWQVPAVVMEATGDYWKGPFYRLEAEGFECVLADARQVKNLPGRPKRDPADSRWLAACFERGAVTACFVATPEFRVIRLHTRYRRDLTAERTRDKQRAEKLLESAAIKLSCVVTDLHGVTGRDIMEHLIAGQRDPRALAQLARARARRKIAQLEEALEGAEFFTDDHAALLKTMLARIDRVNEEIGRLTEVIERLLAPYEEQLQQAESMPGWARRAAQDAVAETGVDMSRFRTGGHLVSWGSRAPLDHQSGKRKGQARAKKGNRYLGGLLGETAVAAGRTQTREGARYRRLARKRGKAKACVAVGNTQLKVYHKLLSNPGMRYQDLGPDYYERRRDIRRQIAHHVGKLGDLGFEVTLCRIPGPEPDGTSQAA

SEQ ID NO: 148944 - protein, 400 aa, unidentified
MRAVFGIDVSKTSSEVAILVNGEKVHSYTILNDAIGFNRLLGDLKTVHNPEIIFEATGVYSRRLQAFLEEYSYAYTRLNPLEAKKQLDSLRVRKTDKIDAEKLAKSQLVHNRKPTYVQEEVYQHLRDFSRFYQNMTEDLVRTKNRLHKVLQVTFPELENLLSTPTGEQYWNLVMAFPCKEFVLSLSQSNLCEVIRQSTSKRISKKRIAYLTDKLIKLAKQSFCAVKKTSPMLEEVRYYAQELLRLSERRQVVLNDMVALAQPLPEYDILRSIPGIAETTATSIIGELGDIRRFQSTNQINAFIGIDLKHYESGNFLAKEHITKRGNPYARKILFKCIHNIASASHTNPCHIADFYEKRKRQSTIASTKPHTIASIHRLIRTMYYLITHNKLYDYSLTQNR

SEQ ID NO: 148945 - protein, 389 aa, unidentified
MKYVGVDLHKKTISACVVVKERGKKKVIARKRLECKDEAGIKSWFSELGKFEVVVEATASYEWFVKLVEPLAHRVVLAHPKKLRIIAESKRKSDKLDAQVLAEFLASDEIPLAYRPGPRVREHRRLVRWRNFIQRRITSVKNKLRHILAAYNADVPHLFTAEGRAHLATVQLSAADRFVSDQLMVELEQHQERLVTANRRLREFAASAPLAEREARAILDSIPQVGAITADVILAELGDWRRFSSQAEVASYAGLVPGFRESAGKSKQLGITKEGSSLLRWVMIEFAWRMVGTSRKWGGHYHRLEARVGAKKAIVAIARRLLGMVFALLRTGQKYALALETPPPASCRSKSPRDTNPSDPACLRGQPRQARSLGAGAYYGGPLSVPEKE

SEQ ID NO: 148946 - protein, 395 aa, unidentified
MEVGMDRVWVGIDAGKEVHWAHVLDASGEKLLSRKVENDEADLAKLIDEALSFADEVVWAIDQPGGGATLLLGLLWEREQRVLYIPGLTVERSRDTYPGESKTDARDAHVIADQARMRPDLEELTAGEGELAELQILLARRRDLVTDQTRTINPLRDALLSSFPALERALDLNNRGALTLVSHYQVPAQIRRAGRKRIATYLRNRGVKGADALSGQALTAAKAQSVTLPAEDVTARIVAELAAEVLSLKESLKTLDEELEKRFFARKEARVLTSLPGVGVILGAEFLVRGGDLSAFESADKLAAYAGLVPAAHDSGKRVGNDRRMRGGNKALKYVFYQSAFASLRSSPESRAFYERKRAEGKRHTQALIALARRRVNVLWAMLRDGTTFEARFVA

SEQ ID NO: 148947 - protein, 351 aa, unidentified
MSRTSTVRAVTTIGIDMGKNTLHMIGLDTRGGIVLREKVSRGRIILRLANLPPCLIGIEAGMATHYVARELAALGHDVKQVPPAYAKPFRQGHKNDFRDAHSVAEAVQRPTTRFVPAKTDEQLDLQALHRVRSRLVSERTAVINQIRGFLLERGIIVRQGLRFLRQALPDILAKRTDVLSPRMVRIVADLASDWRQLDERIEPVTDEIETLAKSDDGCRRVMTVPGIGPIISSAMVAAIGNGAAFARGRDFSAWIGLVPKQMSTGDRTILGRITKRGNRYLRTLFVQAARVILLRPASWPKHSFGVWLARAAQRLHRNVLAAALANKLARIAWTVLAQERSYEARIMKAAA

SEQ ID NO: 148948 - protein, 362 aa, unidentified
MSNSTTWVGMDVHKENIVTVSISGDSGAVMTRWETPNTAKGKERLAGRIAGLGKARCVYEAGPCGYDLRRFLDKKGIPCDVIAPSLIPTRPGDRIKTDRRDAEKLARMHRMGELTAIRVPTPAQEALRDLVRAREDANEDLVRCRHRLQKFLLRQGRRFEGKSWTREHWRWVRALTFDDANAGTVLAEYVLAVDQQLERVARLDARIEEEAQNPGIAPTVARLKTLRGVRTLTAMTIHSELVDLSRFASPRDLMSFIGLVPSEYSSGGKQRRGSLTRAGNAHLRRVLVEAAWHYRHPPHRTGETIRKRREGHPPDVIETARKAEVRLYRKFTRMVMRGKRTTVAAVAVARELAGFVWAIGRI

SEQ ID NO: 148949 - protein, 368 aa, unidentified
MSDIIRIGVDTSKSVFQLHGVDAAEQPVLRKKLRRRDLLAFFERLPATEVGMEACGGTYYWARELTAQGHEVKLMPPQHVKPYVRRGKNDRNDADAICEAMSRPRMSFVAIKTADQQAAQMLMTTRERLVAYRTQLINTIRGHAAEFGLTAAKGPAHVEPLLLRVAEDGKVPELAKELFAMHGQELSRLKIELREIEAKLKAWHRQNEMSRRLAEVDAIGPIGGCLLAIKAPDPQAFRCGRDFAAWMGLTPKDHSTAGKVRLGVITRAGDEALRRTLVVGATSVIKQVSQGKGNPSPWLRDLVARKPPKLAAVALANKVARIAWKLMADGERYDAARAGIVSPAARVAPCSRRQGRCAPPAAVACGQP

SEQ ID NO: 148950 - protein, 445 aa, unidentified
MEIVNPNAAGIDVGSRSHFVAIGQGKDDVKEFGVYNEDLQAIIAWLLANEIKTVAMESTGTYWQSLFTALQNAGLHVILCNGKFTKNIKGKKSDVQDCQWIQKLHTIGLLTGSFLPDEATEQLRTYCRHRANLLDQAADTTRKMQKYLRLLNLRLDIVVKDITGLTGLKIIGATCNGEVNPEKLASLRNGNCKRSEEEIAKALQSNGRKDYLFALKHEYCMYRDIQSRIKECDIEIEKMLTEQINNNDDKHQHFIDKKVHKRVNKNSPKNIDINLMAYQYFEGVDLLAIEGVSHSTVLTLMSEVGLEGLKKFGVGKQFASWVRLAPNNKVSGGKVLSNKIPKGSNRLKIALRNAANAIGNLKDTPLSNFFKRINFRKGRVSAISATARKLAVIIWNMVIKKQPYNNEHGYEFLDQKRKRKVQEMRKLIHKFDIKTDELGLHISGL

SEQ ID NO: 148951 - protein, 373 aa, unidentified
MQKGTCEWLYAAIHHKGGNTMEEKYVGIDIHRDYGVACVQDIKGKIVDEFRFGNDIEGINKVKDKLGGNNTHIAIESTGNMWIVFWDELEENESDLHLVHPLKTKAIASNKLKNDKLDAKMLAKLLRGDMLVCSYVPPRDVRDERETVRLRASLVRMRTQVINKIRSIFHKYCIRYKGSLYQKAGMEFLNTLELRPVDKSAIKSYLETLKTLNAEIESVNSQIADKDCEDVRLLMSIPGIDYYSAVLIHSEIGDISRFPSHNKLASWAGLIPSMHQSGTSFYTGKITKEGSKRLRWILVQCAHISVRSNPKINEFYSKIAKRRGDNKAVVAVARKLVKIIYAVLSSRNPSLYGDKIKTEKKIKRMKKIAEKTT

SEQ ID NO: 148952 - protein, 345 aa, unidentified
MNILKQTVGIDVAYKSFDARFGTTNTQQLITLSSSKSFKNSPAGFKLFLQWLKKYILSNDIPLVFVMEATGVYYEQLAHFLHSHGYQVAVILPNKIRNYAKSLESKSKTDPIDAATITRFGLERKLSLWTPPSDTLKTLRDLCREYHCLKANCTQIKNQLHALKSSFKPHRESFKRKTQLLKFLERQVALIKKELLALVKTEPDLAQRLKNIKTAKGLGYITILTVLSETRCFQLVTNQKQLASYAGFDIVFNDSGLKKGKTSISKKGNTFIRKALFMPALSACRANPHMKELYKRLVAKGKNKKLAIIAVARKLLLLIYTLWKSNSVYIPDYKPLHCAAQSLSS

SEQ ID NO: 148953 - protein, 350 aa, unidentified
MLIGVDYHPSFQTIAFLIEETGEYEERELNHSDGQAEKFYRDLKQRGICVRVGMEATGHSRWFERLLAELGFELWIGDPAEIKAKRVKKQKFDREDARLLLRLLRENNFPQIWVPDAENRDLRQLLWHRHRLVQMRTRIMNQLHALAMNEGFCWKKKLFSEKGRAQLEKLALAPWAGRRRQGLLELLDRMNPTIEELTAAVEREARKRPEAMRLMTHPGVGPLTALAYVLIIGTPTRFQRGKQIGTYVGMIPCEESSGGKQRLGHISKQGNSLLRFLLVEAAQAAARVNPHWRRRYMHLAMRRHKSIAKVAMGRRLAVRLYWMWRNGCEYSPSLEFGSYAGQLGLGNGVK

SEQ ID NO: 148954 - protein, 408 aa, unidentified
MPDLNLPAWPVFAGIDWGGENHQLCVVAPDGKRLLETRVSHDVAGLHQLDLHLNGFGRQVPIAIERSEGLLVEHLQATGHAVFPVSPRISARARERYKVAAVKDDRFDAFVLADTLRFDHAHWRPLSVPSPLLAEIKALTRDRDRLLETQQATESQLRMILEAYHPAPVRLFSSVDRQITLSFVTDYPTPANASRVKTTRMAGFLSRHHYTGRVPAQTLADRMRQNLLSGSPGTVAGKSFSALAFTQVLQLLNTQLAEYDDAIAAATAEHPDALIFASFPGIGPVLTAVLLAEIGEDRARFPQPEVLLAEAGLAPVTRSSGRSRSVRFRYAANSRLREATMWWAFNSIKMSPWAAAAFRDARDQKGQRYHRALRGLAARWTRILWRCWTNHETYDPARHGSAALITAA

SEQ ID NO: 148955 - protein, 431 aa, unidentified
MTTSSVPMESEILAYVGLDWADQQHVICCQAAGSTSVETAVVQQRPEELQAWVAQLQQRFPQGLVAIALEQSRGAVIAALMHYDFLRLYPINPKSLARYREAFFSSGAKDDPNDAALLLDLLVKHRDRFSPWVPDDPLSRQLALRVEHRRQLVNLQTELTHKLSSHLKLYFPQALDWIGELDSLQACDFLQRWPTLEAVQKARPAQLKKFYNQHHCRRPQLIEQRIEQIGQARALTQDTALVEASYRMVLALVAQLRPLISTLVQWQQEISQLFAQHPDATLFASFPGAGPVFAPRLEAAFGSRRDRFSSAQEILQFSGVAPVTQKSGKSHQVHRRWARPKFVHQSFVEFAAFSIPRCDWARALYQQLRARGQRHWAAIRVIAYKWIRILFRCWKDRVPYDEPKYLKSLERRNPRLWAAIQQLALEKPEVA

SEQ ID NO: 148956 - protein, 397 aa, unidentified
MSECYVGIDVSKDASTAQGIDEKGKKLFYVEFTMEAEGFSKLLGALRAHCKDLSMLKAAMESTGCYHTNLLCFLATEGIPCFVINPLVIANFAKLSLRKTKTDKKDAMVIAQFLLVHKDALVKAEPSQSLQDLKDLARERESLTVLMSGLKNDIKRMLQITFPELESLCNVFSESMRDIIKQFPSARLVRIADFVVVKKALTPSDARRTSPFYPEDFIKAAKESVATDSIAKELILPEKYATLEHLMKQRERITEALVEACQAMMIKDIEIITSIGGISDTTASAFLAEVGDYKAFSSYKHLIAFAGLDPSIHQSGKFEGRSKISKRGNRHLRHLSYLMTTCVVRLDNIFREYYLRRRAEGLPYKKAILATAHKLLRVIFTMLTNRTTFQLKEVISK

SEQ ID NO: 148957 - protein, 367 aa, unidentified
MKKVSTVAVKQSRKTSEQKLTVGLDLGDRSSWYCVLDESGAVVLEQRLSTTPKAIGEVFGGMPRSRIALETGMHSPWVSRLLSKLGHEVMVAHARNVRLIGESRRKDDRLDAQTLARLARIDPQLLCPVKHRSARAQADLTVIRARAGLVRARTALVNTARGLAKSYGERLRGCNAGNMNPEKAEGLSPELQAALKPLLAGIESLSEQIRESNERIERLAEEGYPQVALLKQVKGVGTLIALTFLLTLEDPHRFAKSRDVGCYLGLQPGRRNSGQSEPQMHISKEGDPYLRTLLVQGAHHILGPFGADCDLRRWGLKLAERGGRNGKKRAIVATARKLAVLLHHLWVSGEVYEPLHNNQRRAMETAA

SEQ ID NO: 148958 - protein, 339 aa, unidentified
MQVTTIGLDLAKNVFQVHGITQNDEVAFNRPLRRAQLLPFFSRIEPCLIGMEACSSAHHWARELTKFGHDVRLIPPIYVKPYVKRGKSDAIDAEAICEAVTRPTMRFVAIKTVEQQSLLSVHRARSLLVRQRTQLINGLRGMVAEFGVYIARGLARIIDFAENILAGEVLDLPDIANEVIHNLCEHLMALHARLRWYEGRLKQVAKEDARVRLLRTIPGVGAVTASAIIASIGDGHQFSNGREFAAWLGLTPANKSSGGKEKLGRITKMGDQYLRSLLVVGMTSLVRQTKSHPERASKWLTSLLERKPARVATVAMANKTARIVWAVLTRNEPYTPHTT

SEQ ID NO: 148959 - protein, 341 aa, unidentified
MSIITIGIDLAKNVFAVYGIDDNGKPVLVRPKVPRVELLSLIAQISPCLIGMEACSGAHHWARLFRQHGHTVKLIAPKFVSPYRMSGRRGKNDAADAAAICEAVTRPAMRFVPVKEAHQQIILTLHRTRQGFVEERTALYNRLRGLISEFGIVLPQKVACLRREIGAHLEDLPGYANCCVGDLLAHADRLDALIADYDRTIAQAAREDAASRRLMQLPGIGPTTASALVASLGGGHEFANGRQVAAWIGLVPGQYSSGGKSRLGRITKAGDHYLRSLLVMGARAILAGLGTKQDRFSRWARSLVERRGYWRAVVAIAAKNARLAWAVLKYGEDFRLHAAAA

SEQ ID NO: 148960 - protein, 415 aa, unidentified
MKTHSQLSHFGGLDWAKQHHQVCILDGQGQIVEQLRFEHSGPGWTQFREAIRKYPALGLAIETSQGAVVEQLMNSGVTVWPVHPKAAKSYRQRQAPSGTKDDALDSWSLADALRTDGQGWRPLGEQDPLIAELRLLCRDEEALIAQRTALVNQLQAALQEYYPAALEAFEDWTQPYTWAFIERFATPGQLVAAKPHRWRAFLHQHRLWQPELAERRLEIFGRADRFCGGEALTRAKSRLALSLVQLLQALERQLDGYRAAIEKLFAGHPDHDLFGSLPGVGPKLGPRLLGSLGEDRGQYPDAQGLQCVAGSAPVSFVSGQMRRVKVRWHCDRFFRHTVHLWADCSRKTCAWAAAYYQAKRAQGMSHACALRCLAQRWLKILWKMWQTRRPYDPEYHARNQQKHGSWVLQLHPKNA

SEQ ID NO: 148961 - protein, 319 aa, unidentified
MEKVTHGRIIGIDVSRDWLDIHCLPDGQRHRIPNSDDGHVAVSVLAHDQRAVVCFEATGGQEWRLWFHLEDAGVETRQVPPAQVKAFARSLGTRAKTDRIDAELIARFLVFRPEAGRTLPAEHLRLLRALTTRRAQVVEMRKRLLAQIRAHRKSGTAELFEDIDVELKERLDVVIAELESRISELLGRDRHLADTARILRSVPGIGPVASSTLIAELPELGAITGEQAAALTGLAPVAQDSGTLRGKRAIAGGRRALRHVLFQAALVASNHNPTLKAFADRLRKAGKPHKVIVTAVARKLVIIANALCKKRRKWEPRHP

SEQ ID NO: 148962 - protein, 388 aa, unidentified
MYRIIKIGMDVHSTNYTLCAMEPTIGAEDRVFGEVQVAPDYKAVICFIESLKMKLGLNNEYSIECGYEAGCLGYTLYHQLTGAGIKCVILAPTTMLTQQGQRIKTDKRDAHLIAQCLCYGGYHPVYIPTGEDDAVKEYLRMRDDHKLALKKLKQQIHAFVLRHGYSYTGTKWTVKHVTWLKKVELDPMYRETLNEYLASYEEQEAKIQRYDQRIEEIAAEARYQENVKKLGCFLGIRTHTALSLIVETGDFKRFAKGNTYAAFLGLAPGEHSSSKNVNRLGISKAGNTHLRCLLIEAAKSICKGAIGHKSKELRSRQSGQPAEVIAYADKGNTRLRSKYYKMIRHGKKTNVAVTAVARELACFVWGMMTGNISIASRTDPSISSVSQG

SEQ ID NO: 148963 - protein, 385 aa, unidentified
MTATTRRFDPTALANTLCISFELGEGSWRLSFTSGFGEKIVRSGVRSRDLEGVVREIESAKGRLGLAPGCRVVSCYEAGRDGFWLHRFLTSYGVENLVVDSSSIEVSRRRRRAKTDRLDGESLLDLLLRHLAGSRKKVWSVVRVPTVEQEDRRHLHRELASAKRDRTRVTNRMKGLLANQGLTLDLKKNVPGQLQALRQWDGTPLPAGLRARLAREWERVQFYAGLIERLEAERRELLREANDPVIDKVRQLNSLRGIGVNSAWLYGMELFGWRELRNRREVGAIVGLAPTPHESGQQERERGMSKAGNRHVRAMAIEIAWGWLRFQPRSELSKWYQRRFGTGSKRVRKIGIVALARKLMVELWRYLETGVLPAGAELKTDVRIR

SEQ ID NO: 148964 - protein, 448 aa, unidentified
MSERTIACEAPSIRMTTDSAAVRATKGEIMKPWIEITHYAGFDWARDHHDVVIVDRQGQIVADLRFEHSLEGWQQFRDQVKPYPALAVALETSQGAAVDQLLQQDCNVYPVNPLSAKSYRERKVPSGNKTDRLDAWSLAEALRLDGQQWKALQPLDPLTQQLQLLCRDEISLIEQRTALINQLQQALVEYYPAALQAFDDWTQPFCWDFVVQFPTPEKLAAAGRRRWEKFLHTQKLWRPETAAKRLEIFQNARQFCGSAAVTSAKSLLALSLAKLLKALQLQLDQYRQQIEALFKQHPDHDLFGSLPGAAQTLAPRLLGEIGGDLHRFEDTQVLQCIAGTAPVSFQSGQIHRVRVRYQCNKILRHTIHLWAQCCVRVCPWAEVYYKQKRAEGKSHACALRCLGQRLLKILWKMIQTRQPYDADLHARHQKQHGSWVLALMKPNAKPAQ

SEQ ID NO: 148965 - protein, 350 aa, unidentified
MIIIGADFHPEFEQIAFVDTETGELQERRLQHRDEAERFYRELAAQGAQVRVGMEASGHASWLERLLAELQFELWIGNAAEIRRQQVRKQKTDRQDAQLLLKLLLQDRFPRIWMPSWENRDLRQLLWHRHRMVQARTRIMNQLQAVALNEGLRCKKRLWRKHGREQLQAIRLAPWAGRRRRDLLELLDRLTPTIAELTLAIEREAEKRPEVQRLMTHPGVGALTALAFVLIIGTPERFHCGKQVTSYLGLVPLEKSSGSRRRLGHITKQGSSMLRFLLVEAAQVTVRSDPGWRSKYFHLMMRRGRKTAKVAMARTLAVHLYWMWRKQWDYEQLHEFGSHAGQPGYRHGVK

SEQ ID NO: 148966 - protein, 411 aa, unidentified
MDVVVARCAGLDVHKDTVVACVRTPGPDGQPTEQVRTFGTTTAELLGLRDWLVAEGVRLVGMESTGVYWRCVYYVLEDALACWLLNARHLRNVPGRKTDVADAAWICQLVEHGLVRPSFVPPKPIRELRNLTRYRKAQVEERTREAQRLDKVLQDAGVKLSSVAGDILGKSGRDMLAALAAGTRDPEVLAELARGKLRRKLPALRQALAGRFGAHHALLVGQILAKLDFLDEAIAQLSAEVDRVIAPYQQQVALLDTIPGVDRRTAQALIAELGVDMARFGSAARLASWAGMCPGQHESAGKQRSGRTRKGPKWLGAHLTEAAKAAGRTKDTYLAAQYQRLRGRRGAAKATKAVGHSILVAAYHILDRGVPYRDLGADWFVRRRPEAQARKLVSQLNTLGYQVTLNPIQAA

SEQ ID NO: 148967 - protein, 334 aa, unidentified
METLYFLGIDISKKKFDAALTIDGKQFHEAQIENTPAAIQLFFRDLKKQLSSLNRLTVCLEHTGIYCLPLLNFLVKHKIRVSVEPALQIKQSQGMTRGKNDQVDAKRIALYALKNRENLRFWQPQRHCIQRLKALLVLRERMVKMKVQLEVPLHESREFVATSIFKQTLANCQKTIRALQSDIKGIEKEIDTLVSNDEQISQQCRIATSVPGVGKITALNMIISTQEFSRIQDAKKFACYAGVAPFEHSSGSSIRGKTRVSKMANMTLKKLLHLAAMSAIQCNDELRIFYKRKVDSGKNKMSVMNAVRNKLISRIFACIKDKRMYQKIYQHALV

SEQ ID NO: 148968 - protein, 326 aa, unidentified
MIFLGIDVSKKKLGAKLLVDPAQVKFKSKSVANAAQGVVELLAWAIRQGGCAVNEVQAVMEATGVYHELAATALFDAGVRVSVVNPAQIKEFARGLAVKSKTDGIDSAVLARYGALVNPAPWQPEPREVRELKALLSRLDAIEADLRRELNRQEKTEHTAVPAEVLESLANSVRFLREEQARLQQRIKDHLDGHPTLRQDRALLETIPAIGDKTAFRMLALLRSRAFTSATQAAAYVGLVPVEHQSGSSVCKRPRLSKAGNARIRAALYMAAVVATRYNPDIRAQYQRLLAAGKSKMSALGAAMRKLVHICFGVLKHQTPYVAQCS

SEQ ID NO: 148969 - protein, 320 aa, unidentified
MKTSDNVSVTVGIDVSKLHLDLHVSSGLYDSFRNDGSGFSDIKKLLSKFTVSLILLESTGGYENGIVCYLQRLGYDVVVINPRFVRDFARSLGRLAKTDKVDAELLSQFATVINSRGDRARFVRPLTDETRRHLADMVSRRRQLVDLITVERQRKSVSSQYASESIDAVISYLRSQLERVDADISAHVSLYYSDLSDLLTSFKGVGSATVGVLLGEVPELGKLNRRQVSALIGVAPFNRDSGQMRGRRRISGGRSLVRNSLYMPTLSAIRFNPVIRDFYERLLKSGKSRKVAQVACMRRMVCILNAMLRDGSRFEPVMGN

SEQ ID NO: 148970 - protein, 417 aa, unidentified
MAMKIVRFNCCGMDVHKNLVVATIGITDRKTNVTEYFQRSFSTLNSDLYRLKDWLRSHHCSDVCMESTGKYWIPIFNILEDEINVRLTHPKYVKAIKGKKTDKKDSKWICDLFKHDLIKFSFIPPREIRELREIARYRYKLVCMRSSERNRYQNCMTVSNVGLASVVSDPFGKTASNIMKEVMKSNVIDDNKILKLVHKNCKNKDKILDSLHGYRIESDQRFKMEKSLDHMEYLDQLIDSCEVELIKRAYPFRRSFQHITQIKGISVLSAILIISEIGIDMSQFGSDKQLVSWAGLSPANNESAGKKKSVRISKAGQYLKPLLVQCALSAIKDKTSYFGRKYSNIKKRRGHKKAIIAIARMMLVSIYHMILTGEEFQPCDYESFMDPKPNANPSLTVEKALNFLKQSGIDISSILVN

SEQ ID NO: 148971 - protein, 352 aa, unidentified
MGERWSPHHPQLTRTVARNSRFRIYKAEKLGNLIMTNITYEFNIGIDVSKQKLDVSFNDKETAIFANTSQGFKQFLKSIKNKSNTRVVMEATGGYERPLAHFIQDQGMAVSVVNPKRVRDFAKALGKLAKTDEIDSHVIRLFAESIDPRIMEQKNELQQLLDSLTHRRGQLIKQRAKEKQHLETATSKEVSNSINRNIKFLDKEIERIENKIKTLINSNQQLKNKVERLETIKGVGSIVALTLMADLPELGTLSNKEISALVGVAPFCRDSGTMTGKRTIWGGRAQVRSILFMAAMSARNHNPPIKAFYERLISKGKPKKTALTACMRKLLITANSMIRNNEDWCPDHGKLA

SEQ ID NO: 148972 - protein, 475 aa, unidentified
MNIKGTKKKNQVVTANIFEQQELLKKAEVIKENLTASTWRELETNGKFDKNKKLSFISDDMLILGCDVGSETHYVRAIDTRGRELSKSAYSFNNDYEGFQSAKEWAVKIAAEHDKSQIVLGLEPTGHYWFCLATWMIANGISVVQVNPYAVKQTKEVEDNSQLKDDRKDPKLIANLVKDGNFGMPYLPEKIYAELRRLSMFRDQLNEDRIRTINRMHREMKIYFPEYKEALGKVDGAFSLELLKEAPFPDELTALGEEGIRQIWHAAKLRGRGYSRAREILQYAKASVGIKDGSIASKAAVKWFVQKIMELDVELAVIENQINQKCQEIPHTGNVLEISGIGENTLSGILAEMGDISRFDDVKEIQKLSGLGLVACSSGKHKGETKISHRGRKRLRYWLFQAAKSAVAHAEEFKELHMYYTTRADNPLKKMQSLIVIACKLLRIIYTILNTGTFYDPKKMLMDIRRPEKKEAIVA

SEQ ID NO: 148973 - protein, 343 aa, unidentified
MKAVTTIGLDIAKSVFQIHGVDAAGNVIVRRQLKRRYVLPFFQKLPPCLIGIEACASSHHWSRELKALGHTVRLMPAAYVKPYVKRQKNDAADAEAICEAVTRANMQFVATKTLEQQSCLMLHRTRHLFIRQQTAVINAIRAHLAEFGIVAPVGRNGVEHLLNIVADFSDKRLPDVARACVTALGAQLRMLKAQILEFDRQIMAWHRSNEASKRLDDIPGVGPALATALVASVADPKAFRSGRHFSAWIGLVPKQYSSGGKDKLGSISKQGDRYLRSLFTVGALAVIRYAKIHGTKHRPWLTALLARRPTKIAAIALANKIARMAWAMMAKDDRYKEPVALAA

SEQ ID NO: 148974 - protein, 343 aa, unidentified
MTEVITIGLDLAKNVFQIHGVDGLGEVAIRRQLRRSQMIPFFEKLPPCLIGVEACPTSHYWSRELQELGHEVRIMPAGYVKPYVKRNKNDAADAEAICEAVTRPTMRFVAVKTAEQQSLMMLHRTRSLLVRQRTMLVNAIRSHLAEFGIVAPIGLRGVKRLVAIVSDPTDERLPSLARACLESLIAALTTVEWEASCNKRRILAWHRSSEASRRLETIPGIGPVIATALVASVSDPLIFKSGRELAAWIGLVPKQNSTGGKERMGRISKQGDKYLRWLLVAGAMSVIRHGRKTNFEKNPWLADLVHRKPTKVVAVALANKIARTAWAVLVTGETYRQPAPVEA

SEQ ID NO: 148975 - protein, 430 aa, unidentified
MDYNAQNKKIEAITERTLVIGIDVGSETHYARAFDHRGIEYSKKPFKFINDEDGFASFYTWISEYKEQHEKDKVVPGMEPTGHYWFNLGKFLQDNGMEPVLVNPHHVKKSKELDDNSQTKNDRKDPKVIAGLVREGRYMIPYLPEGVYADLRTASNMRFQIQSELTRILNRISRWFNIYFPEYKAVYGNVDSSSGMLVLKQAPLPEDILTLGVDGINKIWRDAKMRAVGIKRAKTLVEAAEHSVGSKEGAVAARMEIRMLFEDYESRNKRLQEVMDLINELVSQIPMAEKLLEIKGVGIKTVSGFLAEVGDISRFSNPKELQKLAGLALVENSSGKHKGETTISRRGRKRLRYLLFEVAMSLVSKNSEFAELHRYYTTRKINPLKKMQSLMVVAAKLIRVFFVILTKGVDYDPMKMITDIKRPEAYLQAA

SEQ ID NO: 148976 - protein, 354 aa, unidentified
MSQEKYIGMDVHQATISVAVMDAHGKLIMECLLETKAATIVEFIQGLHGSLSLTFEEGTSAAWLHDLLKPHVNRLVVCDPRKAALLKDGNKSDRIDARKLAEMLRTNQLKPVYHGEHGIRTLKELGRSYLTITKDVTRSMNRIKALYRSWAIPCAGATVYAPRHRAEWLAKITEPGVRIRAERLYQQLDLLQPVRLQARRELLVESHKHCAVKLLRQIPSVGPIRSALLVALLQTPHRFRSKRQLWAYSGFAVETHDSGEYRCVRGKLQRNRERITVRGLNDNHNKDLKNLFKSAAISASTCPGPLQDFYVALVAKGIRPTMARLTLARKIAAITLTMWKKGVSFDPKQLHRQA

SEQ ID NO: 148977 - protein, 317 aa, unidentified
MPGRIFNQERNMDQIIIGVDTHKSCHIAVAINTQGKRIGTMTIPTTRQGYRSLEAWATGFGPVKAFGIEGTGSYGAGLSRDLQTKGHTVLDVIRPNRQLRYLHGKSDILDAESAAKSVLNGQATALAKTQSGASEMIRHIKIARDSAVKSKSQAMITLKTLIINAPAELRASLDQIRGPITLVRHISALRPGEITSPTASAKAALRALAQRWLALHEEIQIHEAELERLVADKAPKLMKSHGISTLTVAEMLILVGDNPERIRSEAALAKLCGICPIPASSGKTTRMRLNRGGNRQANAAIYRVAIVRMRDDDRTKA

SEQ ID NO: 148978 - protein, 388 aa, unidentified
MNKIIYIGMDVHSTNFTLCSFEPGYGFEADKIFGQTQIKEDIFNSTVKYINKLKSMRPDVDVVCGYEAGCLGYNLHRKLKAKEIESVILAPTTMAVSRNCSKKKNDYRDAITIAKCLASSAYKAVYIPDDKDEDIRDFIRMRDDHKTALKQIKQQLNAFCLRHGHHYDKTKWTGLHLNWLRKLELSKVKRETVEEYLATYEALTSKIAALDVRIEDIASEERYAEKVNKLKCIKGIKTHTALSFVCEIGDFNRFKSADKFAGFIGLVPGECSSGNTERMLGITKAGNRHLRRLVVEISNTYRRGTVGRKSAALKERQKDMPKDVVAYADKATNRCQRKYQRMVFKGKNSNQAVAAVARELCCFIWGMMTGHHSRTAQAEASVYRSELD

SEQ ID NO: 148979 - protein, 321 aa, unidentified
MVYIGIDISKSSFVAAYPSMNGYRTKTYPNTSTGVRKFIATLSVVEHHCVMEATGNYGFLLLYLLHQSGIAVSLVNPKQIKHFARMMMAVTKTDEKDACMIAMYGEKMNPPIYKMPSQAIILLKQKKTVIRQLRKQLVASKNLRESLVVLPYRDKACVRALNKTIDFLTKQIEQLEAELAEIASAEFDKQLKTLTSIKGIGITLATSLILTTGGFTYFDNAKQLSRFIGICPTYQQSGTSVNIKGHINRNGDENLRSLLYVASWSALRSNAACRECYLRLKVNGKPSKVALIAVANKLVRQAFAIATTDSTYIDGFVSIKK

SEQ ID NO: 148980 - protein, 339 aa, unidentified
MNCTAVGVDIAKTVFQVHYIDPETGEIVNKAVKRAKFLQHFANRASCLIGMEACGGAHHWARQLRKMGHEVRLMPAEFVKAFNIRNKNDAADARAIWLAVQQPGKPVAVKTEMQQAMLALHRMREQLVKFRTMQINALRGLLTEYGEVMSKGRAALNREIPAVLGRIAERLPAALVDTLREQWNGLTKLDEQIAGIERRMREWVKEDRAVKAISEIPGVGLLSATAAVAMMGDAKAFTSGREFAAWAGLVPKQTGSGGKVNLLGISKRGDTYLRTLLIHGARSVLTHAKEPSPWIEQICKRRPYNVVVTALANKMARTIWAVLAHDRPYQREFVSAKPA

SEQ ID NO: 148981 - protein, 538 aa, unidentified
MAPYIPGRKNSSRKAKTPRPYLLHKPRGLISQRVQAVGPEHFGVVCVDCAKGSSKYFLADFYGHMRIEPTVVHHTRGDLQAALDRLREARTQHEFRDLVVAIERTGEYHRPVQRAYRQAGYDVRLVHPFATKQFRQPADPGNKTDDNDLNAIFRVVINGFGLIDPVWPDDYQRLQLLRRHRRDLVCKTVELQCQIREKLHAAMPGYAEAFSKDHFWDNGTGMFVARRTGSAQAIRALGADGLERLLAEAKIRFLKNSVHKVLAWAHDAPPAHPDNACLLNIVAALDDDRLEKTRQIRAVERDLASLVVRTPYVLLLAIPGINIVSTADLAGELGPIVHYADANHLTGRAGLVPCRYQSDTVDVQGPLRRCGNRKLRAVLMQTADNLVRHNDYYRARAGRWQALGKDPRWIRVKIAKCFSRLLFAMLTSGQLFRHPCCQDRHYILGKLLEFHTEHATPTAQLQEDMLAACQRLPKNVLADEAKPLTEQLNQLARKRGPQPLTDLITIVLARLRLRQLQSETVRSEDPSAHAQTEEPTSP

SEQ ID NO: 148982 - protein, 402 aa, unidentified
MTYDYVIGMDACKYFHHACVLDIDGTQVLSKRINQNEQSLRALFSAFSAYDHKVLVVVDQPNNIGRLTVAVAQDIGIDVRYLPGLAMRQLSRIHAGNAKTDIRDAYIIAHAAKNLPESLRNVDRVEEAFLQLKVLNGIDEDLARSYTRLINQIRSALVGCYPQFEQALRGQIIHRKWVLHLLARYGGPTKIKRLGKAKAAAFARRYKARNPEPVLDAIFAAISEQTVTIAGAHYAEMGVAMSAKDALLKLEHRQQIEKEVIELINDIPHTQFLLSMPGIGPKTAAQILMTAGDMSDFPSAGHLASYAGLSPRTNQSGTSIMSNSLNRAGNKKLKNALWQSSFASIRSHERSRQFYERKRREGKRHNAAVVALARRRLNVLYAMMRNHEHYHDPAPSQEDLAA

SEQ ID NO: 148983 - protein, 505 aa, unidentified
MKTNTSKSQASIYRNQNALLAALFERARDPRKVLCVALDFAKAKHVALCCDGNGDILRSPFPVHNTKEGVDFLIEQVSSTASRRKIQKCNIFFGGEDEPSYVANFTAALRARNYLVLRVNAAEAADNRESYNATTDELDLLGIAKTLLSRRAFATGPANPGRGKTTQSKPAEPDVYFELREITRARRSQVRNQTATSNRIHAMVDQLFPGFLNPAKSGITPFCKASLALMHERFSAPEIAHRRHGTLAAFLARHGVREADEAAAKIISLAKEALPPAHDRVAALQRTLTAEVELRECLERNAQAHRQHAAILLVSTPYSMLTSISGIGFTLASGIAAELGDPTRLRGLDSLCAYAGIVPDTFQSGGPDKPASQGSTRARCNHILKDWTVQSAQKIHLYGPPELKDRITRWNLNGQHGIFAGARRYLRLVRCLVLNQVPYMDPMARSPMASEQERADAADQIWAGLLNKWRTIPEGTKLIAEKSCPLGFWRQLTLETRSIKLSERS

SEQ ID NO: 148984 - protein, 408 aa, unidentified
MKRYYVGVDWADREHQLYVGDEEGGKVAEMKVQETPEGMAQLGRWLDEKRAQGIELWAAIEKPHGRIVDFLLDHGVTVYPVNPKALDRVRDRYRMSQSKSDPFDARVLSEFLRTDHVHLRPLRPNSEQAQELKLLTRDQHRLVRHNTRLLNQLKVTLKEYYPRPLEVFGGLESQIAQDFLKQYPTPQALSELSRKKWNRFAQQQHHLGKARCDELWEKLNKPQLVVPQHVVRAKAQLVDVLLDQLKPSLRAVKTYSERVERFFASTPAAELTQTLPGGKSGTLVPTIWAELGDAQGRWESFQHLQAEAGVVPVTRSSGKSHVLQFRFACNKHLRHAAYLFAFAALNRSEWANRYYRDQRAKGHSHPQALRAVGAKWLKIIFVMWRDHKPYDENYHLANVARQRMRQAA

SEQ ID NO: 148985 - protein, 406 aa, unidentified
MEVVYRCCCGIDVHKKIIVACLIKGGKQELREFGTTTSEIKILANWLSEEECEMIAMESTGVYWKPLYNLFELLNLNAMVVNASHMKALPGRKTDVKDAEWIADLLRHGLLKASFIPDREQRELREIARYRKSLIEERAREISRLQKILEGANIKLDSVVKDINGKSARKLLDLIIADRAPDADEVSQLIHGRLLPKLDQIMLSIDGITTPLQRKLIAQIVDHIDDMTKRIADMDDLIKGYMEQYEAAIAAVSELPGIGRRSAEVIISEIGMDMSRFPSAAHLCSWAGVCPGNHQSAGKRQHGKTTKGNKTLRSILTQCAKAARNCKDTFFSAQYQRIAARRGKNRATIAVAHSMLIAIYHVLKNGVAFHDLGAEYYNSFNREHKIKSHLKRLYALGWSAESPLPA

SEQ ID NO: 148986 - protein, 370 aa, unidentified
MSIKRILVNTIDTDLEYEVIGIDLAKNCVSAILLTTDGEIFGIDRLDYQELEKSAQELSPTIFAMEPCTEMNYMVQKLEDWGHHCIVISGKNVKDYVESHFSNQKTDLNDAQALAFLTKDTQLRTVKAKDPEQLKYASLTTLREQYVKQYRQTMVSLKGICQVWGLSISKGISGKARLKDMIENHAAFPAELRTALVGMVAHAQAVQKDLKSVTKILEELAKKDKACQLIQTVPGLGTICSCRLRATVGDIQRFKHPKDFPAYYGLVPRSMATGHNEKKGKITHLGDKTMRSLMVQGAGIVINQATKGNLHSKQLTKWILKKQKEKMPWGKLVCAVAAKLLRIVRAILISGKPYNPKIAGVAKCSLPKAS

SEQ ID NO: 148987 - protein, 459 aa, unidentified
MTRKASRPSRSKKDALQVVHPHAAAIDIGSRFHVVAIPPDHDELPVRTFNTFTGDLCLLADWLGEKQITTVAMESTGVYWIPVYELLEERGFDVILVNARDTKNVPGRKTDINDAQWLQRLHAYGLLRGSFRPAQELASLRATLRQRERLLAYAAAHIQHMQKALMEMNLQLHHVVTDITGVTGMRILRAIVSGQHDPVILAEYRDPRCKASEETIRQALSGHYREEHLLALCQSLALYDSYHEHVAVCDQIIEATLKRLSLTTPVPDKPLPAARHRDANPNAPAFDVRASLFAVIGADLTQIHGLGPYLVLKLVGECGTDMQRWPTVKHFTSWLALSPGSKISGGKVLSSRTRRTKNRAAALLRLAATTVGRTQTALGAFYRRLASRIGKAKAVTATARKIAVLFYNALRHGMTYQDPGATYYEERYRQRILTNVKRRAQSLGYQLTPLLTEGEYRVS

SEQ ID NO: 148988 - protein, 412 aa, unidentified
MKDLLEISCGLDVHKEKIVACILTGPLGKPTRSEIREFSTLIPDMIALRNWIVSKNCHHVAMESTGIYWMPIYEILEDAFSGDITLLVVNARHMKNVPGKKTDMRDSEWISTLLRAGLLNGSFIPEKRIREFRDLNRYRKSVIRDITSQKNRIEKFLQSSGFRLSSFISDIFGASGRNIILHLIEHGQIDKTALDSCLKTKTRNRIDEILMSVNGTLSEHQKAFLRILMTHYDSLKKHLAEIETSLEEDMAPFALQVEQLNSIYGISTTASCAIIAEIGIDMKPFKTAEHICSWAGLCPGNNESAGKRKSTSVTKGNPYIKSMLCEIAWVIAGKRNTYLSAWYWRIKQKKGAKKAIVALARKLLVIIYTMLKQGSLFDESCFETRRKHCEQKQLSRYIRELEKHGYHVEAQS

SEQ ID NO: 148989 - protein, 322 aa, unidentified
MSAPVLGIDIAKQRIEVALFVEGKIKNRSFKNAQDGFKALSRWLRKMGIEQVHVCMEATGNYGEDLAIYLHEADHTVSVVNPARIKGFAQSELIRTKTDKVDAGIIARFCLVMKPESWTPPSLEIRTLRALVRRGNNLTVMLSQEKNRLGTAHESVILLIKDHIDYLDSEIKKVRDQIYDLIDISPTLKQKKDLLASIPGIGKVTIPVILAELDNLEKFKYVGELVAFIGLAPKETLSGTSIKGKPRLCKTGNTRLRKALYMPALVSIRYNPLMITFYNRLKEKGKNGKVIVCAVMRKLVHIIFGILKSGKKYDLNYKPAFA

SEQ ID NO: 148990 - protein, 438 aa, unidentified
MSNKVIFNLDELFISVGIDVGADFSWMSIALPNQQFVGKPYKILHNSIDSLATAVSKIKEAEELFSLESRIFLESTGIYHYPLFCYLRDKGFNCSVINPIITKNSTNINIRKVHNDRFDSKKAALVGLKPNLKVSLMPSDLALNCRNLCREYYDLMDNRSAYVNKLQGELRMAFPQYLGIFSKVTINTSLTLLGTYTSPSAFLEADKQEIIDIIKSTARFGLTYAQNKYNAIIQAATDANQFGYIIDSNIKRIRLYISFIRKFDEEINSILESLHELVDANKDTDFVKQIHLIETFKGAGFLSAVSIMGEIGDFSAFSKPKQLFAYFGLDPAVKQSGKFEGTKVQMSKRGSAIARRVIHTLTLQSISISRNGEAKNSVLREYYIKKCDSKPKLVAMGAVSHKVCNMIFAILRDNKPFKIIAPQEHIKQYNATKCDIAA

SEQ ID NO: 148991 - protein, 334 aa, unidentified
MEQITTVGIDLAKRVFALHGVDTAGRVVLRRTVRREQLVELIAGLSPCLIGMEAGSGAHQWARRFQALGHTVRLMAAKFVSPYRRNGKNDGNDAEAICEAVSRPGMRFVPVKSVEQQALLTLHRVRQGFIAERTATINRIRGLLAEFGVALPLRSVTVRRQALQAAESLPELARRAIEDLCSHLRDLDSRILAYDRELEQQARRSESAQRLMKIRGIGPLSALAIVATVGNARDFRSGRQFAAWLGLTPRQHSSGGKSRLGAITKHGDRYLRTLFILGARSVLHTAARHSDRMSRWVMSLEQRRGYQRTLVAIASKNARIAWPLLSKNQELRPA

SEQ ID NO: 148992 - protein, 362 aa, unidentified
MSKSITIIAFDQHAATTVAAVLLPGQRTPALHMLTSDVPTILRFVERVRRAGVVQCCYEAGPCGFDLQRGLTTHHIPCDVIAPSLIPRRPGDRVKTDRRDAAQLAVLYRAGALTAIHIPTEQEEAARDLLRCREDIRADLLRARHRLSHFLLRHGRRFTGTKKAWTKRHAAWLQAQRWPLPALEQTHRAYVRAVDEAVGRLHAVDTELRDLLTLDPLRARVERLRCFRGIDDLTALTIAAELGDARRFPTAPSLMAFTGLIPSEHSSGAKQARGPITKTGNAHLRRVLVEAAWQYRHHAFLGPSLQQRQRGAPPAAIDIAWRAQHRLHRRYRSLSARGKPKQHIVTAVARELTGFLWAALTQ

SEQ ID NO: 148993 - protein, 376 aa, unidentified
MRWGTEVIGPLGADGSRSSCGVLPPTLSPGTAAQVTHDRTVARLPIAPTRQVTVTRIICGVDICSASLQARIGRNGAAGSFANNPEGIAALAAFCRTHQVELVAMEATGGYEQQPFALLSEQGLAVTILNPRAVRRFAEGMGVLEKTDALDAGLIAWFAEVKRSQPQSLSSTSQQQLRALVTRLRQLTQIRTAQRNQLRLVSSPAVLASFTELLALVARQIHELEAAIAELIAQDPLWQHLDQVFRSIKGVADRTVARLMAEMPEIGMLSNKTISKLAGVAPLARDSGKHQGKRAVRGGRASVREILFIVASVVGRHEPDFIAFQQRLSAAGKPRKVIRIALAHKLLIRLNAKAREVRQQFAAPQLERLGPVVVTH

SEQ ID NO: 148994 - protein, 476 aa, unidentified
MSKGSGTTRGDRRRNARRERMRGLLPRDGVVIGIDLAEDKQAVAVTGHDVRVLAGKTVRVKAFRLGDALAWAVGQARAKGFAAVAVACEPTGPRWLQVQRLCAERGLPLVCVQPLVSHLARQQQDYTTHKTDEADCVMIARLAIELHCYIPEELDEAWAQLRHLGRRRAQLITAATASVQRVRDFLSVAWPVAAEACAHPFESVTWLEAMQVVTSRCGGQPEKLAAVGPAEFTALVRQAVAGWGGQRPAGPVCRAVFAALASTEGVVVSHRRGLLRRCADELGDLQRTRAQLRAVEADMAAVLGELGLSRLADIPGLTAVGAAAILAETGDPRRYDSSSSLVKHAGLSPSGNASGAFEGQAHISRRGRPGLRLTVWRAIWPLLIHNPVMAAKYAAMITAADAAAAQAVPAPPGTGSPQASAAAAARARRAKARVACAASLLRWIYSMVVHGTGWDPDVASGAASCQHAPRYQAEAA

SEQ ID NO: 148995 - protein, 415 aa, unidentified
MGGRQQWYAGVDWGSQSHHVVLTDGDGRKIGERSFKHGGEGLAEMAAWLMAASCAAEPGQILAAIEVPHGPVVETMIERGFKVHAINPKQMDRFRDRFTMAGAKDDSRDAEVMASALRTDPRCFRSLAAADPIIVELREWSRIAEDLGVERNRLINRLREQLWRYFPALLELEDDLGAEWLLELWEAAPTPNTASRLREATIAKLLKRHRIRRFDAASVVNTLRRPPVRVAAGTVEAASAHVALLVPRIRLLNRQIKDAHSRIDGLTARLMPAEAAEPGQKKQHDAEILASLPGVGRTVLATLLAEASDALQRRDYAALRSLAGVAPVTKRSGKSCVVVRRQACHDRLANAVYHWARVAVQHDPRSRAKYAELRSRGHSHGRALRSVADRLLNVACAMLKSGAAFNPSSAAQKPA

SEQ ID NO: 148996 - protein, 349 aa, unidentified
MTEQRISYAGERVYVGVDVHKETYTVTCVCHKQIVKTATVSAEPASLAASLLRWFPGATLASAYEAGFSAFVLHRALPQVGITNIVVNPASIAVAANAKVKTDRRDSKRLAIDLADGRLRGIYVPTEAEALARLLPRTRAQIVEHRATIARQIKAKLHQCGLIAPSSRRLISSRYLREIATWPLPPELGVSLTLLAEQWRFATHQLVEMRRQLRDQAKAQDEIEKVYRSVPGIGAVVARTFATELGDMTRFANERALFSYTGLTPSEYSSGTSVRRGSISRQGSSRVRHLLVETAWRAMPRDAVLQEIFDRIAATRGKKRAIVAIARRLTGRIRACFRQGATYAVGTYA

SEQ ID NO: 148997 - protein, 481 aa, unidentified
MKIYDSAGWKPSSGYTRITCQDVYSLIEMDTYQVAWASSELCSRSARKGKSMTSKLFISVGIDVGADFSFMSLALPSQTFIGKPFKIVHANLNSLEKAAFTIKEAEELHSMKARIVMESTGIYHYPLYCYLRDKGFDVIVINPIISKNSTNMNIRKVHSDRFDSKKLTLIGLKPDLKTSVIPSDDVLNLRNLVREYYYLMDCRSAYVNKLRGVLKVSFPQYINVFSKVTVQTSLTLLEKYSSPADFLSVKKKSIIDVIRKTARFGKDYAEEKYQAIVEAANSAGVFGHFVPSNSTQIRLCVSFIRKYDEEIAGVLATMHKLVDENADKAFVQHICFIETIPGAGFLSAVTVICEIGDFFVFKSPKQLFAYFGLDPSVNQSGNFTGTKNKMSKRGSSIARRAIFTIALVGIGLTRKGVANNPVLREYYLKKCQSKHKMVALGAVMHKVCNIIFAVLRDNKPFVLITQEQHIQNYKTPTVDAA

SEQ ID NO: 148998 - protein, 350 aa, unidentified
MTTIAEPRPVVTGGVDTHLDMHVAAVVTVVGGVLGTAEFPTTAAGYRRLLAWMRTFGELGQVGVEGTGTYGVSLARHLRSEQVKVVEVMRPNRQVRRRHGKTDVVDAIAAARAVLSGEANAIPKTHDGPVEALRTLKVLQRSATKARTQALNQLRALLVTAPDELRARLRDLTQRELLKTCAGFRVAAEDDSLAAITRFALRELGQRVLYLNDQLAQVRLRLQRITEQVAPALTALKGVGPDVASTLLLAAGDNPERLTNERSFASLCGVSPVQASSGKTRRHRLNRGGDRQANAALWRITLVRLNCDPRTKDYLAKRVTDGKSKTEAIRCLKRYIAREVFAALPIPAAA

SEQ ID NO: 148999 - protein, 403 aa, unidentified
MVKYHVGVDVGKERHHVAVLDISQGSYRRSFSFTNDHDGFSEFVSAMEKLSSEKSEFLIGVEACAYALNVSYFLLATGFSLVEVNPFRAGQFRKAQGRKAKTDRIDARTIAAILALGDHKTLSIPDPILDNLRELTRFRVDLVNERSSMIIHLQEALSVVFPEYEKVFRTLDSAGSLALLTTYPGPEHVIAAGEEAVGKTLSLASPRRMSRGMARRIIEAAKHTVGVVQKQPALGVKISILAKRIADLQGTTRDLDRQITALYNTLPQRPCGFPVGRAPSLATIVAEIGDIRRYPTLKKFLSHLGWCPQSFQTGNYRMEHPRMSHAGNKYVRRIIWMLSIFAVQHVPRYREYFQRRVNEGKGKMHIIVAVGRKLLSAFYAMLKNGTAYDPNWEENRRLAPARL

SEQ ID NO: 149000 - protein, 344 aa, unidentified
MNICTVGLDLAKNVFQVHGIDGTGKVIVRRSLRRRQVMPFFGKLEPCLVGMEACGTSHFWARELRALGHEVKLMPPIYVTPYVKRGKTDAGDAAAICEAVTRPTMRFVAIKSAEQQSILALHRTRALLVRQRTQLINMIRAQLAEFGFVLATGIQHALKLVDQLVEGVTPDIPALACKIVISLAEQIRALQARIGTLEKDMKVWFRGNDLAKRLQTIPGIGVLTASALAASVTDPHQFTSGRQFAASLGLTPKADCSGAKERMGRISKMGDRYLRRLLVSGITSQLQAVRRKPEAHPWVTRLLASKPNKLVAVAMANKAARIAWVVMTRGEVYHANHSVTEVTE

SEQ ID NO: 149001 - protein, 355 aa, unidentified
MEYGAIDLHKHESQVRIVTVGGEIVDRRIATTRDRLTAIFGGRPHMRILVEASTESEWVAQHLEGLGHEVIVADTNYMPMYGHRSRQVKTDRRDVAALTEACRLGIYRPAHRRSAARCELQWRLTVREQIVRSRTRSITLLRTAARTAGMRVRTGGAETFLGRLEQVALPPAIHEATAPLRDTIEMLNDQLVKADEYLSKLPDSDPVVRRLMTLPGIGPVTAVAFIAALDDVARFRGPGQVSSYLGLVPREYSSGEQQRRGGVVRAAHPRVQALLVQAAWRVWRSTHADTRALREWARAIGHRRGRRVAIVALARRLARVLFAMWRDGRDFEPARIRRHQTRATSAETAPEAVTA

SEQ ID NO: 149002 - protein, 417 aa, unidentified
MQYAPVKLADQPANGLTCGIDWARDDHAVTVIDSGARVVYRGVVEHSAKGLKDLIAVLTRTGVEEVAIERPDGPVVEALLDAGLTVVVVNPNQIKNLRSRYGSAGNKDDRFDAFVLADTLRTDRARLRPLIPDSNATTALRALCRARKDLVIHRVRVANQLRAHLNRVYPGPVGLFDALDSQISLTFLTRFDCQDRADWLTPKRLGTWLASVGYKGHTDPAVLHARLCARPRGFTGIDGAAYVGITTALVKTLTNLVSQIAELSTQIRQQFAAHADACIFTSLPRSGTVRAARLLAEIGDCRGRFPTPDALACLAGVAPSTRQSGKVRSVGFRWACDRQLRDAVCDFANDSRHANSWAADLYNRARSRGHDHPHATRVLARAWVHIIWCCWQTNTPYDPARHRALQTLLAQQTTAST

SEQ ID NO: 149003 - protein, 337 aa, unidentified
MTTLTLGLDIAKNVFQVHGVDGQCKLRLQRKLRRGEVLRFFARLEPCLIGIEACHSSHYWGRELSKLGHQVRLIPTQYVKPFVLGGKNDANDAAAVCAALRRADIHSVAIKSAEQQSVQSLHRMRERLIHERTAKSNQIRSMFAEEGFVFATSIGKLRSSVASLVGNPNATVTPLLRRLGAMYLEQIATLERWLAELTTQLRDIFSQREDCQLLASVPGIGPVVATALVGTVGDPRQFKNGRQFAAWVGLTPRQRSSGGKVRLGRISKRGDTYLRTMLVQGARAVMRFMGRRADRQALWLQRLVQRRHQNVAVIALANKIARIAWAVLARRIAYSPA

SEQ ID NO: 149004 - protein, 328 aa, unidentified
MAKEKFDVSFFDLTSKKVSNQPSHKVVKNNFKSIGRFLETLPSDAVLVAEHTGVYGDTLLKCCMDSNVKIAFVGGYVIHRYRATPDRAKTDVLDCALLREFGERYPDKLKFRKFPEEALYELRQLARHREMLVEQRKQLMTADKSEDCRPIRSLAVKRSMDRIKEMLDTEIAETEKEMLKVINGHDSIHHNYELVKSVDGVGLITAVELLVKTENFTKITTARQYAAYAGTAPYEKSSGKMDKGAHISKIGNRRSKTLLYICAESARLHNKEIKLYYERRTLIDKKPRHYVLNAIANKLLRIIFTLVEKGEYYDANFIRQDPRVVKYN

SEQ ID NO: 149005 - protein, 368 aa, unidentified
MKKNNTCLKSPKRSKTRKRSITIGMDLGDKTSRYCVLDSEAEVVREGTVATTKKGMKQRFGNLARCRIAIEVGTHSPWVSRLLSSLGHEVIVANARQVKLISTSSRKDDRLDAQTLARLARVDPQLLRPIRHRSEKAQGDLMQVRVRAALVDTRTGLVNTARGLAKAMGERLPKCDADQMGVGKMQGLPAVLVEALAPLLETVELLTQQIKASDQKLEQLAGRDYPETELLRQVSGVGSLISLTFVLTVEDPKRFRKSRDVGCYVGLRPRRSESGESRPQLGISKEGDEYLRKLLVQGAHCILSHKSPDTDLKRWGLKLAGKGNKNAKKRALVAVARKLAILLHHLWVNGEVYEPLRNSRLLEQKAVA

SEQ ID NO: 149006 - protein, 365 aa, unidentified
MYKVLNSAATLIQRTTTGAPQGHMYYIGLDVHKKTISYCVKEASGKVHEEGQLGATRWELDGWMKTLPQPWMVAMEATIFTGWIYDHLLPHATQVKVVHPLMLRAMAAAKKKNDRIDAGKIADCLRCDFLPECHMASTAIRDRRRTLRYRHLLVRQMVQMKNRISGLLMETGVSHNKRRLHKVGYFRKLLASNEEVNESIRPLLRVSRDTIVRLQKIEYALVSSLQRDPLLAERIKRLRTVPGVGPITALTWALEMGEVSRFPSIREAISYCGLCGDEKSSADKVIRTPLSKQRNKHIQRVLVEAAKLAPRQDHNLALVYEREKQQGNANRATLAVARKMVAHLLAVDRGQRDFVPFADPQSAAA

SEQ ID NO: 149007 - protein, 338 aa, unidentified
MSIYAGLDVSDKTTHICVVDVDGKVLPRDVVASDPEVLAKWLNRHCAGLMRVVLETGPLSTFLYHGLVERDVAVECICARHAKGVLSARVNKSDVHDAEGLAHLARTGWYKRVHMKASATHIDRAALRIRSQLITARTAMANQLRGLLKLFGLRMGTARTPGRREERLTALYAQRPDLKPLFAPLIASMEAIEEQLRASNRLLNDRAKADEVCARLMSVPGVGPITALTYTSTIEDPHRFARSEDVGAYAGLVPRRSQSGERDTSGHISKAGDPMLRKALYEAANVALSQVKQPFALQAWGRKMAETKGARRARTAVERKLAALIHSLWLSETEFRWA

SEQ ID NO: 149008 - protein, 358 aa, unidentified
MRIIGCDLHARQQTIAMLDSDTGELEEKTLEHEGDTVREFYSALRGPILVGIEATGSMQWFLELMEELGIECRVGHPQKIRKAETRKQKHDRRDARLLLTLLAENRFPTIWMPSSEQRDLRTLLRHRHQWVRLRSRVQHTLQSMALNHGLRRGRSLWSQAGQDELRALPLAPHASERRKALMTLYPGLQESIDQLDQQVSQQVQQHPRARRLLTHPGVGPITALATEVFLGDPLRFSDGKALASYIGMIPSEHTSGRRQRLGAMSKQGNALLRYLWCEAAMHAVEGDPDLKRFYRRKLVQKGLGKARVAAARKLGIRLWIMMRDQIDYQEFCRRGKARQESGRFRAGMPDLDSGPAAQ

SEQ ID NO: 149009 - protein, 319 aa, unidentified
MSQITIGVDIAKKKFDVASLISGKYKHKIFTNDELGYIAFVAWFLPLCGDVNPHICMEATGSYSLPLADFLAKQHYAVSVVNPAKIHAFAKSELSRAKTDKADAKLIARYALTIAPPLWKPIPTNIRELQALVRRVEHLLEMIQMERNRQGTADLIITDSINTVLGTLEAELKATRKTIHEHINNDPDLKKRGDLINSIPGIGNATTAYLLIAMSEHHQFKSAKQIVAFAGLAPALQESGESRKNTHIDKNGDSALRKALYLPALVAWRHNPLIHTFCERLKANGKNGKVIVCAAMRKLIHLAFGVIKSGQPFDPNYAI

SEQ ID NO: 149010 - protein, 332 aa, unidentified
MLAVGMQVAKEGGDLMRFYTNQHQFYCGIDLHARSMYVCIVSHDGEMLVHRNMQAAPEPFLKAIAPYRDGLVVAVECIFTWYWLADLCAQEGIPFVLGHALYMKAIHGGKAKHDKIDSQKIATLLRGGMLPKAYVYPAEMRATRDVLRRRTHLMRTRAELLAHVQNTHAQYTLPDIGKKIAYKANREGVAERFDDPAVQQTIEVDLDLITYDDQMLSDLELFILKTAKQHDAHPLYLLQTVPGIGKILSLVLLDEIHQIDRFPRVQDFASYCRLVKCAKESGANAWALLGTRSGTLTSHGPFLKRPRCSFVGTSPDKSIWPGWRKSMTKAKR

SEQ ID NO: 149011 - protein, 352 aa, unidentified
MEIIALDAHKRYSYVCVQKKDGRVLCEKRINHSKGAIKQFLANWTAGANVAVETVGNWYWIVDEIEQAGMKPKLVHAHKAKMMLGSINKTDKLDARGLNRLQRTGTLPTVWIPPGEIRDYRELPRTRMVFANLRTRLKNRIHSVFDKYGLHTDFDGISDIFGKQGRTQMVLTIKQLPLETRYTLRCLLRELDMVESQIQRIEKRMRKVFSKTEQVSRLMTLPGVGFILAVVIANEIGDISRFATAQRLASYAGTVPRVHSSGGHTRYGKLRSDVNHYLKWAYSEAGNSTAVNHKRFPGRHTSMLYRRIRERKGHAKAVGAVGRHLAEASFWILTKGVDYKEPESKLVSSTAV

SEQ ID NO: 149012 - protein, 403 aa, unidentified
MLNAVGIDVSKRKSVVSVAQPGGVFIAKPFEVPHTKNGLQDLVAYIKNLEGETRIVMEHTGRYYEPMALWLSEAGFFVSTVNPKLIKDFNNNSLRRVKTDKADAKKIARYTLDNWAELRQHTSMDNKRIELKTMNRQFAFYMKQKTAYKNNLISLIDQTYPGANTYFDSPARSDGSQKWVDFLKKFWHVDCVRNLGLTSFTEEYKKWCKEHSYNFQSSKPSELMDKAQDLIAVLPMSEMTKLFVLQAIEQLNAISKAVEELRIKMDELAQTLPEYPAVIAMNGVGKTLGPQLIAEIGDISRFARRGALTAYAGVDPGANESGDMYQKSNKTSKAGSPHLRRTLFQIVEGLIQRSPDDPVYYFMDKKRSEGKPYYVYMTAGANKFLRIYYGKVKKYLSSLPLEG

SEQ ID NO: 149013 - protein, 364 aa, unidentified
MKTIKDQNITKPKKYTYFIGIDVSKNKLDYAVMRGNDLLFHREAKNEPAVILDFINELKDFPGFTIRKALFCMENTGIYCNHLIRSLSRLKGNIHVGHALHIKRSLGLVRGKNDKIDAIRIVRYSWKNRDELRLFGEKRLVITKLSALNSLRNRLTRVGVMVKTPLKEQSAFIDGVLQAEILAGCELTDAAVKSDLKNLEDTIKRLINSDVQVKRLIQIITSVPGVGLVTALQVLISTNEFKDISDPKKFACYAGVAPFKSESGKETGLVKAKVSKAANKKVKSLLHICAVRAIQHDENLRAYYERKTTLEKKSKMLTINAVRNKLILRIFACVRQDQCYCSDHVPDRFQLTNHTPPPEVPDAC

SEQ ID NO: 149014 - protein, 391 aa, unidentified
MIYIGIDVAKDKHDCFITNSDGEVLFKAFTITNNLDGFNDLYQKIETVMKDITKVKVGLEATGHYSYNLLGYLIDKGLPTYVINPLHTNLYRKSLSLRQTKTDKVDARTIASMLMSDVNLKSYSDISYHNEELKSLTRYRFDKVKERAKLKSSVSRLICILFPELEKLVPTLHMASVYALLSEFPGAKQVANAHLTRLTNLLSEASKGRYSKDTAITFRDAARTSIGSNMPAKSLELKHTIKLIKELDSEIDEIENEIKIIMDEINSPILSIPGINYRMGAMIIAEIGDFSRFDSPDKILAYAGFSPSTYQSGHLYGAYAHMEKRGSRYLRYALYNAAKYVCHWDPTFTAYLAKKRAEGKHYNVAISHAVKKLIRVIYHLEKTNQQYIKAS

SEQ ID NO: 149015 - protein, 456 aa, unidentified
MNPKRSKPKNDRTMPMIHPNAAAIDIGATMHTAAVRADRTPEPIRSFGTFTTDLHRLVDWFTECGVETVVMESTSVYWIPIFELLDARGFAVFVVNARDAKHVPGRKTDVSDAQWLQRLHSYGLLRASFRPKGQIAELRAYVRQRERLLEYAASHIQHMQKALTEMNLQLHHVVADVTGATGLRIIRAILAGERDSKVLACLRDYRCHSSAEAIEKALTGNYRAEHLFALELALALYNIYQDKASACDARIEAVLKELSISRGRDAGPLPSPRRRLHGKANGPDFDVRAALFKLLGKDLTQIDGLGSYLSLRLIAECGDDLSAWPSAKHFTSWLCLAPSNKISGGKVLSSRTRSGSRASALLRLAAVTVGRTDTALGAFYRRLSARIGKAKAITATARKIAVLFYNAVRHGMEYVDPGSSYYETRYRTRVVENLHRRAKAFGFVLLPLESKAGAVS

SEQ ID NO: 149016 - protein, 322 aa, unidentified
MSVSNHRCAGIDVSKGTLDIAISNNASQFTVPNGTDGFTQVLRELKRNETRLILMEATGGLESGVACYLQSEGFDVVVINPRQARDFARAMGYLAKTDRIDVRVLLQMSEVINQHPEREKYIRPLPDAHRQILAAMVARRRQLTAMLTAERNRLHPSHPLSHASIRSIISALKGELARIEGEMAIHIKEHFSELSELLNAVKGVGTATVAVLLAEVPELGSLSRREISALIGVAPVNRDSGTMRGRRTVFGGRASVRTALYMSALVGTRHNPIIKEFYTRLVAAGKPKKVALTACIRKLLTILNAMLKKNEAWDPMYHQHAS

SEQ ID NO: 149017 - protein, 343 aa, unidentified
MEAYAGKQFVGIDLHRRRTVIVRTTEAGEVLEAVRIVNDVQRLASVMARAGHCPEVVLEATYGWYWAVDALQAGGANVHLAHPLGVKAFEYRRVKNDFRDAQDLADLLRMGRLPEAWIAPPPTRELRELVRHRAKLVGLRSRCKAEVHAVLAKCGVQVLMSDLFGVWGTELLDGLDLPAPYAARIASLRRLMDDVDFEITVFAGIIRGRLAHEPGYTAVQKIPGIGPTLGAVLVAEIGDITRFASAQKLTCWAGLTPKHHESDTHVRRGRITKQGSRLVRWAAIESVKTISKTSEVGMLRERVADRRGRNIASVAAGRRQLELVFYALRDGHVRALEHLPRVA

SEQ ID NO: 149018 - protein, 385 aa, unidentified
MIYAGIDIAKLNHFASVLSSDGKVLVEPFKFTNDNAGFCKLLAVLNNYDKSSLIIGLESTAHYGNNLVEFLVNRQFQVAVINPIQTPSMRKNRIRKTKTDKVDATIIAQSLIMQTYRLCSKYDIELMHLKNFGRFRQKLMKQRTRNKILLTSYIDQAFPELQYFFKGIHHKAVYAILKEAPSPELISAMHMTHLANLLVKASKGHYTKEKAKELRVLAQQSVGSSDSSISIQITHTIEQVELLDSQIKDVESKIDTIVLSTGSVILSIPGISTLEAGMILGEVGDIHRFSKPHKLLAFAGLDPSVKQSGNFCADHTRMSKRGSRYLRYALIYAAHNVVKNNDTFKQLYDKKRANNLGHYSALGHCAGKLVRIIHKMLTDDVVFNL

SEQ ID NO: 149019 - protein, 346 aa, unidentified
MVLIGCDFHPSWQQVSWLEESTGEGGDQELVHAPREAEKFYRQFAAPARVGLEATSNCQWFIELLVRLGHEVLVGDAAKIRAADDRQQKHDKRDARLIERLLKENRFPRIWVPSGAQRDLRQLLIHRHKLVRIRAQVKNSLQHLAMNQGLLKKRRLWSEAGQKLLCALPLQPWAHRRREDLLKLRTALDEKINGLDMAVAEAASQDDGARLLMSQPGVGPITAMAFVLTIGDVSRFPRGKQVASYLGLIPREYSSGGHQRLGSISKQGNAFLRMLLVEAAQIAVRYDPQFRNEYLHRCHHMAKGVAKVAAARKLAIRLYWMLRTNTGYPTVVRVESSSRVALVGAS

SEQ ID NO: 149020 - protein, 455 aa, unidentified
MAKKGKKNPSTPENMPILHPHAAGIDVGAEEHWVCVPADRDAQPVQKFSAFTCDLHRLADWLTACRITTVVMESTGVYWIPLFQILEARGFEVALVNARHVKNVPGRPKTDRFDCRWLQKLHSYGLLAPSFRPPQDICQLRSLLRHRENLVQMTVKHIQHMHKSLDQMNLHLHHVISDVTGVTGMRIIRAIVAGERDPKALATYRDYRIKSDQDTIAKAMEGDYRPEHVFTLTQSLALYDFTQQQIAACDQEIERVLGTFDSLVDPEDHPLPPPTTAHRRPQRNEPAFDLRTHLYRITGVDLTQVPGLQAPTIQIVLAEVGLNMHKWPTDKHFASWLGLCPDNQISGGKVLSTGSRRVQNRASRALRMAAQSLRTSPSYLGAFHRRMRSKLGPAKATTATAHKLAKIIYHMLKEKTPYQERGAAYAIQKDQERKIRQLRKQAKHLGFALVPQTSN

SEQ ID NO: 149021 - protein, 347 aa, unidentified
MPVTIGVDPHKASHTAAALDEHGHLLGQQRITATLEGYQALRQWAGQWEDRRWAVEGAHGIGRALAQRLVGDGEQVLDVPAKLAARVRVLSVGHGRKSDPHDAISVAIAARSVPCLRQVGVEDQAVVLHLLTKRRQDLVAARTQTINRLHRLLMDLVPGGARRNLTAKRAAALLAAVNPAGAPAVTRWQLATELVADVRQLEERIATVEARIKTAVAQSNTTLLELFGVGPVLAARFLGEVGDIGRFPTKHHFAAHTGTAPLEASSGQVIRHRLSRAGDRKLNHALYMMAMVQVRRPSAGQAYYRRKLAEGKSPREALRCLKRRLSDAVYRCLLADQHRQPSPVGLA

SEQ ID NO: 149022 - protein, 327 aa, unidentified
MFHVGLDIHTQRISICALDEKGQVIHRSQVRSIEEMVRTLRGLPDRFEVCYEASCGYGTFHDLLRPLAERVLVAHPGRLRLIFRSKDKNDRKDAERLAKLLYLGEAPTVHVPALDVRTWRELINCRSQVIAKRTRAKNTVRALLRSAVVIAPRRPGLWTKKGLNWLRQLELPTVSQQLRRDLLLEEIETLTRQLQRIEQQLNRRALHTSAVAQLRSIPGVGVRTAEAVAAFVDDPQRFPHAKAVGRYFGLVPCQDQSGDKNRLGHITREGAPVVRQLVAEAAWQALRRSPTVRAYFERAQRGDPQRKKIALVATAHYLVRVMWAMLK

SEQ ID NO: 149023 - protein, 405 aa, unidentified
MSELEKDLVFAGVDTHKDTHTLCLLDHMGRAIGTFGFAADAKGYDALAGKIGGPATCVGVGVEGTGSYGAGLTRRLLELGYCVYEVMVPGRARRKPGRPKGDPADAEVAARQVLARANLSKPKDQSGWTEELRQLMIARDRLVQATSAMINAAKSLIVTAPEDLRRSLGGLSRKNLRSALSTLGPAAGGIILALGSLGKAWDLQDREADAIEERMKRVLEANAPALLAIYGCGTVSAAALAVAGGGNPERLRSEAEFASLCGVAPLLASSGKTGRHRLNRGGGRRANRALCQIAVTRMSYDRRTKDYVGKRKRDGKSKKEAIRCLKRYIAREVFRALRNPLEIKGPSWKDLRPARQALGITLVEAGKALNVGFQKVSYAETGRLMNVRFLEEYDAWLKSQAKSES

SEQ ID NO: 149024 - protein, 452 aa, unidentified
MRRLNGKQGLRRSQFAKELKGADLEKVLLVPIDVSKVLQKSMILNYFGDVIETPFAFMVSQTGMSLLIQKIEEARQSCHAEKVFVGIEATGHYYEDIVRILTEEGYSVHIVNPATTHEERKQHLTYTKTDDIDLYLIAEALVGNKATNSKLASGVYKQLQNLTRARRSEINKRSRIKMELRGIHDQIWREYQGVSVLVDHKVKTTKIFSDFWGKASLHLLKNYPHASQVLELGEDGLRALSKQHNLKIRKKTIDKLLFAAKESVSKPIEQLSSELFLLKQKIKAYEWHTTNIELYDKEIERIFVQTDGLFLLTVPGIGLITAAEIYCEMGDISLYNNASQLIKKAGTNPVIKQSGPDGGYYGCISKQGNSNLRRAVYTAGRCLSAHNEALKPFYNRLKEKGKKARKIYIAMGNKFIKIAFAMLKNQQPFEWNHSDFNYEKEIMKKLSQPLAA

SEQ ID NO: 149025 - protein, 369 aa, unidentified
MEQHTDAFVGLDVAKLRHAVAVADDGRNGEIRYLGEIDAASESVRRLAAKLAKRHGNLHFCYEAGPTGYGLHRQLTQLGHRCSVIAPSLIPRKPGDRIKTNRRDAQQLARLLRAGELTEVWVPDEAHEAMRDVARIRDAAVADLRRKRQTISSMMLRLGRVYPGKKTWGVRHMNWLNTQRFEHPAHGLVMQELLLAARHAKERLERADDAIVEFLPTWSLAPVVAALQALRGIGLVSAVTIMAEIGDLRRFENPRQLMSYLGLVPGERSTGESVRRLGITKAGNGRVRRTLIEGAWTYRYLPRTGPAKLVVQANLPADVKDIAAKAQTRLCARYRTLSAKGKKPTVTVTALARELSGFVWAIGRAVQTA

SEQ ID NO: 149026 - protein, 402 aa, unidentified
MQVDDIDVFIGIDVGKSEHWATALTTAGECLHDRPLPNDEARLREVYEHLGEHGRLLVVVDQPATIGALAVAVAQDMGITVGYLPGLSMRRIADLSPGSAKTDQRDAAVIASAARTMPHTLRSITSSDEDAAALSMLTGFDLDLARQVNQVSNRIRGLYTQIHPALEGVLGPWLEHDSVLEVIATWPTPAALRKAGRARIDAKLKANGCRRHAAWAQAIVEALSKQTVTVAGTDAAGVVLPHLARQLIALHTQRADIAAQVEALVEAHPLYPVLTSMPGVGVRTAAVFLAGTLGKTFTTGAHLASYAGLAPVTRRSGSSIHGEHVSHGGNKRLKQAMFLSAFASLRTDPVSRTYYERKRAQGKRHNQAILALAHRRILTLHAMIRNGTLYNPQPAQPLTTTA

SEQ ID NO: 149027 - protein, 363 aa, unidentified
MSHNEFKKIREPIEPQEVSPMKQEITVLGIDLAKHVFHAVGMDNTGKIVFRKRLSRHDLMPFIAKLPMVLIGLEACGGAHYWARRFRASGHEVKLMAPQFVKPYVKSNTNDSRDAEAIAEAVTRPTMRFVPAKDVDQQDIQALHRVRERLISERTALVNEVHGLMHEYGIVMPKGVSKFRQAVVGKLESAKDKLTPLSQEMFWKLVEEFAALEEQLAYYQKKLEALATTHPECQRLMTIPGIGPLSATALVAAVSDASAFKNGRQFAAWLGLVPRQHSTGGKERLLGISKRGDSYLRKLLVHGARTTIRWVGRKTDRRSQWIRQLVERRGKNRTAVAVANMNARIVWALLTSHQDYQLATGEG

SEQ ID NO: 149028 - protein, 406 aa, unidentified
MYYLGIDVSKSTSRFVILDDNGERFTKAFTLQNNNQDFRKLLLRLKELNLKPANLLAGVEATGIWWENLYCLLTEKKFKVIVLNPHQTNKFREALRKKAKTDDIDAYVIAGLLRSKDYAASFIPEELIQVLREITKLRYQLIKDRKNFQRQAYSLLSLVFPEYPKTAIKNPFAVASTAILKAYPTAKHLSLAKPKHIEKIVRSIKGNNFNIKEIQQLIDTAKDSIYSGRARDDRGLNLNLLLSHVEHLNKSIAELNQRIQEILAPTNNDDFNSFPGANLLTIPGVGPKTVAAVLSSVGINGQSFSSGKQFIGHIGFFPQIYESGETKRANKISKRGPKYLRWALYVAAVACIKHNPQFRVLYHKKISQGKNGKQTLVYVAKKLAHLCLSMLKSGETYRPERVFMPA

SEQ ID NO: 149029 - protein, 355 aa, unidentified
MKLAILGIDLAKSVFHLHGADAHGHAMLRKRLSRSQLPAFLANLPRCTVAMEACGSAHHWTREIAHLGHAVRLINPQFVKAFVKSNKNDRNDAEAICEAATRPSMRFVPVKSVEQQETQQLHRARAQLIKNLCGLANHMRGFLTEHGIIVAKGFAPLRRALPELLEQPELNPLFRELLGEMAERFRLLEERRLRYDKLIERVYRADERCQRLGQIEGVGPITATALVAAIGDGKAFNTGRHVSAWLGLTPRQYSTASRTVLLRISKRGDQYLRMLMVEGARSAIVAAARKSDPRSRWITGLAAKRGPCVTAVAVANRNARICWALLARGESYRAAATSGKLRMVPLSAAEKNRIG

SEQ ID NO: 149030 - protein, 409 aa, unidentified
MLFGGIDWSDRFLDFHLRTSDGRVLVQGQVESSVEGLTELFTALESHGPATEIGIAIETCHGAWIQPLLDRGYQIYPVNPKTVERFREALSAAGNKSDKIDRKVLAMFLVTFHQDCTPLRPDAQEIVSLRIACQDRVRMVEERSAKLSELKAILKCYYPAFLRLFANLKSKIALQFLEKFPTQKQMKDLTKRRLQNWLKRHHYSWVRRIADMVDVLKEPSLPVAEHLQQAKTPLIFYLAGSIQILNSEIAQRDKRITEHLDRLPEANWIRSLPGAGEVIAPALLACLGRDLQRFASAANARALMGTAPVTKSSGTVRVVQFRRGCWKFARRTLQLFVEQSRHQCPWARAFYIKQRNSGHDHHAALCALAHKWLKIILAMRRNGTVYNEQIFVNSQRRYLLKVPMLNKAI

SEQ ID NO: 149031 - protein, 310 aa, unidentified
MEMSYVGIDVSKDRLDVCVLPQDEAFSVARNAKGLAELDGRLKVLSPKLIVVEATGGFETVVAASLAAANLPLAIVNPNQVRHYAQALGKRAKTDPIDAHVLARFAADVKPEPRPLPDEMTQLLADLVARRRQIVEMMGAERQRAKRATVKRLRKSIARLTAALEKELAELDTEIDDTVRGSPAWLEKEELMTSVKGVGEKTARTLLAELPELGTLGRKQIASLAGLAPYTRQSGRWKGKSMIGGGRKPVRSALFIAAMVACRYNPHLKTFYQRLLAAGKPKVLAIIAVARKLLTILNAILRDKKAWQPT

SEQ ID NO: 149032 - protein, 363 aa, unidentified
MTVYCGVDLHTRQQLIKWCDTRDGEIKEERLSHESPDSVRSFYSRLTGEVIVGIEACGYSEWFETMLRELGHEVWVGDSTKIRYRARSRQKTDRRDAELLLDLLLKGEFPRVSRLSFESLEVLRRLRYRHRLVQMRTRMRNSLQSIAHGCGVALGPTLRSKRGRERLNALPLSPVLSQQRSGWLEMIEEVGKRIARVEEELEQAAAGDGRVRRLRTHPGIGLLTGLALVHTLCPVERFADSRKVTAYVGLEPREFSSGERKRMGHISKAGPRVLRFLLVEAGIKAVHQDADLKRLYDRVMHRREQARAKVAVARHLLVHAFIMLRDGIDYEEFKVRGAERRSAARTVHRPQVPDLLIERPASE

SEQ ID NO: 149033 - protein, 318 aa, unidentified
MNVIGFDVSKDTIDATLITTKGSKDYIKIANNTEGFENLINWIKTKRIRKIAISMEATGIYYEQAAEYLSALYTIFVINPLKIKEYAKSQFSHTKTDKADSKLIAEFANRHLDKLTPFRPSENPILYKLINLLQQLKEQKKETQNRLHTAKDIYIKSTHEAIIELLEEKIDQTSKRIEGMIKQKESLNIEYQNLQTIPAIGKETAVILLRHLTDKNFETANKFVAFAGLSPKIEQSGTSVNKKGRLSRYGHRQLKRALFMPAIVAYRMNAFPQLVRNLEAAKKPKMIIIVALMRKLAKIAFYIHKTKKPFDKARHQTV

SEQ ID NO: 149034 - protein, 367 aa, unidentified
MKYHTSTTQFNCGIDLHARQMYVCVMDRQGKTLVHTNIKNNDFNYFLKLIQPYRHSLTVCCECMFGWYWLADACQAAGLPFVLAHALYVKAIHGGKNKNDRIDSEKLAHLLRSNLIPPAYVYPAALRPLRALLRQRTFFVWSRSELLARIHSHQLAHNRIPARQTRSNRDPWEEQLLAREDNPIGQLALKNELAMIRHFDTQITAVETQLQKLTKEVASRNYALLQTVPGIGENLAATILYEIGDIARFPTVKDFLSYCRLVKGTVASAGKIKGLRGAKLGNPYLRWAFGEAAVIAKRDHAIIGPLAQRLEAQMNGNKFKANTVLAIKLARAVYFMLRSHTVFEADRLVAALTHQRFWPWRPPTHRV

SEQ ID NO: 149035 - protein, 355 aa, unidentified
MSEITRVGADLAKNVIQVHAVDAAGKVVSNRPLARDKFMTWCAQLPAGCMVAMEASSSAHHWARKLVAMGLDARIIAAHLVAPYRLQGKSGKNDANDAGAICEAASRPQMHFVPIKTIDQQSMLCVHRLREGFKTDRTACVNRIRGLLAEFGLVFGKSAKVLRAVLTDVLEDADNELAGVARLCIERAKEQWAELDAHIQWCDERIAAHLKQNEQVRQAEQLAGVGPVTASAVVATVGDFKQFKDGAQFGAWLGLTPRQNSSGGKNNLGSITKRGDMYLRMLLIQGAKSAVMTAHLRDDPISKWAHQLREKSGWQKAAVALANKNARILWAVFVRGNPFDARHVSVKPGVAVAAA

SEQ ID NO: 149036 - protein, 385 aa, unidentified
MSKLNLTDASAAAEYATVYVAFELSKAKWKVGVMLPGSQRVSRFTIDGGDLAALSAWLAKWRARAEATGKPVRIVSCYEAGYDGHWLHRWLTSQGVINYVIDPASIQVNRRARRAKTDNIDLEQLMRTLLAYLRGEPGVCSMVRVPSPEDEDRRRASRARDRLLKERSSHSNRITGLLHAQGIRDAMPLKRGFLASLDTLRTGDGRPLPARLKAEIVREHERLCLAHKQISELEAKSKAEVRTAARGSVEEKIRNLIDLRGLGVVSAQKLMHEVFYRSFDNRRQVGSYFGLTNSAYDSGSSHRDQGISKAGNRRGRALAVELAWLWLRFQPGSELSRWFNERVGTLKGRIRRITIVALARKLMIALWRYVTTGVVPTGAVLRPSI

SEQ ID NO: 149037 - protein, 337 aa, unidentified
MKNSSQSVAFFIGIDVSKLTLDVTVINSQKKTRKYKQIENSTSGLNAMDTWLKNQALFNYANALFCFEHTGMYTRVLLGYLLSKNARVWMESSLQIKKSLGLNRGKNDKIDAHRIAEYAYRFSDKAKLVINNSDEIFILKDFLSARARLKKSLQQIAVTIKELKKVDLEQGKEIEMLNLHALRGMKKSIEQIEAKIQQIIESHKRLKEVYQLTTSIPGVGFILATKLLVYTKVFTSFDNVRQLACYCGVAPFEYRSGTSVKGRTGVSKFANMDLKATLHLAAISAIQHNAELKQYYERKVEEGKSKMAVINAVRNKLLARIVAVVNRNTPYVQLTHN

SEQ ID NO: 149038 - protein, 340 aa, unidentified
MNRTVIGMDIAKDVFQLHSVDVRTGEIERHKLRRSQVMEFFVNRAPAQVAIEACGGAHWWARQIRGLGHEVKLIAPRSVRPFVLRNKTDAADARAIWTAVQQPEARLVAIKSEAQQAILALHRVRAQLMKFRIMQTNGLRGLLYEFGEVLPAGQTALAKAIPDALARVAQRLPGMLIDSLREQWARAKAIDVDIITVERRLDLGLRESPACQRIAQIDGVGLLTATAAVAVIGDATSLRSGREFAASLGLVPRQTGTGGRIRQLGISKRGDPYLRTLLMHGARSLIARGGKRAPWIQGLLARRPYSVVVAAIANKLARTIWALLARDQAYDPSAFSAVAR

SEQ ID NO: 149039 - protein, 341 aa, unidentified
MKNLFIGVDFSKEKVDVAIIFADGLTETAARVFNEFKTTVSGYKQLVKWVEQNSYGIDSSLWLFCGENTGDYSKGLCNFLYGKGYDMWLENAKSIKDASGLRRLKSDRADASMIAEYAMRNYDRAIMYEPLSESLAQLRELFLYRQMVIRHRCSFQVRRGEKKLTMEKSPVKTMISQSGRHIVSELNKEVEKIDKRIAELIKSDEELTEVFTIVTSVPGIGTQNAVCLMVYTDNFRRFNYDSRKIACYYGIAPFGKDSGTSVHSDPRVHYMANRQIKSMLTQAALAAVNFNPVIARYYMRLVERGKKKQVALNNVKNKLVHLVTAMVRNRQLYTPEYKISA

SEQ ID NO: 149040 - protein, 348 aa, unidentified
MEILAMDLGKSNTVVCFYDSDSAKHKFGKVKTAPQQIHNLIAEHSPDRVVFEMGSATGWIYDIAMASGVEVQVANTNHHAWRWKNVKKKNDRDDALKLAQLSAMNQLPLVHVPKRSIRQKRSLIHYRHRLVKRRTQIKNNIRAILDKEGCSMAQGKSGWSKGTLEELRKMALPIDECDVDNLWRGQLSVELELLESVGSCIRKIETCLDGQGKTDKQIQRLQTATGIGPRLAEAVVAFLDEPNRFKNGKQVGSYVGLTPRQYQSGEMNHQGKISGQGNKLLRALLVEVSWLGLRHNPWMLKTYERILRGSASRKKIAITAVARKLLVRCWAMMRDEQDWRDEKAKQVA

SEQ ID NO: 149041 - protein, 351 aa, unidentified
MMIIGVDYHPSFQQIAFMDEKTGEFEERRLNHSDGEAERFYRELKQRGVSVRVGMEATGYSRWFERLLAELGFEVWIGDAAEIKKLRVRKQKTDRLDAQLLLKLLLENRFPRIWVPIPENRDLRQLLWHRHRLVQMRTRIMNQLQAVAMNEGYRWKKKLFSAQGRALLEKLSLAPWASRRRKELLELLDQLDPKIAELTAAVEQEAHQRPEVLRLMTHPGVGPITGLAYVLIIGTPERFPCGKQIGSYTGLIPCEDSSAGRQRLGHISKQGNALLRYLLGEAAQAAARCNPDWRRRYLHLAMRRHKNIAKAAMARKLAVRLYWMWRNGWQYSQLVEFGSNAGKLATGHGVK

SEQ ID NO: 149042 - protein, 318 aa, unidentified
MNIKINQSINVGVDTGKTQLDIHIRPLDLFFSVENNDKGIKKALETIKSHNPERIVIEATGRLEMPFVLACVEAQLPIVRANPVHIKRFAGAIGRRAKNDRLDAELIVHYGEAIKPDLTVIKPKNIRLMSDLVIRRNQLLSMQTMEKNRIQILPASLHSTIKPMLTTIKNQITKLEEKLVKLIEDSPESQAKNTILQSVPGIGNIAAASIISNVPELGYITNKQAASLIGVAPITRESGRYKGKRVIQGGRAQVRTVLYMAMMSAMQCNPVFKATYARLVAAGKPKKVAIIACVRKMVVTLNSMLRDGVMWDENTAKN

SEQ ID NO: 149043 - protein, 387 aa, unidentified
MAQVNDLSRSLTAFDPISTLVVVVEMSKASWLVSGVVPGVERQPLKKLEPDATALLRLIERWRNEAVRAGRPISRIALAYEAGRDGFWLARWLIARGIEAHVIHSASVAVSRERKRAKTDRLDAAMLMRVFLGWLRGERGHCGMVAIPTMEEEDARRPSRERESLVDERSRITNRMKSALARLGIRGFKPHLRKAPERLAGLRTAEGTGLPANIIEEFRRDMARLALVREQISSIEKTRAERLERAPDTGPHAMVRLLARVIGIGIETADMLVREILSRKLRDRRAVARYAGLTGSPDESGLKRREKGLAKAGNARVRRGLIQLAWRFLMFQKDSALARWYRTRTEGPSGARKTTMIVALARKLLIALWRLVTTGEVPDGVELRPAA

SEQ ID NO: 149044 - protein, 354 aa, unidentified
MSNKSTSIVATMGIDIGKNSFHVVGLDERGAIVLRQKWSRSQIEVRLANMPPCLVGMEACVGAHHLSRKLQSQGHDARLMPAKYVRPYSKGQKNDFRDAEAIAEAVQRPTMKFVATKTAEQLDLQALHRVRERLVSQRTGIINQIRAFLLERGLAVRQGLRFLRTELPIILAKRTDVLSPRMMRIIEDLAGDWRRLDERIEGLSAEITALARQDAACARLMTVPGIGPIISSAMVAAIGNGGAFSKGRDFGAWLGLVPKQISTGDRTILGKTSRQGNRYLRVLFVQAAWVVLVKITDWDRYGLKTWIEAAKKRMHHNVLAIALANKLARIAWAVLNKERNFECVRTAATSSRPA

SEQ ID NO: 149045 - protein, 337 aa, unidentified
MNTTCNDVLGIDVSKKKLDLALLINGKLKAKVFDNTSAGHRALVAWLRDSKASLPTLHICMEATGVYYEAIATTLHAEGFKVSVVNPACIKGFGSGENIRNKNDEIDAGLIARYCAAMSPDPWTPPPLEQRQLRAWTLRVQSLKDIRQQEQNRIEAHIVAGLHDVADNVTEHVKWLDAEIRKLQADIDDHIDRHPGLKSDAALIASIPGLGMTTVARILGHLGDIRRFKNAKAFAAFLGVTPKQRTSGTSLKGRTMLCKTGNTSLRAALFMPSMVARQHNPILRQFAERLLANGMAKRAVISAVTHKLAHLIYGVVRTGKPFDAGYLHKNLAIQDGI

SEQ ID NO: 149046 - protein, 432 aa, unidentified
MNHSTTIPLIGLDIGKNVHVFGVYSGPRLEVLVPPATVYNTHAGFAVFAACVSRLLAQHGQVRLGNEPTGVYYEAWGRAVLNHFADAIGTGRLDYRLVLPNLVKEARQALLRGRYRKTDAIDTAAIARCLLLGEGTPAHFPDAHALLFDQWARHYRRLERDRRRLERTVLDQMDRLWPGAFVNVKRFAAAHPDLEPPVPLVQTRPLERHLVQALLTHCPNPYDVLACTEAEMVAFLRETVGRGGLASARKVLCNARQALLPPPEVAAVYAHALATDWQRYQALAAQLAALETQAETLVLRSPAAVLTTVPGVSALHAARYLAYVQDPHRFPDADHVWAFAGFDPATAQSGDARRVGYLSKRGDPGFRDTLYLIGRHTSQHCPPIKAVFQRAYRRFAADKTPVRATIHAAHAANRLLFRLLVDQVPFDPAYPA

SEQ ID NO: 149047 - protein, 343 aa, unidentified
MQTVTTIGLDIAKSVFQVHGVDAAGQVVIRRQLKRHYVVAFFQKLPPCLVGIEACASSHYWSRELQALGHSVRLMPPAYVKPYVKRQKNDMADAEAICEAVTRANMRFVPTKTPEQQSGLMLHRTRHLFIRQQTSVINAIRAHLAEFGVIAPIGRKGVEELLRVVADPNDKRVPEVVRACLAALGSQLLSLKKQILEFDRMILAWHRSNQTSKRLNCIPGVGPLLATALVASVGDPKSFRSGRNFSAWIGLVPKQHSSGGRERLGSISKQGDRYLRSLFVAGALAVIRYAKLHGTNHRPWLTTLLARRPTKVAAIALANKLARMAWALMTRGERYNYPVALRP

SEQ ID NO: 149048 - protein, 434 aa, unidentified
MTVMVTEAGDGVEIVFARVAGIDVGKREVAVTVRVPGAGPGAGRVEVTRKFKTFYPVLAVMAAWLAERGVTHVVMESTGVYWRPVFHALCEAEPVEGVGFEVLLVNAAHVKNVPGRKTDVKDSQWLAQLLEVGLLRGSFIPPKDIAAIREVTRYRKKLIQTRTSELQRLGKVLEDAGIKIDSVASTLTTRSARDMIEALIGGQRDPRVLADLARGVMRKKIPDLSMALAGRFADHHGVLARLHLDMIDHLDATIARLDGQIEVMTDPFAAQIRALCTIPGIAERTAQVIVSEIGVDMSRFPTPAHLASWAGLCPGNNESAGKHGRTRTRKGNQEIRTALVEAAWATARTQTYLGARFRRLHRRFGRSNGAKAAVAIAHDLIVISWHILRDGVEFHDLGADYFTRPSSPAHSRRKDHLVHELQALGYTVQITPAA

SEQ ID NO: 149049 - protein, 330 aa, unidentified
MLINVGIDVGKESLDLCVLLDKTIGKLKSKKFKNKKEGYISAVEWLTKTIDCAPGTMLITLEATGVYHEGIAYYLYSQGFRMFISNPGKAKKFAQSLGLVHKTDKSDAAMLAKYGSIQPDDMSLWVPEDDDVRAIKTLIRRLNALEKDKLRESNRLEASLISDAAKRVIQSTRYLISVLGNEIMDIQNEIDQLISSNQEMNKNRELLLSVPGIGAVMARELVYLFSAKKFTSAKQVAAYVGLIPRLNESGVFKGRSSLSKSGPARTRSKIFLAAVCAGTHNPDIKAQKVRLIHAGKTKMQALGAAMRKLIQICFGVIKNQTRYQPQIVLI

SEQ ID NO: 149050 - protein, 387 aa, unidentified
MQVAERRSEALTALRVDLSAIFVSLELSRSKWLVTSLSPGAGERMSKFIVTGGDVPGLLACLAELQRKAKARTGSSFRIVSIQEAGLDGFWIHRILQREGIESYVVDPASIATSRRRRRAKTDKIDGEALVRALLAYKRGEPRVCAMLRVPTPEEEDRRRLVRERKALTNERVRHVNRVKGLLFGQGVSGYQPLNRDRRKRLEELVTGDGRPLPSALKAQISRELDRIELLIEQIKAVEKARDDMMAAAQTSSPAPALLLNLKGIGPQFAAVIWSEGLSRHFDNRRQVAAYAGLAPTPWQSGKVDREQGVSKSGNPRLRTTLIQLAWLWLRHQPDSALTAWFKERVTQNGGRQKNAAIVALARKLLVAMWKYVTAGVIIEGAVLTAH

SEQ ID NO: 149051 - protein, 375 aa, unidentified
MSKANTLFIGLDVHKETTDVAWVSDKSAETVHYHGTIPTNLRSFDKLIKNQTAKTSKLCVIYEAGPCGFWLYRHLLRRGIECWVVAPALIPKAPGDRVKTDKRDAMTLARLARSGDLHSIYVPDERDEAIRDLIRCREDAMLDLRQARQRLKSFLLRHGHPCTGRQNWTEAYRRHLADISFPQSATKITFQHYIHIVTERYERLQRLELELQSLAESWRWYPLVQRLTVLRGVRFLSAMTLLAELGDLRRFASPRSLMNFVGLTPSEHSSGQRERRGGITKCGNSHARRILIESAWAYRFPARVSRELESRQQEHSIKLQTRSWEIQQRLCRRFHALKARGKEYNKVVTAVARELTGYIWDLAQGFDADMPQQAY

SEQ ID NO: 149052 - protein, 340 aa, unidentified
MGEQYVGIDLHRRRSVIVRMTPDGEVLETVRIDNDPVALSLELAKAGPDPEVVLEATYGWYWAADLLQACGARVHLAHPLGVKMFGYQRVKTDARDSTNLAELLRMHRLPKAWLAPPEVRELRELVRYRAKLVALRSGLKAQVHAVLAKQGVRVPMSDLFGVAGTRLLDQLRLERAYALRVASLRRLLAAYDQEIAMLGREIGQALAGDVGYRAIQVIPGVGPVLAAVFVAEIGDVHRFAGAPQLCSWAGLTPRHRESDTTVRRGPITKQGPRLVRWAAVEATQRLPAASKQAADFHRIADRRGTGIGRVAAARRLLRLVYYGLRDGQVRCLAPAPREAM

SEQ ID NO: 149053 - protein, 309 aa, unidentified
MLTAEADKCKTKVVVNTAAGVQALLAWCAKHGAQPAQLHAILEPTGLYHEQAATALPQVRVSLVNPAQARDFAKALALRSKNDAPDSYVLARYGQTLSPALWHPAPLHARQLRALLTRREALSKDLLRELNRKEKSQFSPSAPLVDGSIDKAIAFLREQIKQIERAIDQHIDNHPDLKQDCELLNSIPAIGPQAGNAILAVMHNRHIDSAQSLAAYLGVVPVQRQSGSSLNSCARLSKAGPSQVRATLYMAALVGTRHNPHIRALYQRLLKAGKSKKAALGAAMRKLVHLCFGVLKNRIPYQPNYAMNG

SEQ ID NO: 149054 - protein, 326 aa, unidentified
MRMFVGLDVHKKYTEVAIVDEDGVVTEQERIENEPGLIEEFSNRLNNADMVMESSSTWYWLYEILSRKHRVVLSNPAKTKAIASAKLKTDKVDALMLANLLRGGYIAESYVPSRRIMSLRELVRYRANLVRMRGTIKNRVHAYLLMNNIKIDYSPFTKDFLEELEKVEDGRVQGYLRIIETLNLEIHEASKKICNEALSDESARLLMTIPGISFYSALLLVSEIGDVSRFPDSAHLVSYAGLASSTHSSGGTTCHGRITKAGSPYLRWVLNQCTWVHVRNEPEGNIAVFYERLRRKKGHSKASVAASAKLLKVVYWVLKEKRPYQG

SEQ ID NO: 149055 - protein, 482 aa, unidentified
MKKRNIYQNQSQELLSLFETAGSSAKVMCVPMDYAKKDHLVMFCNGHGDILRKPFSVKNSPDGIEYLIDQVARSCRRRGIKKEHVFLGGEDANSFAENFVSTLRVKGWLVAGVNAHDAKKQRVNLQASTDRIDLMGIATMLLNCRANCCPAATGIYRNLRTLVRHRRKLVVMLTEVKNRAHGIVDRLFPGFLNENKSGIVAFTQSSLYLMENRFSPKQIRRRRRQKLIEILKRFGTSKAEETALKLQQYAAKVLHTPDEYIDTLQISLAQHVKHIRCLKESIVQLEKEIAVNLAQTQGAFLTSVRGIGIVLAAGVSAEIGDPYEQKSLNNVISYSGIIPRVKQTGGVDGKTYTGHVAKRCNRILKDYVVKSAYHLGLSGPEDLMADYKRRDASGQHADFGIGRRYLRMTMSLMRTSQIYLPPRLRKADTAPEERAGYYLMSWPFLRDKWKKAGALEAAFSKDMPLGLWRQIVQKLYDITLKL

SEQ ID NO: 149056 - protein, 339 aa, unidentified
MNVVIGVDPHKASHTAVAIDEAEDEISSVKVRATRRQVEQLVRWAEPFEKRRWAIESAGGMGYLLAQQLVAQGEVVFDVPATLASRIRVLGTGRSNKNDPNDAHSIAVAAFRAPSLRNVEPADHSQVLRLLAKRNLDLGSHRTRVVCRLHALLAELVPGGIAKELYVSDAERFLANITPETPVEQVRYDMALELLDDVRRLDEQTKESHRRIRIAIKASGTSLTEIYGVGPIIAAQLIGYAGDIRRFANRDAFASYNGTAPVEFASGGRVVHRVSRRGNRQLHHAVHMTAVSQIRQSDSEGRAYFERKVAEGKTKKEAIRALKRQISNAVYRQLLLDTR

SEQ ID NO: 149057 - protein, 387 aa, unidentified
MPQLNDLSRSLVALDQDSTIIAVVELSQSSWLVGGVLPGIERQPQKKLEPSAERLLGLLHRWRDEAVRAGKKITRIALAFEAGRDGFWLARWLNARGVEAHVIHPSSVAVSREHRRAKTDRLDTELLKRGFLGWLRGERGHCSMARVPTIAEEDAKRPNRERECLVGERTRIVNRMKATLARLGVRNFKPTLRKAAERLATVHTPEGTPLPRNVLAELQRDMARLGFVVSQIREIEQARQKRLEQETETGSHAMVRQVARVIGIGIETADMLVHEVLSRPMRDRKAVARYAGLTGSPDESGARRREQGLARAGNARVRRGMIQLAWRFLRFQKQSALAQWYRARTADSRLGTRKTMIVALARKLLIALWRFVTTGETLEGVILRPAS

SEQ ID NO: 149058 - protein, 334 aa, unidentified
MDKVTTVGIDLAKNTFSLHGVDASGQVVLRKTVSRARLMVVVTQLAPCTVGMEACSGAHEWARRFQAAGHTVKIMAPKFVVPYRRSGKNDGNDAEAICEAVQRPSMRFVPIKSVEQQAILAMHRVRQGFIEERTATINRVRGLLAEFGTVLPQRAAEVRRGAAAAAEALPPLARHAVEDLISHLAGLDERIKSYDRELESLARSSETVQRLMTVPGVGPLGALATVATVGHAHEFRDGRQFAAWLGLVPRQWSTGGKPRLGRITKHGDAYLRTLLIMGARAALQMAAGRGDRLSRWAIALKERRGYHRAVVALAAKNARILWAMLAHGAEYRIA

SEQ ID NO: 149059 - protein, 443 aa, unidentified
MSRKDKTHLRGERGQAFADQIRGLNLEQILCVSLDISKYFHLVMIHNALGEIVTPTFEIDIFKTGFEQLCQAIDEAIDQTQAQLVLLGMEPTGHYFENLARHLHQRPQPVTLLNSYAVSQNRQQQMMRREKTDPIDVAAIGDLLRRGEGSSFQPLTGIYLELQHLDRVRLSKVKMRTMLKNQIIGHLDRIFPGLVLIGDQARARYRPLFVTDFWECQTMQQLIRVCPDPRQLATMSTTDLIAAFHAHNFKMGPKIAAKIITYAQKVLLPNPEVIAIRSELLHSDLMLLEAVEQRLLLLEERFVDLVAQTPYQIWTKLKGLSDLQVARLAAAIGDPDHYTHAKQVFRRSGLVSGRNDSGVRQNQGKGSPVVKTGDVHLRRALMDTLSTLLLHQPVLFSYYAKLKLSKPDLVARVATARRATGILWATLRDQYSTTLVYKRGEPM

SEQ ID NO: 149060 - protein, 337 aa, unidentified
MEYYAGLDVSMEETHLCVLDRDGNVIREGKTWSIPAAIEAFLATGPACRQVVFETGRMAPMLYHGLTALGVPVVCIESRQAYQALKSLKTHKTDRNDARGLAHLARTGFYKPTHVKSLSAHAVRALLAARKKLVGQRVTLDNQIRGLAVVFGARLPRALSPAFKEAALKVSDGVTGLSAAMRGLFAAREAIRAAVAAIDTDVKKMTRRSQVCRRLMTVPGVGPLTALAFAAAIDDPARFVRSREVGAYLGLVPRRYQSGEMDYTGRISKRGDVRLRTLLYEAANVMLTRYKASLKLKDWALSIAARSNMRKARVALARRLAVILHAMMRDGTEFRAA

SEQ ID NO: 149061 - protein, 427 aa, unidentified
METDLSRVERFRQFKQEIRGNERYLIVGIDVAKDRHHAFLGTANGRTVLRRLAVENSRNGFEHLSAHVQFQMRKHGLDEVVFGVEPTSVYHKPLAECLIGKGCLVVYVTNAAIKQNRQLLDGRWDKNDTKDAANVADLVAQGKCHYFDLPNDVLRDVRALLGVRRRLKRQLHSARMRIRNNLVAQYFPELDTFWNKAEEENLAIVRWSLDPETIRRLSFKEFFHRVTSRSKGARQHERLRGIWEAASSSIGCRVGKALEVETRILVEEVKRTREQIAEVEKSIKAHVSGLTHYELLLSIPGFGPYICAVVLAAVGNPHRFENRSQLLRLAGLDLSANRSGKRSSTAVPVISKRGKADLRYALYQAALVASSFNHHVMAYYRNLLTGREREPGIRTKMRVKLAAKLLIIAWTLMKNKEPFNPDRLKTD

SEQ ID NO: 149062 - protein, 349 aa, unidentified
MADKLIVGIDISKDWLDLCASNAAGVERIANTPEVVAAWLERVGAGLIAFEPTGGYERTLIAAVRERGIAFVRVHPNDVVAFRKSRGIKAKTDAIDARLILAFVCDKAARAELRTSLIGDDRLRALAARRRQLADALQAERCRLDAAALPAVRASLEAVIAVLRHSLGVLEAELADAVAAHPQTAELAKLLQTIFGIGPVVAITLIADLPELGLLSAKQIAALVGLAPHTKRSGKTRYRETTGHGRPGVRRVLFNAARAAVRHPSLFKDFYDRLVTDNRRPGKVALTAVMRKILITANAVARDHEPWHGRLAAGTPCRPHAEQTDHRAGRVKAAAARRAVARSASLEAA

SEQ ID NO: 149063 - protein, 350 aa, unidentified
MKTVALDVHADVSQMAVVTKDGEVLLEMQVPTRPEDLRRVVAGIPGPKRVVFEEGPMSGLIHDALKDVADEVMSVDPTRNALIGRAEDASDEKDAVRLATLANNRSTREVYVPEEPHRTLRSLTGYDHALADGVTAVKNAMKALCRRWAIPCKGVRIYGKETRDEFCAQLPSSPLRWQLQSLARRLDAMGLERTRAKRTVARLARKLPVIEKLKAIPGIKSVGAPTLVAWIVDPTRFRSRSALASYAGLGLGQGFTNWKPVGRARASKRGNRELKRVLFIAAEAAIKGQNAFARRFQARIAAGWERRKAIRDAARTILFTACAILRTGKEYDDGRVSVPEDQGDDRRVRD

SEQ ID NO: 149064 - protein, 317 aa, unidentified
MAQILPTVGIDVSKDKLDAATFPEGQRLSVANNEAGWRELIGWLRSIAPRAIGIEASGGYERGVIGALSRASLPVRSVNAWKLRQFAKAAGRLAKNDHIDAVMIAWFVSTMPTREIKRDPAREHLAELVSARRQLVDLQQELGNQLEHLRDAELRRIRRRRIGQLAVDQARLDRRIVEAIEAVPSFLHRYKLMCSMPGVGPVLAATLLASLPELGAATNRQIGALVGVVPYDFDSGKLKGLRCIFGGRAAVRRVLYMAAQAAAQHNSVLKAVKQRLVAAGKEPKVAIVAVMRKMITTLNAMVRADREWDPTRQAAAS

SEQ ID NO: 149065 - protein, 359 aa, unidentified
MHQKINEKTFHGQSIYVGIDVHKKDWKVTVMTESILYKTFSAPPQPGRLSSYLTEHFPGAEYYSAYEAGFSGFWTHRELTRLGIKSIVVNPADIPTTDKERKQKEDRRDSRRLAQTLRSGQLKGIYVPTEKTQLDRGLLRGRESIVKDLNRIKNRIKSLLYFQGIPYPIQFDMKNSHWSNKFFQWLESISFSFESGKARLEEYVGAAKYHRSSLLRVTRQIRELSKSPKYKEDVDLLMSVPGIGMLTAMTILLEVVDINRFENFSSLCSYVGLIPSTHSSGENMVNTGITTRKNSRLRAALVESAWVAIRNDPALLAGYQNLKKRIPGNKAIIRIAKKLLNRMVFVLRKKEKYEKGIIK

SEQ ID NO: 149066 - protein, 347 aa, unidentified
MKGYYYIGLDVHKKSISYCVKTVEGTIVDEGILPATRESLREWAESFASPWVGAMEATLFTGWIYDFLLPFAEELKVGHSYMLRAIAASKKKNDRVDARKLADLLRCDLFPECYMASEKIRELRRVLRYRNLLVREAARMKNKTAGLLMEVGAEYDKQRLHGKAYFKALLETLDYVPPSVVSLLKLTRSSLEVFVANQNLLLKALQEHPNLRERVDCLMSIPGVGKVTALTWALEIGDPHRFSSCKKAISYCGLCSPQDESAGKERRHPLSKQRNKHLQTILVEAAQLGPLRNPQLASVYERERGRGANHNQATLAVARKLVAYLLCVDKTGKRFELRNVVSTSLAM

SEQ ID NO: 149067 - protein, 405 aa, unidentified
MLETIVKKVAGLDVHKMVIVATVLLTQEDGETRKETRKFGTFRKHRRQLARWLKRSGIELVVMESTGIFWKSIFETLETAGIKTYVVNARHVKNVPGRKTDVMDSEWLATLARAGLLKPSFIPPKDLRELRLIGRHRMKLHGMLAGEKNRLHKILDDAGIRLGGVVSDINGVSAKEMVTGLIENKPVEELVLCARGRLKAKAEELHDSLSESISERHKFLLQKIQNHIQHLEQEIWEMDDYLFAAMTPYQEQWGIMQTLPGVDKFSAAMLIIEIGTDMEQFGSSGQLASWAGMCPGNNESAGKRKSGRARKGNRSVRRVLCEVANAARKTNSQFKGKYQGLVIRRGHKRTIIAVGHKILRVIYSMLKNNQPYWDPEIDYEALTVKRNAPRWLRALTKYGYLPAGA

SEQ ID NO: 149068 - protein, 326 aa, unidentified
MEHELHYIGIDTAKEKLDVDVLRPDGRHRTKKFANTTKGHDELVSWLKGHKIDHAHICIEATGTYMEPVAECLYDAGYIVSVINPALGKAFAQSEGLRNKTDTVDARMLAEFCRQKRPAAWEAPHPLERALRAPVVRHRALTDMHTQELNRTETAREVQRPSIDAHLLWLEAELKRLEKQIKDLTDDDPDMKHRRKLLESIPGIGEKTSAVLLAYIGLKDRFAHARQFAAFAGLTPRRYESGSSVRGASRMSKAGHVSLRRALYMPAMVATSKTEWGRAFRDRLAANGKKGKVILGAMMRKLAQVAYGVLKSGVPFDASRHNPVAA

SEQ ID NO: 149069 - protein, 359 aa, unidentified
MEQITGRPIVRVGVDLAKRVIQVHAVDAAGRVVTTRPLPREKFLPWCAQLPPQCVVAMETCSGAHHWARRLRVMGLQPRLIAGHFVGPYRMEGRRGKNDANDAAAVCEAAGRPHMRFVPIKTAEQQAVLAVHRLREGYKEERTGCINRIRGLLAEFGLVFAQSPEALRTQLGDVIEDASNELPHLARVALQRAHLQWLELECHIAWCDERIAAHVKTDEQAKTAAQLMGIGPVTASALVSSVGDFKQFKTGPQFGAWLGLVPSQNSSGGKASLGRITKRGDDYLRTLLIQGAKSVVMTAHKRQDRISRWLVQLAARVGWQKAVVAMANKNARILWAVLTKGRRFDPDHVGVKPTPAMAG

SEQ ID NO: 149070 - protein, 393 aa, unidentified
MFNPLKVRLMRAVCGLDVHKDSVYLCILTGEGELIEKVFGVLTFQLQQMRDLLLAHNVDEVSMESTSVYWIPIWRVLAPHFHMRLVNPYFIRQLPGHKSDVADAQWIAECTLKNLVSGSFVPPEDIQQLRQYDRRIFDLDEEIVRKLSKLDAVMQRCNFRLSNYVSNVDCKSYKDVVRKISEGVTDPESLIGEIHGRIIKHHGRETILASLAGVISQAEIDVLRQLREELALAEEHKRECLERMLEICREKYPDELRRLQTIPGVKERTATSLIAEIGTDMSKFETANHLSAWSGLRPRNDESNKKFKSRRITHGNIYLRKNIIQCAWAASRTKGCFFSRFSYHQTQVRKKNKMKVIVAVARKLLVAAWHVIHDKTDYADFQKQDRQAPASNG

SEQ ID NO: 149071 - protein, 379 aa, unidentified
MEHDSALYVGLDVHKDSITVAYAAGSGEVELFGKIGTTQADIDRLCKRLQSKARQIRVVYEAGPCGYSLYRQLVQKGFECMVCAPPLIPRKPGERVKTDRRDAVKLVRLVRTGDLSAVYVPTVEDEAFRDLARAWVSAKDDMKRARQWLKAFLLSHGVRYTGRPDWGPAHRRWLSAFSFGNLWQQLAFDELRRTIEDHLAQCGRLEAALREAVLDWRFYPAVLGLQAMRGVQFTTAVGMLAELGDLSRFAHPRQLMAWLGVTPSEHSSGNKRRLGSITKTGNSYARKLLVESAWSYRHPARVSPEIQRRHEGIPKPIIDRAWDAQVRLCRRYRKLAARGKNANVTVVAVARELAGFIWDISRLAMSLAVPREVHAQCNT

SEQ ID NO: 149072 - protein, 388 aa, unidentified
MIQVDDLSRSLIAFEQISTLVIVVELSQSSWLAAGVVPGIERRSLKKLDPDPTALLHLVEGWRDRATKAGRAITRTVLAFESGRDGFWLARWLRVRGVETFVMHSTSVAVSREPRRAKTDRLDTEMLIRVFLGWLRGEPRHCKMVAIPTLEEEDARRPSRERENLVGERTRIINRMKAALVRLGIRGFKPGLLTAPQKLDALRTPEETPIPPNMLDEMRRDMARLAWVREQINAIEQARLERLERAPATGRHAMVRMLARVIGVGVETADMLVQEVLSRNLRDRRAVARYAGLTGSPDESGSKRREQGLSKAGNARVRRGLIQLAWRFLRFQKDSALAQWYRGRTEDAAGKRKRTMIVALARKLLVALWRLVTIGEIPVGVALRTAVA

SEQ ID NO: 149073 - protein, 468 aa, unidentified
MRNAIGIDPDSKGFVCAYVKASETKVVTRGYLATEEDLGRFLKWVKEQGDVIVAIEGSNGLSKPIEKALREAEIIFYSFPPADADRFRKAVLGQNKDNQKDAESVGRYAMAMEVQGKLERYRRVWDADLELQILTRGYERKSYAMTAEVNRLWKLLRHASPDLYLALGGNHPEVELKANMLQNQGILALLSVKPNVGEWKKLSDEEFLSAMGGNAKGRLSMIQELRKVAATMNPVTPAVALMIQNSAGQIVRFKREQSEITKLLDEMTKDSLPVQALKEMRGIATITATTMIAEIIDIRRFAREDNLASYSGLGRREYSTGETTRMIPTRSFNHRLKDIFMTAARNYVHFNPDSHLAGYYRNLVKARMDPVEATKRVARALVRVIFRKLSSLVKEAVGERPVEETLTAGESDMASGSLRSDRGHESNISLSSQKGSKSGKAKRVKGSGSRTSRSMRSEKKRAVSKKTA

SEQ ID NO: 149074 - protein, 292 aa, unidentified
MGEVCRIGLDIAKNVFQVHGVDKHGRDVLKKKLQRSAVLSFFANLPPCLVGIEACGGSYYWAREISKLDTGHTVRLISPRLVKPFVINNKTDAADARAICEVVGRPSTNFVPIKTVAQQDMAAWHRIRALKIKMRTALVNQVRALLLEQGVVIPQGVLHVRRQLPTIIEDQDNGLSLTARDYLSDLYSEIVDCDERIEKCDERINSFAKTDETCKRLLKVPGIGPLIVTAIVAHVSNAHNYRNGRAFASSLGLTPREYSSGENRSYWGYPNAGILISDNLLFKVCVISSEAG

SEQ ID NO: 149075 - protein, 342 aa, unidentified
MEAYVGQQFVGIDLHRRRSVIVRTTATGQLLESVRIVNGADRLSEVMTRAGQSPEVVLEATYGWYWAVDALQAAGAIVHLAHPLGVKAFEYRRVKNDVRDAVDLADLLRMGRLAQAWIAPPAVRELRELVRHRAKLVALRSHAKAEVHAVLAKCGVQVLMSDLFGVAGTALLDELDLPAPYAARIGSLRRIMDLLDFEIDVFSKLVRGRLARDPAYTAVQTIPGIGPTLGAVFLAEIGDVTRFATAPQLTCWAGLTPKHYESDTHVHRGRITKQGSRLVRWAAVESVQILPKTSLVGQIRDRVAARRGRNIGVVAAARRQLEYVYYALRDHHVRALPTSTAA

SEQ ID NO: 149076 - protein, 371 aa, unidentified
MTSVVYVGLDVHKESITVCSYDPINDNLGNVQKLGSDYKMIMKYVEQLRRRANDEVEVICGYEAGCTGYALYHQLNNRGIKCVILAPSTMMIINKGGKKNDRRDAGNIAKCLAFGTYSKVHVPTKEDEDVREYIRMRDSQKKALKITKQQILALLLRQGYRYTQGKNYWTQMHLLWLRSLDLGGILQETLTEYLIEYERLTSKIERMDQRIEEIAGGDRYCENVKKLTCLIGVKTHTALSMLVEVGDFKRFATPDRLASYLGLVPGEDSSGARQRNTSITKAGNSHARRLLVEAAQGYTRGAIGFKSKELKRRQSGNTPEVIAYADRANERLRRKFYRMVLKNNAHRNVAATAIARELACFMWGMLTDHIA

SEQ ID NO: 149077 - protein, 340 aa, unidentified
MTIVTLGLDLGKNWVHMVGLDADGRIVLRRRVRRDRLLVETVDMPPCLIGMEACCGAHHLGRALAAQGHTARLMPPQYVKPFVESNKNDHRDAEAAAEAVQRPTMRFVPLKSEAQLDLQTIHRVRQRLVGRRTALINQLRAILLERGITVARRRRVLELRLRAILADESARLSARVRHLIEDMRAEWRDLDARIDAFDAELTAKARQDDACRRLCEIPGIGALNATALVAAVGNGAVFDRGRDMAAWLGLVPREYSTGSKQRLLGISKRGNKYLRTLLIHGARAALPYLAARNDRLGSWLRSLLARAHRNVAVVALANKLARIVWAVLANDGCYAMPTTA

SEQ ID NO: 149078 - protein, 423 aa, unidentified
MEPQGLTENEEPIRVVHPRCCGLDVHKDAVQACLLVTAPGGKVRQEQRSFATVTEGLLALLDWLVAAGCTHVAMESTGVYWKPIYNLLEGTLAVLVVNAQHIKQVPGRKTDVNDAAWIAGLLRHGLLRPSFVPDREQRELRDLTRYRKSLVDERTAEVNRLQKTLEGANLKLASVASDILGKSGREMLDLLVRGTTDAALLAQCARGKLKAKIPELERALAGSFGPHHRFMVARQLAHIDFLDAAIAEVSAEVATRLAPFEAEVALLDTIPGVGRETAEALLAEIGTDMGQFPSAAHLASWAGMAPGNHESAGKRKSGKTRKGSRWLRATLVVAAQAAGRTKATALGARFRSLAARRGRKRAAVAVGHSILILAYHILLHHEPYQDDRLRASQGKRPPSPEQLVQQLRALGFDVAIQPAAPAA

SEQ ID NO: 149079 - protein, 317 aa, unidentified
MTEVSFPSQVLRGCGIDVHLKVVVATIKGEGIRKETRSFDTFTSSLTELKEWLLQNGITHVAMESTGVYWKPVYHVLEDAIPNVWIVNARHIKNVPGHKTDKMDSEWICKLLLAGLLKPSYIPPKKQRQLRDLTRYRNKLIQHVSSEKNRIMRILEDCNIKLSSVVSNTSGTTATKLIDWLCEGKFITLQDVESIYHGRMSTTPEELLKACTGFVESHHVYMLQMIRRDIDQTTVLIDELGAKIRDVLSKYDNAIELLKEIPGFSDKVVEDLVAEIGFDMSKFPSEKHLASWAGICPGNNESAGKKKAEESPTETNK

SEQ ID NO: 149080 - protein, 322 aa, unidentified
MEVGQTVADPGVVGGVDTHKDLHVAAVVDELDRVLESRCFATTRQGYKQMLTWMRSFGQLRRIGVEATGTYGAGLLRYMQNAGVEVLEVTTPDAHDRRKRGKNDDLDAQNAAHAAFAGRRTVAPKSRDGMVESLRVLKACRKTAVAARRVALQMIHNTIVCAPDDLRETLRKMTRMQLIRTLAAWRPDLTDYRSVGSAYRITLKSLGRRYLELHDEIADLDTMIVAIVDELAPALVARNSIGHGSAAQLLVTAGDNAERLQSEASFAALCGASPVPASSGKNDPPSPQQRRRSGGQQCAPHHRHRTASDRSPDQGLHREACC

SEQ ID NO: 149081 - protein, 385 aa, unidentified
MAQSEDMSKPPTALAQNDTLICVVEMGLKSWLVAGLVPGIERQPLKKLEADESALHRLVLRWKAEAEKAARPISRITLAFEAGRDGFWLARWLGSRGIEAWVIHPTSIAVSRDHRRPKTDRLDTQMLMRAFLGWLRGEPGHCRMAAIPTLEQEDAKRPTREHETLVGERTRIINRSKSALIRLGIRGFKPGLRKASERLASLRTPEGVPIPPNTLAEMHRDMARLAVIQSQIAEIAVARLERLEHATDAPHAMIRLLARVIGVGVETAEMLVTEVLSRNLRDRRAVARYAGLTGAPYESGSKRHEKGLAKTGNARVRHGMIQFAWRFLLFQKESALARWYRARTENAKGSRKRMIVALARKLLIVLWRFVTTGEPPEGVALRVAA

SEQ ID NO: 149082 - protein, 457 aa, unidentified
MMAREVGAVLEPQEIQDEEHEQILERVAAVDVAKASGMVCMRVPDPARPGRRHNLVWQVDATMNAVLELADHLVGERVQKVTLESTSDYWRLWYYLLEAAGLDVQLVRAADLRRAPGRPKTDKLDCIWQAKCTEKGLLRPSFVPPAEIRVLRDYTRMRIDLTRERTRHYSRLEKLLEDALIKVSAVASSIDTLSVRDMVAALIAGERDPIVLAGLARGRMKIKHDKLVEALTGRFDAHHGELARMLLDQIDGLTTQIDKLTVRIEELIAAIPEAQGVDPDGTTGPGAGLTAGSPVLPAADRLDEITGIGRDAAQVIIAEIGLDMSRFPTPGHLVSWARLTPLTMQSGAVTRGGKTGKGNPYLKGVLGSAVAAAGRTDTFLGQRYRRLARRRGKLKALVAVARSILVIAWHLLSARDARFHDLGSDYYTSRIDKNRKTRSHVRQLEAPGYSVALTPAA

SEQ ID NO: 149083 - protein, 356 aa, unidentified
MTIVAHAHPFVIGVDTHARNHTVAILAAPHGELIDTAQFPTTAAGMARAIDWTARRTGADLDALWVIEGVGTYGAQLAHAVTHAGYQVVEAARMNARANRGVGKSDPLDARRIAAAVLPLETADLRYPRRDDGERAALRVLVAARDHMTRERTATINALIALLRAVDLGIDARRPLNGNQIAEMAHWRTRRTENLATATARAEAIRLAKRVVGLDEELAANHSRMEHVVRMTPAAGLLEKTGIGPVTAAIAITAWSHPGRVRSEAAFACLAGVNPIPASSGNTTRHRLNRGGDRRLNRALHMATITRMRSDPATRAYVERRRAEGRSTKEIRRCLKRYLARQIFRYLNTSAAVTPA

SEQ ID NO: 149084 - protein, 460 aa, unidentified
MRRRGKRTSGIEEARPFTGMSQVNANAAGVDIGAEEIVVCVGGDANTQIVKAFGTYTVDLQAIGKWLKEHQIKTVAMESTGVYWIPLFEELERQGFECLLISSRSLRRVPGRKSDIVDAQWIQTLHSYGLLESSFRPEAELAMLRTLLRHRAQLLEHRSPHILHMQKALLQMNVQLSQALSDITGDTGQTIIRAIVAGEREPQKLAAWRDRNCKKSEEEIGKALTGTWREEHLFILKQALELYDFYTQQVESCDEEIERVYALTRPNWEVGELAAVPAKKRQSHKKNAPKNTEAIRQHLKRISGVDISLVDGFGVPLAQTVLMEIGTDMDKFPDEKHFCSWLGLAPKHEISGAKVLKNKTLKTKNRAGQAFRMAAQAVKRADCPFGALYRRLKARLGPAQATVATAHAIARVVYRMLKYQVEYEPLSVNEYEKKYKEQQIKYMKKKAAKLGYQLVPTPSA

SEQ ID NO: 149085 - protein, 306 aa, unidentified
MIAQNYVGCDISKQWLDFFDETSGRLRRIDNQADAIAAYVAGLDPSRDFVVMEATGVHDRLLRHALAKAGVPFSRHNPAHTHHYSKSTRRRAKTDPLDARMLSGYGRRYNPEAEPAPSEEVEQLQSLAGHRDQLVGMRATLKKQLSEAFEEIVITSLEDLIADLDTRIKAFESQIAAVIRQNQDTARDHALMVSVPGASKGGALSLLALLPELGQRSPKAIAALVGLAPFDNKSGKLNRRSQIQGGRSRVRRALYMAALTAIRACERFKTFYTALAARSGSKKLAIIAVELLVVLNAIIRDITAFA

SEQ ID NO: 149086 - protein, 344 aa, unidentified
MEITRLGLDIAKRVFQVHGVDELGRMQVSKKLSRAEVLRFFAQLPPCVIGVEACGGAHYWGRELKRLGHTVKLMAAQFISPYRKSGKNDANDAEAICEAVSRPNMRFVGIKSEEQQAVLMMHRVRTLVVANRTALANQVRGLLGEFGIVVPVGIRRLRAQLPQILEDAENGLPALARRILADLLQQLHHLDEQVEHYERELGALAQLSEPAQRLMQINGIGPITATALVASVGDARVFKNGRQFAAWLGLTPRQYSSGGITRLGRITKHGDRYLRMLLVHGARALLRFVNRKTDARSAWAKALKERRHVNIVAVALAAKHARIVWALLAQGTQYRQPPEMAAAS

SEQ ID NO: 149087 - protein, 339 aa, unidentified
MDTIRFLAIDLAKNVFQVHGVDAAGKLVLRRRVGRAQLTELVLRLAPCTIGMEACSSAHHWARQFLQQGHTVKLISPQFVKPFVKGNKTDGNDAEAICEALQRPSMRFVPIKSVEQQDVQSLHRARSRLVSNRTGLVSQMRGILAERGIVFAQSITRARREIPVIVADTSNALTPLAREMLADLMDQLRELDRRIAGFDRRIDLVFKASETCQRIAQIEGVGPKTATAIVAAVSDPKDFRNGRHFAAWLGLVPRQSSSGDRTHLLGISKRGDRHLRTLLIHGARAVLRTAPTKHDKKHAWALALKARRGANRAIVAIANKMARVIWSMLATGQSYQKAG

SEQ ID NO: 149088 - protein, 401 aa, unidentified
MVKVRERIWVGIDVGKASHHACAVDETGKVVFSQQTANGQAAIQALIARAGKAGGEVSWALDMTSGTAGLLLALLWQTGQPVRYVPGRLVNRMAGAFAGEGKTDAKDAKTIAETARLRTDLVTVTAADPIVADLQVLTAQREDLMGDWVRGVNRLRALLASIFPSLERAFDYSTRSALVLLTGFQTPTSLRDAGRDGVQAYLTEHGAWPRGIPVMADKALDAAGEQTVALPTEKVTAPLIARLAADLLDLDRRIKDLDKELTDRFEEHGHAKAITSIPGFGPILGAQFLADTGGDLQRVFGTPGRLAAYAGLAPVPRDSGRVKNNLHRPKRYNRGLRRVFYLAAFSSIRADGPSKTFYQRKRSEGKVHTQALIALARRLVDVIWALIRDNREFQPTVAAAA

SEQ ID NO: 149089 - protein, 360 aa, unidentified
MEDSSTRVVGIDLAKRSYVAHLIDETAVKTQTLVWDGKTDEKGISRLCAKLRPTDRVGMECCAYAFYLAKVLKERVGCRVLVLNAGDLAIIYKSVKKTDLEDAGKLAWLVHRMKDEELPVVAIPDEQEEHRRALVSELGSKKQGRTRAINRLHSVFVRQGIVTVGKEDLRTSAHREIQIAVLTGHLQSEARRLQEELILLEKHIDEIQTEVKNDLAAEPLATPLLSIPGVGPATAMAFLAHVGDGSRFSRARQVSHFVGMTPRVDSSGETAKIGNISKRGCRAIRAVIVQSAWAAVHTSKSHRLKQKYIELSDRRGRGRAIVAIARRILELMWTVVRQRTLYNQTTPAELAAKMARLRVA

SEQ ID NO: 149090 - protein, 386 aa, unidentified
MPRYIGLDVHKNYIHACEFFPGQPEGKQERHFRFPNTSQGWSAFIGQLDPDTRVALEVTGSAFEIYDTLFPHAGQVFVANALELKRMGSGRHTDRADASRLARMLAIGTLPTVWVPPQTMRQVRRLLRARERLNRSRLALINQARSVLSRHGVTVPKGADLFRLLTPHDLVRLPTGEKAIVLANLEGARSLSQQVDALTVEIAQSVAHIPEVKQLLTIPGVGIVTAAALWARLGDPQRFRSPKQVARYVGIDPSVDQSGERDRRGRISRRGDTLLRYMLVEAAWSTARYDTGALGAFYRRKVKTLGARRAIVALARKLLIVAWRILLTGEPYRAQKADAVKRKEGELRRLLRRAVDWEAIGAEMWPSSHSAVSDPPSRESPYVTAG

SEQ ID NO: 149091 - protein, 348 aa, unidentified
MAGSTLPHRWSVGIDLHKDTLTACVYCSCCGEIRFQKIACRCRKQIAEFFGSLPRPHVVAIEAVGFYRWLWEMLEPLVERLVLADATQARALAGRRMKTDREDAQNVAELLACNRLPLAYAPPFEVQVLRDCSRQRNALSRQHAHVLHRVKSVMNANNRPGPARMASSGLIRYLEAFQSKLPERHGRYLWLCVDQLALIERQRAQLERELQRLLAQPLFAETSAILNSFPGVGLVTCATVLAEIGDFGRFSYRKSISRYGGFDPRTFDSAGKQRTGHISKRGPSNLRWVLVQAAWAAIRLDPQVKRIWLRISRKAGKKAATVAVARRLLVWMWKAVRTGQPYRAPVAA

SEQ ID NO: 149092 - protein, 342 aa, unidentified
MESAVTIGLDLGKSVFQVHGVDAGGTVVVQRRLTRSKLLAFFAKQPACLVGMEACAAAHHWGRELRKLGHTVRLMPPRYVKPYVKRQKNDAADAEAICEAVTRPSMRFVEIKSCEQQGTLVLHRVRLMLMRQRVQLSNAIRGHMAEYGLVAPVGRNGLQRLITILGNADDERVPAVARMSLAPLVSQFGLVNDQVLENDRRVRASARATELGCRLMEVPGVGPVLASAMVATVPDPAAFKSGRNLAAWIGLVPRQNSSGGKEKLGGITKQGDRYLRQLLVAGALAVIRYAQRHGTKRPWLVHLLARRTPKIAAVALANKMARMIWAMMMTGERYREPTVAAA

SEQ ID NO: 149093 - protein, 289 aa, unidentified
MKLYGAIDLHSSNNVTVVINDQDQVVYQKRLPNDLSLIAQQLSTYRASLQGIVVESTYNWYWLVDGLMEKGHRVHLANTAAIQQYNGLKYTDDHSDARWLGHRLRLGVLPEGYIYPKQERMVRDLLRKRGQLVHQRTANLLSIQSLISRTTGNSISAQYIKALNIQRVDGVLPNPDLLLALKANLAVMNSADAQIEILEKAVQDRVKLHPQFRFLKTVPGIGPILALTIMLETGEIERFASVGNYASYCRCVGSKKISNGKRKGSGNTKNGDKYLAWVFVEAANFCDPF

SEQ ID NO: 149094 - protein, 347 aa, unidentified
MRFYTKQHRFYCGIDLHARTMYLCILDQEGEIKLQRDIKTDPEVFLRTIARYREDIVVGVECIFTWYWLADLCARENITFVLGHALYMKAIHGGKAKNDKIDAHKIATLLRGGMMPIAYVYPPEMRSTRDLLRRRMHLVNKRAELLAHVQNTNHQYNLPEIGKNLGKKGNREGVAERFHDVIVQKNIELDLALIDHYDQLLHRVEHEISLIAKKHDADSYFRLRSVPGIGRILGLVILYEIHDISRFERVQDFVSYCRLVKPARESGGKRLGSSGKKIGNVHLKWAFSEAAVLFLRRNPEAAKYREKLAKKHGKAKSMTILAHKLARAAYYILKRKEVFNLETFFAR

SEQ ID NO: 149095 - protein, 415 aa, unidentified
MEVIYKRCCGLDVHKKMVVACLIIRDGEEVKKEIRTFGTMTSDLILLHDWLLANRVTHVAMESTGIYWKPIYNLLEGNFEVLLVNAAHLKAVPGKKTDVKDCEWIADLLAHGLLKGSFIPPEPIRDLRDLTRYRKSLTEERNREVNRLQKLLESANLKLSSVATDVMGVSGRAMLEAILSGSTDPEVLAELARGKLRKKLSLLREALRGRFRPHHRFMLEQILSHLDFLDETIERVSKEVENRIVPFQKEIELLKTIPGVDQKTAEVIIAEIGVDMSRFPSHRHLASWAGLCPGNHESAGKRKSGKVRKGSQWLKRGLMESSWAASRTKETYLSALFHRMVRRKGKKKANVAVGHAILIIVYHILKKRIPYYELGADYFDRLNLKYITHHLVNRLNGLGYKVILEPLSLAALVET

SEQ ID NO: 149096 - protein, 342 aa, unidentified
MKATTIGIVLAKHLFQLHEVDQHGKTILKRQLKWEQMLSFFSNLPPSLIGMEACGSDHYWANKLQEMGHTVKLMAPQFVKPYVKTNKNDAADAEAICEAVSRPNMRFEPMKSSEQLAVLALHRARQGFVKTRTAQANQLRGLLAEHGIIIPKGIAHIGKHLPEILEECENGLPGTFRQLLECLGDHLKALDRQVQELEVQLQSWHCENVASKKLAQIPGIGPITASALIASVGDAKNFKNGRQLAAWLGLVPRQHSSGGKQTLLGISKRGDSYLRTLLIHGARAVLRVAERKAQHAGSWLAGVMGRRNHNVAVVALANKNARIVWALLAQEREYKANYGVAA

SEQ ID NO: 149097 - protein, 420 aa, unidentified
MAKFRAAPRTPAWLAIDVAKNRHAALLEDHAGHRRRLTVSNTQAGFEELARILAPHLPCEVALEPTGDYHRPLANFLLRQGHHVHFVSSIATNRTREALFNSWDKNDPKDAQVILHLLKSGTTQVFADPLQRGNQDLQELLGTYRQIADRKTRVYHSLMTHYVPLYFPEAEPFLSNPRCEWFLEVMRIAPCPSAVLQYGKKTFVKRFTAVGGHFTSRQSLVASYYESAKESVGIPVAADSQAVQMFQIAVEQYIDLIKLRRKLQERIDAQLENNVDYQRLRSIPGIGPIVALTVLAEGGDLRRFSHHRQFLNYCGLSLSTMQSGASRGRPQLSKRGNARLRWAFWVAANAAINQRRNSFRKKYDDYVRRDPLDADLKRRAYVAVAAKVARVAYGLIKSGKEYRHYLEVAVHDGRIPSLGR

SEQ ID NO: 149098 - protein, 321 aa, unidentified
MYTFVEDKPIKKKLRRAELLAFFANYPTSLIGIEAYGSAHHWARELTKLGHEVILLNTRFVKSFVIGNKNDFNDAAAIFDAVTRPNRRIAAIKTIEQQDIQLVHNIRQGLVGNRTALVNQIRGLLSERGIIIPQGINRLREQLTLILEDAENDLTALSREVFAEQYENLRALDDEIKEQDRRISRLCNNNELSKRFLEVPGIGPMTASIIASDIGNGKGYPSSRDYAASLGVVPRQHSSGGKFVYLGISKRGNKYIRTLLIHGARSVLKNSGKKTDKLSLWLQSLVERRGFNKAAVALANKNARILWAMATQEKEYNALLV

SEQ ID NO: 149099 - protein, 326 aa, unidentified
MQGKEASEQETKVKSSVGIDTSKCWLDVHVLPTNERLRVANSCAGIRQLKRWLSRFDIALVAIEATGKWHRHVHRSLVASAIPVAIVDPFRVRMFAKAQGILAKTDRLDARVLALFAAMMDPSVRAPAPQTMAELAELVVARASAVEAQTALKNQNDAAECKFLKRQLERRIVRAGKDIAALEGEILKRIKADNGLARRYAILTSIPSFGFAVAATLIACLAEIGSATVKQIAMLAGLAPIADQSGERNGVRVIWGGRPAVRRVLYLAALSATRFNADMKAFYQRLRDKGKPPKVALIAIARKLVILANTLLNEDRTWQLHAPKRA

SEQ ID NO: 149100 - protein, 339 aa, unidentified
MHFIGIDPHKDTLAACAVDPHGRPVSHASFPNDPAGYADLVPWALAYRPDRIGVEGAGGLGRQATLALQRSGLTVVEVPPQLTAQARRRGRSQAKTDPIDALLIARITLRDANLPTVRGDGPLEALRSLVDYRRELLGERTRLANRLHADLEQLRPGYQRRLPKLAHPATVDRARRLLADDARTRAQIARQRLTRLRQLHTQIAELTTQITQLVGRFDTALTQICGIAAVAEAELLAEVGDISRYGTKAQFAMSNGTAPLPVSSGRTNRHRLNRGGNRQLNRILHYIALTQIARDPQGRAYYHRKLAEGRTKPDALRCLKRRISDRVYQTLRRQPPAGC

SEQ ID NO: 149101 - protein, 316 aa, unidentified
MTEAGGFVGIDVAKAELEVVVRPSGARWTVTNNPVGLAQLQERLQASAPSLIVLEATGGYEVAVVAALATAALPVVVLNARQVRDFARATGRLAKTDAIDAGVLAHFAEVVRPPVRPLPDAMTQSLQAWLMRRRQLVEMLLAEEQRRSRAPRPIQRQIDQHVRWLRAQLGAVEKDLAQTLRESPVWREKDNLLRSVPGVGPVLTTTLLGDVPELGQLNRKQIAALIGVAPLNRDSGTYRGRRAVWGGRARVRATLYMATLTAARYNPVIRAFYERLVAAGKPKKVALTACMRKLLTILNALIARRTAWKPPAAVSA

SEQ ID NO: 149102 - protein, 445 aa, unidentified
MQTIFRLAKPLNSDAQPIATSFAMPLGKTDSTRYAPTYNNSGLGVRLGSRRPSKRSCSELQQSGRVVVRQKFCRVHNVSEDSCRRLPRLAVRWNYHGFNVAQRQEAAMSLYAAIDLHSSNSVLAVMDGEGKSLLQCRRPNDLPRLLSDLEPYRDELVGVAVESTYNWYWLVDGLMDHGYDVRLVNTTAIPQYDGLKHGDDHTDALHLAQLMRLGLLPEGYIYPREQRATRDLLRRRFSLVRQAVRLMLSIQSSFSRSTGKQLSANQLRQLKPSQLVDLFPELSTRYGVLIQFKLWLTLQDQITALEQWIRKELTRPDLLARLQSVPGIGPILGMTILLESGAIERFDSVGDYASYCRMVESVRLSNGKRKGTGNRKCGNRYLCWAYMEAANYAVRYHPSIRRWYERKRARKHRVVAIKAVAHKLARACYHMLHEGTTFDPTRAFG

SEQ ID NO: 149103 - protein, 362 aa, unidentified
MKRIKFVGLDVHAETIAVAVAEQDGEVRSIGVIPNRCESVRKLVQKLGPVEELRFCYEAGPTGYVLYWQLAALDAKCEVVAPTLVPVRAGDRVKTDRRDALKLARSYRAGELTAVWVPDAAHEALRDLVRAREAAKRDQLRARNRLTKFLLRPGKRPPEGVNPWTLNYMNWVRKDVHFEPLAQQATLLDYLHEVEHMAARVTRLEQAIEEAVQLAPQQMREVIEALQALRGIAKVSAVTIVAELGELSRFGEARQLMAYSGTVSREHSSGESCKRGGITKTGNVHLRRIVVEAAWAYRHAPAVTACLRQRQERVSEEVKEIAWKAQHRLHGRYRKLTARGKNTGKVITAVDANSWGSSGPLG

SEQ ID NO: 149104 - protein, 424 aa, unidentified
MNNVQAEKLGFVKGKVLIVGVDVAKRINYARFIDSQGYELCKHYRFQNDLDGIKSFISKIKSLERQHGLERTVIGMEPSGHYWEPLAYQLKEYQLGQVFVNPYHVKCSKEMADNSPSKSDLKDALLIAKLVLDGNYFKMYLPEGAYRDLRNLTRERYQLRKKLNNSKNRLIAQLDSYFPEFFKVFKDPLGQTAVYILEHHPFPQDITDFTLEELATAIKGASKSRLGLKKALELKQAANDSVGINEGLASARYRIKSCLTEIAFYKRQLSLLEEQMFQYLNNTGFSRNLLSIPGVGVVTAARFLGEIGDISRFDSPEQIIKLAGLNLKTNSSGQRKGKTAITKRGRAELRSLLYQSALVMVCRNEQMSKSYHYYRTRSINPLKSKQALVIIMKKLVRIIYALMTKDELYDPAVALRGDIVTTAA

SEQ ID NO: 149105 - protein, 286 aa, unidentified
MVVLGADTHKRNHTVVAVDGAGVELGSITLAATPEGHLRLVKWAARWPERRWAIEDCRQLSRRLEADLLKVGEQVVRVPPKMMAGVRRSARTRGKSDPIDALAVARAALREPDLPRAQLDGPSREVRLLVDYREALVKDRTAAQNRLRWRLHELDPGYDPPAGSLNRYKTLDEIDQLLTAHTSMVAELGRREVARIRELTREANQLEGDIGRRVEELVPSLLEIPGCGGLTAAKLVGEAADITRFKSRDAYAMCAGTAPIPVWSANNQRFRLNREATDRPTQQSIG

SEQ ID NO: 149106 - protein, 370 aa, unidentified
MSKLATLFIGLDVHKESISVAHVPDDRRAEVSYVGRIGTRPADIDRLVRRLQEKADRLVVAYEAGPCGYVLYRDLTRRGITCLVVAPSLIPKKPGDRVKTDRRDAVQLARLLRSGDLESVYVPSVEDEALRDLCRAREAAVVTLKAAKFRLKSFLLRLDLHYTGRADWNDAHLRYLAKVVCPTPAQQIVFQESLRAVDEQVQRLKRFEAELADLVPAWRLAPVVHALQALRGVQDTVAVTVLAEIGDLTRFDNPRQLAAFLGLTPSEDSTGESRRQGPITKAGNGHARRVLVEGAWAYQYPAKVSPAIRKRLEGLPQPVQDIAWKAQVRLCKRFRRLVARGKHPNVVVTAIARELAAFMWAIAKEVPITA

SEQ ID NO: 149107 - protein, 346 aa, unidentified
MIYVGIDLHRKRSQIAALDEAGVELLSRRVANEPEALRTILAELGGELKVALEATYGWEWLADLLEQEGHELHLSHPLRTKAIAAARVKTDAVDARTLAHLLRTDLLPEAYVAPRELRDLRDLLRHRVVLTRMRSALKNRVHALLARQGIQREHADLFGTGGRRFLGELALREPARRRLDSLLSLISDFDREIELAKREIDALARHDPRVDVLCQLRGIGPYTAMLVIAEVGEIERFPSARHLCAWAGLTPTVRSSDGRARLGHISRQGSPHVRWALVEAAQKAATGGGPLRASFERIAKRRGRNIAKVAIARKMLTLCYYGLRDGEIRCLQAPGPESTRPVKAAP

SEQ ID NO: 149108 - protein, 339 aa, unidentified
MENNNNPYYKHYLSIDWSQQDVSIARMRAGSNQPETKMFPSDIKKIKEYLKGLQGKKILTIEETTGSHWLYVELLESVDKILICDPYRNSLLKEGAKNDKIDARKLCLLLRSGLLKEVYHTSNEDYKIRKLASAYIALVKSGVRIKNQNSALYRGEGLKYKKDKIKKGEEILSFVEGQQKRAIKLYEEEKKKYEEVFKELKKKNEVIKMLCQVSGIKETSGVKIYSVVIDARRFENKYKYWAMCGLVKHDRESGGKNYGKKNPRYSRILKNVYKSAALAAIGGNNDIREYYEVLLQKGHPIAEAKNQIARYIAKVTYAVMKNKKPYKAYQWRELNKQKS

SEQ ID NO: 149109 - protein, 337 aa, unidentified
MGIDVHKKSWGVCILTDYYEHKVFSQPPEPLVLMNYLNRNFPKGNYYSAYEAGFCGFWIAHELERLGVVNLVVNPSDIPTTNKEKKQKSDKRDARKIARGLRNKTLKGIYVPNQQILEDRLLVRTRQKLLSDIKRCKCRIKSHLNYFGIKIPKELDKPYWSKAFRFWLTTELFTGSAQVLIEALLEEMQQIEHQKKVLEKQIVQLANGIYKPIITLLQSIPGIGLLGAITLATEIAEITRFKTQDQLHSFAGLIPNLYASGETERIGRITKRHNAFLRPILIQCAWRAVKVDPRLGLNYINLCKTMKGNRAIIRIAKKLMNRVRFVWKHQQKYSCNL

SEQ ID NO: 149110 - protein, 371 aa, unidentified
MWTAPYGISLCQNEVWLKSQTREPSVNQIIRIGMDTSKHFFQLHGVDAAEQPVLRKRLGRKQVVAFFAKLSPTVIGMEACGASHYWARVLRQLGHEVKLIAPQHVKPYVKRNKNDGRDAEGTCEAMGRPTMRFVPVKTAEQQAALMLVGIRERLIARRTQLSNAIRGYAAEFGLVAAKGLDKIEPLLAWVAQDEGVPTLARELFAMQGREYAQLQVELKAIEARLKAWHRANACSQRLAQIPGLGPIGATALVMKTPDPRAFPSGRHFAAWLGLTPKDHSTAGKTRLGKITRAGDEFLRSVLVAGATAVIQQVKHGRGHPSPWLIALLKRKPPKLAAVALANRIARIAWKLMTTGESYDGARMPGASAFAA

SEQ ID NO: 149111 - protein, 341 aa, unidentified
MTTVSTIGLDIAKHVFQAHGADASGQAVFRKKITRTKLIDFLASQPRCLVALEACGGAHYWGREISKLGHTVRLIPPSYVKPFVKRQKNDAADAEAICEASQRPSMRFVAIKDEEQQAHGVVFRARDVLVRQRTQCINALRGHLTEYGWVVPKGTSHMATLIDQIEDPNCSLPKSACAVLAVLVTTLKSLEENIAILDAEISRRSREDAIARRLMTIPGVGPISATAIAALAPPVETFRTSRDFAAWLGLTPLQRSTGGKQRLGATSKMGERTIRRLLIIGASAVVSQARRRGAPAGSWLARMLVRKPRMLVMVALANKTARIIWALLAKGEVYRAPAAVA

SEQ ID NO: 149112 - protein, 344 aa, unidentified
MPIASIGIDLGKYTFHLVALDQCGKAIVRKKFSRQQLLSYTANLPDSLIGLEACGGAHFLGKALREQGHEVRLIPGQFVKPFVKTNKNDYIDAEAIAEAVGRQNMRFVPIKTDDQLDLQALHRVRERLIKRRTALINQLRGFLLERGILFAKGPASLRNQLPAVLEDAEQNLTPLLRSLLHRLWQEWKQLNSEIESISHEIDDIGGADASCQRLREIPGVGPLVSTATIAAIGNGAAFRKGREFAAGLGVVPRQHSTGGKTKLYGVSKRGSSYLRRMFVHGARAVLLRVRYDTGGLGQWAQQLAARAPRNKVVVAIANKLARIVWAVLAKGEPYHHPAPLCTGA

SEQ ID NO: 149113 - protein, 346 aa, unidentified
MLVIGCDFHPSWQQVCWVDTITGETEEKKLVHGSGEAERFYRQLSGPALIGMESTGNHQWFLEMVTAAGHELWVGDAAKIRASDVRQQKHDRRDAALLLKLLLDGRFPRIWVPSSEQKDLRQLLMHRHKLVRVRAQVKNELQHLALNQGVQRKQRLWSAAGQKVLNELALRPWGSRRREDLLKLLAMLDQQIAPLDLAVEQAAQENSQAKLLLSQPGVGPVTSLAFVLTMGDVSRFRRGKQVASYLGLIPREYSSGGHQRLGSISKQGNRFMRMLLVEAAQIAVRYDPGMRNEYLHRCHSKAKGVAKVAAARKLAIRLYWMLRTQKPYPQIVRIESSSRVALVGES

SEQ ID NO: 149114 - protein, 328 aa, unidentified
MHFIGNDVSKLTLDIAYFDEVRMRWSKPRQVSNTKHGWDMLIHWAEKQTRASGEAICVVMEATGIYHLKAAAYLSIAGLKVIVVNPGRAAEYARSQNRMNKNDPLDARSLQRYGSTLEKYHWFTPDSPEISELKALLSRMRQLDKDLQRERNRLEKCDFQEASALLRTSLRRSIRTIIKEQKWIQTHIDKLIANNAKLKRNQQLMCSIKGIGKITSQWLLPLLSDQRFNSAREVGAFLGLAPCHKTSGTTLKTGGKLTGRGNANLRARLYMPAMSAARTDPEMRAFYQGLIAKGKPKKVALIAVMRKLAHLCYGVVKNQTPYQANYAT

SEQ ID NO: 149115 - protein, 341 aa, unidentified
MPGPRARIRKVGQPDVPSTSRKEPVQSAREMFVGIDVSKAKLDIHVLPGDQAWTVSNESTDVGALVSRLATLKPTLIVLEATGGLERRALAQLLAAKLPAVAVNPRQVRDFARATGHLAKTDILDAHILALFAERIRPEVRPAPDEETQELDALMVRRRQVVDMITAEKNRLAAAPPSKRVVQAIRKTIACLEKQLDEFDSDINGAVRNSPAWRAKDDLLLGVPGVGKVLSRTLLAHAPEIGTLTRKQIGALIGLAPLNCDSGTYRGRRRIWGGRARVRAVLYMATLSAIRCNPAIAAFHARLTAAGKLPKVAIVACMHKLLTILNAMLRSNSPWRAEVSS

SEQ ID NO: 149116 - protein, 358 aa, unidentified
MNVGVDVHKRICQACLKDERGSIVEEFRFPNNQEGASRLATILRKHGEAKVALESTGNLWVKLYDRLDEEPGIDVILTNPRKTRVIAEAKIKNDKLDARLLADLVRADLVARSYVPPKEIRMQRALLRERISLVESRTIIKNQIHALLDKYEIQPTYTDMFGKHGREWLRSLNLPSIDQTILEVGLQRLEELEAHIDAFTDKIAQEAVEHPQAKLLMSFTGIDYYSAMLLASEIGDVTRFPYAKKLVRYAALAPGTRQSADKTVHGHIVKEGNKRIRWILVEAAQHASRHDPRLRGFYLRVMKRRGYQRAIVAVARKMLVSMYHVLSKNEPYHGERTELLERKLKRLEWKATHSLQAI

SEQ ID NO: 149117 - protein, 459 aa, unidentified
MSKLSQLNPSLSQARPFASMSRVNPHAAGVDLGAHEIMVCVPGDQSTQLVRSFGNYTADLQAIAAWLKAHHIETVAMESTGIYWIPLFETLEAEGFRCHLISARSLRRIPGRKSDVLDCQWIQTLHSYGLLESSFRPEADLVALRTLLRHRAQLLEHRAPHVLHMQKALLQMNVQLSQVLSDVTGQTGQTIIRAIVAGERDPHKLAALRNYRCHKDEDEIAKALTGTWREEHLFVLKQSLEMFDFYTRQIEACDAEIERVYHTIRPKGDGSDDDDPPHIPEHKRKSHSKNAPKGGAIRQHLKRICGVDVTAIHGLGEVLAQEIVMETGTDMSKFPNEKHFCSWLGLAPKNEISGGKVLRSATLKTRNRAGQAFRKAAASVMRSDCVFGVFYRRMKARIGPAQAAVATAHLIARVYYRMLKDKVEYQPLSVEEYETRYRQQQVRYLQKKAARLGFQLTPA

SEQ ID NO: 149118 - protein, 385 aa, unidentified
MTTTEEVGTFIPRDYDVFAGLDVDKRSIAITFTDHGTMRKSLKLPYSASQLLNYTGKHFPGQRVAFVYEAGPTGFGLHDELTAASHRCLVVSPSMVPSAPRNKVKTNRLDSKKLSEGLRGGQLRGIHVPPPSYRELRHLVQLRDTQVAQLTATKLRIKSLLLYEGIPFPAANGKWSGRVLRQLETLPCNATVRFKLDQLIDTLQFHFQSAAKVQKQIRYFCQNDPELNQCISFLISLPGVGTITATHALARLGDWRQIKDVRQIAGFLGLVSSEHSTGDKENRGEITRIGDKRLRSKLIQCAWTAIRKDPELRAFYRRIYERHPKKVAARKAIVAVARKLTTRMYAVLKEQRPFVIRTDSSIAPLTAEETTGLGERLDGAQNDQP

SEQ ID NO: 149119 - protein, 388 aa, unidentified
MQAAVDRPEALSAIRTDLGAIFISLELSRSSWLVTSLSPGSGEKMSKYAVRGSDVAGLLERFAQLREKARARTGRVFSFVVIQEAGLDGFWIDRVLQNEGVESHVVDPASIATSRRRRRAKTDRIDGETLVRVLLAYKRGEPRVCAMVKAPTPEEEDNRRLCRERKVLTAERVLHVNRIKGLLFCQGISGYEPLRRDRRERLEELQTGDGRPLPQHLKAQVDRELDRLELLLKQIKTVEGERDALLAAAQTAMPAPAAMLLDIKGIGSEFAAVLWSEGLFRHFDNRRQVAAYAGLAPTPWQSGAVDREQGVSKAGNPRLRTTLIQLAWLWLRNQPQSALTIWFHERVRRNAGRLRKTTIVALARKLLVALWKYVTTGVVIEGATMKAA

SEQ ID NO: 149120 - protein, 317 aa, unidentified
MTKTNTIAAGIDTAKDKLDVAICGQVLRLQVANSIRGWKQLRSELAKAGVERVGIEATGGYERGVVRHLQAAGFVVLVLQPIQVRAFARLHRQRAKNDALDAALIAACAAAIEPHEIGPDQRLAALADTLTFVEQIEEDIARFKTRLEHIGEPRLKRMVLADLARLKVRRLAQLRLIAKQLRAHHDLAVRLDLVMSVPGIGERTALALIIRMPELGRISREQASALAGLAPFDDDSGKYRGQRHIAGGRGRLRRSLYAAALPAAFRWNKALINLYSRLTAAGKAHNVALVACARKLLIYANTVVARGTPWVENAPAT

SEQ ID NO: 149121 - protein, 353 aa, unidentified
MTEYVGIDWAYRRAAWCAMSAGGVISAEGFTPADEDGLAKLVLRLGSDVKACLEMMSGAVWVRDRLRSAGWQVEVADARRVKGVAPLACKTDRVDARVLAALCRRDLVPALWIPSLEERELRERLRRRMHLVRLRTSAMNRIFGLGTQWGLRLSAERLRRQGALELLAQRGVPAVWQRSIQEALAVIDLLEARIAPLEAELAPIARADRDVALLVTIPGVGEMLALTLAAEIADVSRFPSPGKLVGYAGMAPGVKQSGQSSRSGLPLSKAGSRTLRWAAVEAAQHAWRESNPWRQLYSDVAKRSGKNAAKSAVARKVLIASWHMLSRREPFKPSRPRGGARTVPASSISVLAA

SEQ ID NO: 149122 - protein, 366 aa, unidentified
MRKISTVAMGRIENFKDHKLTIGLDLGDRFSHYCILNESGEVIGEHNLPTTPKGIDEVFPRIPRSRIALETGTHSPWVSRQLTRLGHEVIVAHARNVRLIGDSSRKDDQFDARTLARLARIDPGLLGPVQHRSAKAQIHLTVIRARAGLVSARTALVNSARGLTKSYGERLRKCGTQKMNREMAKGLSQELRDALDPLFGEIESLNERIAEYDRRIEQIAKEVYPQVALLKQVKGVGTLIALAYVLTLDDPQRFRRSRDAGCFVGLRPGRRNSGMSQPQLHISKEGDVYLRTMLVQGAHYILGPFGEDSDLRRWGLKLAERGGKNAKKRAVVAVARKLAVLLHKLWVSGEVYEPLRNNHKVVAAVA

SEQ ID NO: 149123 - protein, 341 aa, unidentified
MKNLFIGVDFSKEKVDVAIVFADGLTETAPRVFNEFKTTVSGYKQLVKWVEKNSYGIDPSLWLFCGENTGDYSKGLCNFLYGKGYDMWLENAKSIKDASSLRRLKSDRADASMIAEYAMRNHDRAIMYEPLSESLAQLRELFLYRQMVVRHRCSFQVRRGEKKLTMEKSPIKTMISQSGRHIVSELNKEVEKIDKRIAELIKSDEELTEVFTIVTSVPGIGTQNAVCLMVYTDNFRRFNYDSRKIACYYGIAPFGKDSGTSVHSDPHVHYMANRQIKAMLTQAAQAAVKFNPVMVRYYIHLVERGKKKQVALNNVKNKLVHLVTAMVRNRKTFTPEYKISA

SEQ ID NO: 149124 - protein, 341 aa, unidentified
MKNLFIGVDFSKEKVDVAIIFADGLTETAARVFNEFKTTVSGYKQLVKWVEQNSYGIDSSLWLFCGENTGDYSKGLCNFLYGKGYDMWLENAKSIKDASGLRRLKSDRTDASMIAEYAMRNYDRAIMYEPLSESLAQLRELFLYRQMVIRHRCSFQVRRGEKKLTMEKSPVKTMISQSGRHIVSELNKEVEKIDKRIAELIKSDEELTEVFTIVTSVPGIGTQNAVCLMVYTDNFRRFNYDSRKIACYYGIAPFGKDSGTSVHSDPRVHYMANRQIKSMLTQAALAAVNFNPVIARYYMRLVERGKKKQVALNNVKNKLVHLVTAMARNRQLYTPEYKISA

SEQ ID NO: 149125 - protein, 408 aa, unidentified
MEILHRRCAGLDVHQKEIVACRRIASGRKVEAELARFPTTTPGLLALSAWLAEAKVTHVAMEATGVYWKPVWHVLCADFKLILANASHIRNVPGRKSDANDATWIADLLAHGLIRASFVPPQPIQELRDLTRTRRELTREIVRHTQRIQATLEEANIKLTSVISDILGWSGRRILKAIVAGESDPLRLAELGHPRLACARENLVAALQGRLRDHHRFLIGQHLKTIEQIEATIAEFDARLDAALAPFRDAIERLKEIPGVGDNVAQTLVAEIGADMTAFPTAEHLVSWAGMCPRLDESAGRKRSKRLRKGAPWLKPVLVQSALAATKVKNSSLRARYFSLKPRLGHKKAIIAVAAAMLRIAYHMLKDGTFYQDLGPDYRRPKNPERAAQNLAKRIRALGFDVELKLAA

SEQ ID NO: 149126 - protein, 340 aa, unidentified
MNIKRIGLDLAKNIFQIHAVDHHEHVVLRKTLRRDRMIAFFTQLPPCLIGIEACGSSHYWARELTRLGHTVRIIPPQRVKPYLKGQKNDANDADAICEAISRPGMRFVAVKTERQQTLQAEHRVRARLIRARTALSNEIRGLLAEFGLILPTGIRQLRKALPEILSQQEQWDDRFMRLLCELSEELKILDERVARHDGRLQQAARDDIRIKRLLAIEGMGPVVASALVAAVGDGRQFKSGREMAAYLGLVPRQHSSGGKERLGHISKRGDSYLRTLLIHGARAVLNACKNKTDRRSRWLQALSERRNRNIATVALANKNARIAWAILSREEDYHGLQAAG

SEQ ID NO: 149127 - protein, 343 aa, unidentified
MQVSTIGVDLAKNVFQVHGVDSAGKVVIIRQLRRKQVIDFFSKIPPCLVGMEACGTAHHWAREVSELGHTVRLMPPSYVKGYVKRSKNDAADAAAICEAVTRPSMRFVPIKSADQQALLMLHRTRDLLIRQRTQLINALRAHLAEFGLVAETGREGLAQLAAIITDESNREALPSAMKQALQAIVDQLAALESQVGTLDRAIHAHHRANDMSCRLETVPGIGVIGATAIASTVTDPSDFKSGRDFAAWIGLVPRQHSTGGKERLGGISKQGDRYLRRLLVIGATAVVRHARQHPQKHPWVMKLLAKKPAKLVAVAVANKMARIAWAIMAKGGYYRAPELAAAA

SEQ ID NO: 149128 - protein, 352 aa, unidentified
MSSQQRFPNVTIGLDLGDKVSRTCEIDAAGKIVKRAGVATAPGAIERYFGGRPRCRVVVEVSTHSPWVSRQLKALGHEVVVSNTSEVYGKNRRKRRNDRIDAEFLARQGRADLELLYPIQHRSAEAQQDLAYLRARDQLVRVRTKLITHVRGAVKSLGARISKCSAEAFAKRAAVQLPDCLRGALLPLLEVIADLTQRIRAMDGQVERMIDEHPEARRLQQPAGVGPLTALAFVLAVEDPKRFEHSRQVGAYFGLVPKLDESSDSSPQLRITKAGDELVRRYLVSAARYILGPHGPDCDLRRYGEAIAARGGKNASKRAAIAVARKLTVRLHHLWVTGASYDPDWTQRHRAA

SEQ ID NO: 149129 - protein, 418 aa, unidentified
MTQPYAAYLGIDWADKKHDLCLVDTATGKRTRQVLPHTPQALAEYFTNLRQRYPGQLITVGLEQSRGPLLFALLQYDFLVLYPINPTTLAKYREAFSPSRAKDDPTDAEYAAELLMQHHDRLKAWHPDDEQTRTLRYLVEHRRRLVGDRTRISNRLTSLLKCYFPQVLAWFPELTTILVCDFLWRWPALERLQGVKRTTLLNFFRAHHSGRTDTLEKRLAAIKESVPLTTDRAIIDSSVLMITALAAQLKTTLAAVKQFDEEIARLCAVHPDFPLFQSLPGAGDVYASRLLAVMGTQRDRWASAAELACLSGIAPVMERSGQSVWIRWRYFCPKFMRQSFHEYAGESVKHSFWARAYYEQQIGKGKSRQAAVRALAYKWIRIIWKCWLTRTPYNEVKYLEALRKKGSPLLSYAAKTAA

SEQ ID NO: 149130 - protein, 345 aa, unidentified
MKIATVGIDLAKNVLQIHGVNENGKAVLKKQLKRNQVLEFFANMEQCLIGMEACGSAHHWARQLQALGHTVRLMSPQFVKPYVKTNKNDAADAEAICEAVTRPNMRFVPIKNAEQQAVLALHRARQGFVKARTAQGNQIRGLMGEYGLVVPKSLANLARQVPELIEDASNELPGSFRLLVQRLLDQLKDLHRQATEIEAQIIAWHRDHAISSKLAEVPGIGPITASAMVATIGDAKNFSSGRQLAAWLGLVPRQHSSGGKNVLLGISKRGDTYLRTMLIHGARSAVIAAQRKKNPVDGWLGGLLARRCNNVAVVALANKNARIVWALLRHDRKFRFDYTPAAVNA

SEQ ID NO: 149131 - protein, 389 aa, unidentified
MEARTVNNPPPAAPHDDAVRCVLAIELSKKSWIVAVNTPSSEKISRYTLKACDWKELLKLCERIGTRIARELKKDVELVSCYEAGYDGFWLHRLLEAHGIRNYVIDPASLQVDRRARRAKTDRVDVERLLRSLIAYLRGEPKVWSVVCVPSVAEEDDRRLHRERGRLINERIQHVNRIKGLLAIHGIYDYQPLRRDRMQQLDRLRTAESRTVPPRLKAEILRELQRLELVIGMIKTIEAERDAIASAKIETVHASAKKIQDLAKIKCIGPEFANTLVGEVFYRSFDNRKQLASYVGLTPAHFQSGSMCRDQGITKAGNAKARTVMIELAWLWLRHQPDSPLSVWFRDRVGKLKGRIRRITIVAVARKLLIALWRYLETSLVPDGAALKV

SEQ ID NO: 149132 - protein, 371 aa, unidentified
MKNCITFVGLDVHKNSIEVALADAGREGEVRHYGAIGGDMDSFSRLLRKLVSTGKELHFVYEAGPCGYEIYRYLTAKGFDCAVVAAPAGDPTKGARKRIKNDRRDATTLARLHRAGELTYVFVPREDDEAMRDLTRAREDASNAQLVARQQLSGMLLRLGFRYNGKTNWVLAHFRWLSDLKMPTPAQQVVFQEYINAIKETTDRLERLTHQIEVLAPAWRMFPVLQAYQALRGVSLVVASTVVAELGDLTRFDNPKQVMAFLGLVPSEHSSGETRRKGGITKAGNGHARRVLTEAAHAYQFPARVSRALLLRQEGLDKTILDIAWKCQVRLCSRFRRLMAKGKNRKTVVTATARELIAFMWAIAKQVPISA

SEQ ID NO: 149133 - protein, 342 aa, unidentified
MKITTVGIDLAKNLFQVHGVDERGKTALKKQLKRDQMMAFFTNLPACLIGMEACGSAHYWANKLQRLGHTVKLMAPQFVKPYVKTNKNDVADAEAICKAVSRPNMRFVPIKNSEQQAVLALHRARQGFVKARTAQANQIRGLLAEHGIIIPKGIAYIGKHLPEILEDGENGLPGSFRILIKRLGDHLKELDRHTQELEVQIQNWHRDSTASRKLAKIPGIGPITASALVASVGDAKNFENGRQLAAWLGLVPRQNSSGGKQTLLGISKRGDSYLRTLLIHGARAVLRVAERQAHQANSWLAGVMERRNYNVAAVALANKNARIVWALLAHDREFEADYGAEV

SEQ ID NO: 149134 - protein, 355 aa, unidentified
MTSTKYIGMDVHKESISIAVMNVAGKIVMECVIETKASMILQFFDGLRGDLQVTFEEGTSAAWLYDLLKPHVTKLVVCDPRKNASMREGNQSDKIDARRLAELLRLNHLSPVYHGEHGLRSLKELVRSYLTITKDLGRVMTRVKAIYRSWAIPCTGKQVYAPRHRAEWLGKIGEPGVRRRAEFYYQQLDALRTVRQQVRRELLAEGKKHSAWKRLCQIPSIGPIRSAVLLGILQTPHRFRTNRQLWSYSGFGIETHSSADHRRVNGQLQRAKKQSGIRGLNRNCNHDLKNLFKGAAIVASSKPGPFQEFYSALLTTGLRPEMARLTLARKIATIVLIVWKRGVCFDAQHLKPQTV

SEQ ID NO: 149135 - protein, 343 aa, unidentified
MQIRSVGIDLGKTTFHLVALSAAGKVLFRKKFTQKQLITFTANMQISLIGMEACSGAHFLGRVLRQQGHNVKLIPAQFVKPFVKSNKNDFLDAEAIAEAVDRQNMRFVPIKTDDQLDLQALHRVRDRLIARRTSVINQLRAFLLERGMTFAKTPARLKDAMPEILEDADANLTPRMRNLISLLWSEWKDLEQQIAAMNAEVERIASSDPACQRLRQIPGIGPLVATAIVAAIGNGAAFQKGREFASWIGLVPRQHSTGGKARLFGISKRGNSYLRKILVHGARSAVLRVKRERSPFGGWLDALEQRAPINVVITAAANKLARIAWAVLSSGQDYRTAASMPSV

SEQ ID NO: 149136 - protein, 338 aa, unidentified
MTTYAGIDLHSNNIFLAVIDHKNKRLFDKRLPNSLSVIKDALQPYKQTLAGIAVESTFNWYWLVDGLKEGGYKMHLSNPAATKQYEGIKHSNDRSDAFWLAHMLLLGILPEGYIYPKAQRPTRDLLRRRLLYVRQRTTHILSLKSMISRSLGQNMSANTVKRLIPEDARRIFDHEHLILAGSHAIATIGFLSSQIKSIEKEVMQCAKLKPEFTGLLTMPGIGNILAMTIMFELGDIRRFPKAGNYASYCRCVKSEKISNNKRKGSGNRKNGNKYLSWAYVEAANAAINHYPAAQRFYNRKAARTNKIVARKALANKMARASFYILRDQLAYNESKMFA

SEQ ID NO: 149137 - protein, 344 aa, unidentified
MILIGCDFHPSWQQVCWVDTETGETEEHKLVHTPGEAEKFYRRFAAPALIGMESTGNSQWFVEMATAAGHEVWIGDAAKIRASEVRQQKHDRRDAALLLQLLVEGRFPRIWTPSSEQKDLRQLLIHRHKLVRVRAQVKNALQHLALNQGVQKKRRLWSAAGQKLLREIPLKPWAGRRREDLLKLMEKLDQQIQLLDQAVQEAAWQDRQARLLMTQPGVGPITSLAFVLTMGDVSRFPRGKQVASYLGLIPREYSSGGHQRLGSISKQGNRFMRMLLVEAAQVAVRCDPQFRSEYLHRCHQKPKGVAKVAAARKLAIRLYWMLRTQKPYPEIVRIESSSRVPLVG

SEQ ID NO: 149138 - protein, 374 aa, unidentified
MSANDAVDGSTAGIAMCHGGYLNRQKGEPPKMDVSTIGLDIAKSVFQVHGIDAAGQVVVRRQLRRRQLLGFFEKLAPCLVGIEACATAHHWGREIAALGHEVRLMPAHYVKAYVKRGKNDATDAEAICEAVQRPTMRFVGLKSPKQQSLLMLHRTRELLVRQRTMLVNAIRGHMAEFGIVTRVGLPQLKELLAVIADRDDHRLPPDARACLESLGRQFLSLNEEICAADKRLQAGHRSSELSRRLATIPGIGPITASALVASITDPSAFRTGREMAAWIGLVPRQNSTGGKPRLGKISKQGDQYLRWLLVAGAMAVIRHAKRRGTANHPWLDDLIARRPTKVAAVALANKMARMAWALLSHGGAYRQPVITASL

SEQ ID NO: 149139 - protein, 425 aa, unidentified
MMKLKYSVCCGLDVHKNVIVATIVTTNSDGISEYNQKSFSTINSDIQRFHDWLIENNCYHVCMKSTGKYWIPIFNYLENDIDVCLTHPKYVKAIKGKKTDKKDSKWIADLYKFDLVRCSFIPPKDFRQLHEIARYRFKLVCMKSSEKNRIQNCMTVSNVGIASVLSDPFGKTATEIMSYLLEHTADSIDEKAVRKLIKKGAKAKSDEIIETIKGYNIETDQAKKLELACGHLEYLDDMITQTEVELYVRIKPYYEFVNFVSTMPGMTELSSTIVLAETGVNMDIFDDAKHLCSWCGLSPTNNESAEKKKSVRIAKAGDYLKPMMVQCALAAIKSKKQPYFAIKYGRIKKRRGHKKAIIAIAIARMMMVCIYHMVSEKKPFTPTDYEELMDPQNHVERVVLNEDNVFAYLESLGYDSSKLVKRNDN

SEQ ID NO: 149140 - protein, 469 aa, unidentified
MAARKQQKRGMSAQVVEDEDYQLRYEIVAGIDVAKESAVVCVRMPPAAGRKHRTSHLQTVPATVPAIGELAAELTAAGVQMVSMEATSDYWRIWFAVLEEAGLAVQLVSSSQARNLPGRPKTGKEDARWIARLTEMGMLRSSFVPPPEIRALRVYTRHIWDLTADRTRYWQRLEKLLEDALCKLSAVVSRLAGHQRARAVIEAMIAGERDPRALAALGRGRMRNDKLPALAEALSGMRFGPQHAHAAASLLRAIDLLEAELRDLQERVTAHLAAIPVSWGVDADGVTGPDAGREEDAAVLPAADRLDEIPGLGGEAAAALIAGIGLDMTRFPAPEALVSWAGLTPTARQSGPRKGRGKKGRGNTYAKRIAVLAAYAAANTDTFLGERFRRLSARPGGDGRKKAGCAVGRSILVIVWHLLNDPAARYRDLGPDWHARHTDRSRKARNARRQLEALGYDVIIIITLREDAA

SEQ ID NO: 149141 - protein, 327 aa, unidentified
MSEELVHTAILGIDISKENFDVALLRGSKYRHKKFTNARKGFEELSEWLGKLGVETLHACMESTGVYSEELAEYLYDRGFSVSMVNPARIKGFARGELKRSKTDKLDASLIARFCAAMNPSLWTPDPVEMRELRSLARRMEALLNMRQQEQNRLEVSDDIVKKSIRRHIRYIDKDIDALKDEINSHIERNPELRDKRKLLESIPAVGEATINVILSHFASIEKFPNPKCLASFLGIAPRHYRSGSSVRGRTRMSKVGRSSLRKAFYMPAVVGLRYNPVLADLGRRLKEAGKPPMLIIGAAMRKLMHIIYGVLKNKTPFDANYSIKTA

SEQ ID NO: 149142 - protein, 423 aa, unidentified
MYSSTLSVGADVHLDEIVLRAVDKLGGHEVIERFRVTNNLPGAQSAAATIAEVATRLGYTRIEIGWEATGMLWIPFHRFLSTSPLLQPFELELICFNPKLVANFKNGIVLRGPKSDERDSYDVAARTRFGELPISYVPDDFWQGLRRLTRYRFQLSRNLSREKMRFQSYAFLKCSDWKRVKAFSDVFGATSIALLTEFTAAELREMTHDQLIDLVAHRGHGRFHDPTGTARAVRQALRTSYPIDPQMDEMVTATLATGWDHIRFINRSMKHLDKLIARYIDPIPNSIITVKGLGAVITAGILAEIVDISRFPEHKHLAQYIGLTWERRSTGNFVSQNTRMTKVGNVYARYYFIQGADKLRRFNLEYKAYYRRKYSEVSKYQHKRALVLTARKLVRLVHALLTKNVPYVRPRMPVDFQEDPLLQ

SEQ ID NO: 149143 - protein, 424 aa, unidentified
MKVTYQTCCGVDVHKSFLVATIVKTTGGIEPSYQKKRFSTFNNSILEFKQWLLDNHCHDVCMESTGKYWVPVFNLLEDKINVVIANPKWVKAVKGNKDDTKDSKWIGDLFRLGLVKGSYIPCKKVRILREYTRYRYKLVSCRSSEKNRYQNALTVCNVALDSIVSDIFGKSSTSIIDYLLEQSGTSINHEEIASKLLRSLKSKEDAVIESVEGYQMTDAQKYRMRLVRAHMDYITAEIKDVDKMIENMISSNPDFENAVQFLCTIPGVKRDSAITIISETGTDMSQFSSSKRLCCWAGLTPGSNESAGKKKSVRITRAGVYLKPALVQCAHAAVKSDKSPYYKKKYESLVKRRGKKRAIIAIARMILTAIYQMLSTGEQWNPSDLYKIDMPVALVEKQKAKAIKQAKKLLQREGLLPPDEPLAS

SEQ ID NO: 149144 - protein, 495 aa, unidentified
MKFSEKVLRPRHIPGGRIAPDGSRSRKLNLAKVTESKPDRLAALVPKSERTPAHEAPCISVTYDGATMHNKKEKPMKEWKEITHYAGFDWARDHHLVVIVDQQGQIVADFQFDHSVEGWKSFQEKTAPFSNLAVAIETSQGVVVDQLLQGGYAVYPVNPAAAVSYRQRKAPSGTKTDHLDGWSLADALRVDGHGWKALQPMDELSLQLRLLCRDEVALIEQRTGLVNQLRQALVEYYPAALEAFDDWVNPSTWDFVIQFPTPESLVQAGRRKWEKFLHAHRLWRSETAQKRLAIFAQADQFKASAPITKAKSQLALSLCKLLRTLQQQLDEYQNQIQELFNRHPDHDLFGSLPGAKSILAPRLLAAIGSDPDRYTTVEVLQCFAGSAPISFASGQIHKAKVRWACDKFLRHSVHLWANCFRKTSAWGQAYYQKKRQDGMSHACALRCLTQRLLKIVFRMITDKKPYDAELHARNQIKHGSWVLALVGNPIAKTGE

SEQ ID NO: 149145 - protein, 370 aa, unidentified
MLYVGMDVSSKSFVVHALDEKKRVLKREEIEPTRNALKKLCAELGEEAKLIAFEAGNQMKWIADTLKKQPGVTLHVVHPNEVKWIAESGGKKTDKVDARKLAELARGDLLPRKVHLVEGPTREMRELVSARTKLMQQRVNMINTLRGYLKQEGVPLSEKFFAQKDWKEQLGEKKLSSTLKAIIEAFRPAIDSLKASEVQLVERLKKLSDARTELLETIPSIGVLSSRTVVGALDDAKRFDDRKCVAKYGALTPTIFQTGNEVHLGRINRDGRQEVRRVMLQCAHVLVRMKSPASRPLREFFLRLERKTGKKKALVALARKLLTVCYGVLKSGKAFDPSKVEAKPPRTKKPGFQPQKTGARKQTYVLGTVA

SEQ ID NO: 149146 - protein, 352 aa, unidentified
MSKITITGIDLAKNIFHLHAVDSTGRQVKAIKLSRLRLSEYLHRSEPVTVAMEACASAHHWGRLCQLLGHEVRLISPQFVKPFVKSNKNDRNDARAICEAAQRPDMHFVPVKTVEQQAVLSLHRVREMLIGQRTATINQLRGLLTEFGLTAPAGRRALHNTIPAMLEDLMKISPTFLVSCIRQQWEHIGELDQRIDNVTSQIEMHARQSDVTRRLQTIPGIGPITASALEAYVGNATQFRAGRQLAAWLGLVPRQHSTGGKPVLLGTSKRGDGYLRRLLVHGARAVVATVRSSPNVQKQDKTIMGWVARKHMNVAVVAMANRNARIAWAVITQKRNFDRNFRDQLANQLAAT

SEQ ID NO: 149147 - protein, 415 aa, unidentified
MIKTLYVGVDVSMKDFKVQYMDDQGAEVSKRQRFENNQPGLDSFVELIRQICLSSNITRVAIGLESTSVYGWHLQMGLASDHRLAPYEPQVYVFNPKVISNFKKAYVDLPKDDWTDAWVIADRLRFGRLPENSQVDFRYLPLQRLTRFRYHLTQSITREKNYFLANLFLKFNTLSQDEVFSNLFGATSIALLTEFLSPEEIAARPLEELIDFVMEKGKKHFTDPQATAQALKNAACKAHRLRGSLLEPVNLILATSIETIRCLERQISVVDKAIVKELSHFKHTLNSVPGLGPVFCAGIIAEIGNIHRFPNDSAVAKSAGLTWKTHQSGEFTADDTPLTRTGNSYLRYYFVQAANSVRRYEPEYQQFYARKYRESTTHHHRRALVLTARKLVRLVDALLRSNQLYRPQGQRSGIA

SEQ ID NO: 149148 - protein, 383 aa, unidentified
MKTSEVRTFSSMTAGLLAMRDWLMSEQVTLVGMEATGAYWKPIFYLLESDVECWLLNARHMKTVPGRKTDVKDAEWIAKLIEHGLVRPSFVPPQPIRQLRDLTRYRTEVVRERTREAQRLHNLLEDAGIKITLVVSDVLGKSGRAMLDALIAGERDPHTLAELAVGRLRAKHAALIDALTGTFTEHHAFLARAMLDRIDTATAMHNRLSAHIDRLVQPYRHHVELLASVPGVSEHTAQVILAEIGSDIARFPSAGHLASWAGVCPGNNESAGKHSSGTTRPGDPWLKSVLGQAAISASRGKDTYLAARYRRLMARRGRKRALVALQHSILIAVWHMFTHDMAYCDLGANYFIECADKARATRRLIGQLNHLGYQVTLNPLAVT

SEQ ID NO: 149149 - protein, 352 aa, unidentified
MAKTEFDELMSVGIDIGKDTFHLVGFDQDGQRVLRKQIKRLALITTFEKLPRCVVGMEACLSAHFVSRTLRKMGFEPRIIPAIYVKPFNKGQKNDYNDAEAIAEAALRPNLKAVSEKTQDQLDLQALHRVRSRLVSRRTATINQIRAFLIEQGITVRKGLRALKNSFETILEERKDEISPRMRSILIGLYGDWMWMDDRIDKVSAEIEEISRTEENCRNVMTIPGIGPMISTAMVAAVGEGEAFDRGRDFAAWVGLVPRQYSTGGRTILGRISKRGSRYLRMLFVQAAKVIMMRPHRWPDFSFGEWLKSASERMHRNKAAVALANKLARMAWSILRHKTAFDAPRDEVAVGV

SEQ ID NO: 149150 - protein, 319 aa, unidentified
MSSNREIFAGIDVSKPYLDLAFWNDNRSWRFDNDEPGIEALIDLLTESTVDLVVVEATGGFEKQAALAIAASPLPVAIVSPRRVKAFARANGRLAKTDRLDAHNLAHFAQVVQPPARPLPSAAREHLSGLTARRRQVNRMITAEKNRLRNAHPEVQGHLMEHLKWLQDDLKQLDEEIKTLLQEDDDFKHKAELLCSVPSIGIVTATTLLADCPELGTLDRKKIAALIGVAPMNKDSGRKIGRRRIIGGRAHIRATLYMAALSASRTNPVLRPFYQRLVNNGKEKKVALTACMRKLLTMLNAMMRDNKSWNPAIPSQIHA

SEQ ID NO: 149151 - protein, 340 aa, unidentified
MPVIRIGLDVAKNVFQAHGVDEHGQVVLRKQLRRREVLSFFASLPPCLIGIEACSASHYWARELTALGHQVRMMPARYVKPYVQRGKSDALDAAAICEAVSRPTMRFAAIKSVEQQSALTLHRAREILVKQETMLANLIRGCLGEFGIVAPLGIRRMAELVGIIRDEADSRIPPHARIAMTAVADQLGDLQRRIKEIEQAIRAWHRNNDASRRLATIPGVGVITASAIAATVATPTEFKSARHFAAFLGLTPKQHSTGGRQRLGRISKQGDGYIRRLLILGGTALVRYARGAGGTVWAKQLLARRPARVVTVALANKAARIIWALLVRGGVYRSAAPQAA

SEQ ID NO: 149152 - protein, 484 aa, unidentified
MKAKPKESTAKTTGQSTQPHWQQMNRKQRRDMERKMQSADLSLQLVHPNAAGVDIGNECHYVAVPPDRDSQPVRHFGCTTAELRTMADWLKKCGIRTVAIQSTGVYWIAVYDILEQAGLEVYLVNARDTKNLPGRKSDVQESQWLMKLHTYGLLRNSFRPSQEIRTMRTYWRQRKDLVQSAGRHIQRMQKTLTQMNMQLANVLSDVSGVTGQAIIQAILAGERDPQKLAAFRDPRVKASQKEIAQSLEGNWQEDLLFVLKQEQVGYEFCQKQMAECDRQLEQYLQQREDRSQGAPLPEEKRKDRLQKKKGNKPHFDLRQQLFRMTGTDLTKIDGIDVMTAATILSEAGWDMTKWKNEDHFVSWLRLSPDNRISGDRIIGKGRLPTTNRVTVALKLAASTLRTSQSYLGAQFRRFRARLDTPVAIKAMAAKLARLVYRVLRYGTKYIDLGAQFYEVQQRTRDIRRLKHRAAKLGFQLLQASAPAA

SEQ ID NO: 149153 - protein, 426 aa, unidentified
MRHIGLDVHRDFCEVAIAEAGEVRSCGRIETTPEKLELFAQSLGKDDRVALEVTGNAWEVARIIEPHVAQVIVVSPTDTGIRQARAKTDRLDARTLAKLLASGSLQGLWMPDDGTRALRRRLQRRSQLVRARTRAKNEVHGALIRRLVQKPKVSDLFGVAGRRWLKELELPAEERETVDACLRQIDFLDAELAEVERVIAADALASPDIRRLMTVPGVNVITAATFCGVVGDVSRFATPRRVVGYLGLDPRVRQSGPGPAKHGRISKQGSAPARYALVEAAWSVVRQPGPLRAFYERVRARRGHQVAIVATARKLACLFWCLLTREEDYAFAQPSLTRKKLRRLELTAGAERGKVKPGIWATNKALSRAERELAAQGEVAYRRLVADWQAQRKRKGAGVPVGRDSSSHLLVEETAARQGSAPEPAL

SEQ ID NO: 149154 - protein, 421 aa, unidentified
MEVVYRCCCGIDVHKKIIVACLNQGGEQSLREFGTTTSEIKSLATWLTESGCEIIAMESTGVFWKPLYNLFELMDLDAIVVNAAHMKALPGRKTDVKDAEWIADLLRHGLLKASYIPSREQRELREITRYRKSLTEERCRETNRLQKILEGANIKLDSVVKDINGKSARKLLEKIIEDDVPTSEEEISKMIHGRMRSKLGQLVTAIEAITTPLQRKLLAQVIDHIDDLNRRIADLDKLVQDYMDEYEAAITALCDIPGIARRSAEVILAEIGLDMSRFPSAAHLCSWAGVCPGNCQSAGRRKHGKTTKGNKPLKTILTQCAKSARSVKGSYFSAQYQRIAARRGKNRATLAVAHSMLIAIYHMLRNNVPFRDLGSDYYDSFNRDRKIHGRPSSYTRPNTCCSRSYTFPVVTFCIQDEPESW

SEQ ID NO: 149155 - protein, 423 aa, unidentified
MPYRIAGIDVHKKKLAVVVADVEVEDEYQFERRWYGSNPEQLRVLSEWLIEQQIEEVVMESTAQYWKPVWGALERYWKPRCQSRAGASRMSGTLHLAQALSNRGRRGRKNDFRDAERLVKRLVSQELVLSFVPDTEQRMWRTLTRTRYQRTRDKVRLQNQLEALLEEAHIKLSSLVSDLLGASARRMLKALADGETDPAALAALADQRLRATPAQLHDALGACTELNPVYRRLVNMTLEGLQLVEQQIGQLDQEMASLLRQHQDAVERLAVVPGLGVDSAQQIIAEVGAKAATFPSAEKLSSWVGACPGEEESAGVNRSRHSPKGNRQMRRVLNQAANAAVKHKGSIFEIVYRRLVPRLGHNKTIGVIAHRLCHLIWIILHKGVRYEERGPAVSEKSRQRRTARMVRTLRILGYRVEPLANPA

SEQ ID NO: 149156 - protein, 336 aa, unidentified
MRYIGVDLHTTQITVCYLKTDAAKQVKTYRLEQIKEFVSTLESTDEIAVEATGNTRWFVGEVKAVVASVVIVNPRGFEVIKQSVNKTDRHDAINLARFLQAGLLPEVREKSEQAERVASLNETRNKLVRLRTSFLNKIHALTVSKGRKLKKESLSSERGLGRVLAQEWTEVERLELEIIIDEIRHLKESVKKLDKVLEAEAQKLKGYQNLVSITGIGARSAGVLLSVIGEVRDFASADKLASYFGIVPKVSNSNETLHHGRITKRGSKTGRTTLVQCTLVAIRHNEYLKNYYTQVKERRGYGKAKIATARKYLTLIYNTLTNGWVFADFKNFVLAE

SEQ ID NO: 149157 - protein, 311 aa, unidentified
MANFAQSILCGIDVSKDTLDIATADEITTQIPNTPEGISQWLASLPKGSKIALESTGRYHEAVLDLALGAGFDVYVVNGQQLHHYRQAVGPRAKTDTQDAQLLRRYLCHEYGHLTAVNPLNNQQKRLWQLLKRRAMLIKMRTQLTLPMKGDTELQSISQGIVSELNLAIKKVERLMFALAKAQNWESAIAHCRSVPGIGPLNALALVTCFHRGTFQRVDQFIAYMGLDVRVRDSGRLRGKRKLTKRGEPEMRRLLYMAAWSFARNPKFRPLYEQMRSRGLSSTAAHIAMARKLARIAFALMKKGEDFMLEA

SEQ ID NO: 149158 - protein, 322 aa, unidentified
MASEKFDVSFIDEDGRARHIVVKNTFAQIEKFLDKLPAEAHLVAEHTGVYGDLLLYLADSRGVAVSYVQAYAIKHSMGLVRGKSDPLDCARIREYGERNTDRLVPTHFPSENLYRLKELHATRRLLVDMRKLALTSQRGDRMRPLHSTVAESAKAAAIEELNARIDEVEKEMQRIIDQDPALKKTSEIVQSIPGIGPVTTTQLIIKTDNFTRVATPKKCATLAGISPWPNSTGKSDRGCHVSLMGDRELKSLLYMCARSASVYFEKMRIYRMKKQDVEKKHFFVVMNNIANRLLKIIYALVRKGEMFDPNFVTIDPRLKTCI

SEQ ID NO: 149159 - protein, 387 aa, unidentified
MCYYVGIDVAKFKHDFTVVTSDGEVIVESTTFKNDLKGFETIKDSLSNLDHSQEIKIGLESTGHYHKNLVKFLTEQGYKVSVLNPYLVHGFIKSRTLRKQKTDNLDCMWIAKYLQSEDFKAYQSKLYPCEELKSLTRNRNKIVRERSNQLVTVTNCLDCIFPEFKGFFDGKLSKSALALLFEYNTVESIKNLTASKIQKVRDKHKGIRIGKFFDIRDAAKITIGVPNDSVSFIMKQAIYQIFSLDEILKSYDEQINKIMDDQNSVLESIPGVGRSSVASIIGEYNNFQGFPDADKLLAYAGLECSRYQSGESDHHGHMVKRGSPFLRYTLMNLAISLKNHNAIFKEYYLKKRDEGKNYRVALNHVVRKFLRIAFKLVSTNQKFNIDK

SEQ ID NO: 149160 - protein, 342 aa, unidentified
MQIAVLGIDLGKNSCSVAGMDATGRVVLRRRMHRDGVVKLAAGLPACVVAMEACCGAHHLGRVLQAQGHEVRLMSPEYVRPYVKAQKNDDRDAEAIAEAATRPTMRFVELKSEAQLDMQTLHRARDRLVGERTALINQLRAVLLERGIVVPQGRRKLELYLEALLVRKEASLSPRTRLLIEDLRAEWRELDRRIAAFDEEFATQARTDETARRLTSIPGIGPLNATALTAAIGGAQTFRRGRDLAAWLGLVPRQATTGGRPRLLGISRRGNAYLRKMLIHGARAALPTLSKSETPLGGWLRGLLARAHVNTVVVALAAKLARTAWAVIRRGETFEVRATATS

SEQ ID NO: 149161 - protein, 380 aa, unidentified
MTRISVGVDVSKNRSTVCIMDQDGKFIMRPFLVWHSTEELDFLADTLKRLNGEVRVIMESTSIYQYPIALQLKERGLFISIVNAYEMKQFANIDFRGGKTDKKDSRTIASYGISYWYKLVEWQIPKDTYFNLDLLNRTYMNAKKHRQIILQELQHYIDCAMPGMDKELHSLNLNTKKDFMLDFVEKFWHRDEIVNMTEAEFTEVFTAWAKKKGYRPVEGKAAKIYAIAKSCIPYYPANPTVKTILQCIVDKLSGVNRTLVTIVTQMIEEAKKLPEYQIVREMPGVGDPLAARFFGSAGDIRRFKNSKALVAYAGIDSPPDESGDFSSTHRHITKKGSKVFRDTGYEIMMALRAQKRTWEKVRKNPEVYDYMLRKEAEEKP

SEQ ID NO: 149162 - protein, 350 aa, unidentified
MIIIGCDYHPGFQQIAYVNSDTGELSEARLGHKEQAEQFYRDLRTRGLTVRVGMEASGHARWFERLLNELQFELWIGDAAAVRTKRVRKQKTDRQDAQLLLRLLLEDRFPRIWVPDAENRDLRQLLWHRHRLVQMRTRVMNQLHVVALNEGLRRKKALWRPAGRVELEALSLAPWAGRRRQDLLDLLDQLTPKIQELNGKLEQIVQRRPVTRQLSTHPGVGPLTALAYELVIGTPERFQCAKQIASYVGLVPSEESSGDRRRLGHISKQGNALLRFLLVEAAQVTVRSDLQWRSQFFHLAIRRGRKIAKVAMARKLAVELYWMWRRGWNYDEMQQLGSHAGAPGNPHGVQ

SEQ ID NO: 149163 - protein, 376 aa, unidentified
MAEVTFPQLIQRACGIDVHLKVVVATIDGAGIQRETRSFKTFTSSLNELKEWLLSNGVTHVGMESTGVYWKPVYKVLEDSIPNVWIVNARHIKNVPGHKTDKMDSEWICKLLLAGLLKPSYIPPKEQRQLRDLTRYRNKLIQQIASEKNRMMRILEDCNIKLSSVVSNTSGATATSLIDMLCEGKVLTLDDINSVYHGKLSASPEELLEACTGFVEEHHIYLLQMIRKDIDQTQTLVDDLSERIKRLLSKYENVLELLREIPGFSTKVVEDLVSEIGLDMSHFPSEKHLSSWAGLSPGNNESAGKKKSARTHHGNKQVKAVITEAAWAATRTKNTFFSERYHRIAARRGKKRALIAVGHSQLISVYLILSTGSPLP

SEQ ID NO: 149164 - protein, 423 aa, unidentified
MKQTVPVVGVDVSKRISDMCVLAPNNEIMARLKIYHDLTSMERSVAELRRVENECGVAPVIVMESTSHYHLILFQFFCEAGYEVIVVNPIQSGALKNINVRKVKNDKVDAYKIAMLYRLKVLRKSQVPVDSLRGLRLLCRQRAELMNDVTSYKNRLAAYLDQIFPSYDKVFSDVGGAASRAVLRECPTPQILLLKSENELLRIICIAGYKGHTFGVKKVEKLRHVAEDALRLGLYAPGNAAVVISAVAMLDALLNGIWEIEQAIKALIIQEPFIQKNIALLQTIPGIGPHSSIALLAEIGDFTLFQKPKQLVAYFGLDPSQRQSGMFTGSKMKLSKRGSSYVRALLHLAAVSSVAPHKNQSPANPVLFAYYQEKCKTKPPRIVMCALMHKLCNIIFAVLRDQKPFELRQPEQHATRLGLFSVA

SEQ ID NO: 149165 - protein, 358 aa, unidentified
MKIVGCDLHARQQSIAMLDTETGEFSEKTLSHEGNAVREFYAALESPVVVGIEATGSMQWFLELLEELQIEYRVGHPAKIRAAETRKQKHDRRDAHLILDLLVMKDRFPQIWMPSSEQRDLRTLLRDRDQWVKMRARLQHTLQAIALNHGLRQGHGLWTGAGQSALQAVPLPPYNHQRRQELLGLYRQLQRRIQELDKEVDAQARRRPQARRLLTHPGVGPVTALATEVFLGDPNRFATANQVASYIGMIPSEHTSGKRQRLGAMSKQGNALLRYLWTEATMHAVQKDPELRRFYRRKLIQKGMGKARIAAARKLGIRLWIMMRDEIDYEEFCRRGMLRQTGKAHAGMPDFNSGPATQ

SEQ ID NO: 149166 - protein, 413 aa, unidentified
MDVLHPRCCGLDVHKNSISACILVQVAGQVQKHQRRFGAMTQDLQELANWLRQFEVTQVAMESSGVYWKPVWNILEGQFTIVLANAQHIKNVPGRKTDQKDAEWIAQLLQHGLLRPSYVPCEVIRDLRDLTRMRASLSQEASRISSRVQKVLEDANVKLASVATNTLGKSGRAMLEEIIAGQNDPEYLASLALGHLRAKTPQLRLALEGKIRPDHRFLLRRLLDQLRFVEHEIVLLDEHLEDIGRERPELSQAVARWDTIPGIDQVAGWSLLAEVGHTMAQFPTAEQLASWASLCPGNHESAGKRLGGTTRKGSPWLRRMACQCAWAAARTKNTYLSAQFRRLAARRGIKRAIIAVAHSLVIIGYHLQKSQRNYEDLGGDYFDRIDSDGLKRYFIRRLEKLGHKVTLVPIKAA

SEQ ID NO: 149167 - protein, 417 aa, unidentified
MDVMVDRCAGLDVHRDTVVATVRVPGTGRRRFNQDTQTFKTTLAGLAGLALWLAEAGVTLVGMEATGVYWKTVFQALEDRFECWLLNAHHLRNVPGRKTDVKDSEWICQLVQHGLVRPSFVPPPEIRRLRDLTRLRKAQTNERGRTIQRLEKVLQDAGIKLSSVASRTYSKSARAMLEALLSGVSDPEQLAELSKGKMRAKIPQLREALASRFQVEHHGIMVAQLLVQIDMLDAAIQNMSDRIEYVLAPHTEIVELLCTIPGVQAHAAQVLIAECGLDMSLFPTVGQFASWAGACPGHNQSAGRRRSGRTRPGPRWLTDQLTECARAAVRTKETYMAAHFAQLRGRRGEPKAIGAIRHDLLVAYYHIVRDRVPFRELGPDWQRKRYSVEHRAGRLQRQLEALGYAVTLDRTETEQAA

SEQ ID NO: 149168 - protein, 361 aa, unidentified
MNTTTVGVDLAKQVFAVCVLDGQGRVQQRRELRREAFGAWLAQLPAGTTVAMEACSSAHHWARVCMEHGLLARLIAAQFVTPFRKSRGAKNDRNDAEAIATAARQGNMRFVAVKSVEQQGRLAWHRVREGFKSERLAVMNRLRGLLSEFGIAIEVGAASLRRALAQVQERADWPLGFAELLGQLRTHLDQVEEHLRACDRRIESHARADERCMRLQALAGIGVLTADATVAMVNDGREFRHGRQMSAWLGLVPRQNSSGGHEKLGRISRSGDSYLRTLLIQGARSSVNQARRVAQDKATPEQIWIQQLSTRMSFGRLLVAVANKHARQLWAMLARGKAYDAHAWLNHPMVQRNAKRARAAA

SEQ ID NO: 149169 - protein, 348 aa, unidentified
MDHYAGIDVSLECSSVCVVDASGKIVREGKVASEPEALTGWLGGLGVGLARIGLEAGPLSQWLYAEMKKAGLAVELLETRHVRDAFRAMPVKSDRNDARNIAHLMWLGWFRPVHCKSMGAQETRAVLTARKLVQSKLQDVENSLRGILRGFGLKVGKTTGRSFAGRIQELAAGHPTLETIATALLSVRAVLLCEFNGFEKRVRSMARADARTKLLMSTPSVGAIVALTYASAIDDPARFKSSKQVGPHFGLTPRKYQSGETDRTGRISKIGDTAVREALYQAAHVMLTKPTKGCAELKSWAMRIAKRAGMRKAKVALARKLAVIMHRMLADGQAFRPTTRTKPLAVTA

SEQ ID NO: 149170 - protein, 451 aa, unidentified
MVSMSSDQTWMMIGSSELPLSVESAAGVVSEAAGVCVSVLGVLPAHAVRPNSRSTARARARYTDNGRQSNRGYRIQWEATMNSILYVGMDVYKENYTLCCYSFDRDKVEYRQTVPSDYRLILKYLEQVHGKYLEEVEFICGYEAGCLGYSLYHQLTDHGVKCIILAPTTMGITNTNRVKTDRKDAANIARCLAFHTYSAVYVPDGEDNAVKEYLRMRDDQKLALKKIKQQITAFVLRLGKQYTGSKSLWTENHLKWLRGLDLTLLEKETLQEYLITYDYLTDKLERLDARIEELARNERYGERVRRLGCFIGIKPHTALSLLVEVGDFRRFEKAPNFAGFLGLVPGEDSSGGGRNRLAITKAGNSHLRRLLVESSQSYSRGTIGFKSKELKKRQEGNPPEVVAYADRANERLRRRYYRMTLKNGTKRNVAIVAVARELACFIWGMMTDEIA

SEQ ID NO: 149171 - protein, 414 aa, unidentified
MKAQPESRTIHRYVALDLHKEYVMTGAMNAAQEWVLRPRKVEMMRFREWAAANLRQGDAVILETTGNVWDIYDIVAPLVTRTVVAHAGAVRQIAEARVKTDSEDIKRLLRLLIADIVPEVWVPPAHVRELRSLISYRNRLVKTATMIRNRLHSLLHRHNLKLGENGLTDADWWESQPLRALEKLQVRQELALLSRVEQSKAELETELAKMSMSAEWGKSAARLLQLPGLGLITAMTVLSAIGDIRRFASPKQLVGYAGLGAGIHQSGKEHQDKGITKSGRKELRWALVEAAWRAVRSSEVWKQRFDQLAKRRGEHKAITAIARKLLVTIWYVLTREETDRYASEEDLAYKMLVLSWELNEEARLGLTYKQYAKYALMKLGIETDITRFVRKNVPRRVAPREEVLARMKELGLSL

SEQ ID NO: 149172 - protein, 335 aa, unidentified
MKHYAGLDLSMESTQVCIVDENGRKLVSQKVESSPEAIAMMLGRYSPLDRAVIETGRMSPAICLGLRELGVPVVCIDARQAHQSLKVMKANKTDPHDAAGLAQLARTGFYKEVHVKSPAAHGVRSAITARSHLVEARVRLDNMIRGLCATFGYRPGAGQGKAFLERIMQAVHIPGLGDAITSLLSVRAELVEQIKEMDRRLRIMASQSQACEILMTIPGVGVQTSAAFAAAVDEAARFRQSRNAGAYFGLVPRRHQSGELDWTGRITKQGDSTVRKLLYEAANSILTRIRETFALKTWAMKIAKRRGLKKARVALARRLAVIMHAMLRDGTLFQA

SEQ ID NO: 149173 - protein, 361 aa, unidentified
MSIMPEVNSSVTTVGVDLAKDIITVFAVDAYGRKLQVKDIRGKEFSAWLVQLPEGCVVGMEACSGAHHWGRLMNEYGLVPRIMAAEFVKPFRKSISAKNDRNDAEAICTAVRQPNMRFVSVKNIEQQQRLTWHRLREGWKEERTALINRTRGVLAEFGIVIGKSSAAFTRALTGLIREEGQPATLRNLLEQVQKQLKALDERLAQCDRTIAQQARHCEDAKRLQAITGVGVITADAITATVGDARDFKNGRQFSAWNGITPRQYSSGGKSRLGGITRRGDAYLRTLLIQGARSTLNAALKRAPDKLSRIQRWIVEVNARVGYHKALVAIANKHARMIWAILAKGEAFNPDAWQEYQIGESV

SEQ ID NO: 149174 - protein, 343 aa, unidentified
MDHIGFDLGKVNSQLCIITATGELIERRISTSRESLTKLLGSRPPAHILIEAATESEWVARHLESLGHEVVVADPNFAPMYATRSRRVKTDKRDARTLAEAARLGAYRPAHRTSDKQRHIRAKLAVREALVRSRAKYISLIRALLRRDGLRLAAGTARCFSVRLADLATTPELRAEISPLLDLLHRLNNQIKQADEELVQPVSEDPVIRRLTTLPGVGPVTAVCFVATLDDVTRFPDARQVRAYLGLVPTEYSSGERQQRGRINKAGPNRARYLLVEAAWSILRRRSPATADLYRWATAIRERRGTKVAVVALARKLAGILFAIWRDASEFQPSPRAAKALAA

SEQ ID NO: 149175 - protein, 330 aa, unidentified
MDQYIGLDVSLKETAISIRQDGKRIWRGKCASDPKLVAEMIRKHAPHARRVVFETGPLSTWFYHELTKEGLPAICIEARHAQKVLNETLNKTDANDADGLAHLAEAGFYKAVRVKAFDSMLMRTLVTARNQLLNISTQLSNQIRGVMKTFGLIVPQGTGRVFDGNVRQLLDGNDGLAKIILPLLEGWRDIRMRAADLGRQLVAVARESQATKRLMTIPGIGAVTAVSYVAAIEGPDNFKTSRSVGAWLGLTTRRYQSGEVDYDGHISRRGDPHLRGLLYEAATVILTRTSARNESRLKSWGLKLRERLGFKRAAVAVARKGLSGILCGGP

SEQ ID NO: 149176 - protein, 344 aa, unidentified
MSIKVVGIDLAKNSFQICVLSTSGAILSNRKVNRGSLLDTVRQLPEKTTIAMESCATSHHWGRIFLGLGFKIALIPAQHVKPFVGRQKNDANDARAICEAFSRPDIHFVPVKSVAQQDLKSLRCVRARLVEQRTALANQIRGLSAEYGITFPLSIKALYSHLPLIIEDAENELSHVMRGLLHTLYSDLINIGERIDEITSKVTMLGQQHPRYDAIKSIPGFGPILTTALLSEIGAGNQFKNGRQFSAWCGLVPKQHSSGGKSSLGSLSKSGNRDLRTLLIHGARAVMRCGINRTDAMGDWLRSIIGRRGRAKAIVALANKLGRIAWRVLATDSRYDIHKAFQAV

SEQ ID NO: 149177 - protein, 473 aa, unidentified
MIKSVGIDLAGNGEHKVRCLDEQGQLCDGFSFDSTPAGLAKFEEHVLKDGSNPIIVFEPTGLAWLIVAVYIRGQHPDCRLVRTQGRNVVALRKYLHRSSKSDKLDALTLAKMPFVDQERLNDVYIPPAKVNAILRLARQRQRLESDVAGRKKRILSIVNGYIPDIRQAFSNIWSPQGREFLRTHLNPLSVARSGEKAFDRFLTRARFRGKEDGEESHTVYLTCKMAATIYEKSRSTGAIDDDFFAALQDEIARELRLMEAEEAECDIIAQRINELYQELHPTDNLRTIPGVGDQTAPIFLAVVGDPARFHSQSAFANYNGVVPDSRQSANTEAKGLRMTKAGPAIMKWALYQSSQIGRRFDPQLAWVYYHEIMNNGKNHKQAMGAVMSHIGARILAVLRENKPYELRDLQGKPITWENARRLILANYQIPEEIKQERRRCKSDGLPPKVRNRRREMKAHRAHEAATAPQPVVA

SEQ ID NO: 149178 - protein, 362 aa, unidentified
MNDTHYIGLDVHKKSVNYCVKTGDGEIVREGRVAALRDDLRLWARAQPKPWQGAMEATLFSAWIYDTLKPFAQELDMAHPARMKAITAAKKKSDRLDARTIADLLRCNLLPKCYVLSPEMRDLRRLLRYRQLVVAESVRLQNKMAGLLMETGTPFVKARLHGKKYFAQLLAGLQEVPESVKDLLQMSRGAMEMFESTQKRLVKRLLAEPPLERRVERLCTIPGVGPITALTWALEVADPQRFSSLGDAISYCGLTAAFRSSAGKEQRGPISKQRNAWLQTALIEAAKLAPRWNSQLAAVHAHELTRGHRNRATLQVARKLVAYLMAVDKSGKPFQLRALQDQLGSTGKEENQTLADAALAPA

SEQ ID NO: 149179 - protein, 348 aa, unidentified
MRFYTQQHRHTCGIDLHARSLYVCILDDSGQTLVHKNVKASPEALMKLIADYQEDLVIGVECMFSWYWIADFCADHGIEFVLGHALYMKAIHGGKAKNDRIDSEKIARLLKGGMFPYAYVYPRDMRSSRDLMRRRVKLARERGDLMAHIKNTLSQYNLPALNENLRYDKHRQPMRCAFSDPSVQRSIDLDLARIEFYDVQLAKLEWYLKKTAKAVDPNTMIRLQSVHGIGDILSLVILYEIHDIERFPRVQDFVSYCRLVKCQRESAGKLHGTGGAKIGNPYLRWAFGEAAALFLRGNPDAQRWLEKKKRKHNKAKAMTILAHKLGRAVYYMLKRKTLFDQGRFLASS

SEQ ID NO: 149180 - protein, 326 aa, unidentified
MNNIGIDISKHKLDCLWLKDPQLNKVKTKVFKNTPDEHQRLGRWLLDQIQADASDIRVVLEATGVYHEAVAYSLHQQGFIVCIVNPARAKEFAKSLGHQHKTDAKDSLALALFGQAMNPDAWKPEPLEIKELRSLISRLQALEMDYQREFNRLEKAQVSLESERIIESLGLMMKHLKDEKLRLEQDIDDHINRHPHLKKNQELLCSIPAIGPVLSRIMVSIIHSDRFKSAGQVSAFLGLIPKIQESGIWKGRSRLSKRGPAKVRAKLYMAAIVAIRHNPDIKSQYERLLANGKTKMQALGAAMRKLVQICFGVIHHQNEYYPQLKN

SEQ ID NO: 149181 - protein, 389 aa, unidentified
MKIFVGIDIAKLNHFAAAISSDGEILLEPFKFTNDADGFQLLVSKLESFDKNSIIIGLESTAHYGDNLVRYLVTELYQVCVLNPIKTCQMRKNNVRKTKTDKVDTFVIAKTLMMQDDLRFITFFDLDMMDLKALGRFRQKTIKQRTRLKIQLTTYVDQVFPEIQYFFKSGLHQHAVYALLKEAPSPKEIASMHMTHLANLLKVNSHGHFTKEQAKELRVLAQKSVGANDSAISIQITQTIQQIELLDSQLEKIEAEMTDIMKFNDSVIMTIPGIGYINGGMILGEIGDIHRFSNPNKLLAFAGLDPSVYQSGNFQAKTTRMSKRGSRVLRYALVNAAWNVVRNNATFKAYYDAKRAEGRSHYNALGHCAGKLVRVIWKMLTDNVEFNLK

SEQ ID NO: 149182 - protein, 432 aa, unidentified
MNPLSVSPEPSPVAAWVGLDWADQQHVICLYEVATGQSTLTRLEQKPEALQDWLSQLRQRFGGAPVAIVLEQARGAVIYALLSADFVRLYPVNPQSLASYRKAYAPSGAKSDPADAVLLMEMVRNSPERFRVWKPDDADTRSLQLLTENRRQLVNQKTALTNQLTSLLKTYYPQALELAGALDSLQACDFLQQWPTLEALQQARAGQIRQLYREHGRPSSEQLDQRLEQICQARHLTRDPAALLSGSMMVQVLVEQLRPLLAAIERFDRQIAVLFGKHPDRSLFDSVPGAGAVLAPRLVAAFGTDRDRFQSAQQAQQLFGIAPVTEQSGKQRWVHWRWACPKFLRQTFHEFAGHSRHWCGWAKALYQRLRRLGKGHHAALRVLAFKWIRILFHCWKTRTGYDEQIYLKSLQKRNPTLWAEIQLLPPRKKKVA

SEQ ID NO: 149183 - protein, 335 aa, unidentified
MVFYAAIDIHKHAFQAAVLDPESGEVVEARFSADRESLARWADEWRGRVSAVAIEATTGWRWVWRELVAYGFDVRLAEPVQARALLGRRRVAKTDRLDARWLARLLAKEMLPESWIPPEEIQQLRDRTRLRKSIADDRRRWGQRLHAFLLHEGWPCPKSRLLTPEGMRWASALKLSEHARLQVDSLIAIINALETQLGTVDAELRRFARDDARCQALQSIYGAGPILACHLLAEIGEACRFRRSDQITRLAGLDPVVDESGETRRRGHLAKAGSPHLRWALVEVAVHANRDSAPDVGTYRAVRERRDATVARLTIARKIGKRAYHTLRELELAAA

SEQ ID NO: 149184 - protein, 453 aa, unidentified
MGRRTASGTKKKKDRQIFKQVNFNAGGIDAGAEYHWVAVPEDRATPSVRKFSTVTSGLYALADWLVECGVDTVAVEATGVYCVPLLEVLDARGIKVVLAKPSSLKSINNCQKTDMKDCQWLQMLHTFGLLMASYRPTQLVASFRSYARQRRMLIEHASTSIEHMKKALTQMNIRLDLAVSDVTGKTGMAIIGAILKGERDPKELAGLRDERCSKSEEAIAEALTGKYSDEHLFELDQAVRTWEHYQGLIAECNKRIEEQANRFEKKASREEIPAPRRKEHVRKNVLTFEARELFFEVLGQDLTQIDGISTGTVSTFLAEIGTSVAGFKTFKQFASWLRLSPGSNKSGGKNKSGRNRPTTNRLATALRVAAQTLQSSRSALGAYYRRMKARLGPEKAINASAHKLARMIYLTLKEQRPYLDPGADYYDQRNADRILKQMEKRARQLGYQLVKAA

SEQ ID NO: 149185 - protein, 376 aa, unidentified
MGKSIVEARRFVGLDVHADTIAVAVAEKEGEVRSLGIIPNRPPSIRKLLGKLGEPGSWRACYEAGPTGYAMYWQLTALGVECMVVAPTLVPMKAGDRVKTDRRDAERLARSFRAGELTSVWVPDAEHEALRDLVRAREAAKGDQLRARHRLSKFLLRHGQRPSQHMRAWSQRHLDWIRREVKFDLFAQQATLEDYLAEVDHLGQRIARLEKRIDEAVEEAPAAMKAVVSALQALRGIAKMSAVTIVAEVGRLSRFAKARQLMGYSGAVSSENSSGDRTRRGGITKTGNAHLRRVLVEAAWCQRHKPTLTRALRVRQEGLPASVVEIAAKARHRLSARYRRLLARGKPCQQVATAIARELLGFVWAIGVEVERTAAA

SEQ ID NO: 149186 - protein, 341 aa, unidentified
MHKQDSSKVLVFAGIDVSARELMVAVQVGDKLGPVRSFANATAGHRQLQQYLRSHGQRIRVCLEASGNYSLDLCLALHADKRIELSVINPRLARRFAESLGTRSKTDPMDARVLCVFAQRMPPGPWQPPSSASLQLRALTRAIDALTRMLVQEKARQHAAEASTALPRLVVTEIKRHQRYLEQRIQRLRREAVRIICRDAELHRHFRLLQTTPGIAEVSALQLLGELAVLAPTLDARQWVAHSGLDPRQHRSGSSIEWVLRLSKLGNRRLRRALYMPALVAAQHDPYLRAFYQRLCRNGKAPLQALAAVMRKLLHAFHAMLRLDQPYDGARLCAAFDRMEA

SEQ ID NO: 149187 - protein, 314 aa, unidentified
MLSPECFVGVDVSKAALDVAVRPAGVVWQMGNDKAGICELVRRLGQLEPVCIVLEATGGYERAAARALFKAGFPVAVVNPRHPRAYARATGRLAKTDRIDAQVLSQFGEVVRPRLLTSDNTAREELSGLEARRQQLREMVTAEENRLRTAQPNVARGIREHLDWLKKKAKQLDKEIEERMHSRQEWSMTEEILRSVPGVGPVLSAAIIAGLPELGCADRRQIAALVGVAPLNRDSGTLRGRRCVWGGRAPLRSVLYMATLAATRHNPVIGAHYRRLCAAGKPRKVALVACMRKLLTILNAMLRNRTPWRTSPVG

SEQ ID NO: 149188 - protein, 339 aa, unidentified
MHVTTIGLDLAKNVFQVHGIDDHGEIAFNRALRRAQVLAFFERLEPCLVGIEACGTSHHWARELIKLGHNVKLIPPAYVKPYVKRGKSDAVDAAAICEAVTRPTMRFVEVKTPEQQAILAVHRTRDLIVRQRTQTINMLRAQLAEFGLVLPQGVYHPLQFAKDCVDGEQPDLPKNAQEVVFDLCDELLFLHAKILRHSRHMTRIAKSEKRVALLRTIPGVGPITASAIVATVGSGKQFNNGREFAAWLGLTPLNKSSGGKERLGHISKMGDQYIRRLLVLGMTSRIRSIRLEPEKFDPWFADILSRKPSRVAAVAMANKTARMIWAVLTRNEPYKVRTV

SEQ ID NO: 149189 - protein, 370 aa, unidentified
MLDTTTFIGLDVHARSIKAVSLDVMTGEVRAATFGYDAGAVAGWVRSVDPRARCVYESGVTGFDLQKRLSGLGVDCAVGAVSKMIKPSADRRRKNDRNDAEFLARMLSVGNVVEVWVPDDECEAARDLTRALEDARDDLSRAKQRLSKFLLRHGLAFDERTPTGRRKGNWTRAHWSWIESIRFAERADNDVLAYYVDAVRRAAEEKARLEGLVEAEARKPRWRKRVDSLRCLKGVDTASAADLVFEAGEFSRFRNARSFAAWVGLTPSEHSSGESDRRGAITKAGNKHLRKTLVEAAWHYLTCSGRPKDLARGQAPDRGARRHAAKGVRRLVERREALLARGVHGNKANVATARELACWVWAVGLMAEEA

SEQ ID NO: 149190 - protein, 430 aa, unidentified
MKSNTQNAKIEAITEKTLVLGIDVGSETHYARAFDYRGIEYSKKPFKFSNTEAGFVTFKEWILDLKEKHEKDKVVPGMEPTGHYWFNLGKFLQDNEMKLVLVNPHHVKKSKELDDNNPTKNDRKDPKVIAGLVREGRYMIPYLPDGVYADLRTASNIRFQLQAELTRIQNRISRWFNIYFPEYKTVYGRPDAKSGMLILKQAPLPEDILTLDIDGVNQIWRDAKMRAVGKARAKTLIEAAEHSVGSKEGAISARMEIRMLLEDYESRNIRLQEIMTLIEELVNQIPMAEKLLEIKGVGIKTVSGFLAEVGDISRFNNPKELQKLAGLALVENSSGKHKGRTTISRRGRKRLRYLLFEVAMSLVAKNPEFRELHTYYTTRRLNPLKKMQSLMAIAAKLIRVFYAMLTKGVDYDPKKMVGDIKRPAVYLQAA

SEQ ID NO: 149191 - protein, 370 aa, unidentified
MEEGIKFFVGLDVHKDTIAVAAAEAGREPARWVGTIAHDVGKLLKRLARYGEPAQVQVVYEAGPTGYGLQRELTRRGYGCQVIAPSLIPKRAGDRIKTDGRDSVRLAELSRAGELRAIWIPDPADEAIRDLARAREDVVNARTQVRQQLKGFLLRHDVRYAGKTSWSKTFYRWLATLNFGLSGAQTAFTEYWQAVAAADERVARLTQALAGSIAGWRFESVVMALQALRGIDQISAIGLVAEIGDIGRFAHPRQLMAYLGLVPAEHSSGERVARGSITKTGNAHARRLLTEAAWNYRFQPRIGYRAQRRAEDLPQELRDLAWKAQLRLTGRFARLRARGVQINKVCVAVARELAGFVWAIAQARAKLPQS

SEQ ID NO: 149192 - protein, 409 aa, unidentified
MQTVHVRCAGLDVHKETVVACVRVVKREEVHHEVRTFSTVTSSLYELAQWLQEERVTKVAMEATGVYWRPVWHILEGGGLDLLLANAAHIKAVPGRKTDVNDATWLADLVAHGLIRPSFVPPTQFQELRDLTRARKQSTRERTQHVQRIHKVLEDANIKVTSVISDVMGISGRKFLAAIIAGITDPVVLARLGSPRLHASPETLAEALRGHVTDHHRFMLQFYLDQVDDTDRALSRLDEQVAALLEPFREQVEHVSTVPGVGPTVAAAIVAEIGIDMSRFPSASHLVSWATLCPRSDESAGARRSTRTRKGATWLKPMLVQAAWSAVRTKRSYERVLFMRLKSHRGPQKAIVAVAASMLRAIYCILRDRQPYRTLGQDHFDTIDREKASKRLVARLKRLGYEVDVKKAA

SEQ ID NO: 149193 - protein, 406 aa, unidentified
MLFVGDDWAEDHHDVEVQDEIGRRLAKARLPEGISGIARLHALVGRFLPEDGDPAEVKIGIETDRGPWVAALVASGYQVYAINPLQSARARQGNGVSGAKSDAGDAHVLADMVRTGSHQLRTVAGDSEQAGAVKVLTRMHQTLIWDRTRQMLRLRSSLREFFPAALKAYEDLDSRDALELLTKAPEPHSAAALTRAQITAALKRAHRRDREAKTTAIMAALRTEHLTQPPLIAAAYGATVRALAAVITTANEQITALEGPVEACFGRHPDAEIYLSQPGLGPILGARVLAEFGDDPTRYAGARARKNYAGTSPITRASGKKKVVLARYVRNKRLADAVHRQAFSALSGSPGARAYYDELRDRDISYNAALRQLGNRLVGILHGCLKTHTLYDEATAWNQHTQQAAA

SEQ ID NO: 149194 - protein, 346 aa, unidentified
MKVLIGVDPHKASLAVAAVDEAKGELLERASFPQNRSGLRALERWAKRFPERRWALENAGGLGRHLAGRLAAAGESVVDVPPKLSAKVRVLSTGNSRKNDGLDALATALAASRNERLAAVDPEAASEVLRLLSERREELVAERTRGLNRLHGLLRDLVPGGIAGTLSADRAARILRGIRPQGSSSRVRRRVASEVLRDIRTLDRKIAGLNERIEAEVEACGTTLTEIFGIGSILAARIIGTVGDVGRFPTKAHFASYSGTAPVEASSGEVVRHRLSLAGNRHLNYALHMVAVCQARSDARGGGYYRKKIAEGKSHKEALRCLKRRVCDAVFRSLVADSQALSRSAA

SEQ ID NO: 149195 - protein, 368 aa, unidentified
MLRLVSLAERGQGVGPTRKGAGGGGPGDPRPVVSIGIDLGRSKWALAVSFGGQVQRRLATPGQLSHLEALLEQYRECRVQVAYEACGFGYEIAWYLQQRNIAVTVVAPVTMERAVGARVKTDKIDATALATKLEQGSLKGIYIPSRREHADRQLSRTYAKALKARQRAQVQIRALMQEQGRIGPSPAQGWSAYARWLGQQSDLPEPVRVSVNELGQVRQAAAESAKRLKGSLLKLSKNPEYAAVVAAVRGQPGIGWLTAIRVVMEIATIRRFRSAGSFVHYLGLTPSEYSTSESIRRGHILKCGPGYIRSWLLECSWRAVGVRGDQALRECFERLAPRIGRKRAIVAVARRLALRLRARWIETLGQAA

SEQ ID NO: 149196 - protein, 345 aa, unidentified
MQVTTIGLDIAKNVFQVHGIDVAEKVVVRKQLRRCQVLEFFKALRPCLVGMEACATAHYWARELTKLGHQVQLMPAKDVKAYVKRNKNDAADAEAICEAVRRPTMRFVQVKSVEQQGRLMLHRTRDLLMRQRTQVINALRAHMAELGIVAAQGYAGLKELLKIIAGERDARLPVDAHASLVVLAAGLHAVQTMIGSIDKRIIVEHRSNEASKRLRSIPGIGIVGATAIAATVTDPKVFRSGRDFAAWIGLVPREDSTGGKHKLGPISKRGDRYLRRILVVGAHAVLKLARQKPEKYPWLTQLLARRPFKVVAVALANKMARVAWALLAKGGTYYRARALVAPAAV

SEQ ID NO: 149197 - protein, 331 aa, unidentified
MDEVKRFVGIDVAKAKLDVFIRPCGESFSVANDELGVRELLKRLGPADFVILEATGGLEMPVASSLASAGVAVAIVNPRQVRDFARATGRLAKTDRLDAQVLARFGETVRPATRPLADAQAQALEALVTRRRQLVEMLSAEKNRRTMAPKVLHRSIDEHIRWLEQRLGGLDDELGTVIRDTPLWRERDQLLRSVPGVGKVLSSTLLAHLPELGALNRKQIAALAGVAPFNRDSGSMRGSRCIWGGRAQVRRVLYMAAVAGIRSNPAIRSFYLRLRASGKHAKPALTACMRKLLVILNAMLRTKTHWQLPALATPTSTISPLAGAVSEHGCC

SEQ ID NO: 149198 - protein, 395 aa, unidentified
MVISYQKPTDKDTQMRKQNTNMSETKQTIYIGIDEHKKDWTVTFRSKSVGLDTKRFEPDANKLVSYLRRTYPDHNYEGVYEAGFGGFWLDRELRAAGVKNIVVNPADVATKGKEKAQKNDKKDSQKLARELASGNLEEIYVPSVKDEAIRTVTRLREQTVKDQTRIKNRIKSLLCLYNVNIPRNDEMQHWSANFIKYLSEIKGLPAETKYTLDTHITILTFVRTQLLQIIRKMKQLVKEDKVLATKVKHLESIPGVGFITAAGVQTELIDIERFPSLDNLASFVGLSPAVYSSGEHSKDLGITKRYKKYLRNRLIESAWVAVRYDPELRKNYEEYVKRMSKQKAIIRIAKKLLNRIMYVMKNNVDYKPKTAKSETQKEPVTKQSEKKKVKVKRVF

SEQ ID NO: 149199 - protein, 408 aa, unidentified
MKVYIGIDWSEQKHQVCFMNEAGAVIQQMSVEHSVEGFLKLEAARQKLGVSPKEVVVGLETAHNLLIDMLIERSYPAIYILPPNQVKSNAGRYAQSGAKDDTRDAWVIADMLRTDRGRLHAWQPDSLLTRQIQAQVRMVLFLTRMIQRQSNHLRAILVRYYPAMLDIFSRLDSPTSLAFLEAYPIPQEAVRLTYEQFTQFLRVHHHTHRAKWATMYAQLNHDYPQAHSDTIAVLAPQAKQCAILLLPFIQAKKHALAELQKLYRQHPDVAIYEHLPGVGDFLAPALLAKLGDDRLRFPNRQVLQAIAGTCPITRRSGKSKFIQFRRACDLQFRYIVHQWAVQAIKQSPWVQTYYQELLKRHIGKNDATRRVANRLLAILYKLWQSHASYDETYYLQQRALRAKPLPKA

SEQ ID NO: 149200 - protein, 414 aa, unidentified
MDLEIMYDVACGLDVHFAIIAACLARTGPKGGPRYEERSFPTTQQGLRELRDWLIAAGCQSVGMEATGVYWMPVYAALERDFVLVVGNPCHMQNLRGHKTDRKDARWISGLVRHGLIRPSYVPTPEFRDARELTRSRRQLLQARTTVRNEIQRSLACKGIPLGNVLSNVFGVSGMGILEALAEGRSVVEELPKLVHRSVKSKLPALTAALEAPLPEAPRRLLAISLTRLEELEEHIQEVEKLISKQMEPHAVAINQLTGIPGIGVTAASIVLAEIGVDMSHWPTERHLSAWAGVAPGSRESAGKRMSSTIRKGNGHLTTILVESANAAIKVKTSHLACQFHRLRARLGYKKALVAIARKILVIIYRLLSSGGEFREPQSHPAEEKSKQRAVRKRVKDLKALGFEVTLTPITQSA

SEQ ID NO: 149201 - protein, 366 aa, unidentified
MQLLLIERLRAPVSLIRACPWACEINSGELLERPSRPTPGAGPAWPARILQAGVIYHVKEEVVYLGVDVAKAYLDAAMGSEKRRLANDGTGHRQLINWIKQMETNVQVICEPSGGYERMLIQALVGAQVKVSLVQANRVRQFARAAGILAKTDSIDAEVLCAFGQAMRPQTLSASKLQQEHLRELESQRRHLSRLLVMEQNRGARLGDSSVRTLNRSLTKQIQKQIERIDLLITEHIAGSQELSAKAHKLTAISGVGPRTAALLLAQMPELGQLNRREVAALVGVAPFNRDSGKWRGKRTIFGGRRHVRHGLYMAALVAARHNPILRAFYQRLRAAGKPAKLALTATMRKLLIVLNSALKPDPIYA

SEQ ID NO: 149202 - protein, 321 aa, unidentified
MPTFYLGIDVAKAKLDCALRLPNGKFRAKIVPNNSQGYAELVDWLSHKEALDVQVCMEATGVYGEDIAQCLSTQGFIVSVVNPAQIKAYSASRLTRTKTDAVDARLIAEFCAERNPPPWQARTEAEVALRALVLRLDALQTMRTQESNRLGVARDAVRTDIQEHLDWLDEQIKTLLKTINGHIDSNSDLKGKRELLDSIPGLGERTIAILLAFYADPSRFANSRQAAAFAGLDPRQYESGTSLKAKPRLSKVGHAFLRKSLYMPAMVTLYKTDWGKQFKDRLAFSGKPAKLIIGAMMRKLLHVVFGVLKSGKKFDPALHGA

SEQ ID NO: 149203 - protein, 312 aa, unidentified
MEAKVIGIDVSKLKLDFDCLPVSAPQQFGNDAEGIGALVELVKGSGAERIIIEATGGYETAVVSALVVAKLPVVVVNPRQVRDFAKAIGRLAKTDRLDAGLLALFGERIMPALRPLPDEAQRALGDLLDRRTQLVAMRAQEKARLASVTPIARKNVLQHIVWLDKCIAKLDHDLEERLRKSAVWCEKVALLGSAPGVGQVTTFALLARLPELGQLNRQAIAALVGLAPFNDDSGIRRGARYIRGGRADVRCAMYMATLSAIKHNEPIKAMYERLTAAGKPFKLAMTACMRKLLTILNAMLKRNQKWKIQHSS

SEQ ID NO: 149204 - protein, 333 aa, unidentified
MSKFSNFLGIDVSKEYFDAVIILNSDKNDTIHNQFSNDIKGLKELVKWLKSITSTNQNTLICLEHTGMYGKAIIQYLLSKEFSLWVEMSLKIIRSIGVQRGKNDKIDAERIAYYAMKNQDEVQIYQAPRKVIDQIKKLISLREHLTTTKAMLMRNSNELKGFEPELSKLHKKHSKATIKGIETDLKNIEKELDSMIKLDEKLSNVFEKVTSVTGVGKVTALFLICYTNEFTMYETPRQLACYCGVVPFEYTSGKSVRAKPRVHFMANKKLKKQLHMCAISTIRADGELKEYYERKVAEGKNKMLVINNVRNKLIHRICACVKNDKLYEKRNVA

SEQ ID NO: 149205 - protein, 344 aa, unidentified
MSSIDYIGFDIHKKMINFCAKAQDGTILEEGTIPARREALLAWARARPRPWIGAMEATLFTGWIYDLLKPLAQALKVAHPPMLKAIAVAKKKNDKVDARMIADLLRCNLLPECYMAPVAIRDLRRVLRYRNLVVREATRMKNRIAGLLMETGTAYNKERLHGKAYFSELLGSLQEVPGSVVELLKLSRGQLEFFAAIQRRLLKGLREHADLNQRVMRLQTIPGVGEILALSWALEVGEVKRFPSIGQAASYCGLTSAQHSSAGKEQREPISKQRNQHLQTILIEAAKLAPRYNPQLAVVHERELQRGNRNQATLAVARKLVAYLLAVDKSGKPFAMRASTQEAA

SEQ ID NO: 149206 - protein, 455 aa, unidentified
MRRKKASTKPHVDSGFSLIRPNAAGMDIGSREHYVAVPEGSDSRPVRSFGCTTSELKEMAAWLKSCGVETVAMEATGVYWVPVYEVLEDAGLEPFLFDGRQTRRVSGRKSDVLDCQWSQKLHSYGLLTRAFRPDKEIASLRSYWRQREGIVDSSARQIHLMHKALEQMNVQLHKAVSDVTGVTGMRILRAIVAGERDVQTLARLRDRRVKATEEEVAQALEGTYREEHMFALTQALETYDFFQQQLVACDQVLEGYLAQLPSAPNPATVSRPRQKRRKNQPHFDLRKELARIAGVDVCQIEGVEAITAQTLISECGTDMTRFPTQRNFTSWLGLSPNNRKTGGRIRSRRTRRVHNRAAVALRVAAQTLHRSDSALGSYYRQMKARHGAGKATTATAHKLARLYYRLMKHGEAYFAQSQAQYDAFRRERDLHALKRRARRLGLELLNTTTGEIMAT

SEQ ID NO: 149207 - protein, 402 aa, unidentified
MNCVGIDVSKGKSMIAVMRPFGEVVVSPFEVRHTANELSELAGLLKSLDGETRVVMESTGNYHAPVAWLLHDAGLYVSVVNAMLVHDYGNNSLRRAKTDKKDAIKLANYGLDHWLTLPRYVPEEDTRLMLKACYRQYQQYSKVQTMLKNNLISLLDTTFPDANRLFTSPPRDDGHEKWVDFVATFWHCECVCDLSEKAFAAKYQKWCKKHGYNFSEGKALDIYAAARGSFGVMPKTDTAKLLVEQAISQLRTTSSALATLKQEMQSMATSLPEYPVVMGMFGVGPTLGPQLMAEIGDVRRFHSKKALVAFAGIDASPYQSGQMDVRSRSISKRGSASLRRTLFLVMSVILQRAPMDEPVYQFMNKKRSEGKPYRVYMMASANKFLRIYYASVKAYLDPLEHD

SEQ ID NO: 149208 - protein, 429 aa, unidentified
MQNESTPGARGPVFCGVDTHADSHWLCVLDWRGRKVLSRQFPADAAGYEALAGAIAAAGEPACVAMEGTSSYGAGLTRHLASLGMPVREALSPARTQRRRPGQGKCDESDAERAARAAMSGSKLGTPKSQDGWVDGVRCMLAARSGAVKARTSAINTARSLLTTAPEGLRSRFRGMAGPRLMEELPSVRAGGALGAALGALADLWAAARDAALDMERAIEASLEENCPALLAMYGCGPVSAAKLAVAAGDNPGRLRSEASFAAICGACPIPASSGKTVRHRLNRGGDRQANSALHEIARQRVMRDPETAEYAERARARGKSDREVMRCLKRYVAREAYRALMRPHEVRRPEDASGLVAARRAARVSQVRAASILGTSEKYISMLERGQRELKPIRRAYEAWVEAGLPLDWDRQAFEAERKMDSKKHLAK

SEQ ID NO: 149209 - protein, 407 aa, unidentified
MKNNSSSNKQRLAVEVEFREKTPLEKSNSSAKQRKAVKAVKEFGEQKLFAMATVGNGGSGRLTIGLDLGDRSSCWCALGADGEVMARGEVMNEPQSLELFFGRIPMSLVALEVGSHSPWISRLLEKQGHEVVVANARRVKLISESSRKNDDVDAELLARLARADRRLLSPVKHRGAEAQADLMAVRVRAQLVELRTQTVNAVRGLVKPFGQRLPSCDADSLKRTCAWDLDVAIRGHAERLLGVVEELTKQIDACDRELERIAKDRYEKETAQLRQVPGVGPITALTFVLTLDDPARFAKSRDVGAFLGLRPKSRQSGASEPEMRISKEGDGYLRTLLVQCAQYILRRRGPDTDLKRWGLAIAAKGKKKAKKRAVVAVARKLAVLLHRLWVSGEIYERRRSSERKAAA

SEQ ID NO: 149210 - protein, 352 aa, unidentified
MRIPQAFMVGIDVSKAHFDVAVEGKSAVGRFDNDAPGRTALATAIAGAELVVVEATGGYEMAIVRALMAAGIPIAVVNPRQVRDFARASGRLAKTDQVDARVILHFARAMRPAQIPHIDDGRIALAALVARRRQLIDMAVAEKNRLEHAPQAVAALIGETLAALKSQLARVDAAIALAIEAEPDMAARRDLLLTVPGIGEVGAAVLIAELPELGAIDDKKLAALVGVAPVAHDSGTWRGQRHIAGGRATVRCALYMATLSAIRCSPAIKAFHKRLRDAGKPPKVALVAAMRKFIVMINTIIKRRTPWSELPTTRLLRRASQRPNPRRTRRNACVLRSSTVHQRVRHSWTTRS

SEQ ID NO: 149211 - protein, 407 aa, unidentified
MDVIYPRCAGLDVHKQTVVACVRIVGDGPLLQEVRTFATTTSGLLALSDWLDSFGVQHVAMEATGVYWKPVWHVLEGHFELVLANAAHVKNVPGRKTDVNDATWLADLLAHGLIRASFVPPTAVQELRTLTRTRKQFVRERASHVQRIEKVLEDANIKLSVVISDILGKGGRAVLQALIDGHTDPEVLASRITTRVKASRAELLEALRGRASAHHRFMLNVHLSHIDALDKAVAAIEAEVGAGLAPFQQAAKLLSTMPGLSEVSANVVVAEIGIDMSRFATPGHLLSWACMCPRNDESAGKRRSTRLRRGGKWLKTALVQAAWSAIKVKGSYLQAQFHRLRARRGAKKAIVAVAASMLTAAWHMLRNGTEWHELGAAHFDRADATKTANRLIRRLQQIGYVVQATPA

SEQ ID NO: 149212 - protein, 372 aa, unidentified
MDKKTINPTACVGIDVSKYFLDVYISKTGEHVQVKNEKSGYLAIIKKLKNISEPAMVMEATGGYEKKAAFYFYSKAFLVAVVNPKRVRDYAKCTGQLAKTDKIDAKIIASYAEKVEIRFLENRDEIREHIRDLMNRRRQLVELKKIEINHLEHAECKETILSIKRMINTIKNQIKKIEQQVDDFLKKSSDLTNDVELLMTVPGVSKITAILLLVELPELGSCNRKTIASLAGLAPINKDSGSKKGIRSITEGRKRIRTALYMPTISALRCNPVIRDFYLVLRGKGKPGKVIIIACMRKLLTILNEIMRSKTSWRIEKQDDKSLSGLKHNDTSESESKEKLEEKIVAHQTNISNYEYHSDGYQKGRVVNVSLK

SEQ ID NO: 149213 - protein, 344 aa, unidentified
MTQYKRIGIDTSKAVFTLHGIDQAERPTLRLNLRRGQMIAFFTKLPPTEIVMEACGGAHHWARELTALGHKVLLIPPQYVTPYVKRGKNDRNDAAAVCEAGGRPGMHFVPVKSVDQQAQAMVLKVRGTVVDQRTQLCNTVRGHAAEFGVVAGKGRGQVAVLLSVVEQQPAIPPEAKAMFVVLGQQIEALDAQIQHLDARLAEAHKSNPVSQRLATIPGVGPITALTLAIEIDPGAFESGRHLAAWAGLTPKEHSTGGKPRMGGISRAGNERLRALLVSGATSVIQAMVRPGGRQMTEWLRALLLRKPRKLAAVALANKMARIAWAMMTTGETYRRPSAAGAVAA

SEQ ID NO: 149214 - protein, 336 aa, unidentified
MRFYAGIDLHANNNVLAVLNDSGQLVCQRRLSNVVAVVIGELERFQSALVGVVVESTFNWYWLVDGLQAAGYQVHLANTTAIQPYQGIKYTNDLTDARWLAEMLRQKILPEGRICPAALRAWRDLGRRRMQLVQQRTSQIVFLQMLLARVQGHRPSRTRVREVDVKTLGQPRAVGLNVASGLRIIDALDSEIARIEKVLLAQVALEPSFQQLQTVWGIGKILASVMALEIWDIHRFKTPGDLASYARCVSSSRFSNGKRKGQNNVRNGNPYLAWALIEAAHFAAMHYPPAQAFVARKTEQCNRALAIKALANKLARACFFVLRDQVDFDPKRVFGS

SEQ ID NO: 149215 - protein, 343 aa, unidentified
MEHIAIDLGARESQVCVRAGDGTIVLEARCATATLCTFLGQRPPSRVVVETCAEAFRVAAVARELGHQAVVVPAGLARALGVGTRGLKSDVRDARHLSEASCRMARLPAVHVPEPRSQARKGECALREALVTTRTKLVNTVRGWLRGQAAGPLRRCTPPTLPARVRAHLAAHGQVVPDAVERVLHVIEALTGQIRAADAALTALAQEDAVCRRLMTVPGVGPVTAVRFAAAVDDVQRFPRASAVQSYLGLVPGEDSSAERRRITGITKAGPSRVRWTLIQAAWCVRRLRPQDPAVQWARRVESRRGRPVAAVAWARKLAGILYALWRDGTVYDPQYPATRRAA

SEQ ID NO: 149216 - protein, 366 aa, unidentified
MTSVAPAGERIYLGMDVSRDKIAVAVLPPGQDVPAVEMISHDGEMVRRLIGKFADRSVLAACYEAGPGGYELHRLLTSAGVACDVVAPALIPKAAADRVKTDRRDCVRLALSHRAGMLTAIRVPSEPEEAVRDLVRTRADLVDDRKRMMQRIGALLQRHGRVWRAPRWTCQHRAWLDRQSFTEPALEAALRTYLAALDARDAELAVLERQLRGCWASVDPLAPMVRQLGCYRGIAELTALTLAAEVADFRRFASAPAFMGFTGLTPSEYSSGARTRRGGITKAGPQLVRGALVEAAWSYRHRPAIGATLRRRQAGCAAETLARSWKAQQRLHATYAKLTRRGKIPSVAVTATARELAGFVWAEMTS

SEQ ID NO: 149217 - protein, 316 aa, unidentified
MQSILNLGADVDSRYVMVACAAGSFKPYRIANEGKAIRAWLRTVPQGSRLAMESTGSYHELFADLAHQAGLQVFIVNARDLRRYGQGIGRRGKTDRIDAEVIARYLAREHQELHAYVPPSDEQRLLTRLIGRRAKLVQAKGSIRQSLGGLPALQSEVRRLIGHIDRVIASLDLLMQRTVQQMPGAREAAGHIATIPGFGVLTSTCLGHRFTRLPYATSDAVVAAAGLDPRPDDSGQKEGRRRLSKRGPAEERRLLFNCARSAAQRKPWRPYYDAQLAKGLSKTAATVVLARKMLRVAFAVYKHRQPFNPLLVGGGT

SEQ ID NO: 149218 - protein, 387 aa, unidentified
MTVRTVSNLPAAMHVETARCLFAIELSKQSWVIGFITPLSAKISRRILSGGDWKGLVDLIEEVRSRVSRETSRAVDVISCYEAGYDGFWLHRLLQAHGIRNYVIDPASLQVDRRARRAKTDRIDTERLLRSLMAYLRGEPKVWSVVRVPSVAEEDARRLHRERDRLVSERVQHVNRIKGLCALHGIYDYQPLRPQAMARLEQLRTAQGISLPPRLKSEIKRELQRLELVVKMIATLEAERDAIVEDGASTHVNAKKIQNLHQLKAIGPEFAAVLVGEIFHRDFNNRRQLASYVGYAPSPFQSGNVAHDQGISKAGNRKGRTTGIELAWLWLRYQPDSDLSVWFRARVGTTKGRIRRIAIVALARKLLVALWRYLETGVVPRGAVLKG

SEQ ID NO: 149219 - protein, 279 aa, unidentified
MEHYVGLDVSLKLTAICVVDQTGSVTREGVVDSDPETIADFVTSNAPSAVRIGLESGPTATWLWTELKQLGLPVICIDARHAKAVLKMQINKSDRNDAAGIARIMQTGWFKEVRVKDLDSHSVRALLASRALLVKIKRDLENQVRGLLKNLGLVIGRAKLNVFAVRAEELIKGRPELMAAVRPLLDARNAIEQQVDDLDRKVMRLARNNAQVRRFMTAPGVGPITALCFLATIDDPTRFKRSRSVGAYTGLTTRRYASGETDWTGEQPGSIATETSCPL

SEQ ID NO: 149220 - protein, 417 aa, unidentified
MADDLGWFAGVDWASETHQVTLLDALGTVIGEHAFLHGGAGLGALCEWLLAVTGAPAETIAVAIEVPHGPVVETLLERGFLVYAINPKQLDRFRDRFTVAGAKDDRLDSRVLGDSLRTDRHCFRPLHLADPVVVELREWSRMAEDLQQERTRLGNRVREQLWRYYPQAIQLTDDVAADWFLEFWALVPTPAKAVKVRKETIAKFLKAHRIRRIDAEEAQRILHQTPISVAGGTTEAATAHIRMVALRLKVVNRQLKEAHRRLDTLCVNLAGSKEPEPGQSQEQRDVTILRSLPGVGRIVLATLLAEAWEPLRQRDYHALRSLCGVAPVTKRSGKRCVVVMRQACHMRLRTAVYHWSRTAIQHDGLSHRRYAELRKRGHSHGRALRTVADRMLAVACAMLRTHTLFDPSRAGAEKAAA

SEQ ID NO: 149221 - protein, 405 aa, unidentified
MCVRGSSRILVIGSIKRWGKLPHPRKEGLYMIAYVGIDAHTTNYTLSTYLEGSAVPVNTNTYSPSVSNIVSYCKGIRKKIGNDTEIVVGYEAGCLGFKLKRDLEEKGLTVKILAPASITGTEINRRRRKKTDKRDAEAIARSLKNHEYSEVYTPDEEDESVRDFIRMQQDHKKQLRVIKQQICAFTTRHGYKFTDGRNYWTKKHLKWLKELPLEGINKETLDSYLLSYETVSDRLEQMNRRIEEIAEKDKYREAVHKLICFKSIKILTALALIVEIGDFTRFVKAKNFAAFLGLVAGELSSSDDQNQTGITKQGNTFLRKLLVECAQSFSRASSGKSEALKKRQEGNAPEVIAYADRANERLRKRYMRLVLHNRKNHNKATVAIARELACFIWGMMTGNIHTVLA

SEQ ID NO: 149222 - protein, 351 aa, unidentified
MNRSAPTHCPLYCVDLAKHKFQVHGYSADGHRQQCLTLSRSQFDRLFCEESNSDCLVVMEACASSNYWCRRLLALGYRVKRVPAQFVDKQRIGNKTDGNDADAIFAVHQDRRVGAVAVKTVEQQDLCAQHRLRELLVGQRTQLLNQARSLLAERGQIAPQGRVALEALIRLVCQEEPNQEVSAGLIELLEQITCQVAGIDAQIQSIEGRLKAASQASVLIRQVQSIHGVGLITATAVVAEYGNNISHFADARQFAASLGVTPSERSSGQQRRLGGITRRGNPYLRTLLVQGAQSVLNHCQRREDAISQVARRLLESKRRTVAVIAIANRLARIIYAVIKHNTPYRAQPQQA

SEQ ID NO: 149223 - protein, 457 aa, unidentified
MRRKGKRTKGIEQAHPFAGMSKVNPNAAGVDIGADEIVVCVAANESVQLVRGFGNYTVDLHAIADWLAEHKVETVAMESTGVYWIPLFEALEQRGFECLLISSRSLRRVSGRKSDVTDAQWIQTLHSYGLLESSFRPQADLIALRSLLRHRRSLIDHRSPHVLHMQKALLQMNIQLSQAVSDVTGVTGQAIIRAILSGVRDPKMLASLREPGCKKSEEEIGKALTGTWREEHLFVLKQAVALYDFYTQQILECDEEIERVYGLTRPDWEAGEVKPTRKKNSARHSKNAPYNPEQIRKHLKRISGVDLSAVDGMSVSLAQTVIMECGTDMSKFPTEKYFGSWLGLAPKHEISGGKVLKNSTLKTKNRAGQAFRMAAQSVKRADCPFGVLYRRLKARLGPSQATVATAYAIARAVYRMLKYKVEYDPLSVNEYQKQYEEQQLKYMRKRAAKLGYQLVPA

SEQ ID NO: 149224 - protein, 343 aa, unidentified
MESIYYIGLDVHKKSITYCIKDVTGGVVCQGMVKAERRALQQWLVDLPGSWVGAMEATMFTGWIYDFLKPYALELKVAHPAMLKAITAAKKKNDRADAEKLADLLRVNLLPECIMMSEELRELRRILRYRNMIVRTASKMKNKISGLLMEVGAVYDKRKLHGKRYFGQLLERVEDVPDSVKDLLKLSRSNLELFVAVQKKLLKVLREDSLISKRVELLQSISGVGEIMALTWVLEIGDPGRFSNSRQAISYCGLCSAQRESAGKEHRGPISKQRNKYLQSMLIEAANIAPLWNPQLAMLKEKELTRGNCNRATLAVARKLVKYMLAVDRRGEPFIAEKESLVV

SEQ ID NO: 149225 - protein, 349 aa, unidentified
MDENEVILGVDTHLDTHVGVLINTNGNLLGCLAVTTDTSGYLKLVTWANSFGMLKRAGVEGTGTYGAGLARVLRDHGIEVLEVNRPDRSKRRLQGKSDPTDAESTARSVLSGNATAIAKTQSGVAEAMRVVSVARRSAVRAKTQAINQLRALLVSAPQDIRERLWKTKPGDCAKGCARLRSRSATEFLNILTTSLCLLGKRWLALAEEVEKLDVILENLTRQHARRLREQFGVGPQTAAVLLSTAGDNPERLKSEAALAALCGVSPLPASSGKTVRHRLNRGGNRSANNALWTIAMVRMRGDPKTQSYVARRSAEGLSSKEIQRCLKRYIVRELYPLILADLADSARSC

SEQ ID NO: 149226 - protein, 370 aa, unidentified
MLDTTTFVGLDVHARSIKAVSLDVMTGEVRCATFGYDAGAVAEWVRSVDPGARCVYESGVTGFDLQKRLSGLGVDCVVGAVSKMIKPSADRRRKNDRNDAEFLARMLSVGNVVEVWVPDDECEAARDLTRALEDARDDLSRSKQRLSKFLLRHGLVFGERTPTGRRKGNWTRAHWSWIESIRFAEGADNDALAYYVDAVRRAAEEKARLEGLVEAEARKPRWRKRVDSLRCLKGVDTASAADLVFEAGEFSRFRNARSFAAWVGLTPSEHSSGESDRRGAITKAGNKHLRKTLVEAAWHYLTCSGRPKDLAKGQAPDRGARRHAAKGVRRLVERREALLARGVHGSKANVATARELACWVWAVGLMAEGA

SEQ ID NO: 149227 - protein, 326 aa, unidentified
MTKLNIYAGFDVSKAFFDVCILDQDGQQHSRQISFDKPGLEALVAFLPKSAYCIMEATGAYHSRLAFYLYQTGYRVSVVNPLVIKRYAQMKLLRAKTDRADARLIACFGKDQHPDLWEPPAPYLIKLQHLQALQHQMTKHCTALKCQREAFNHASQMDKEIKKMLDKAIGHVNNQIELIDKRIEQIIEQYHKQLLQKLISIPGIGKKTAAMLIVISDAFKKFENYKQLSAYIGLSPRIYRSGSSIKGKSAICKMGMGRARALLYLCAWSAKRNNSSCKMLFERLVARGKSKRLALIAVANKLIKQVFAIAIHNTLYKPDYQKNICF

SEQ ID NO: 149228 - protein, 345 aa, unidentified
MKKVMAGIDLHSNNLMIGIMDMDGKRVASQKLSCGLKEVVGFLSPFKKRLEQVAVESTYNWYWLVDGLQRLRYPVVLANPAGMEQYSGIKHADDTNDAFFLAELLRLKILPTGHIYDEQLRPVRDLLRRRLTLVHHRTALMLSFKSLYTRTTGKEMTLSELKELEIKQAQDLYDHPANQLIAGMQIKHIEQLTESIERIEKVVLDCARELPLYTKLTTLPGVGTILGMTITMEVGDIKRFAEAGHFASYCRTVEAKRTSNGKKKAENNSKCGNKYLAWAFVEAANFARRYDEQCRKWYERKAAKKSKVIATKALACKLAKAAWYLMALGTDYNAKRMFGQPATTQ

SEQ ID NO: 149229 - protein, 412 aa, unidentified
MKDLLEISCGLDVHKEKIVACILTGPLGKPTRSEIREFSTLIPDMIALRNWIVSKNCHHVAMESTGIYWMPIYEILEDAFYGDITLLVVNARHMKNVPGKKTDMRDSEWISTLLRAGLLNGSFIPQKRIREFRDLNRYRKSVIRDITSQKNRIEKFLQSSGFRLSSFISDIFGASGRNIILHLIEHGQIDKTTLDSCLKTKTRKHIDEILMSVNGTLSEHQKAFLRILMTHYNSLKKHLTEIETSLEEDMPPFALQVEQLNSIYGISTTASCAIIAEIGIDMNPFKTAEHICSWAGLCSGNNESAGKRKSTSVTKGNPYIKSMLCEIAWVIAGKRNTYLSAWYWRIKQKKGAKKAIVALARKLLVIIYTMLKQGTLFDESCFETRRKNCEQKQLSRYIRELEKHGYHVKAQS

SEQ ID NO: 149230 - protein, 382 aa, unidentified
MEKYCIGIDVDKKTIKVCLMLRSSDLSKKVKGSKTFSNDIVGFQSFTAWLSNRIKEDDIPQSYVMEATGVYHELLAYFLNDQDKLVHIVLPLKSKRYLQSLGFRSKTDKIDAKGLAMMGCEQELDQWQPTSRQLLKLRSLTRHIERLQNTKTSFLNQLEGADHTVVMDSLVIKSINKMIKELENQIAKLEKKVKKTIESDELLNQKYELFKPLKGVGLMSFAVVVAETNGFALFKNQRQLVCYAGYDVVENQSGQRSGKTRISKKGNSHIRRILHMSSLSAVRNKVPVLRNLHERVVDRTGIKMKGYVAVQRKLLVLIYSLWKNDTPFDPMFGTSGNHEPKLLCSVDQPIGWAHIKTAKSDDSAALDELPCNQLPEVLCSVM

SEQ ID NO: 149231 - protein, 332 aa, unidentified
MKRGQSSTKRGSRKPGKATVRNVVAGGVDVGKDWLDAAVHASATEPLRRANTAQGQAEILAFFVEHGVTRVGIEASGSYEFEMVEALREASFEVIVFQPAQVRAYAKFLKLRAKTDAIDAALIAHCAAAQSALQESPDPRLKPFAEHLTFIDQIGEDISRLRTRLDRFRNARLIADIKSEIARLAKRQRVERTKLRAAVRAHADLAKKLDLLISIEGLGEPTALVIVVRMPELGTISRERASSLAGMAPFTCQSGRFIGQTHVAGGRARVGKALFAAAQAASQRWNKALVDLYQRLTAKGNHHTAAVVACARKLIIYANTVLARGTPWIPQN

SEQ ID NO: 149232 - protein, 356 aa, unidentified
MAVYVGIDVHKKYCQAALMNNDGRIIKELRFDNTTQGASNLITLAKSIDPQVQAVVEPSANFWIRIYDKLEDEGVQIKLSNPLRTKAIAEARIKTDRIDAKTLAYLLKGDLVAESYVPTRKNRERRALIRHRASLIQMRVDIKNRIHALLDKHELTHNYTDLFGKQGLEWLRSLQLPTIDQQILQSSLHVVETLTEQIREMDIQIAKDATSEEKAKLLMTMPGVDYYAAMVLLSEIGDVHRFNSDERLVSWVGLAPQTHQSGDSNWTGHITRKGSKRARWILGQCANIARQHDPRMREFYERIERKHGSQKAIVAVARKMLAIMYVMLIRNEAYRGENLELTERKHKRLDTLANSA

SEQ ID NO: 149233 - protein, 408 aa, unidentified
MEVVHPRCAGLDVHKRVIVACRLTPGPRGHPVREIASFRTTTAGLLELSGWLAAVAVAVVAMESTGSFWKPVYNVLEGSFELVVVNAQHLKAVPGRKTDVRDAEWIADLLRHGLLRPSFIPERPERELRELTRYRTSLLQQRSAEVNRIHKVLEGANIKLASVATNVVGTSGRAMLEALIAGEVDPERLAGHARGRLREKHDSLVEALAGRFGTHQAFLLAAMLHHLDTIDELIERTSAEVAARLAPFEAELGRLQTVPGIGRRTSETILSEVGADMSRFPSSRHLASWAGLCPGNHESAGKSRSGRARKGSPWLRSMLVEAAKSASRSPTYLGALYARLAARRGAKRATFALAHNLLVIAFHILSRGVEFKDLGPTYFDARDRERTFQRLTRRLEAMGYQVAAIPNS

SEQ ID NO: 149234 - protein, 417 aa, unidentified
MKDRSEARGVQYVALDIHKHYCVIAGVDREGRVLLQPVRVEHGDLEGWLKKHLCSTDRVVIESTTNAWHVYDLLAPLVERVVVANPIRVKQIAQARVKTDIRDTLILARLLAANLVPDMWVPPAHVREMRQLLSQRRQFVETHTQIVNRMHSVAHRHHLKHERGKRFNEKTTGWQKSKTLSSLEQFQLQLEMENLAYIEKQIERISREVRKMCHQKPWADSMTYLIQLPGFGVITAMTVLAAIGDIQRFESPKHLASDSGLTPGLEQSGTKNRGTGITKEGRRELRWALVEAAQRAVKSDPVWKTRFQEMQKRMHRNQAIAAVAHRLLELVSYVLTRRQPYRHFTHERIAYKYLTWAWKMDEAARDGLTRQQFARYYLMRLGVGHELTRIALDPKHPRKLASEAELLALRPELNHIE

SEQ ID NO: 149235 - protein, 402 aa, unidentified
MNAVGIDVSKGKSTVAAMRPFGEVVLSPYEVSHTNEDLHNLAAKIKSLPGETRVVMEYTGCYHAPVTQVLCKAGIYVSVVNPLLVKDYGNNSLRRAKTDKKDAVKLANYALDRWLSLPRYYPDEDARLMLKTAYRQYEQIVGIQTMQKNNLISLLDSVFPAANRLFSSPPREDGHIKWVDFLERFWHCECVCGLSKKRFTECYRTWCRKQGYHFSEDKAHDIYSEACSHVSVMPKCEGTEFIIKQAIAQLQSTSAAVAALRKQMQALASTLPEYSVVITMYGVGPVLGPQLMAEIGDVRRFHSKGALVAFAGLDAPAFQSGQLNVRSRSISKRGSPSLRRTLFLVMSVILQNSPEGEPVYQFMSRKRAEGKPYKVYMMASAGKFLRRYYAIVKKHLNELEED

SEQ ID NO: 149236 - protein, 337 aa, unidentified
MNYSGIDLHSNNSVIVVSDETDRVLCQRRVPNDLAVVLRSLEPYRQGNVGVVVESTYNWYWLVDGLQGAGYTVHLANTAAIKRYEGLKHSDDETDAAYLAQLLRLGILPTGYICPIEQRALRDLARKRLQLTRSRTQHILAVESNVARQTGGRIASRAVKELTEETVKEFGLIENVRFALAANVAVIQTLNAQITKLEGHLCTQVRPQAEFKLLTTTPGIGEILATTVMLETVSIERFAGVGNYASYARCVDSKRVSNGKKKGEGNVKNGNKYLAWAFVEAAHFARRYCPEAKRFYERKKSRTNNIVATKALAHKLARACYHMMKEKKPFDVKRCFA

SEQ ID NO: 149237 - protein, 406 aa, unidentified
MKQIVSVGIDVSKGKSTVCAMIHPNTIIKESFEVLHTVEEMSMLADYIGSLDGEIRIVMESTGHYHLPVAQFLYQKGFFVCVENAYIIRQFSRIMLHGAKTDPLDAKKLAKYGLAYWSELKPYKFHPSCYTELSLLSKQYQTYIKLLIAAKQNVIHLMDEMLPGFKEALDTASSVQFSKVKYVDFAKEFYHVDMIKTMGKEIFRENYKQWCKEKGYRFQSEKADELFHLAEDGIPTLPTEFPSTRLCMEVATEQVSQLGYALEQILSQMQNLAKTLPEYQTIRQMGGMGEKLCVRFIADIGDVRRFHNGKALVAYAGIDAPPYQSGQYTGTKRRISKRGNSALRKTGYEVMKSLKSHPPKTDTRVYDFIIKKENEGKSKKQAKIAGLNKFLQIYYARVMEIYKNIV

SEQ ID NO: 149238 - protein, 483 aa, unidentified
MKPKPQEKTQKATDHPTQGHWHEMNRKQRREMMRKMQSEDLSLEVIHPDAAGIDIGNESHYVAVPPGRDSQSVREFGCTTAELKAMAAWLKQCRIRTVAMQSTGVYWVAVYDILQQAGLEVYLVNARDTKNLPGRKSDVQESQWLMKLHTYGLLRNSFRPSQEIRVMRTYWRQRNDLVRSAGRHILRMQKALTQMNLQLANVLTDISGATGQAIIKAILAGEHNPHTLAEFRDPRVKASEEQIARSLEGNWQEDLLFVLKQEHEGYEFCQKQMAECDRQLQQYLQQREDRSHGANLPEEKRKGRLKKKRANKPQFDLREGLFRMTGTDLTRIDGIDVMTATTVISEAGYDMSKWKTEDHFVSWLRLCPDNRISGNKVIGKGRLPTNNPISIALKMAASTLRESKTYLGAQFRRLRTRLGAPIAIKAMAAKLARLVYRMLRYGMKYVDQGAASYELRHRELQIKRLKAKAEKLGYRVTPIPVAA

SEQ ID NO: 149239 - protein, 394 aa, unidentified
MPELFVGIDVAKDTSSAQGIDSNGKGQFSLTFRMDSAGFMRLWQTIAEHGKDLSKISVAVESTACYHINLYSFLTAKGISTVVINPLLVANFAKLSLRKTKTDKKDAMNIAHFLLVHRESISHLSLSQDLQDFRDIARERESVGNLLTAHKVEIKRLLQSTFPELERIGNISTRVMLEFIGSFPSARLVKMAAPKAIQKILQRKGVETRLTYTAEDLLKAAKQSVATISPAKELILQGKVRTLQHLQERYEEMTKILTEYCKASMLEDFEIITSIDGINKRTATTFLAEIGCFSNYASYKKLIAFAGIDPIVYQSGKFEGESRISKRGNRHLRRVIWIMTTCVIQHNAIFRAYYMKKRNEGQAFKKAVFATAHKLIRVIFAMLTQRTMFKEVCA

SEQ ID NO: 149240 - protein, 355 aa, unidentified
MKRAYFIGMDTHCQFCEVAAVNAGGTVVARDRCPTCIPALLEVIERVPRPRHLVIEEGPLAGWLWRHLHQAVDRMVVGEPRRNRLIALDGDKDDDLDAEKLAQLLRGGYVKAVHQVETLERAVFKQQVSLYHHRVRQRVREGLRISSLFRQHGVMIRESAFVAAADRPALQARLPATKSLQEMVPLLWSSYDAAVEHEEQWRRRLVRLAKQEEGIQRFTALPGISWIRGATWYAYLDTPWRFGSKAALWKYLGIGLERKHSGNGPEYLGVPTRAHRLLKGTILGAACSAVASGDNPFAELHGRWMEQGLSSKLARRNVARALAATLWGLWKNGSAYRPDWVGVARAAGWATEVSR

SEQ ID NO: 149241 - protein, 433 aa, unidentified
MGLIVPTVMQPERADQPPSYDGFVGIDWGSQQQQVSVLDRDRRRMGERVVDHDGASLAQFVAWLWGLSAGQPQRVAVAIEVPRGAIVEGLVERGFHVFAMNPKQLDRFRDRHSVAGAKDDRRDAFVLADSLRTDQPSFRRLRLDDPQLLVLRELSRAEETLLEAFRRSANQLRDQLHRFYPQMLQLCSAADAPWLWDLIDLAPTPAHAARLREEQVQGGLKAHRRRRLKAHEVLACLQTPARPVAPGAVQAAQAHCRFLLPCLRGLAEHLQACGQQVGALLHTLAEMPGAGAGPSDVAIVQSLPGVGRKMTAWLFAEAAQPLAERDYQVLRTHGGVAPVTKQSGKRRVVVMRRGGNPRLRHALYHMARVAMQRDAHFNSVYAALRAKGQRHGQALRSIGNRLLRILMAMLRHRTCYDASRIHREPVVQMGETI

SEQ ID NO: 149242 - protein, 438 aa, unidentified
MNKLISKKTVIESSQYVKRNNMEQKFGSYLYCLMKYCVESPIVSIDVSNGNSHYMCFIKNNKRFGKVKKIDHDIEGFKRLLEDIQKLEAETNEKVCAVFEATGVYTKPLERFLSKNSIKTYIINPLESARKRKEEIHNKKTDKLDPISISKVYYDKKEMMELKKKDETYNWLRKKNRLYEDQLNHLRKYKVTFQNQLSICFPGYLDLFKDGYSDIPMTILKKYPHPDLLKNKKAETVARYLEKNTCHTHKVSLEYALKIIEFAKKTYPGCEKDDVEVEIFKILLDKVIETQRECEKTLNEMITVASTLEEYRYISSIDGIRPNLAARIIAEIGDIEEFKSREALVAYAGLDPHIYQSGDQDGKHLKISKKGNKYLRCLLFLAVGCSIRGAKDNPVNRFYQKKKQQSNPLNSKAAKTACTAKLLKIIYGICKNKTTYER

SEQ ID NO: 149243 - protein, 335 aa, unidentified
METVYFLGIDMAKKTFEGAVTVDGKTFYQGNSDNTGMGINNFFKDVMTKFAISNAQLIVCMEHTGIYCHPLLEFLIKNHIKVCLESSTQIKRSQGMVRGKNDKMDAQRIALYAYKNREDLTFWTPQRLVIQKLKALLVTRDRLIRCKTELQVPIHECEEFIEKPIHNMIVRSCKSSIKILEKDIEKIEKMIQDLVKEDAQLNVKYQLATSVTGIGKITALNMIVSTGEFIRIQEPKKFACYSGVAPFEYSSGTSIRGKTRVSKMANMTIKKLLHLAAMSAIQYDNEIRLYYNRKVAEGKNKMSVINAVRNKLISRVFACVKNNRPYQKIYKCELV

SEQ ID NO: 149244 - protein, 339 aa, unidentified
MSHSVIGLDIAKSVFHVYTIQADGKVLKKMLRRQQVLEFFANYPVSLIGIEACGSSHYWARELIALGHNVKLLNARHVKAFVKGNKNDFNDAEAIFDAVSRPNARTIAIKTMEQQDIQLIHRIRQEAVKRRTALVNQIRGLLGERGIVIGQGIHQVRKHLPELLEDAENALTTLSRAAFAEQYERLLELDKEIKRYDQKMGQLCQANELSKRLAEVPGVGPMTATIVAADLGEGQHYANARHYSASLGIVPRQSSSGGKSVLLGISKRGNCYLRSLLIHGARAVLRTCHNKEDKLSLWLQKLIKRRGFNVAAVALANKNARILWALANKTEHYQMTVSA

SEQ ID NO: 149245 - protein, 333 aa, unidentified
MTTKTIVCVSAGIDVGAETLILVIRKNAVSMKAQRFANTLADRKRLVKKLAPFPGIIVCLEATGVYYLDLAIALHAAGIRIMVLNPKASHHFAQVLLRHSKTDAVDADTLAQYAERMPYQPWARPADEALALRCLARRINTLTRNKAAAKNQRHALTFSPQTPKAVLRDLKLSITQLEKRIDCLTEEAKTFIQAHPALARPFALLLTVKGIGEASAIALLGELLLLPKGLTHKQWVKEALLDPRHFQSGKSIDKRARLSKAGNRAIRQALYMPALSAKAHDPYVRGFFEHLIANGKTPLQAVCAVMRKLLHAIHGMLTHHQPFDNTRFYTFPA

SEQ ID NO: 149246 - protein, 346 aa, unidentified
MKITTVGLDLAKSVFQVHAVDERGQVVQRRKLRRDELAGYFAALPPCLVGMEACGSAHHWARRIAGFGHEVRLMPPQYVKPYVKTNKSDARDAEAICEAVRRPNMRFVPVKSVEQQAVLSLHRARQGMIEARTAQSNQIRGLMAEFGLVLPQGISQIRTQAAVRLDAFEDLPELARQMFQSLLENFRDLDGRVQELEKRIVAWHRSSQESQRIEQIPGIGPLGASALIASIADIKAFGSGRQLAAWLGLTPRQSSSGGKERLLGISKKGDSYLRTLLIHGARSVILAESTKTKAQPNGWIINMLQRKHHNIAAVALANKNARTLWALLTHGRNFQHGYVSCPPLAA

SEQ ID NO: 149247 - protein, 323 aa, unidentified
MSNLPVFVGLDYHQDSIQVCVLDQTGRTLLNRAAANDWRELDRLITPLGRVQRVGIEACCGSADLGEELVERLGWNVSLGHPAYVARLKRSPDKSDYSDGRLLADLTRVGYLPQVWLAPASIRQLRQLVNHRQAQVDHLRTLKLRVGAVLRDQRVRIARDRGGRWSKAWCASVRDNDRLDEQSRWIVNDLLDEIVHGYQKLSATETRLREVTQGDATIEKLMQGCIGDFRRFKTAKQLSRYCGMSPCNASSGNKVADAGLINGCNRMLRMIIVQAAHRLIRIAPRWSGLAASLKARGKPHCVIVGAVGNRWVRTLHHVMKNGG

SEQ ID NO: 149248 - protein, 377 aa, unidentified
MKRIKFVGLDVHADTIAVAVAEQEGEVRSLGIIVNREECVRKLVGKLGPVEQLRFCYEAGPTGYALYWQLSKLGARCEVVAPTLVPVKAGDRVKTDRRDALKLARNYRAGELTAVWVPDAAHEALRDLVRAREAAKKDQLRARHRLSKFLLRHGRRPPAGVHSWTLQYLKWVQQEVHFPERAQEVTLLDYLHEVQHAAARIARLDQAIDEAAQSAPAAMRAVIEALQALRGIAKVTAVTVVAELGKIGRFTGAPQLMAYGGVVASEDSSGERIRRGPITKTGNAHLRRVVVEAAWAYRHRPSIGATLRKRQEPVSEKVKEIAWKAQQRLHARYMKLTLRGKNKGVVITAVARELLGFLWAIGIQAEAEQQESLSRVA

SEQ ID NO: 149249 - protein, 402 aa, unidentified
MNNPALCIDVSKSSSFATGFLSYNKPYTKPFDFSHTPEGMKSALCCLKDLQNSTSSIPDVVLEATGNFYKPVTQYFVNLGYSVYVLNPLQTSLQKRKSIRKIKTDPIDTFRIAQVYYTNDLMPFKEQKHDVQELRSLCRQWDGFNALNTETQLKFRSLLTLVFPKYDTVFDHLCNPTSLRVISSFPSPAAVLSAKREELFNLIKLSRHSNDWCNQKVDMLIAAARESLSYDGAQQSNIRVLQSYIKSLLTHKEILIDIRAQINEWAKLSPDFQLLLSIPGVGEVTAATILGEIGDISNFETAKQLVAYAGLDPSVYQSGNFRAKNTKISKRGTPYLRKALFQAASAAVRKRPKGPCNSVLYEYYTNKVNVGKPPKVALVATCNKLLRIIFGMLSTQTEFKAE

SEQ ID NO: 149250 - protein, 346 aa, unidentified
MGKSIINLSSVTTVGLDLAKHVFQVHCVDASGCVVVAKPIRRNKLLEFFASLPRCPGGLEACGSAHHWARELIKLGHDARMMPPAYVKPYIRRQKNDASDAAAICEAVTRPSMRFVGVRSLENQAALMRHKAREMLVSQRTQLLNGLRGHLTEVGVIAAQGPRHARELAELIEACEETVSFEVCEALAPLVVQLRNLDEAIARLDRIIAKLAQKDETARRLMSIPGFGPITASAMAATIQDTSGFAGPREFAAFLGLTPKQNSSGGKPKLGRISKMGNRNLRKLLVVGAHAVLFHRKPHTDPLRMWAKKLIEKKPFKLVAVALANKMARIAFAILRGKTVYREIPA

SEQ ID NO: 149251 - protein, 347 aa, unidentified
MRFYTKQHKYYCGIDLHARSMYLCILDQAGEVLLHRDFRANPDAFLKAAAPYREDLVVAVECIFTWYWLADLCRNEAVHFVLGHALYMKAIHGGKAKNDRIDALKIATLLRGGMIPQAYVYPSEMRATRDLLRRRLHFTRKRSELLAHIENTNSQYNLPVFQKKLTYPSNRGEASGRFSDPGVQKNIDVDLGLIAYYDVMLRELENFILRTAKNCDANTLYRLRTVPGIGKILSLVILYEIHDINRFKRSQELASYSRLVRCARESAGKVSGSGGKKIGNVHLKWAFSEAAVGFLRNNPEGKKHYDRLLHKHGKGKALTVLAHKLARAVYYIWKKDTVFDQREFLAN

SEQ ID NO: 149252 - protein, 408 aa, unidentified
MNPLFVGIDVSSRSNVAYLMKPDGSKHSSFSVQNNLGGAKMLSERIVSALSSMRLSDVVIGLEATSIYGNNLVYALREDGSLSRFQRKIHVLNPKQVKKFKEAYPDLPKNDFVDAFVIADHLRFGRIAKEVYMDDYRYQALRTLTRARFDVIQNLTREKQRFANYLFLKCSGIAQEKDIQNTSATTIALMEHFETVDDLANTDLDELTDFIAQAGRGRFVDPDATARAVRAAAKGSYRLPKTVNDTVNQAMSVSIASMRALKEQVKVLDKAIEQQLEIIPNTLTSIPGIGKVYSAGIIAEIGDIHRFDSQASVAKFAGLVWTQYQSGEFEAEHSRMIKSGNRYLRYYLLEAANSVRRCDSEFRRYYDLKFKEVNKYQHKRALALTARKLVRLVFRLLKDNRLYIPPEG

SEQ ID NO: 149253 - protein, 350 aa, unidentified
MLIIGCDYHPGFQQIAFMDTGTGEYGERRLEHMEGAGEFYRDLGARGIAARIGMEASGYTRWFEQLMAELGFELWIGDAAAISRKRVRKQKTDKQDAELLLKLLIEGRFPRIWVPSREDRDLRQLLWHRHRLVQMQTRLRNQLHAVALNEGVRLKKRLWRPKGRAQLESLALMPWAGRRRQDLLQLLDQVDGTIAELTASIEQEAEKRPEVVRLMTHPGVGALTALAFVLILGTPERFATSKQVSSYLGLVPTEESSGERRHLGHISKQGNTLLRFLLVAAAQVTARSDPDWRRCYLHLAMRRERAIAKIAMGRKLAVRLYWMWRNGWEYTQLPKLGSHAGQPENRHGLH

SEQ ID NO: 149254 - protein, 337 aa, unidentified
MKLYCGIDLHSNNSVVVILDEADKVIYQKKLNNDLNMILKQLSVYKDRITAIAIESTFNWYWLVDGLMEAGHTVKLVNTAAVQIYSGLKHSDEDDARWLAHLLRLGILPTGFIYPREERAVRDLLRKRSQLVRQSTTNILSLQNILARNTAHSLSSYRIKKLDDERAEQLIDDPNITLALKSNLNVIRCLQNTINEIETTVLQQTRIRNEFKQLITVSGIGEILGLTIMLESGDMSRFAKVGNFSSYCRCVKSGRFSNGKKKGEGNRKNGNKYLAWAFIEAANFAIRYNDKVKAFYQKKKSKTNGIIATKAVANKLARACYHILKDQVPFDVNKAFT

SEQ ID NO: 149255 - protein, 364 aa, unidentified
MHESMTVTIGLDVHASSVRLAAVRGDELLDERTLPYDHQVVERALRRWREVRCCYEAGPTGFGLYRHLVERGIACDVVAPGLVPQRPGDRIKTDPRDARKLAQLHAAGLLSPIRVPTAELEAARDLIRAREDARIERMRARHRLSKLMLRNDRRLPTTCWGVSRRRWLGQQRFVETPRQVAFDDYLHALDLVDARIATLGREIETLAAEPAFALLVGRLRCLRGVDTLTALGIAAEVGDFSRFATAEEFMSFVGLVPSERSSGERRRQGSITKAGNAHVRRLLVEAAWSAGRRPQIGERLARRQHEQDPLVRARAWRCQQRLYRRWRRMAARGKPRQKIVVACARELAGFVWAIATEQPLRAEG

SEQ ID NO: 149256 - protein, 411 aa, unidentified
MRRVIGMDIHRTFAEVVFWEDGKLRPAGRVSMTRSGLEGFGRSLGKEDEVVIEATGNAMAVVRVLSPYVARVIVANPLQVKAIAHAHVKTDKIDAGVLASLRAANFLPEVWLPDSDTERRRRLVARRNQVVRHRTRIKNEVHAILHAHLIPPCPHADLFGRLGRIWLAQQLMPDDEGAAIERHLRELDRLSEDLGVLDTQIAQAGSADPAVKRLLTITGVNLIVAAGLVAAIGDVRRFTSPQQLVSYVGLNPRVRQSGLGVAQHGRISKRGRSHARAMLVEAAWAAAKAPGPLRAFFLRIRARRGHQIAAVAVARKLAVLCWHLLTKSADYQWARPALVASKLRAMELQAGQPARKGNKRGPAYAYNVKALRDREIELARHAEQAYERFVSQWQRRGTAKQRTGAANEERR

SEQ ID NO: 149257 - protein, 403 aa, unidentified
MSTFFAGLDWASRTHAACVIDEHGSVCVQFEIHHDAAGLAELRRRLTASGVTAVAIERPSGLIVDALLEGGFTVVPIHPNAVKATRPRYRSHGGKSDASDAYLLADLLRTDGHRFTPLAPQGDDIRALRALVRGRDDLVATRVQLANQLRSLLQSFWPGAAEIFADVDSPIGLAFIQRYPTPESASRLGPKRMAAFCAQHAYSGRRSADELLARLHQAPAVAVSELEMEAKGELALSLARTLDRLVAQIRLLTSRIEHHVGTLDDGRLLMSFPRAGQVCAAQILAELGSVRERFDSDEHLAAEAGVAPVTYASGKSKAVTFRWACNHRLRAAVTCLADNSRHASHWAAHVYAQARARGCDHPHAIRILSRAWLRVLWRAWIDRKPYDASQHRAAQRLLQTATG

SEQ ID NO: 149258 - protein, 395 aa, unidentified
MFFLGVDIGKRNHEAVITDENGHKLGKSLRFANSKKGSEQLLALINRYDLLPEDILVGMEVTGHYWLSIYSYLTGLGFKVTVFNPMQSDTLRQFYLRKTKTDAIDALLIAQVIRMDLPEETTLPTEDLLRIKQLERFRYTIVDQTSDIKRKIITCLDQVFPEYEQLFADMFGKSSTKVLSESPLPEDLLAYSADDLASLLNEASEGRLGNQRSKAKASQLKDFAGDSFGISLATDVFKLEIQHLLQQLGLLENQLQEMEEKLETLVTQQDNYLTTIIGVGPVTAAVLLGEIGDIHRFERPNQVLAYAGLDASVHQSGDFTGTKNKISKRGSPYLRRALWQAAFVASNKDPVLAKYYQDLRSRGKPHGVAIGAVCRKLVNIIFAVWTNHQPYEIRS

SEQ ID NO: 149259 - protein, 313 aa, unidentified
MFVGIDVSKAHLDVAVRSGPEPWRLRNEEAEIHSLVRRLQELAPALVVCEATGGYEKALVAALAAAQMPIVVVNPRQVRDFAKATGKLAKTDAIDAGILALFAERVRPEPRELKEEDLQAFEALLTRRRQLIEMITAERNRAGITQAAAVKTRIQEHLTWLGRELDTLDQELDQAIQDSPLWRAKEDLLRSVPGVGPILSRTLIAELPELGRLRSREIAALVGVAPLNRDSGTLRGKRMVWGGRAPVRAALFMAALVAKRHNPVIRAFYERLLEKGKPKKVALVACMRKLLIILGSMLRHGTRWDPQHALCGA

SEQ ID NO: 149260 - protein, 352 aa, unidentified
MNEAITYRIGLDVAKNVFQVHGVKNEAGEPVAFVRRLRRAQVAALFATLPRSLIGMEACGSAHYWARLAQRHGHAVRLMPPAYVKAYVKRNKTDAHDAAAICEAVARPSMRFVPVKSEADQAMVMLHRVRSSFVEKRTAAANQLRAVFAEVGVVAPVGSRGLSEVLALVETQAEAFVRLPAALRLVLAELARQWRSVDATVRKMQVEIAASVKRSARAMRLTAVPGIGPMGASAIDCLLPDPHAFRSGRDFAAWNGLTPREDSSGKSVRRGPITKKGDGYLRRILVLGATAYLARVRRGQIKGASPWVSRMAAHPKRKLAAVALANRTARIAWAMLARNEDYRAPAAVLQAA

SEQ ID NO: 149261 - protein, 403 aa, unidentified
MNRNAVGIDVSKGKSMAAILRPYGEIVSSPFEIKHTSGNIQSLIQQIKSIEGESRIVMEHTGHYYKPLARELSLAGLFVTAINPKLIKDFGDNSLRKVKSDKADAVKIARYTLDSWTELKQYSLMDEIRNQLKTMNRQFGFYMKHKTAMKNNLIGILDQTYPGVNTYFDSPAREDGSQKWVDFAAAYWHVDCVRKMSLNAFVDHYQKWCKRKKYNFSRDKAEEIYGAARELVPVLPKDDLTKLIVKQAIEQLNTASKTVEELRTLMNETAAKLPEYPVVMGMKGVGPSLGPQLMAEIGDVTRFSHKGAITAFAGVDPGVNESGTYEQKSVPTSKRGSSSLRKTLFQVMDCLIKTKPQDDPVYAFIDKKRAQGKPYYVYMTAGANKFLRIYYGRVKEYLMSLPE

SEQ ID NO: 149262 - protein, 347 aa, unidentified
MSITRIGLDTAKSVFQLHGLDETGKAKLKSKLQRSQMVPFFEQLERCTIYLEACGAGHYWARVLIGLGHDVKLIAPEAVRPFVKKGKKNDPADAAALCEAGARPDIKFVPVKTVEQQAILAVHSVRTLLVKQQTMLSNAMRGLAAEFGLIVPKGIDKLVELMALIGADESVPKQARQTARELFDQREAVGERIETLEAEIVAHARQDEAARRLATIPGVGPITASLIAATVADFGVFKRARDFAAWLGLVPRQHSSAGKTRLGKITKSGNREIRKSLVMGALSMTFRAPQWKSAAGVWTCHLLESRPVRLVSVALANKIARIAWALMTRGEVYHAKGRLVAAAEPAA

SEQ ID NO: 149263 - protein, 358 aa, unidentified
MASIASTSRVVIGGIDTHKDLHVAAVLDTAGVLLGTEAFSTTRAGYRALVGWLRGFGDVRLVGIEGTGSYGAGVTRHLGEAGIEVAEVDRPDRSDRRRRGKNDTIDAENAARAALTGRRTSTPKSKDGTVEALRVLRLTRTTAVKSRRVALQLLGNHIVAAPEELRDQVRNLTRMQLIRTCATWRPDTSGFRDPVVATRIALKSLARRILELNDEIAELDQLITTLVGELAPQLLAAVGISVETAGQLLVTAGDNPQRLRSEPAFAMLCAAAPLPASSGKTQRHRLNRGGDRQANSALHLIVVTRMRVDPRTKDYVTRRIAQGHSKLEIIRCLKRYVAREIYYLLKPPHKENAKSRPA

SEQ ID NO: 149264 - protein, 399 aa, unidentified
MFVGWDWASATHDVTVLDDAGAVVDRWAFRHTEQDLVAALDRLARLAEPAALPVIIERSSGLVVERLLAAGHPVVPVHPTAFWAARPRWGASGAKSDAGDSYKLADYLRTDGHRLRQLDPPDVGLQELQALVRLREDHVRACTAASNQLGALLDTYWPGPKAVFFRLASPIALAFLTDYPTPQAATRLGEARMASFCRRHSYRGGKPPAALLARLRSAPTAPVGIPAATLATLVGAQVDLLQTLLGTIAELEARIATRVATHPRAKLLASLPGVGTINLAQLLAEVGPILDRVSSAEHAAAECGAAPVTRASGKTSGVYFRWAANRRARKALTAFAHNSRLLSPWAAHLYADARARGKRNPHATRIVARAWLRVIWACWQRATPYNPAEHTAALQAATA

SEQ ID NO: 149265 - protein, 412 aa, unidentified
MQIVYERCAAVDVHKRTAVVCAVTPDAKGQRQKERRTFSTMTPDLLTMRHWLHALGVTHVAMESTGSFWKPIFNVLEGQMEVLLVNAQHVKAVPGRKTDLKDAEWLADLLQHGLLRPSFVPPAWQREVREFTRYRSRVIEERSRTINRLQKILEDANIKLSSVATNLMGRSAHEMLLALLAGEEDPAILAELARGKMRGKRDLLKQALQGQVKSHHRFLISEQLAHIEALDEEIAHLSAQIAERLRPFEQQLKRLETIPGIKRRLAEVILAEIGPDMSRFPDAKHLASWAGMCPGNSISAGKRLSGRTRRGSPWLRSALVEAAHAAIHAKDCYLAAQYHRLVVRRGGKKATIAVGHTLLVIIYHVLAEEKDDEELGGNYFDEWDRQAVQKRLVRRLEHLGYEVTLTPTSPAA

SEQ ID NO: 149266 - protein, 419 aa, unidentified
MKSSKTKKGKIINEKTMIAALDIGKGAHYAYFRAPNGKDIKPFSFHNVKKGFDTFWMKLCQFKRKEGLEGTVIGFESTGPYAEPLLHYLRKKPVILVQINPVHSKRLKELTGNSPNKTDTKDPRVIADIISLGHALTLVVPEGSAAQLRRLTQARERAIRSRTAMVNQLHHLLFVIFPEFFKVFKDISTKSALYVIKNHPTPESITSVGLESLTVMVRKVSRGKLTHGRIKELFKAAQQSIGIDEGKESILMEMEHLVSAMDHESRFIDDLEKQMSYHLDHIPYSHCILSIKGIALITVAGLIGEVGDFKKFHTISEMMKLAGLDLFEISSGKHRGKRRISKRGRSLMRKLLYFAAINVVKSHGIMHEQYQEMLNRGMVKMKALVAISRKLLMLIFALARDNTVYVENYSNIHHLKLAA

SEQ ID NO: 149267 - protein, 420 aa, unidentified
MNRNRSKSRVDRTMPMVHPNAAAIDIGATLHMAAVRADRAPEPVRSFGTFTADLHRLVDWFTECGVETVVMESTSVYWIPIFELLDARGFAVFLVNARDAKHVPGRKTDVSDAQWLQRLHSFGLLRASFRPKGQIAELRAYVRQRERLLEYAASHIQHMQKALTEMNLQLHHVVADITGATGLRIIRAILAGERDPEALAGLRHYSCQSSAETIAKALTGSYRTEHLFALEQALSLYDAYHEKASACDVRIESVLKELIIHRGHDHGSAPPVSRRRNRTDQANALAFDVRAALFGLLGKDVTMIDGLGPYLSLKLIAECGDDLTSWPSAKHFTSWLGLAPSNKVSGGKMLSSRTRRSGGRAAALLRLAAVTVGRTDAALGAFYRRLSSRIGKAKAVTATARNQAQGGGIGRRPLSIRNAR

SEQ ID NO: 149268 - protein, 326 aa, unidentified
MDVLGIDLAQLSFDATLLQQTGSSHYAAFPNTPEGFEQLATWLREHTVSSLHACMEATNIYWQALASWLHAQDYSVSVVNPSRIKGYAMATMQRNKTDKLDSAIIASFCAKHQPTLWQPASQEQQRLRALTRHRDDLLQTQLQQQNRLRDTTDELVRASLESLLKAIASQLETVQEQITQQLRAQESFQANLALLTSIVGIGVVTAAKLLSEFAELDQYESAKAAAADAGLTPSQYESGTSVRRRSKLSKMGKVGIRAALYWPAITAMRRCPAIKAFAQRLAARGKPKMVIICAVMRKLVHICYGVLKHQTPYDPAKAFGHTSPAT

SEQ ID NO: 149269 - protein, 348 aa, unidentified
MDNTSDRTVIGMDIAKNVFQLHVVSAETGQIQRIKLKRAAVEDFFANTPTSLVAMEACGGAHYWGRRIKALGHEVKLLPARQVKPFVVRDKTDARDAHAISVAALQGHIKPVPVKTEDQQVCMTLHRMREQMMKMRIMQTNALRGFLYEFGVVLPVGHRALLEKIGPTLAEEEERLPKQIVQSVLEQMNRIHQLQQDIIRIEARLTAISKNDNAMQALQSIPGIGLLTATAMIAKTGDFTDFKTSRQFSAWLGLTPRQTGTGGRIRQLGISKRGDAYLRTLLMHGARAIIARRAHSAWVASLLSRRPYSVVVAALANKLARTAWAVLTKGATFNPSQWAGVDEAAQVA

SEQ ID NO: 149270 - protein, 346 aa, unidentified
MLHVGLDLSRKRIDVCLISDQGELIDRFTATPDRDGLHGLARRVAVYGEPIRGVVESMNGARFVHDELVAHGWEVLVADAQKVKGLAPLACKTDKIDSRVLAELSFRDLVPAIWLPTFELRSEREISRWRLHLVKHRSTLKNRVHSTLITFGHQCHMSDLFGVAGRKLLGELEMPEPWRSHVDASLVLIDDLEARITQIAKDLRRSGADHRYIPILMTAPGFGWITSYTVACEIADINRFSSPVKLTGYTGLCPRVKQSGQMDQRGPLSKHGPKYLRWGLMEAAIAASSHPLYRERYQRTKRRLGKQRGPKVAQIDLARQLTEAIWYMLTRNQPFAPAGAIFRLAA

SEQ ID NO: 149271 - protein, 382 aa, unidentified
MPQPKDDLSRSLVTLEQDKTLIAVVELSSATWLVGGMVPGIQKKLAPDEEALLALLHRWRDEAIAAGQAITRLVVAFEAGRDGFWLARWLRSRGVEAYVIHPTSIPVSRERRRAKTDRLDIGLLKRSLLGWLRGEKKHASMAAIPTLEEEDAKRPTREREQLVGKRTGIVNRMKAALVRLGIRGFNPKLRKAPERLATLRTPEGCPIPPNTLAELTREMAHLRFINDQIKQIEVERLRQLKHAPQQGSNAKVLRLQQVNGIGVETADMLTHEVLSRDLRDQRAVARYSGLTGSPDESGSRRREKGLSKMGNARVRRGMIQLAWRFLFHQRDSALAQWYQASVAAGKKRKTMIVALARKLLIALWRFLTTGEVPEGVVLRPIP

SEQ ID NO: 149272 - protein, 335 aa, unidentified
MQIYGIDLAKEKFDVSFFDLTSKKVSNQPSHKVVTNNLKGIGKFFKGLPSDAVLVAEHTGVYGDTLLKCCMDSNVKIAFVGGYVIHRYRATPDRAKTDVLDCALLREFGERYPDKLKYRKFPEEALYELRQLARHREMLVEQRKQQITADRSEDCRPIRSLAVKRSMDRIKEMLDTEIAETEKEMLKVINGHESIHHNYELVKSVDGVGLITAVELLVKTENFTKITTARQYAAYAGTAPYEKSSGKMDKGAHISKIGNRRSKTLLYICAESARLHNKEIKLYYERRTLIDKKPRHYVLNAIANKLLRIIFTLVEKGEVYDVNYIRQDPRLVKHN

SEQ ID NO: 149273 - protein, 419 aa, unidentified
MSFKILKNNCCGLDVHKTWIFACIGITDSRSRTEYKQARFSSFSKGLQELCDWLAKYNCTDVCMESTGKYWIPVFNILEKNNVWVTLSHPKYTKPQKGNKTDRKDARWICDLYMCGMVKPSFIPPADIRELRDLVRYRYKLTCMITGEKNRAQNCLTVSNLKLDEVFSDVFGKSSRSITEQILQHPGEIFDVTPFVDGRCKTPIEEIQAAVDGAVSTEQAVKLKQCLNHIDELEMHKAEIDREIFRLSDKYEEALILIRTVPGFDKNPMTAIQVLSEIGGDMSVFPTAKNLVSWAGCCPRNDQSNQKIKSTRISRAGSYFKPVLVQVANALIKSKKNPEFTTRYRRIKARRGHKKAIIAICRMLLTAIWHILTDLKPYTPEGFLESRPVNESKVLTTSQALNLLKQRGYIIKDDVVPVS

SEQ ID NO: 149274 - protein, 365 aa, unidentified
MVRKAYYIGMDVHKDSVQIAVFEEAGSEPIYERRLANDTGLLVKEVMRFSKQGKTEVAYEAGCLGYVIQRAMEKAGICCYVLPANKVAKRRDDRIKTDKRDARLIGRELRSKTIRPISVPDEADEAARDLLRCREDVNEDMRRAKQRILKFLVRHGHIYDDGKSHWTLKHWRWMDRLEFGQEHERTVYEEYRSQIRALEERLTRLEQQVTETAESPRYKAAVTKLRAFKGVDYIIALSVVCEIGDFRRFANAKAFMSYLGFVPSENSSGGKRNQGGITKAGNGHLRTLLVEGAWHYTRNARAGKRLEQRRQGCPVWVIDIADRALHRLHKKYFRLVFSGKHKNVAVTAVARELAGFIWAVQVSAA

SEQ ID NO: 149275 - protein, 328 aa, unidentified
MLGVLQGTRSFPTTAAGYQQMLRWATGFGTLRRAGVECTGSYGAALARHLVGEQIEVIEVNQPDKATRRRRGKTDTVDAEAAAHAVLSGRASASAKAGNGPVEMVRIFKLAKASAIKSRTQAINQLKAVLVGADPQLRDSLSGLSNPTLIRRCAQLDAGTPRDATTAAAYTLALLARRILELTTEIDDLNRQITDTLSTHAPQLLERNGVGPDTAAALLITAGDNPERLHNEASFAALCGVSPVEVSSGKTQRRRLNRGGDRRANSALHTIVLSRLRWDPNTRAYLARRIANGKTRREAVRCLKRYVAREIYQLIAQPTEPTQCARAA

SEQ ID NO: 149276 - protein, 322 aa, unidentified
MFEITTLPTRFIGCDVGKHSIVVFDSANKQLSTVPNTQDALTRFAMGLDATSCLVVCEATGGYERSLLDAMIMAHVPAHRADARKVKAFIRSFGILSKTDAIDARALAQYGEERHSRLLRWQARDENRDKLQAMVNLRRDLVTQRTAFNNRLQAPGSDAVQSHIKAVLDCLDSQIKAINTDVDAIMKANEQLDQMVNTLKTIVGIGQTTASALIALMPELGRIDRTHAAALAGLAPHPHQSGTLDAHRRVKGGRPEIKRVLFMAALTASQHNPALRTFYQRLIANGKLPIVAVTAVMRKLVVIANAKLRELLINTTQKPAAI

SEQ ID NO: 149277 - protein, 430 aa, unidentified
MKSNTQNAKIEAITEKTLVLGIDVGSETHYARAFDYRGIEYSKKPFKFSNTEAGFATFKEWILDLKERHEKDKVVPGMEPTGHYWFNLGKFLQDNEMKPVLVNPHHVKKTKELDDNNPTKNDRKDPKVIAGLVREGRYMIPYLPDGVYADLRTASNIRFQLQAELTRIQNRISRWFNIYFPEYKTVYGKPDAKSGILILKAAPLPEDILTLGIDGVNQIWRDAKLRAVGKARAKTLIEAAEHSVGSKEGAVAARMEIRMLLEDYESRSIRLQEVMTLIEGLVKQIPMAEKLLEIKGVGIRTVSGFLAEVGDISRFNNPKELQKLAGLALVENSSGKHKGETTISRRGRKRLRYLLFEVAMSLVSKNQEFRELHNYYTTRRLNPLKKMQSLMAIAAKLIRVFYAMLTKGVDYDPKKMVSDIKRPAVYLQAA

SEQ ID NO: 149278 - protein, 326 aa, unidentified
MEHELHYIGIDTAKEKLDVDVLRPDGRHRTKKFANTTKGHDELVSWLKGHKIDHAHICIEATGTYMEPVAECLYDAGYIVSVINPALGKAFAQSEGLRNKTDTVDARMLAEFCRQKRPAAWEAPHPLERALRALVVRHQALTDMHTQELNRTETAREVQRPSIDAHLLWLEAELKRLEKQIKDLTDDDPDMKHRRKLLESIPGIGEKTSAVLLAYIGLKDRFAHARQFAAFAGLTPRRYESGSSVRGASRMSKAGHVSLRRALYMPAMVATSKTEWGRAFRDRLAANGKKGKVILGVMMRKLAQVAYGVLKSGVPFDASRHNPVAA

SEQ ID NO: 149279 - protein, 380 aa, unidentified
MEKACGLDVHKDSVFACILDTQGKKIFEKRYGTLTPDLMELRDMLVEQGCGRVAMESTSIYWMPIWHVLETDFELTLANPYFIRQLPGRKSDIKDAQWIAECLQKDLIKGSFVANELLQQMRQYTRQHRRLTKSRIRLEQQLDNQLQRCNIRLSNYVSNQGTNVSMRKIIRAIIAGERDPATLCRLVHGRTRNKHGEEVITDSLNGVIQQVDVEMFKQCMEQIYLIEKQQAACLNHLEELANTYFAEEISLLCTIPGVKQFSAMCILAEIGNDMSTFSKASSLVGWAGLRPRNDESAGKIQSRKTLHGNKYLRQILVEISWSAARSNKSFLGRKYGILAKRMKSQKALIAITRKILVIIYNVLKTKQPFDVKRNIQAIIV

SEQ ID NO: 149280 - protein, 357 aa, unidentified
MTSFEHDGTVHCITQVKPEVKNIIRVIETFKKKHENEELNIVCGYEAGCLGYSLYHELKEKGIECVILAPTTMKTEKGGRKLKNDYRDAKMIAECLAYGGYSAVHVPTELDNSVKEFIRMRDDIKENLKSIKQQIIAFLTRNGKQFDGKSFWTRKHIDWINTVSFSEPLLQDTLKEYMIEYNHLCDRVETLDKQIEEISVKEEYVEKVQQLQCLIGIKTHTALSLIVETSDFNRFKKGNMYSAYLGLIPGDDSSGGQENKLGITKAGNSHLRKLLVEAAQGYTRGKVGFKSKVLKSRQEKCSSEVVAYADRANERLRRKYYRMILRGKRYNVAKTAIARELACFVWGIMTDHIDLCS

SEQ ID NO: 149281 - protein, 378 aa, unidentified
MSKIRFVGLDVHAETIAVAVAEPNGEVRSLGMIANRPESVRRLVRKLEPVEALRFCYEAGPTGYVLYWQLTALGAKCEVVAPSLVPRKPGDRVKTDRRDALKLARCYRAGDLTPVWVPDAAHEALRDLVRAREAAKGDLLRARHRLSKFLLRHGWRRPESIKSPWTNAHLEWIKAKVHFQQPAQEITLSDYVHQVEHLVARIERLDQAVLEAARSAPPQMRAVIEALQALRGVAQVTAVTIVAELGEISRFAKARQLMGYSGLVSSENSSGERKRRGAITKTGNAHLRRVIVEAAWAYQFRPWLGGYLLKRQVGLSEEVKEIAWKAQHRLHTRYRKLAAQGKNKPQIVTAVGRELLGFIWAIGVNVETKMREMKQVAA

SEQ ID NO: 149282 - protein, 449 aa, unidentified
MKKSSSERHGLPVIHERAAGIDIGSRFHVVAVPADITEEPVQTFKAFTADVERMADWVGDLGVTTVAMESTGVYWIPVYEILESHGLHVVLANARDARAVPGRKTDVNDAQWIQRLHACGLLRASFHPDREIAALRSYLRLRERHLDYAAAHIQHMQKALTHMNLQLQHVVADITGATGMRIIRAIVAGERNAATLATLRDTRCKSSVETIQSALVGNYQPEHVFALAQALAMYDAYQAQLEVCDHQIAQSLQRLSRKRPSPSEPLPKPRHRARQPNALNFDVRALLYQLVGVDLTQIHGIGPYLALRLVAECGTDLSRWRTAHHFTSWLTLAPGCRISGGKVLSAHTRKTKNRVTAHLRLAAVTIGRTNTALGAFYRRLSARIGKAKAVTATARKIAILFYNAMRFGMAYQDPGADHYEQRYRERVVKGLHRRAAEFGFTLQAVEGVS

SEQ ID NO: 149283 - protein, 380 aa, unidentified
MITVSMDVHVRNSFLYATDAAQKVLGRGRYSNTPLDLGTFLKPVEQAALATTEPVHVVLESTTNSRGIARMLAAYGREAGIDLTVDVLDARRLRVIAESVCKTDGVDARVLNELAASNLKLPVCYMPDDEEFALREHLRSRSDLVRIRTMLKNRVHAVLHRRAILAPQSDLFTAAGREFLRQLLLDEAGRAILTRYLEGVDQIDALVHESTASLKELARSPRWAKPAALLQTMPGVGLLTSLTILSELGNLHRFPSRAAVANYAGLVPVVRNSNEKHYAGGITHRGSTHLRAMLVEAAWMAEPRVPAYHDLFQRVEFRKGKATAIVAVARRMLEDTYTMLKRDEAFRYRAVSMAETTKKESLCANTPSRRNRKVASSVAG

SEQ ID NO: 149284 - protein, 345 aa, unidentified
MNYYAGLDVSLEETAICIVDETGAIVRELRAPSDPESLISAFNGVALPMVRIGLEACSQSAWLHQGMARSGLPVLCIETRQAKAAMGAMPNKTDRNDARGLAQIIRTGWYRQVHVKSAPSRMSRSLLVARRTVLCKVRDMENAVRAVLRESGLKGGAPGRKLFATRVRELAETDPSLADITEPLLAIVAAMHCQLERLTRRVLETVRVEPICRQLMSVPGVGPLTALAFRATVDRPERFRRSRDVGAHLGLTPRRYQSGETDVQGRVSRCGDELARTLLYEAAHTLLTRCKKWSALKAWGMGIAKRRGMAKARVAVARKLAVILHRMWSDQTEFRWGKVPAGQIA

SEQ ID NO: 149285 - protein, 315 aa, unidentified
MSDVPCFVGIDVAKAQLDIALRPSGERWAVPNDASGVATLVDRVQTLHPTLIVLEATGGLERAATSALAAAGLPVVVVNPRQARDFARATGQLAKTEALDARALAHFADVIRPTPRPLPDAQTQELRALLGRRQQLIVMRTAEQNRLAGTSERLTKAIAAHITWLNADIATLDDDLETLLRASPLWRANDDLLQSAKGIGPVCAHTLRLELPELGTRTRQQIAALVGVAPLNCDSGTLRGRRTIWGGRAHVRTVLYMGTLVATRFNPQIKVFYERLLAAGKVKKVALTACMHKFLTILNAMLKHRTPWKPQEVQN

SEQ ID NO: 149286 - protein, 354 aa, unidentified
MHATTVAIDLAKDIFEVAFADPAGRILERKRLGRRAFSRVLENRPALEVVMEACGSAHYWGRRFQASGHSVRLLPARDVRPYVRGNKTDRADATGLVEAARSRHIRDVPVKTPRQQGLQALHRVREQLKAQRTATINLVRGLLREYGIVIPTGTARVAPAVRDALEDADNDLPMHLRAALAEQMTRIAGLQADMADIELRLEDEAAHDVAIQRYRSVPGIGLLTATALRAGAGELARFRNGRHLAAWLGLVPREHSSGRQRRLGAITKRGDPYMRTLLIHGGRAVLRSAAMRQRSGHPLDPLQTWALELQQRQGHNKAAVGVANKLARRLWALDHHGAAFDPRHVSHKPQIQAG

SEQ ID NO: 149287 - protein, 348 aa, unidentified
MDHYAGIDVSLEYASVCGVDGSGKIVREGKAASEPAALIDWFGSRGLRVERIGLEAGPQSQWLYAGLKQAGLAIELLETRHVRTALETMPVKTDRNDARGIAQLMRLGWFKSVHCKSLPAQEVRALLTARKLVQSKLHDVEMSLRGILRGFGLKVGPTTPKRFAGRIQELVTGHPSLQVIADALLAVHAVLLREFNGFEQRVRSMARADAKAELLMSTPAVGPIVALTYACAIDDPARFKSSKQAGAHFGLTPRKYQSGETDYTGRISKIGDAGVREALYQAAHVMLTKPVKGCSQLKSWAMRIARRAGMRKAKVALARKLAVILHRMLADGKPFNDAAKAKIMAAAA

SEQ ID NO: 149288 - protein, 334 aa, unidentified
MIHVGVDLHQRFCYMTALDSRGRQLNAQSIPNETAELRAYFRQLRKPIRVAVEACSFWPAFREAVGDQVELHLVHPTRVKAIAAAKLKNDKIDSATLAHLLRCDLLPDAWMADEKTRELRQQVRLRATLVRQRTRLKNQVHAILHQCGLRHGCTDLFGRKGREWLSRAALSPSARMAVTTYLELIDQFTSQIEHQDQRVKSFTRSDPRAKWLMTIPGIGPYSAMLLAAEIGDIKRFAHKRALSNYAGLVPWVRESAEKRRSGGITRVGSPWLRWIMVEAAQTAVRTSPGVRRYFDRLRRRKHRNVAIVAVARKLLLAVWALLQHGECFAEEKFA

SEQ ID NO: 149289 - protein, 388 aa, unidentified
MTQTPVPCSVPAAPDYDRTLVLAIELSNASWVLAAQVPGLPRIKAKRTIEPTADALLAAIQGYRERAKTAGRRVERVVATYEAGWSGFWLARWLATHGIETHVVQPSSVPIDRRARRAKSDGIDAELLLRTLLAWLRGEPRVCSMVPIPAGADEDARRCVREREELVAERVALVNRIGAVLATLGVGEYNPLLRNRRERLAALLTALGTSLPPHAHAKISRMLDRLDLVRAQITALEQERDAVLEDEVPDRAGKMIQQLATLRGIGVQSATVLVREAFVREFANGKALGSYAGLCATPYSSGGTEREQGISKAGNRRLRTVMVELAWLWQRYQPGSAEVTWFRARASSTGARMRKVMVVALARKLLLALWRFATQGVVLEGAVMKPAT

SEQ ID NO: 149290 - protein, 493 aa, unidentified
MGNLLSCSVSSCTASACTVFQPVLSSREIRHGPTQCQTSRPFGSQGCRLVAHHQNPNAAAIDVHSDNHVVCVPADRATPNVRTFGANSCDLLQIAAWLKQCGITTVAIESTGIYWIPLFELLEAQGFEVCLIEPGQASRCGARPKSDVLDAQWLQRLHSHGLLIGSFRPPDVVIALRAYLRQRLMLISLASMHIQHMQKALEQMNVKLTEVVSTITGLTGMRIITAILDGERDPARLAAFRDARCKNDEAVIARALEGTWRDEHLFELRQAYELYRTYQMKVTECDAQIEQSLAKLPDRSAGAKLQPKVKKCHRKPNTLRFEATEPVFRAMDVDLTAIDGIEDHTALVILGEIGVDVSKFPTEKHFASWLGLCPNHQESNGKRKSRRVRKGKNRVAIALRLAARSLQRSHSALGAYFRRMNSRLGFKGAVTATAHKLARYVYAMLKHGQAYVSQSLEQYEAATQERIERTLRKKARALGYDLVPRQPLSPAVP

SEQ ID NO: 149291 - protein, 324 aa, unidentified
MLPTLGIDISKDSFHLELSLNEKLRHRKFANRQEGFGELCVWLAKHKATQVHACLEATGPYSEAVALYLYQQGHTVSIVNPVQIKAFGQSELRRNKDDRPDAGLIRRFCEKQRPAPWTPPPPHLRELQALTRHLENLIETRQQQINRLEATNTKQVAKSLRKLVAHLDAEIKRTEQQIDDHVDRHPDLKQQSELLDSIPGVGKRTAAKLLAEIPDITQYKSARQVAAHAGLTPRNNRSGTIRGKTRLSKTGNARVRKALFFPAIVAKRHNPIVRAFCERLSSNGKNKMQVIGAAMRKLIHIAFGVLKSGKMFDPNHELFINQVS

SEQ ID NO: 149292 - protein, 357 aa, unidentified
MKSQDSNYVGIDCGKKSLEVIRINSEGSYERQQFSTTEIGISKLINWLNPNDVVGLEAGSQSFRIAKSILNKGIQVIVLNPGDLATIYQSLKKTDKEDSLKIARLIQRFPIEELPVVPVPTDEEEDNRRLCSEQENWTRQLTQGKNRLHSLFTQAGLTHITKKHLRTKANRETSVALLPSRYHKEAERILKVLDLVEQNLKLIEEEIKEALRKNQTYTQTIMSMPGIGMITSLAILSYMGDCKRFSSAKQAAYYVGLVPRVDISGDSAYYGRIVNRGCHSIRRVIVQAAWSLVRCQHGGKLKEFYERLYSKKGAKKSIIAVSRKMIEVLYSMIRTGALFDSMPEEVLHRKLAQYGLM

SEQ ID NO: 149293 - protein, 342 aa, unidentified
MEVTTIGLDLAKNVFQVHGVDDEGTVLIRRQLRRSRVLPFFKKLPPCLIGIEACATAHHWARQLSGLGHRVKLMPPHYVKAYVKRNKNDAADAAAICEAVTRPSMRFVAVKTMEQQSVLMVHRTRELLVRQRTMLVNAIRAHMAEYGIVAPVGIPRVKELFAVIADGDDERLPAIARACLEGLARQFMSLHEEIAVAERRIHAWHRSNQASQRLETIPGIGPIIASALTASISDPEVFKNGRELAAWIGLVPRQNSTGGKQRMGRISKQGDQYLRWLLVAGAMSVIRHGRKTDFEKNPWLGNLVRQKPTKVAAVALANKIARTAWAVLVTGEPYRQPAPAEV

SEQ ID NO: 149294 - protein, 330 aa, unidentified
METVVGLDLHLKKTQGTIMDKEGIVLKTDRFETTKEGVAKFLESVPKGSVVALEALGFCWPWIDCIEELGYVPKLASPSRLRVIADTRIKTDKIDSETIAQLARMGWLPESYVPSKEFRKLRSLARHRNGLVKIATMCKNRTKSSLRKYGVSGDMNLKTALGKKLAESSGLLEVEQNLCVLKNVEELIKQNEKTFEKQYGSNEVMQILRSIPGFGLINALSIYAEVCDIERFVSTDKFAHYCGLAPSTHQSGERSYNGKMMKANKWLKLAMIEATWMHIVHCPNSRISKAYKSAFRRKKNKNKAIVVAARKMTNVIYHIWKNNEKFDVNA

SEQ ID NO: 149295 - protein, 462 aa, unidentified
MAERREDESRSEEARQIEGLPVVRAQVGGIDLGSQRHWVCAPGLEGRGREIADFGATTPELQRMLEWLKVRQVESVAMESTGVYWIAPQEVLEAGGLEVLLVDTRQLARVPGRNKKTDPSDCEWIQRLHSCGLLTGAFRPPEQVGMLRTLVRDKANLVAEAGDWVRRMQKSLDQMNVRVHRAVSDLDGVTGLAIVRAIVAGERDARKLAQLRDRRCQKSEAEIAEQLSGHWREDHLFSLRQSLKMYEATQERIAAYEQEILRKLREMTPEERAGQTAPAVKNPHKANAIRKRGEEPRRQAWYRMSGVDATQIDAIGVGTIEVVLSEYGPDLSRFPTEKQFTSHATLAPHVPRSGGKALKKKKRYSASTRVAAALRMAALALRHSPTALGAYYRSLARRIGGDVAVFATARKLATLIYRLLRWGQPYVDEGAQAFEERYRQQRIRSLTAKAKELGYQLLPATT

SEQ ID NO: 149296 - protein, 387 aa, unidentified
MSEAFDPRKSATAFDQASTLVVVLELSGKSWQAGASVPGVSRRPLRQLEARDLGGVLKAIEQWKAEASKAGREVRRMVVGYEAGLDGFWIARFLSERGIEVYVMHPASIAVERRGRRAKTDRIDVDILLRALLGWLRGEPRHCTMAPIPSEAEEDMREPGRRREALTAARLKVENQMRSLLVRFGVVDFRPRLKKAPEHLEKLRTIDGRPLPPNTKASLDRLMGQHRLLSEQLKEIETARERVVAVTDPDRIERMIQTLARLVGVGVETATTLVHEVFSRHFRDRRAVAGFVGVTGTPYDSGGSTREQGLSRNGNPRVRKILTQLMWRWLIFQPQSALAQWFFMRTGGAKGRIKKIMAIALARKLLVALWRTAETGVIPEGARLAAA

SEQ ID NO: 149297 - protein, 365 aa, unidentified
MDYLKYGIGIDMAMETFDACLSLIDVRQQVHVKAHCSFNNDAKGFDAFLKWVSGQTSLAIPVVYLMEATGIYYEQLAWYLHQKGCVVSVVLPNKAKQYKKSLGLKSKTDRIDAKGLAQMSCEQSHKPWHPISNNLYVLRLLTRQIQGITDQLTSLSNQLHALQHGMFRDKGVENMYASQLKLLQKNKAALQQRVEELINGDVALKSRFEKILKIKGLGLQNLAVIVAETAGFVTFESIAQLVSYAGYDVIEDQSGKRVGKTKISKSGNARIRKCLHFPAFNVVRYNIAPFSGLYERIYERSKIKMKAYTAVQKKLLSIIYTLWKKEEAFDAQHNKITSQEAEAVPSFGSAPHEPVKPTSLPSKPH

SEQ ID NO: 149298 - protein, 341 aa, unidentified
MSEYIGLDVSLKETAISVRRGGKRIWRGKCPSDPSLVADVLRKRAPAAKRVVFETGPLSVWFYHALSAEGLPAICIDARHAKAALDMAPNKTDANDADGLAHLAEVGFYREVRVKGYDSMLSRTLVAARSRLVKITTELSNQIRGLMKTFGLIIPRSKGGKFEADVRRLLAGQEELARIVLPLLEAWLSMRARAAELGQQLVANARHNDACQLLMSIPGVGTITATSFIGAIEDPSNFKTSRAVGAWLGLTTRRYQSGEVDYDGHISRRGDPHLRGLLYEAAVVILTRSRADSSLRTWGLKLREKIGFKRAAVAVARKLAVIMHAMLKSGELFNREEAIVA

SEQ ID NO: 149299 - protein, 494 aa, unidentified
MNELVANYMDARMDGPLFYSQEKNMGLRNAIGIDPDAKGFQCALVKSNESRAQQKGYLATTEGLASFIKWVKTQEDVIVSIEGSNGWSLPIEKALRASVTVFYSFKPSDVAKFRKAVLGQNKNNKLDAESTARYAMALEAQGMLENWKRVWRVDEQLQGLTRSYAQKVKESTRELNRLWKVLRVASVDLYLALGGHHPDAEISGNTLQNEAVVTLLAEKPDLFEWKTFSETDFADHLGTRNYVGRDRLIKELQKVSMSFTPVPAAICLMIKNAADQILLLRRQQHAIKKMLETLTKDDSAVRKLMERQGIGILTATILVAEIIDIRRFAKDDNLASYAGLGRREYKTGDGGNEYANHFFNPRLKNAFMTAAKNVVTFNPDSHLAGYYNNLVKSGMKRMDARKRVARALVRVVFKDLYSLIDFNNVNAIDEERDGSDMANGSSRCDWDHSNISSPPHIIQHTECVEKIKKGEPTTITDDTAVATGGKRKKSKNFS

SEQ ID NO: 149300 - protein, 342 aa, unidentified
MKGYHYVGFDVHKKTIAYCVKTVEGKILDEGVIPANRRGLSSLTQRLPRPWSGAMEATLFTGWIYDFLLPHAQELKVGHSYQLRAICASKKKNDRVDARKLSDALRCDLLPECYMAPAKVRELRQVLRYRNLLVRESVRFQNKTAGLLMEAGAEYNKGRLTGDRYFHELLAGLAEVPVSVKDLLGMAHESVKWFNSLQRRLVAGLREHPLLQDRVERLMSIPGVGEITALTWALEIGEPHRFGAVKRAVSYCGLCSGQNESAGKSRRGPLSKQRNKHLQTILVEAAKVGVRWNPQLAAVYEQARFRGSNRNEATLAVARKLVAYLLYVDKSGKLFVLNSDRA

SEQ ID NO: 149301 - protein, 341 aa, unidentified
MYYCGLDLHAKSSAFCLVNRRGKKIAEGEVSSSRRGFEQMMQRGDGEEIRVVLEASTRSRWAAEVLEGLGAEVVVVDPRKVRVIAETKHKTDRTDARILADLLRTGALPKALWRVPRGTRELRDLVRLRWGLVRQRASLALRARSMLASVGISLGKRALASETTWSRILKRRDVPAPMKKLLEILHDCMKDLGEAIAKVEQECAPRLAAPEVVRLQEIPGVGPVVALTTVGGLGDPARFKDSRTAAAYTGLVPSERSSGETRRRGHITKRGPSELRRVWIQAAQAALRMRDHPLKAWAHRLIYRRGRAVAVVALARRMFRWAFAMWRDGKPFDPRLATAHR

SEQ ID NO: 149302 - protein, 369 aa, unidentified
MSYATAIGLDVHARSITAVALSRDTGEVLAKTFDYDPASVAGWILGFEEPKAVYESGVTGFHLVRALREMGVDCAVGAVSKMHKPAADKRRKNDRNDAEFLARQLMAHNVVEAFVPDERTEGARNLSRALEDLRDDLARAKHRLTHQLIKWGCVWDEKAPDGKRKGTWTRAHWEWIRSIELPDACAREALDLYISQVRHIEAQKKAIEKRIAQHAQEERWQSRVEALRCMKGIEVATAFALVVEVGVFNRFDSARSFSSWLGLVPSERSSGERTLRGGITKAGNSHLRKLLVEASWHYTRATGERKRGMYGCEVPIHIANHAADGIARLVKRREGFVARRMRPVVANVATARELSCWVWALGRMCEGTL

SEQ ID NO: 149303 - protein, 338 aa, unidentified
MDLYTGIDLHSNNGFYGILNEKGERIFQKKLPNDLPRVLKTLEPFKKDINVIAVESTYNWYWLVDGLMDAGYPIELANPAGMTQYNGLKHADDKSDAFFLAELLRLHILPKGYIYPREERAVRDMLRRRMLLVQQRTTHILSFQSMISRQTGSGMSCRTIKALKEEDIQDYLNDEYLILIGETNISVIRHLTEKIRRFEKEVQKRVKIKPEYEKIQTVPGIGKILVLTIMLETGPISRYAGAGNYASYCRTVKAIHTSNNKKKRNLNKKNGNKYLGWAYVEAANFMRRWCPEAKRYHQKKMARSKQVVATKSLASKISKACYYIMRDQVDFDVKKMFG

SEQ ID NO: 149304 - protein, 356 aa, unidentified
MSRDIKYIGMDVHKEATVIAVLNDGGKLVMESIVATKASSILQFIHGLRGELHVTWEEGTWAAWLYDLLKPQVQQVLVCDPRRNALLKEGNKNDKIDARKLADLLRSGMLRPVYHGEHGLRTLRELGRSYQTISQDLNRGMNRIKALYRGWSIPGAGTQVYAPRYREEWRQKIEHAGVRRRAELLYQQLDGLQTLRRTLRPELLAESRKHKAAKLLRQIPCIGPIRAARLLALMQTPHRFRSKRQLWTYSGLGIETRDSAQYRYGHGQLQRTKKPQQIRGLNQNHNHEMKEIFKGAATRASCGVGPLRDFYVAWLEKGMKPEMARLTLARKIAAMALTLWKKEERFDAEQLKLQAA

SEQ ID NO: 149305 - protein, 353 aa, unidentified
MTYDYHIGVDYHKAYSHIVVQDTGGKMLRSGRVRNDRRSVAGFLAPFSASAHAVMEATRNWTVMFDWLDENCDEVVLAHPLKVKAIADAKIKTDKIDATVLAHLLRADLVPKAHAPSHRAREVRLALRERMFFVRLRTMVKNRVVTTFDRYPEQTAALKRCTDLFGAAGRKQLAEIEVCEIDRIQIDRSLAFIDDINGRIKECESTIKVLSKGNANVKLLKTLPGVGEFFARLIDAEIDDISRFRSASKLAAYAGLVPSTYSSGGKTYHGRIIKQGNKWLRWAFVEAVAPAVAHDPDLKHYYERLKATKGTNRAKVATARRLLTIAFQLLRDGRSYERRGAGLESETKLSRLS

SEQ ID NO: 149306 - protein, 387 aa, unidentified
MKKDSIFEKDSRKKGKGSKKGELSNQELVAKIEALQREREAALKLTIGLDLGDRSSCYCALDEKGEVIGRGVVVTEGKEMEQLFGRLPASVVALEVGGHSPWVSRLLEKVGHKVIVANARRVKLISQNSGKNDRLDAEFLGRLARADEKLLAPIRHRSETAQADLMGIRVRAQLVELRTETVNAARGLVKSFGQRLAKCDADSLKESHAKDLEPAIRGHIERLLRVVGELTKEIAACDEELEKVSAERYGEETKRLKQVPMVGTITSLAYVLTLDDASRFGRSRDVGCYLGMRPKRDDSGQSQPELRITKEGDVYLRKLLVQCAQQILSRRGPDCDLKRWGEKIAAKGKKKAKRRAVVAVARKLGILLHRLWVSGEPYQPQRRQQAA

SEQ ID NO: 149307 - protein, 394 aa, unidentified
MILVGIDIGKNKHTFSIIDKNSGEMLLSPSDFSNNLKGFLFLIQKLSSYTKSELLIGMEDTGHYHFALLKYLLDRRYTVALINPTTTDLTRKLQGGITKNDPLDSLTICDVISSNHRNKPYRVTTLNRFDLYEQKQLTRHHHNLKEELNTYKNRLQKCIDIVFPEFNSLFHSKYGIVYMNILKTFSSAKAIANADIRSIRKCFEFKGQGKRISLSAEQLKLTAKSSIGIPSVAEEIQIRHLVSQIELLEKQLSEIDKRIEEFSLKNNSPILTIPGISHFSGTSIISELGDICNYTKASQIIKFAGVAPYHYESSQFTAQHTAITKKGSKYLRKTLYQIILPVISNNEVFYAYYTKKLNEGKGHRCAQGHCIRKLLRVIYHLLSTRQQFNPKLLV

SEQ ID NO: 149308 - protein, 321 aa, unidentified
MEPAILGIDIAKEKFDVALLSGEKVITDTFSNTTAGFGMLKRWLAKYRVERVHACLEATGTYGEALSEHLCHAGHVVSVVNPARIKGFGQGELSRTKTDKTDAQLIARFCRAMRPEPWQPPAPEVKELQSLVRRLEALNSMLEQEKNRLETADDVIKESIKRVITCLQQERKATRKLIRNHIDRYPDMRGKRDLLESIPGIGPGTSAMILAEFGDVSRFPDAGSMASFCGLTPRHRQSGSSVRGRSMISKTGSSRLRKALFMPALASVRCNPVIAALRARLRASGKHPMVIVCAIMRKLIHIAFGVLKSGRPFDPSIAAAA

SEQ ID NO: 149309 - protein, 368 aa, unidentified
MMGWMAPLRHRGAKMLVGQRPPANREPSVSEVTTVGLDLAKHVFQVHGVDAEGATVVRRQLRRGQVLGFFSRLPRCLVGLEACATAHYWARELQGLGHEVRLMPAQYVKAYVKRNKNDAADAQAICEAVLRPTMRFVPPKTAEQQAALLLHRGRERLVGQRTMLVNALRAHLAEFGVVAPQGLRNVGQLIAIVRDAGDARLPGLARQVLEVLALQIEQIEGAVAALEKQLMAWHKANPVSQRLATIPGIGPIIATAIAATVVEPSGFRSGREFAAWLGLVPRQNSTGGKTRLGGISKRGNHYLRRLLINGASANLLRSKATNADPWVIGLRRRRPSLVVAVALANKTARIAWAVMQRQEDYRRMVAAA

SEQ ID NO: 149310 - protein, 456 aa, unidentified
MKASVFARPEERKINQNLKMNQTKLNRKTTAASGRGDFAALIGLDWASQRHALCLYDCATEKRENSTLEHTPEAIAQWAQGLEQRFGGKKIALCLEQAKGPLIYALLEYSFFVLYPVNPATAARYRQAFKTSRAKDDPADAQVCLELLLHHREKLTPWLANDGTTRELSRLLEARRSLIDLRTLLTNMLRDALKSYYPQALELAGQDLFAPLGCQFLLKWPSLEQLQKARTESVRKFYYAHNCRRMDVIEKRLHTIAEMKPLCRDRALIEPARIQVKMLARQLLQFGTALTEYDSRIEHLFAQHQDASIWQSFPGAGPTLAPRLCCAFGSERSRYQSALSIQEYSGIAPVQERSGKNQHWIHRRWARPHFVHQSFFEYASQSALHCPWAKAFIQDQLARGKTHPTAVRALAFKWQRIMFVCWRDRVLYHETIYLDSLKHRGSYLVRKLDQELPKAA

SEQ ID NO: 149311 - protein, 403 aa, unidentified
MPLFVGIDWASAEHAVCVVDSVGKVQARFNVTHTAAGMDALHRQLVQFGPKLTVAIERPSGLLIDTLVEAGFAVVPIHPNALKASRPRYSAAQGKSDPGDAFILADLLRTDGHRFRPLRPLSDETRALRALVRTRDDLVHQRVALANQLRALLESFWPGAAAIFAEVDSPIALAFLDRYPTPQSAERLGDKRLAHFLAQHGYCGRRSPALLLERLRSAPTGLCGEAEAEAKGELVRALVRVLDPLLAQLVKLSSAVEHAVAAHPDGPVVTSLPRAGRINAAQILAELGDDRLRFSSDDQLAAEAGVAPVTHASGKHRSVSFRFACNKRLRQALTCFADNSRHASPWAADVYRRARARGCDHPHAVRILARAWLRVLWRCWQERQPYSLAAHRGAQRLDTEVAA

SEQ ID NO: 149312 - protein, 385 aa, unidentified
MFQCSGSSQAAVDYNSTIIGAIELSEKKWVLAVQLPEVGRHSRHALDACGDGLVSFVERLKAKCASAGRKIARVILTHEAGRDGFWLARFLARRGIEVHVMQPSSLPVDRRARRAKTDMIDVEMLLRTLMAWLRGEPRVCSMVPIPSEADEEARRANREREDLTRERRSIVNKIDGILATLGIKGYKALRRGRREQMNCVRQPDGEPIPSQAKARIERLLDRLELVMKLIEQVESERDAVLKKDAPADEAERMIRSLTALRSIGPDTATLLVREAFVRRFRNRRALGGYVGLGGTPFSSGGSEREQGIGKDGNRRVRAAMVELAWTWLRWQPESALSVWFRARAGAMGGRIRKTMIVALARKLLVALWRYVNDGVVPNGARLKAA

SEQ ID NO: 149313 - protein, 351 aa, unidentified
MEFKHYVGIDVSKNTLDVVVIRNANDTPNHIQISNDNNGFKQLTMWFKKLEKFNFSTALFCMEHTGIYNNPVLHFLSKRSCTIWVENAIHIQKSIGLQRGKNDKVDAHRIAVYAVKNKEELNEYKPRRESIEQLKVLSSLRDQLVAMKKEIATRINEYQKFGDKTVSTLMLKASKQTQQGIEKDLFHLEKEILKIITNDNELKEMYELMKSVVGVGHVTALQLIVHTNEMTLVNNPRSLACHCGVAPFERSSGLFKGKARVSHMANKRLKTALHMAALSAMKLDKELKEFYDRKVAEGKSKMSVINAIRNKLIHRIFAVVKRQTPYQKDYQPVFNIKTLNEKIIENSLILS

SEQ ID NO: 149314 - protein, 332 aa, unidentified
MQYCGIDVANKASAVCISDQRGKIVLERECPTFGGLETILQGRAPMRCVVEASPLAETIVGMAERLGHQVVIIEPRRAKGVICSKKKTDRLDARNLCKMARTEWYTAVHRKSARARLTRTALQARRGMVETARQENSRIRGLLRSHGLVVGKVSAGNFACRVRDLTADKPELAALLEPLLRIHEMLRAEIRKAGRALVSSAKADSTCQLLMTTPGVGPMVAAAFVATIDDPHRFGRRRDVPAYLGLAPRIHQSGEVEFRGRITKEGDHLLRWHLVEAATVLMTRTKKSSRLKRWGLELARKKGMGKARVAVARKLAMVLHRLWVTGEEFAAA

SEQ ID NO: 149315 - protein, 338 aa, unidentified
MNVTHIGLDLAKNVFQVHGVDRDERVVAKRKLTRRQVHDYFEKLPSCRIGMEACAGAHYWAREFGRMGHEVKLIAPQFVKPYLKSQKNDANDAEAICEAVGRPNMRFVTAKPVAQQDMLAAHRIRSELVRQRTAKANQIRGLLAEYGVIVPVGINALRRVLPDIQEDAENGLSGLFRRLLEGLRADWVELELRVDQLDGEIEAAAKEDETARRLQTVPGIGPITATALAASVGDGRQFRRGRDRAAWLGLTPGQHSSGGKERLLGMSKRGDSYLRTLLIHGARGHPGRGQQGRPAQPLDYRSGGAAAQERGRRGLRGREAYKPPPRGCPPWPGGIALQ

SEQ ID NO: 149316 - protein, 318 aa, unidentified
MYYIAFDVSKKVLCGFDGEKELAFDNKKGLKALKSYLKKKYQDLNDLVIVFEATGVYSNYLKEFCADNNLKVYMINPKRSANFSKAIGNRSKTDKIDTKQTIYEYRKIIGPKDIKVPKIDQVAQTLSAYLTSYKFTVKKRVSISNHLEALERNTSSLELVALLKGELKRTKKTEEKIKAKIEEYIKKDSQLKEDYKRQMTIPGVGKVSAICLLTLFNKYKDTNQAQITALVGLDPTKRESGTSVKGKMKISKNGDRMIRGTLYFPLLSAIRFNKKIKALYDRLLANHKPKQVALIAAMRKLILISHAIYKNKTVYSAV

SEQ ID NO: 149317 - protein, 399 aa, unidentified
MFYCGIDIAKYKHEASVIDMSGKALSNSITFANDRQGCEKVLAIFEKSEITPDNVVIGMEATGHYWLSVYTFFLELGYTVKVINPIQSEAFRKMYIRQTKNDSKDSYIIAQIMCFGEYSATTLSEDNIIALRQLSRYRLALVDACGDCKRRVIALLDQVFSEYDKLFSDTFGKTSSELLLNCPTPEDMLAVSTRKLTNILNKASRGRFGKEKAEELKDAAKNTFGIAFAKDAFSFQIKQLMQQIIFTEKQLSELEEQIANLLHETNQYITTITGIGDVLGAIIVSEIGDINRFERPNQLVAFAGLDVTVKQSGEFSGTKNRISKRGSPYLRRAIWLAAQRAAFCDPILSEYYQSLKARGKHHLTAVGAVARKLCNIIFVILKENRPYLPIPPKKSQNLS

SEQ ID NO: 149318 - protein, 317 aa, unidentified
MRREVFVGIDVSQDFLDVGVRPSGERFRVAYDEDGMEALVSRLEPLRPSRIVLEATGKLEAPLVACLQMARMTPVVVNPRQVRDFAKATGELAKSDGIDAGVLAHFAEAIRPEIRPLPEAELQALAELVRRRRQVQDMRVAEQNRLKRTASGDVRQRIERHLAFLEHELDDIDDDLRRQVRKTPAWQADVELYSTVPGIGRTLATSVVAQLPELGHLSGRKISKLVGIAPLADDSGKRHGKRRIWGGRSSVRRSLYLATLVAIRHNPPIRDVYQRLVAIGKPKKVAIVACMRKLIVILNAMKRDGTPWTPDLAAARP

SEQ ID NO: 149319 - protein, 340 aa, unidentified
MGEVTTIGLDLAKHVFQVHGVDASGATVLRKQLRRSQVVAFFAGLPRCLVGLEACATAHYWARELQAVGHEVRLMPAQYVKAYVKRNKNDAADAEAICEAVQRPSMRFVAIKTAEQQAALLLHRGRERLVRQRTTLVNALRAHLAEFGVIAPQGLSNVARLIAIVRDESDTRLPYLARQVLQVLATQLEQLGAAVAAIEKRLAAWHRGNPVSRRLASIPGIGPIIATALAATVVEPIGFASGREFAAWMGLVPRQHSTGGKVRLSGISKRGNRYLRRLLINGASANLLRSKATNADPWVRGLRRRRPSLVVAVAVANKTARIAWAVMRRAESYRPRAAAA

SEQ ID NO: 149320 - protein, 469 aa, unidentified
MAPAKKSTLARRKRKQKSPAKLKPQDGTLGLSVVHGKAAGIDVGNAEHYVAVPPSLDREPVRTFGCFTADLKAMADWLKRLGIETVAMQSTGVYWIALHEVLSERGIKVFLVNARDTRNMPGRKTDVQECQWLLKLHVYGLLKNSFRPEEEIVVMRTLWRQRQQHIADASRCIQRMQKALTQMNLQLANVISDISGWSGQQIIQAILKGERNPQELAKLRDPRVKASQEEVMRSLEGNWRPELLFVLKQELETYQSFQAKIRECDEELERHFQTIPAQADPEELEKVPRNKRPRAHVPENLNLRDELYRITGVDLTRIDGVNVLTAQTVIAECGYDMSRWETEGRFVSWLNLAPSNKISGGKVIGRDRRKVVNRAGQSLLQPASTLLRSQSYLGAQYRRLRTRLGAPKAIKAAANKLARILYRMLKFGQQYVDKGQEFYTQRFRQQQIQILAKKAAGLGLQLIQSQGAA

SEQ ID NO: 149321 - protein, 333 aa, unidentified
MQNFYFIGIDVSKKKLDICVMLKSKVLKEEQVSNHPQAIATVIAGIKEELSMSNDSFIICAEHTGQYTYPLICACKSVGCKLWLENASQIKYCSGVTRGKNDKVDARRIAEYAMRFIDKAKPYNRPTEGLMRLKQLEAERSLYLTDLSKYKAQLTDQEGYMEDKIFKRKAKRLKEMIKSLEKTLKEIAAEMAEVIDSSDELHRQMMLLKSVEGVGPVVAMNMIIATEAFTRFENPRQFNCYVGVAPFAYTSGSSQHSRNKVSQRAVKYIKCLLHMAAVAIAHKKTGDLKTYFERKVAEGKNKMTVLNAVRAKIVARMFAVIRNNRIYQPILSA

SEQ ID NO: 149322 - protein, 312 aa, unidentified
MIATSVYLGADIAKESIALCGPSLAVPPTITNNAAGYRQLLKGLRRSATPVHVVCEATGPYHKAFVAALHQAKVVVSVVNPRLARDFARARNRLAKTDAIDALLLADYGRTMKPAATPVPDAAMVLLDDLVTRRGQLVADRAAERTRLQQITRPELVASVRLHLRHLDSQIEKLWARIAELIESTPALCAKVKLLVEVQGVGELTASALLAALPELGTLSANEVTALAGLAPFNRDSGAFRGTRSIHGGRAEVRQALYMAALCASRANPILKAVYQRLRAAGKAHKVALVAVMRKLLVHLNRLIKKHALVPA

SEQ ID NO: 149323 - protein, 400 aa, unidentified
MRAVLGIDVSKVSSEVAILVNGEKVHGYTMPNDAIGFARLLGDLKTVHKPEIIFEATGVYSRRLQAFLEDNGYDYTRLNPLEAKKQLDSLRVRKTDQIDAEKLAQSQFVLNRKPTYVQEEDYQNLRDLSRFYQNLTEDIVRAKNRLHKVLQVTFSELETILSTPTGEQYWNLVIAFPCKDFVLDLSKNELSKSIRQSTSKRISDKRVAYLAEKLTVLANQSYCAVKKTSPILEEVHYYAKELLRLSEQRQAVLDQMVELAQPLPEYDILLSIPGIAETTATSIIGELGDIRRFQSANQINAFIGIDLRHYESGNFLAKEHITKRGNPYARKILFKCIHNIASASHTNPCHIADFYEKRKRQSQTTSTKSHTIASIHRLIRTMYYLIMHNKLYDYASTQNR

SEQ ID NO: 149324 - protein, 345 aa, unidentified
MKITTVGIDLAKNVFQVHGVDEHGKVALRKQLRRDQMSTFFVNLPPCLIGMEACGSAHHWARTLSGFGHTVRLMSPQFVKPYVKSNKNDVADAEAICEAVTRPNMRFVPVKSVEQQAVLSLHRARQGFVIARTAQANQIRSLLGEFGLVIPKGICHVAKQVPQLLEDASSQLPGTFRQLIVRLTEHLKELDKLVDEFEDQIKAWHRSSELSLRLEKIPGIGPLGASALVASIADANSFDNGRQLSAWLGLVPRQHSSGGKPTLLGISKRGDVYLRTLLIHGARSAIVAAQRKTVNTNVWLASLLNRRHPNVAAVALANKNVRTVWALLAHGREFQPTYVPPQLAA

SEQ ID NO: 149325 - protein, 344 aa, unidentified
MEKHMTVAVDVAKNVFEIAVSRDPGRVCLRKRLSRNQLIPFFRGQPPSTVLLEACGSAHHWGRLLEGLGHRVLLLPPHHTRRYVLRDKTDRADATALLEAHRNEQISPVPLKTLHQQTLASLHRLRSRWVATRTARLNTLRGLLRELGISIPLGPRHVLPAIQAALSDPSAPVPEPLHPALLRAAQEIHQIENSIHITELELQALAKNLPATLTLQTIPGIGLLTSTALVAFVGNPSRFRSGRRLASFLGLVPREHSSGSSRHLGSITKRGDPYLRTLLTHGARSVLLAAKRHHHPNPLQLWALSIQTRRGHNKATVALANKLARIAWAVWSRNQPFQPHRLAA

SEQ ID NO: 149326 - protein, 346 aa, unidentified
MKVFVGLDVSLNTISVCIVDEDGKLVWQGKTLSEPADLIPVLLPYQDNIQLVGIEACPLSEWHYGALADSGFPVVCIETRHTQRFLSSRPNKTDRSDARGIAEMMRLGHFKPVHVKSKASQLIRTVLIAREKFVDHVVAIEQTIRGLLKVHGLKVGAVHRCTFVARIETLLANSPELRVAIEPLLETRNVMRRQKVLLDRRLSQLARQDDICRRLMTVSGVGPIVSLAFKATIDDPTRFKNSKAVAAHLGLTPRIYQSGEIDRSGNISKCGDKLMRHALYEAANSHLRISKKWSVLRAWGVKLAKRVGAKKACVAVARKLAIIMHRMWIEEKDFHFGRQPQSASAA

SEQ ID NO: 149327 - protein, 457 aa, unidentified
MSAPKKVKRKSTFKSNVQLPALHPHAAGIDIGATQMQVAVPCDADSKPVRTFTTFTDDLLKLRDWLQVCGVRTVAMESTGVYWIPLYQILEAAGMEVCLVNARHCKNLPGRKTDVSDCQWLQYLHSVGLLRASFRPPEQICVVRSFLRQRANLVRYASQQVMQLHKALTQMNVQIHNVISDIVGVTGLAILDAVLAGERDRQKLAQLKDHRIKASGDTLARSLAGDWRVEHLFALRQALATWRHYQQLITECDAATAQALAGFESRVDVQANPPPPSTLRHKTPQRNEPGFDARTELYRITGVELTQIPGLQVGTALVLFAELGPDFVQRFPTAKCFASWLGLCPDNRITGGRVISVKTRDVKSRSAEALRLAAQALWQSKTYLGDCFRRWKARLGTPKAITAMAHKLARILWHLLKYREAYDPAVWSAAEEKMRAKKLKRLHQNATALGYKLITVA

SEQ ID NO: 149328 - protein, 399 aa, unidentified
MSRVFIGVDPHKLSATIEVVDEAETVLATGRFGTDKAGYTAMRRRVAAYPDRVWAVEGSNGAGRPLAQRLLADGEAVVDVPAKLSARARMFDTGHNRKTDPHDAHAVAVVAVRTKGLRVLAYDEQLEALRLLVDRRAELSRARIQCVNRVHRLLAELVPGRSKKNMSTAQAKRILATVKPRDVAGKTRRRLAAEQIAELAVIETKIKALTRELKEMVAATGSTLMELPGVGPVVAARTLADTGDVARFADRNRFASWTGTAPIEASSGEIVRHRLSRAGNRRMNHMIHIAATTQLRHDTEGRAYYRRKIAAGKTKAEAMRCLKRRISDALYRRLRADAAARADAGPGGHHGAALKSSAAGSHPHTGTSDQPQPGPAPTTLPATATTRNTTTPKILEPAP

SEQ ID NO: 149329 - protein, 321 aa, unidentified
MNASIFVGIDIAKFFLQIACLELKLKTQLPNSLVGWNRLVKLLKIHGPKVLLICEATGGLERGLVDQLQKADLKVCVLNPRQARDFARAANRLAKTDKIDAAMLAEFGRRMAPRPAAKVAPWVRTLAALVGRREELTAMRTAENNRLEQNFLSFVAKQLKASIKRFNKDIKALEVQIDRLVKSTPELKTKHQLLCAVQGVGSITATTLLATMPELGSLESNQVANLLGVAPLNCDSGQWHGKRRIYGGRRFARRVMYMASLTATRHNEILKAFYGRLVQAGKPKKVALVAVMRKLIIYLNRVLKPKEHSHFPAHTAEAPCF

SEQ ID NO: 149330 - protein, 339 aa, unidentified
MVHVGIDLHKHVSQIARLEESGELNQTRLNNDRAQIKRYFQAIPRPAKVAIEASGTWWWIVDLLEELGHQPVLSNPKQTKAIAAARLKNDRVDAERLAVLLRGDLLPTVWIPPAEIRQARELLRHRIQLVWMRTAIKNQLLALLARRNMRPQNNSRWTTVGGRSEIQALELGPNPSVIRDNCLQLMHQIDQRVRDVDKELARQWASDPVVKRLVTIPGVGVLIATVLLLEIGNIARFPSAKHLASYIGLTPRIRASANRVRTGRISKEGNRLLRWALVIAATQAARKPGTLRTCYRNIQQRRGKKIARVALARKLVEIVYHVWTHEVDLLTVLNWSVRG

SEQ ID NO: 149331 - protein, 412 aa, unidentified
MDEVVEFCAGLDVHRDTVVATVRFPQGRQRGSETKTFGTDTAELVALGDWLISHRVTRVGLESTGVYWKPVFYLLEDRIEQLWLLNAQHLKNVPGRKTDVVDSAWIAQLVEHGLVRPSFVPSPPIRELRDFTRHRRVLSEERTRMVQRLEKVLQDAGIKLTSVASTVLSKSARAMLEAMLAGESDPVVLAELAKGRMRSKIPALTDALRGSFRVCHHGVLVRQILAHVDFLDAQLAEIDEQITTRVATFEPIIERVQTIPGVARKCAIGMIAEIGVDMSVFATPAHLASWAGICPGNNASGGKARSGRTRHGPVALKTVLTEAAQAAARTKNTYLGARYHAIRGRRGTFKAVGAIRHDILIAYWHIVTADVGYQDLGVDWLARRHSREHQIARLAKQIEKLGAAVEITMPAA

SEQ ID NO: 149332 - protein, 326 aa, unidentified
METYDYIGIDVSKSWIDCAYQDQGAWQSERVCNEVDPLRTWLSQWQEQEVCLVLESTGYYHDKLVCLAEEVGIAYVMVNGRKSYHFMQVQGHLHNHDRQAARSLAQMGSEKQLQPPIVPSYMKEHRQRKQLQMALNALTKQRGMLKNQLHALEQLYQANPLAQTALQSALEVVETQIQELEKALSPSDEEEVQRLVQLMRSVVGIGPKSVECLLTYLGDFSQFESHKQLLKFVGVIPGHHLSGSSVRKRARISKQGPGQIRATLYMAARSAKKHNHACRELYERLRKKGKPHKVAMIAVVAKLLKQVYAVVTSEIEFDNQYYLKYN

SEQ ID NO: 149333 - protein, 371 aa, unidentified
MFGDQATFHQKGGTPMNYVGIDYHKKYSHVTAIDEEGSVIRSKRLENKPEPFQEFFKRLEGPSEAVLEASRTWGVMYDLLEELEGVESVQLAHSQKVRAIAEAKIKTDRIDAHILAQLLRADLIPAAYIPGKETRSYKEMIRQRVFLVRMRTRLKNRIHVLVDRLHIPLPSVTDLFGKRGTDYLRKLNLPGVDGEILRENLELLEDFNTLIKEAEREIELLLREDPRVKLLRTVPGLGPILAAVVALEIDRIERFISPSKLASYTGLVPSTYASGGRIFHGKLLPMSNKWLKWALVEAAWGSIRTSPYCRIYFENHKRHKGPHTAAIALARRLSEIVWHVLKENRVYEERPFQRQRRTSSMATSPAALTAT

SEQ ID NO: 149334 - protein, 403 aa, unidentified
MNEQISEKVIEKKHFVGIDISMDSFYAAVMDEKGKVFWNESFKMDEEGFKSFYEKIQKHPNRLAGMESTSTYHINLLLFLVEQQESVVLLNPMLVKRYVTSQTLRKCKTDKADARMIASYVRNKEESLMKYVLAPSQHLFRLARCKENVSKQISSYKTKLKQMIRTTFPELIKKKYAIYTDSMLNLLLLFPSASSFCNAGEKKVEKYIQKFSKGKGKNVSYTGDILCNLAKHSIGRTDPSIEFVIKQTIETLCFFQNKKKELIKRLKKEVGKFSMEEVDILSSIPGVGKDSAVHFMAEINNIGKFPNYKALTAYIGTDPGIEQSGQSFHRKKISKRGNSSLRRLGFIMAQKVIQYCPRFKEYYLKKRKEGMAYRKAVIAVWNKLLRTLFSMLQNHTYFLISDS

SEQ ID NO: 149335 - protein, 409 aa, unidentified
MDVVITRCAGLDVHQATVVATVRVPDDQGGRRVVTDTFGTMTADLLALRDWLHAYGVTHVALESTGVYWKPVYYMLEDAFTLLLINMQELKRVPGRKTDVKDSEWLAQLLECGLLRPSFVPPPPIRELRDLTRYRVQQVRDRSQEVNRLCKVLEDAGLKLTTVISDVMGKSGRAMLQALVDGTTDPAVLAELARGKLRKKLPELRRALQGRFRPHHAFLIEQIFAKIDFLDEALERLTTEIDQRLVPFEPMLTALDTIPGVDRIGAISIVAETGGDMTRFLTAGHLCSWGAMCPGQNESAGKRRSGKTRKGNRYLRGTLIQAGLGAMRKNGSALQARYRRVARHRGHKKAVVAVGHQILEIAFYIMRDGVTYEELGADYFNRRHAEKAVRRHVKQLEALGFHVTIEKAA

SEQ ID NO: 149336 - protein, 487 aa, unidentified
MKTIRDRKQEKAAEASSGSAQGKVQRLNRKQRRELVRKIQADDVSLEVVHPDAAGIDIGNESHYVAVPSKRDPEQPVRRFGCVTAELKTMAVWLKRCGIRTVAMQSTGVYWIPVYDILEAAGLEVYLVNARETKNLPGKKSDVQESQWLMKLHTYGLLRNSFRPAPEIRRMRTYWRQRNDLIQSAARHIQRMQKVLTEMNVQLANVLSDVSGMTGQAIVKAILKGERDPYKLAELRDWRGKATQEQMARSLEGNWQEDLLFLLRQEQQAYEFCQKQIAACDQQLEDYLKEQEDRRQGAQLEEEKRKNRRKKKRGHTPQQFDLRAGLFRMTGVDLTRIDGIDVMTAATAISEAGWDMSKWRTEDHFVSWLRLCPDNKVSGEKIIGKGKLPTPNWLTSALKMAASSLKQSDTYLGAQFRRLRRRLGAPVAIKAMAAKLARLVYRMLRYGMKYVDRGAQVYEEQYRRRQIIFLKRKAAELGLQVVETVAA

SEQ ID NO: 149337 - protein, 391 aa, unidentified
MTMYFVGIDISKYKHDCCIISAANQKVVSKFTFKNDKSGFEQLNLILNSLSTPEDIKIGFESTAHYALNLELFLENAHHSFMEVNPVLIKEYKKSTTLRRTKTDSVDCESIARWLITVEYKPHSKGFYHAYSLKSLTRLRDRLIRQRSFYLVKITNVLDHTFPEFKPFFNERLSKTAIYLLENYGSAEKMAHMNSASYDKLRCASRGKFSIQQFLRLKELAANTVGVNNSIFDIELNSLLTLYNSLCKEIKTLEAEITKLIEEVHPHYMSIPGIGPISAAVIYAEYGDISNFSNPGQMLAFAGIEPGINDSGTESHGGRMVKHGSSQLRYVLLNACLPLIRFDITFATYYAKKRAEGKKHRVAITHVAKKLIRVIYALERQDVDFNVQKLR

SEQ ID NO: 149338 - protein, 466 aa, unidentified
MKKSSTKRSAKKSRKTRRVKRVLKPMNPFAAGIDIGSQTHYAAVPPHCDERPVRSFGCLTPDLHALANWLEVCKVTTVVMESTGVYWIPVMEVLELHGFEVFLVDARHARNVPSRKSDVQDCQWLQELHTYGLLSSAFRPHKDMLPLRNYWRQRDNLVRQCTRHILHMQKSLEQLNLQLHKVLSDITGVTGMKIIRAMLAGEQDPEILARMRHGTVKKSEATFVKALTGNYREDHLFALKQAVQLHDIFQEKIAELDAQTDRYMATLETKANPEDLPSLPARKAQTKRRKNQPHFDLREQLYRITGVDLTQIDGISAITAQTIITEQGIDMSAFPSEKHFASHLGLCPNHQITGGKIIKRKSRKVQSRAAKALRLAAQSLHHSKSALGAYYRRMRGRIGPAKAITATAHKLAKLIYRTLKHGQAYVDKGQEAYDKHYNERQLKNLARRARRMGCELIIADTGEIVS

SEQ ID NO: 149339 - protein, 348 aa, unidentified
MLADEVDYVLGVDTHRDEHVVAVVTAPAGIVVAGSAASASTRGYRELLRLAERHAPGRRAWAIEGTGSYGAGFARFLAGRGEVVLELSRTPRAERRLRGKDDRLDAVRTARAALASELLALPRAGEQREALRLLLVARRSAVDVRREALTQLRAVIVTAPERLRRQLRGLPEGRLLDRCSRLRRTTAAADELATRLVLRSLAQRVRAATVEAAELEREISAHVQSLAPALLDEPGVGPIVAAQLIVAWSHRGRLRSEACFARLAGVAPVPASSGQTQRQRLSRGGDRQLNRALHTIVLHRRLHDPNTREYIARRIAEGKSRRDATRLLKRYVARHLFRLLEQQEPLMA

SEQ ID NO: 149340 - protein, 343 aa, unidentified
MGEVSTIGLDIAKSVFQIHGVGAGGAVVIRKRISRAKLLEFFASLPACLVGIEACPTAHYWGRRLQALGHTVKLMPPSYVKAYLKRSKNDANDAAAICEAVTRPSMRFVATKSEQQQCGLMLHRSRQLLVCQRTMLSNAIRGHMAELGVVSAKGRNGTAALLKIIADEHDDRIPAAARFSLDVLARQYAVVRAEIVAIEKRIHAWHRSCEESRRLEEIPGVGPIVATALVAEVGDWKEFTSGRSLAAWIGLVPRQHSTGGKERLGRISKQGNRHLRWLLVAGAMAVIRYARQHGTKRPWLARLMDRRPIKVAAVALANKIARMAWAMMVRGERFKEPKLLPAA

SEQ ID NO: 149341 - protein, 454 aa, unidentified
MRKPRVVPDEDHEVVYERVAAVDVAKAAGVVCMRTPDPARPGRFVNRIWEDVPAMRAQIAELGRELLRNKVQMVTLESTSDYWRIWFYVLESIGLAVQLVSASQAKNLKGRPKTDRLDAMWLARLTQWGMLRPSFVPPAAIRRVRDFTRARTDLVHERTRCLQRLEKLLEDAMVKITSVASDGLKAKSVVAMVAALIAGERDPRTLADLAKGPLRAKKDQLAEALDGMFDSHHGVIAQMLLEQAAFLDQRITQMEDQAIAALAQVEQSWGVDADGQTGPGCGTGPASPVLAAAHRLAEIPGISVWLAIVIIAEIGLNMSVFPTPAHLVSWIGLCRSAAQSGTRAGKGKQKKGNSYARAAAGQAALGAAGTDTFLGDRYRRIARRRGKAIAQVAVARSIMIIAWHLLNDPAARYRDLGPDWHARRTSRDKKIRTHLQGLKALGVTVAITGDDQAA

SEQ ID NO: 149342 - protein, 344 aa, unidentified
MHIASIGIDLGKTTFHLVALGERNKILVRRKFSRSQLLAYTANLPSSLIGLEACAGSHFLGTVLREQGHQVRLIPAQFVKPYRKTNKNDFIDAEAIAEAVTKQNMRFVQIKSQEQLDIQAMHRVRDRLVQRRTALINEIRGFLLDRGLTFAARPIHLRKNLPSVIEDAEQNLSSRLRWLLDRMWQEWKQMEVDIKAITEAIERIGNENALCRRLRQIPGFGPLVSTATVAAIGNGAAFRRGQDFAAWLGVVPRQYSTGGKQKLFGMSKRGNTYLRRMLIHGARAVLLRVKYDTGGFGQWVHRLAQRAPHNKVVVAIANKLARIAWAVLSSGHDYQHQRLQPVAA

SEQ ID NO: 149343 - protein, 435 aa, unidentified
MKIVYPICCGVDVHKKFLVATIATTDKKGITQYITETFSTLNRGLYSFCRWLTEHNCYDVCMESTGKYWIPVFNILEQGGIRATLTHPKFVRAIKGKKTDKKDSKWIADLFKHDLVPGSFIPPPNIRALRELARYRYKLVCMRSSEKNRYQDCMTISNIGLASVLTDPFGKTATDIMKHVLSSEVFTDKDIEKLIRGTAKKKTDLILESIRDNRIGTDQRFKMGEVSNHLDYLEQSILKTEIELYTRIAPHMPIVKHLANQLPGVTELSATLILAEIGIDMSVFESDKHLASWAGLAPNNDQSAGKKKSVRISKAGQFIKPLLVQCALSAIKSKKQPYFAVKYQKLKRRRGHKKAIIAIARMMLTCIYHMVLTGEVFNPSDLKPTCQPAPKKQVFSDETVFAYLTAQGYDVSTLKKIPSAEEDSPVVAPLLKNPA

SEQ ID NO: 149344 - protein, 391 aa, unidentified
MEVLYQSCAGIDVHQANIVVCILHGPLTSTRPKREMATFDTTTKGLRACHDFLSQFHVEAVGMESTGVYWRPVWHALCDDFELILAQPAHMKAIPGQKTDKKDAHWIAKLTRIGLLPRSFVPDETIQELRELTRQRKHYVESRNRETNRIHKFLQSGGIKLTTYIEDIMGLSGRNLLQLLVDGTPITPRIVHQSVYTSLKKKVPQLLEALDGYFSDHHRFMLKQSLEIYDFYQKQIELLEERITVYLSQYENHVETLDSIPGIDVITASVIISEVGVDMSQFPTSGHLASWAGLCPGNNESAGKKRSTKIRHGNSYLKKCLCQAAFAVKRQKGSPLAERYYQIQSRRGSQKATIALAHQLLKIAYILLKEQMTYPEFLAQKKKTTRDELVA

SEQ ID NO: 149345 - protein, 392 aa, unidentified
MQVAADRAEAPAAIRTDLRAIFVSLELSRVTWLITSLSPGGGQKMSKHSVQAGDIAGLLKRFAQLRAKARARTGRDFPIIVIQEAGLDGFWIHRVLQSEGIESHVVDAASILTSRRRRRAKTDRIDGETLVRTLMAFKRGEPRVCSMARAPTPQEEDRRRVCRERRTLVGERVKHVNRIKGLLFAQGVFGYEPLRKGRRERLEDLRTGDGRPLPMHLKAQLVRELDRLEVVLAQLKTVEAERDALLKPASEEAASPAAMLVQLKGIGPETAAVLWSEGLFRQFDNRRQVAAYAGLAPTPWQSGSIDHEQGVSKAGNPRLRTTMVELAWLWLQNQPASALSLWFHERVRRLGGRMRKTIIVALARKLLVALWRYTTAGVVIEGAVMKPVTATI

SEQ ID NO: 149346 - protein, 341 aa, unidentified
MDICYSGIDLHSNNNVVCVVDQDGKILFRRRLANDLPTVIKVLAPFREQLQGGVGESTFNWYWLVDGLMDDGFKVILANPAAMKQYEGLKYTDDKSDAAWLANSLRLGLLEKAQGYIYPRQQRQIRDLLRKRVQLVQQRTTHILSIQNLTARNTGGSIRGSDVKRLTEADIYRLFQEVHLAMAAIANLHVIQVLNSEISVLEKEINKEVREDKLLVLLLSVSGIGRILGLTVLLETGDINRFAHVGNYASYCRCVESKRTSNDKIKGRGNRKCGNKYLAWAFVEAAHFAIRYDARIEQYYQRKLAKRKKAVAIKTVAHKLARACYWILKTGEPFDVERAFT

SEQ ID NO: 149347 - protein, 458 aa, unidentified
MQEATQHDAVDVFVGVDVDVDVDVGKGRHHAVALRRNGKRLYNKALPNDEVKLRALIAELKTHRRLLFVVDQPSTIGALPVAVARAEGVLVAYLPGLAMRRIADLHAGEAKTDARDAAIIAEAARSMPHTLRSLRLADEQLAELTMLRGFDDDLAAQVTQTSNRIRGLLTQIHPALERVLGPRLDHPAVLDLLERYPSPSALAAANEKTLANRLTKLAPRLGKNWAAEIVQVLNEQAVIVPGTQAAAIVMPRLAQQLAALRKQRDEIAADVERLVLAHPFWPVLTSMPGVGVRTAARLLTEAAQKAFATAAHLAAYAGLAPVTRRSGSSIRGEHPSRRGNKVLNAPCSSPPSLPYETQSHGPIPRARSSRASATTKHSSRSHGDAATSCLPCCATAPFTHPSQPLTLDERHRDTRACCAATSPRGAAPVRRMRSRPDVARAPTPLHAVNLSPGRRRPL

SEQ ID NO: 149348 - protein, 344 aa, unidentified
MGEVSTIGLDIAKSVLQVHGVDGAGAVVMRKRISRAKMLEFFADLPRCLVGMEACPSAHHWSRELQALGHRVRLMPPSYVKAYLKRSKNDANDAAAICEAVVRPSMRFVPIKTKEQQAGLMLHRTRQLLVRQRTMLSNALRGHLAELGIVSAKGRNGISQLLGIITDVTDNRVAPAVRGLLDVLARPYSAIGAEIRSIDKSILTWHRSCEASRRLEEIPGIGPIVATALVAEVGDWREFRSGRNLAAWIGLVPKQHTTGGKERLGSITKQGNRYLRWLLVTGAMAVIRYAKKHGTERRPWLARLMERRHTKVAAVALANKMARMAWAIMVRSERYEEPKLLLAA

SEQ ID NO: 149349 - protein, 323 aa, unidentified
MKQKIYIGIDVSKDKLDIAVKAAETDGTVGPAKRARETWTSANTTAGCEALVRRLRAQEPHRIAMEATGGYEQRVFRALREAGLPAVIVQPLNVREFARAMGKKAKTDSIDAMMIAYFAEVRQPEVLPLPTPNQERISELRWLRSDLLKSRTQYTNRLENCGAEARSHIEKVVASVDSEIAELDAKLREALRATPEDAAKATLLQTVPGVGPITAATLIGELPELGKFDRRRLSALVGLAPMNRDSGRQQGKRAIKGGRGEIRQVLYMAVLTARRRNPVIRALAERLEAAGKPYKVIMTACMRKLLVILNAMVATATTWSLSP

SEQ ID NO: 149350 - protein, 408 aa, unidentified
MPRYYLGVDWADKSHQLYVCDESARKIKEQEVQHTVGELVELGRWLDESRQNGIELWGAIEKPHGRIVDFLLDHGVMTYPINPKALDRARDRFRMSPSKSDAFDARVLAEFLRTDHAHLRALEPDSIAAQELKMLTRDHQRLGRQKIRLINQIKITLKEYYPRALEVFGDLETQIALDFLNNYPTPQALSKLTQRSSMRFATREHHLGEARAKELWDKLNPIQLPVPEHVVRAKTKLLLALVVQVQASIKAVDSYNEEIQSFFAAMPPAQLAKTLPGAKSATTVATLWAELGDAPSRWSSFRHLQAQAGAVPITKSSGKNRLVQFRSACNKHLRQTLYWFSFNSLSRCEWAKKYYRDQRAKGHNKHQALRALGAKWLKIIFVMWKDHKPYDENYHLANIARQRMRQAA

SEQ ID NO: 149351 - protein, 365 aa, unidentified
MTSMTTIPGPVTGGVDTHGDTHHAAVIDQVGREIADAEFRATPAGYRQLLGWLRGHGSLQRVGVEGTGAYGAGLARHLRGQGVSLVEVDRPDRKTRRAKGKSDPIDAYAAARAALNGSATGTPKTRDGRVEAIRTLRVARRGAVKARTQAMNQLKALVVTGPADLREALRDLPAGVLIDTCARLRPGAQGADLAALSDPAAATKTALRHLARRHQRLGQEITELDADILPLVRAAAPALLALRGVGPEVAGQLLATAGDNPDRLRCEAALAHLCGVAPIPASSGRTDRHRLNRGGDRAANNALHTIVMSRLRYDPRTQQYMARRTAQGLGKKEIIRCLKRYVLRDVYRALLTAPATPTKDLAPAT

SEQ ID NO: 149352 - protein, 366 aa, unidentified
MVGCDLHDASLLLKVAVDRQEPEKLYFDNDPEGRRRMIAELKRRKKAEKAERVCFAYEASGLGFTLYDELTEAGITCFVLAPSRMERSVKQRRNKTDEKDADRILKELRGHLLGGNELPAIWVPDAQTRDDRLVVRARLDVGQKRTGVKTQIRSLLKLHDVPRASRTPGGRTKAYRVWLQDLSDSEKALPWGARIALKTLLAQLAALDQELARLQEAVRQMSEFPRYAEPARALMQLKGVGILMAMVFLTEMGDLSRFPNREAVGAYLDLVPSSDESGEQDDHKGHITGHGSGRVRYMLCQVTWVRKRLEAEVQKRYDRIAARNPKHKKIAVVAMMRQLAVLLWHVGLEAQRRAGVFPARAAAAAA

SEQ ID NO: 149353 - protein, 328 aa, unidentified
MTDQYIGVDLHKAFLQACAVDATGARLWEERFDRTPAGVAAFLRQCRPTSAVAVEASTPTWHFADAVVGAVGRRQIVDPLKTRLKAGYAATTDRLDARRLADALRRDSVVGIYYPPLAIRELRELCRSRQALVRPRTALINQLRAVLLRQGVADARRLARTTDDGWLSTFAIPPRATASIATLREVLAVVRTTAGRVEAEVRRVAAADPIAQRLQALRGVGPLLAVMIRAEIGEVHRVPTGAHLASYAGLVPRVDASAGRIRYGRITKRGSPWLRGALIEAAVHGTRRSDRVGRWGRGLAVRTGALKARVALARVLCEEIHRHWTGIA

SEQ ID NO: 149354 - protein, 342 aa, unidentified
MKDTMIGVDLAKSVFQLHGASLAGHLKFRKKVTRVQLRHFMAKHEPAVVVMEACGSASYWAREMVKLGHEVRLIAPQYVRPFVKRQKNDAADAEAIVVAAQRPEMRFVEPKSEDQQACAVLFRARERLLHQRTELVNALRSVLYEYGHVFPKGIAHLRRIEAVLTDPASDLPALVRDECHDLLEQISEQTARIEAKTAKTRGLAGTNDTARRLQTMPGVGPQTALAISGFAPPMDSFKRGRDFAAWLGLVPRQYSSGGKERLGRISKAGQTDIRYLLIIGAMSRLTVLARKSIQEGSWLARMLHRKPLMLVAIALANKMARAIWAMMTKKEDYRDPARAVST

SEQ ID NO: 149355 - protein, 400 aa, unidentified
MLPHKSLDIRVSIDVGCYQHSVAVGLSTGELIDEFEIDHNQQGFDRFFDKIHDIESRYLAPVSVAMEGYNGWARPLDQHILSHGYTLFNINNLKLARFKEVFPSAAKTDAIDARKGLELFTLSDHLPLAKNCLQRIEKPDQINIKLKRYSRRRRRLVDEKVRIKGAMHSDLQSISPELLSLTKNIDQSWFLNLLTSVTELSQLAKKQQRSLAKIKGVGTRYLARIKEWQQVASFSEDISWVSPMLIEDAYKMLELRALIKSLDDTMEALCEASEIGRLLKTIPGFGKTSCAELAGEVDDIRRFESEASLAMYLGMAPLDNASGVYRGSKTPKQINRRAKKAMMTAVDRHRANVTESQVFYDKKRKQGKKHNQSVRALGRYLTKVIFKMLIENRAYEIRLI

SEQ ID NO: 149356 - protein, 315 aa, unidentified
MSYLHFFGIDVSKDHIDIAQHAKAAKPKRYPNSSEGFAAFWGDNETKLSESFVVLEATGGYETALLKALSKQGVAVSRATPLQAKHFIRSLGKIAKTDKLDAIALARYAFERHETLPLFVEKTHEIQGLSDLLMRREDYMAVKKAEMNRVKHPRYASLKQDVESHLAYVNEQIHIIETQIKKLVKTSLALTKKMDVLTSVKGVGAQTAYTLLGLMPELGELTRRQAASLAGCAPHARDSGKKSGYRQVWGGRHNIKTALFMASLSACRSNAQLSVFYKRLVLDGKKKMVALAAVMRKLIVILNAKLRDSKNLLPA

SEQ ID NO: 149357 - protein, 355 aa, unidentified
MDKLTTVGIDLAKEVIAVCVLDRHGAVVERRVLRRAAFERWAEELPPSNVAMEACCSSHHWGRWFAAHGHTARLIAPEFVVAFRKGGKNDTADAEAVAIAASQPTMRFVPVKSREQQAILGWHSMREGWKEERTALINRVRALLAEFGVVIARSADRLLADLPKLTEDARLPDPVQALLLQAREHLAALQARLAHCDAQIAAHARNSMIAQRAGQLTGVGPVTASALAATVPNAKVFANGRQFGAWLGLTPRQHSSGGKTRLGRISQRGNVYLRTLLIQGARSTLQSALKAEPAKTNRLQRWIIALCTRKGYYKTLVAIANKHARMLWAMLAKDENYDAAAWQRHPVYQQQVPIN

SEQ ID NO: 149358 - protein, 420 aa, unidentified
MEDAREVVHGVACGLDVHAAVIVACLVCSGPNGGPRYEERSFGTGLAALKQLRDWLVASGCQMAGMEATGVYWMPVHGVLEGKVPLVVGNPQHMKGLRGHKTDHKDAKWIAMLVRHDLIRGSFVPPPEFRDARELTRHRRQLLQARTAIRNEVHRLLARQGITFGTVLSNVFGASGMAILEALAEGRSVVEELPKLVHRSVKVKVPMLSAALEAPLADIPRYLLMTHLQRLEAVEEDIQAIERKIAAHLEPYREKLDLLQTLPGVSLTSACIILAEIGVDMTCWPTAKHLSAWGGVAPGCRESGGKTHRAGTRKGNPYLCSVLVECAGAAVKKKVCHLGGKYRHLAAQTGSKKKALIAIARKLLVLVYKLLGQNCPYEEPKPQELTDEKRKKAVQRHLQELAKLGVQVDMLPINPKTQPA

SEQ ID NO: 149359 - protein, 400 aa, unidentified
MLSIGIDVSKGKSTVCGMKPGGEIVYAPFEVQHTREGMSELVLLLHNSGEEVRAVLESTGSYHCPVVAALLENGIFVSVVNSLRMKRFCSQSIRKVKTDRIDAMQIALYGLAYWQELQPTKLPEDTYRELQLLARQYYQMTSLLIKAKVDFNAICDQVLPGMQELMNDHAGRHKLSDFVLRYRHTTHILEMGETRFRKDYCKWAEKKGYRNCERMAVLIFATAQNGIPVLPNAPSTQIVITEAIRVLRTVEASRDAILTQMQALAKTLPEYSLVREMPCIGDTLAPRLIAEIGDVRRFHSKRALIAYAGIDAPPYQSGKFCANNRHISKRGNRYLRKTGYEVMQSYVMHKPANDPIFTFIEKKRGEGKSGKLAMVAGLNKFLRVYYGKVTELYRSLPAIE

SEQ ID NO: 149360 - protein, 340 aa, unidentified
MKLYGAIDLHSTNNVTVVIDEQDRVVYQKRLPNDLALILKELSVYQSELEGIVVESTYNWYWLVDGLMEQGYKVHLANTAAIQQYEGLKYTDDHSDARWLAHLLRLEVLPEGYIYPRADRPVRDLLRKRSQLVRQRTTNLLSIQNLLTRNTGSSLSANQIKGLDGQQVDELLPNGDLALAVKANLSVMCSAEEQTELLERTVTQRVKLRPQFSFLKTVPGIGQILALTIMLETGDIRRFCSVGNFASYCRCVGSQKISNGKKKGKGNTKNGNKYLAWAFVEAAHFAIQFNSKVKSFYQRKKTKTKVVVAIKAVAHKLCRACYYIMRDRVAFDVSKAFGQK

SEQ ID NO: 149361 - protein, 472 aa, unidentified
MSEIGSIQPEPEFAAFIGIDWADQKHIWCLQAAGSAKRETGELEHTPEAVESWVAHLYQRFAQRPIAVAVEQSRGALVFMLSKYELLHLFPVAPQMASSMRQALYPSGAKDDPRDADLLLDLLLQHRNKLRRLSPDSEATRRVQNLVEERRKLVDEKTAQINRLTDHLKIYFPQMLEWFGRLDSDVVCALLERWPALEELQKAPPASLRAFFRKHRCRDREQIEHRMEAIRQGVPAIHDRAVIEAKSAAVRVIVRVVRVLGEGIEDLDGQIEEAAAAHPDFFIFNSLPGAGPVMAPRLLAAFGSQRERYRSADEVQSFSGIAPLTETSGKRKWVHFRWACPKFLRQSFHEWAGHSIAQSEWARAYYQQQRSKGNTHHEAVRALAFKWIRIVFRCWQDRVAYDEKHVLGRAREARLPAGRYRSYGENVVKRLWILGDCIVEADKKELDQLTQMSRITEKSCRPRASHRIMVGT

SEQ ID NO: 149362 - protein, 321 aa, unidentified
MTYIGIDVSKDSFVVAYSPDKNSKTKTFKNTTKGIHEFIRTISKEEHHCVMEATGNYSALLVYLLSEAGITTSLENPLKVKNFARAMLSTVKTDEIDARLIALYGEKMQPAPYKLRSDAILTLKQKRTVIRQLKKQLIATRNLKGSMEVLPFFDAKCKKSIDKTIAFLEKQIKDLEEDLASLAKSEYKKQMDLLTSVKGIGITLAAALIMATGGFTYFDNAKQLTRHLGLSPTYQQSGTSVNFKGHINRNGDSSLRSQLYVAAFASLRCNTECRAFYDRLRSNGKPGKVAVIAVANKLIRQAFAVVTQEKPYVDGYISSKK

SEQ ID NO: 149363 - protein, 364 aa, unidentified
MDPALGARWNLERQCLKKEDVMQVVRIGLDLAKYVFVVHGVDSHGKVAVRKTLRRDGVALFFANLPRCLVGMEASNGAHYWAAVLTDLGHEVRLISPQFVTPYVKSNKNDRNDAEAICEAVSRPSMRFVPPKSTDQLAIQAVHRIRRRLIGDRVRLVNQIRGLLSEHGIVIARDISQLRRRLAVILGNDNDGLSEMVRSLMRDLQKEITDLDDRIAIYDRRIREIFRTSEQCRRLSKIEGIGPVTATALIAAAGDRTCFKNGRQFAAWLGLVPKQRSSGGRARLVGISKRGDRYLRTLMIHGARSALSRSSGKQDPRSLWLGKLRQRRHPNVAAVALANKNARIVWSMLSNDAAYQPALSLKAA

SEQ ID NO: 149364 - protein, 405 aa, unidentified
MNCVGIDVSKGKSTVTIRKPGDVVLMSPCDIPHTQSAINDLIKQIKSLEGETKVCMEHTGRYYEPVATWLSDAGIFVSAVNPILIRDFGDDSLRTPKTDKADSKKIARYTLDRWAKLKQYGIMDKTRNQLKTMNRQFGFYMAQKTAMKNNLIALIDQTYPGANDFFDSPARNDGSQKWVDFIHTYWHVDCVRSKSLNAFTEHYQNWCKRKNYNFSAEKAAKIYQISSDLIAVFPKNDITKMLIWQAVALLNTASKTVESLRSKMNELASTLPEYPVVMDMNGVGATLGPQLIAEIGDVSRFTHREALTAFAGVDPGKNDSGKHIQNSVRTSKKGSPYLRKTLFQIMDSLIKRSPVDDPVYAFMDKKRSEGKPYYVYMTAGANKFLRIYYGRVREYLSNLSNNETI

SEQ ID NO: 149365 - protein, 341 aa, unidentified
MAEVVTIGLDIAKSVFQVHGIDAAGAVVLRRQVRRAHLLLFFAKQPKCLIGIEACASAHYWGRELSKLGHQVRLMPPSYVKPYVKRQKNDAADAEAICEAVTRPTMRFVAIKSPEQQSVMVLHRVRMMLMRQRTQLSNAIRAHMAEFGLVAPIGREGLQNLIKLVETSDVRVPEEASACLQLLATQLKLLNSQILATDRRIRTSARATETGRRLMGIPGVGPLLASALVATVPDPKAFKSGRNLAAWVGLVPKQNSSGGKERMGGITKQGDRYLRQLLVVGALAVVRYAQRHGARRPWLVQLLSRRATRVATVALANKTARIAWAIMTSGESYREPMVQAA

SEQ ID NO: 149366 - protein, 367 aa, unidentified
MKQQTSATTETSIKGRTIIDYTGKTICVGIDTHEKDYQVAKVINGICLGNHRMKASPQELIEHLQSHYPGAAFKCVYESCAWGFNLQRQLQQAGIECIVVHAADVSTTDKEKRRKTDKADALKLARELESNNLKAIHVPNEDLQKERNLIRFRKRLKGDLNRSKNRLKSLLKYQGINIPAQFGKACWSHKFMNWIEQEAKKDILLQDTLLLMLEEVKQLRELLLKTEKKLQELMKRRYEQKATLLMSTPGIGRTLAMLFLLEIGDINRFKGFDPLNDLIGFCPDTESSGDTERDRGITTRRHKQLRSGLLQAAWRAIRIDPALLEAYQQLAKRMKPHQAIIRIAQKLLRRIRAVLISGIPYQKGVIA

SEQ ID NO: 149367 - protein, 340 aa, unidentified
MKQVTMIGIDLAKRSFQVHGAQADGSVAFRVKLSRERLLNFLASQPRCTVAMEACASAHYWGREILQLGHEVKLIPPIYVKPFVKRQKNDAADAEAICEAAQRPTMRFVAVKTEEQQARGMLFRTRDLLVRQRTQTINALRGHLAEYGVTAPQGPAHVCRLARAVEDPDSGLLEPVRELGGLLLAQIAELEVKIAGLETDLNACARQDEEAARLMTIPGIGPVTAMALQAFAPPMEGFQRGRDFSAWLGLVPRQHTTGGKPRLGKTSKMGQRDLRRLLITGAMTVVRGAVRRGVTTDPWLARMLARKPRMLIAVALANRMARIVWALMTTRENYRVPVAA

SEQ ID NO: 149368 - protein, 409 aa, unidentified
MLFVGDDWAEDHHDVELQGPAGRRLARARLPEGVVGIARLHELVAAQLGADDGPEQVVVGIETDRGPWVQALLAAGYQVFPVNPRQVARYRERHGTSGAKSDAGDAHTLADMVRTDRHQLRAAAGDSDLAEAIKLLARAHQTLIWDRHRHLLRLRAALVEFFPAALTAFPDLAAADALELLAAAPEPTSAARLSRTRVAAALTRASRRGVPAKANQIQQALRAEQLPQPETVVAADAATVRAAVAVIGTLNAQIAALAGQVEAHFGGHPDAEIYRSQPGLGGVLGARVLGEFGDDPGRYRDARARRNYAGSSPVTKQSGKKKVVVARFVRNDRLADPLHQQAFCALTASLGARAYYDQLRARGTGHHAALRQLSNRLVGILHGCLKTRTLYSEETAWSHRTSDAATAAA

SEQ ID NO: 149369 - protein, 340 aa, unidentified
MYYLGIDHHKKYSQVAVVDEKGKVRSNGKIANEKKAFILLKEYYKEPCRAVIEAGRNWGMMYDLLEELDIKTVVGHPLKIRAIADAKIKSDSIDAKTLAHLLRADLIPQVHVPPKEVREQKNLLRHRLWLVRLQTMTKNRIHQLIDRNHVKRPKVKNIFGVAGRTFLKGLTLSPIDQELLKDHLELLDNLHQHIRKTEVWIGKELKDNPLMRILNTLPGFGKVLSALAALEIDNINRFRTPAKFASYSALIPSTFASGGKVYHGDLIPGGNRWLKYVFIEASWVSIRTSTYCRFYFEKMKERKDSNVAIVALARRLSEIAYRCLKEKRVYEERPYMPYTR

SEQ ID NO: 149370 - protein, 365 aa, unidentified
MTKSIRKTKGHSIEVDWSTVVAIGIDLGDRVSQYVALDAYGERIGEGRVPTTAESFKTRFGSIGPKDVAIETGTHSPWSSRLLKRLGHRVTVANSRRLRLIYENRKKNDKVDADYLARLVRVDPKLLHPVEHRSEDAQQRIILLRSRDALVKTRSRLITFVRGVIKSMGVRLPSCSSEAFVKRSRPAVPESVQAIVEPILSTLERVGAEIAAYDRQIEKLANDDRDAQVLMQIPGVGALTSMTYMATLGERDRFRRSRTVGAWLGLVPAEHASGQSNPQQRITKEGDGYLRSLLINCAHYILGRYGPDCDLRRHGEAIAARGGKNAKKRAIVAVARKLAVLLHRLWCTGAIYEPLRNALSPANAA

SEQ ID NO: 149371 - protein, 374 aa, unidentified
MEWSGRAPAPPAREAGKGTKDEEHAMSAKFNSEIAVIGIDIGKNSFHVVGLDQRGAIVLRQKWSRGQVEVRFSNLPPCLIGMEACVGAHHLSRKLTSLGHDARLMPAKYVRPYSRGQKNDFRDAEAIAEAVQRPTMKFVATKTAEQLDLQALHRVRERLVSQRTGIINQIRAFLLERGVAVRQGLRFLRAELPRILARPCDALSPRMLRVIEDLAGDWRRLDERIEGLSNEIEVLARQDAGCERLMSVPGIGPIISSAIVAAIGGGDVFSKGRDFAAWLGLVPKQISTGDRTILGKISKRGNRYLRVLFVQAAWAVLIKPKSWARHGLKPWLEAAKKRLHHNVLAVALANKLARIAWSVLAHGRVFEATKIQAA

SEQ ID NO: 149372 - protein, 354 aa, unidentified
MNHLNEEGESEMNPTTIGLDIAKNVFQAHGVDRNGKVVLRKRLSRGKVLEFCVNLPPCLIGLEACPGAHYWARELLKLGHTVKLMPAQYVKAYLKGNKNDGNDAEAICEAVSRPGMRFVAMNTEAQQDIQMLHRIRSRLVADRTALINQIRGLLGEYGIVFGQGPGQVRRGVAVLLKREDPRLSGMARELLADLQTQLRELDERIGHYDGRVKAACVGDVRSVKVQALPGIGPLTATALVAAVNDGKQFQNGRRMAANLGLTPREHSSGGKQRLLGISKRGNTYLRTLLIHGARTVLRHATGKTDRLSRWAVAIQARRGANVAAVALANKLARIAWAVLARDRSYRADGAEQSV

SEQ ID NO: 149373 - protein, 341 aa, unidentified
MPGPRARIRKVGQPDIPSTSRKEPVKSESEVFVGIDVSKARLDIHVLPSHQAWSTANEGPHLDALVARLAALKTTLIVLEATGGLERRALALLLAAKLPAVAVNPRQVRDFAKATGHLAKTDTLDAAVLALFAERIRPEVRPPLDEQTQELDALMVRRRQVVDMITAEKNRLAAAPPSKRVVRAIRKTISCLQKQLDEIDTDINSAIRNSPAWKAKDDLLRAVPGVGKVVARTLLAQAPEIGSLTRKKIGALIGLAPLNCDSGTYRGRRRIWGGRAQVRAVLYMGTLSAIKHNPVIAAFHARLIAAGKLPKVAIVACMHKLLTILNAMLRSNSPWSPEISS

SEQ ID NO: 149374 - protein, 338 aa, unidentified
MTIVAVGIDLAKNVFAVHGAGASGKPELVKPDVKRKKLLELIASLPPCLIGMEACSGAHYWAREFQKFGHTVRIMAPKFVAPYRLGGKHTKNDAADAAAICEAVTRPQMRFVPIKTLDQQSHLFIHRAHQGYVAERTALINRARGLLSELGIVLPQAYKAFKQGVHQVLEDLPGYCNQVIGDMLSEIAHLDERIEQDAKLIAKLAKEGEQSRRLMQLSGVGPTTATAIVASIGKGHDFRNGRQFSAWLGLVPRQNSSGGKTKLGSITKAGDSYLRMLLVLGARALLLSAPNKTDPVSRWALQLKERRGYSKAVVAIAAKNARMCWAVLSLGEGFRVPA

SEQ ID NO: 149375 - protein, 363 aa, unidentified
MVQNIYVGLDVHARTVVASARHGDTGEMWERYFPADNELVTEWVCSLPGVPQVVYEAGPTGYGLARTLITRGVHCVVAAPSKLLPAPGNKVKTDIRDARHLSTLLSVGAVTAVRIPTVDEEIARDLSRAREDARQDLTRAKHRVSKLFLRHGVTWDKDSAWTKQHVGWLARYRFGDPVLDMVVDTMVGQVLEALQRRDQLDKQIHEYAMNSVWTPVVIALGCLRGVSVITGFGLATEIGEWTRFSATSIGAYVGLIPSEHSSGESRHHGGITKTGNGHARILLVESAWHHRPTYRRTSPVLQKRWAKAPQRLVEHGHHANTRLHRMWVGFDKRGKNTALANAAVARELAGFCWDLATMTGEPS

SEQ ID NO: 149376 - protein, 367 aa, unidentified
MTKVRTWVGLDVHAAKVVACVVDAESGEMSVRRLPGDTTKVVSFCAGLPGPTRVAYEAGPTGFGLSRALHAAGIGCVIAAPGKIERPAQDKVKTDRRDAERLVRLSMIDSLYAVQVPTSEEEALRDLVRAREDLRGDLMRARHRMGKLLLRHDVRYDGTSDTWSHRHRQWLSMVRLPERGAQATLLDYLGAIDALIIRRDQLEATIAELAPLSPWAEAIARLRCMRGIDTLSAVGLCAEIHGFERFEHPKQLMSYVGLVPSEHSSGQTRRQGAITKSGSQHARRLLVEAAWHYRHPPRLGTRLKARQVDQPATVIAIAWKAQQRLHQTWRRLDTKRRKRKTIVAAAVARQLAGFCWAIVTTETEHTT

SEQ ID NO: 149377 - protein, 400 aa, unidentified
MRVDVFVDRIAGIDIGKAALSVTIRTPQPGSGRRRQVTRTYTTMTNALSTMADWLADEGITRVVMEATSDYWKPVYYLLEAAEVFEVWLVNAQHVKGVPGRRKSDNIDSVWLAKVGECELVRPSFIPPQPIRELRDLTRYRTGLVRDRTRAAQRLEKILEDAGIKLTVVASEILGVSSRAIIGALADGEREPHLLAELAKARLRGKRGELVEALTGRFTDHHGFLCRQILEHITELDDRIAIMDTAIEKATEPYQPRIAQLITVPGVSEITARRLIAEIGTDMSVFPTAEHLTAWARMAPRPRSSAGKTRHGSTGKGNRYLAGVLGEITATVARSKTFIGARHRRLAARKGKRRAIIATSRHLLVIFWHLLSDPTGTASFHDLGPDYLSAASTPPNAPAA

SEQ ID NO: 149378 - protein, 310 aa, unidentified
MDKFAGIDISKDSLDLCIEPDSEVLHIAYDDKGIAQVVKRLAQVAPTLIVMEATGGLEMRLASELAAKGLPVAVINPRQARDFAKATGQLAKTDLVDAAVLAAFARAIRPAVRPIKDVDTRELDDLVTRRRQLIDMRVQETLRLGTASKVQRKSLAGHIAWLDKCIVKLDDDLSKRLRASDAWRTKDDLLQGIPGVGAVTTLTLLAKCPELGALNRRQIAALVGVAPRANDSGKHRGKRFVWGGRADVRAVLYMATISAIRCNNDINAFAQRLKQAGKPAKVVIVACMRKLLTIMNAMVKNNTQWTPKTA

SEQ ID NO: 149379 - protein, 359 aa, unidentified
MTTLTKIERFFKETNFSADDQLFVGVDVHKKSYHVALYLNDAPSIDFVMPANKEQLSQTLKPTRPALRQVAYETGFSGYGLARCLTKDHLPVSVAATSKIPRPSAADDKTDKLDSKKLAEYAAKGLLKPVAIPTLKQEADRQLYRMRHRQSRNRAKVKVQIKSFLMMHDIAEPVGLSHWSQQAVTSLRAVPLRKTLRLSLDELLSDLDYYTARLKSLGQALVEHLDKGTLARRMALLKTHPGVGTVVACQFATEMFHYRDFNSTREVFKYLGLAPRIHQSGEHAIRGSINKLSNSRLRSNLNQAAWRWVAMDVNAKKTYLRILNNCGGIKQKAITAMTRKLSGHLWMMLIKDQPYDPTK

SEQ ID NO: 149380 - protein, 345 aa, unidentified
MKIVGCDLHTRYQQIAMLDQETGELIERRLEHESGEARAFYAALSSPVRVGIEATGHTRWFERMLAELGHELWIGDAAQIRASVVRKQKTDARDAAHLLELLLSERFPRIWRPTMAERDLRQLVWHRQKLVWMRNAVGNQLHALAMGEGVCRKKKLFTKKGRVELQSLGLGVWASYRRQGLLTMLDQFDASLKEMDDAVAEQAEQNAGAVLLMTHPGIGPVTSLAFVLTLGPVERFERSKQVVSYLGLNPREHSSGGRQRLGAISKQGNPMMRSLLVEAGHTAARLDGELRQDYQRLKLRRGSGVAKVAIARKLAIRMYWMLRGQASYAQLVRMQGSPWATLVTE

SEQ ID NO: 149381 - protein, 315 aa, unidentified
MQTPLDIGADISKDYVRVSCATGSLPSIGLANRRASLLAWLKRLPAGSRIGMEATGTYHELLATLAHRLGLVVYVLNAKHVHHYAQATAQRGKTDRVDAELIARYVAKEHSHLHIWHPASPAQRQLQRLMRRRGKLTRARAALRSTLQGVPSLRTDVRVLLKHFDALIAKLDTQARALLKASVEREQAFQRLDAIPSVGSAVGIGLLAALERWSLPRADSFVAFIGLDPRPDDSGKRSGRGRLSKDGDPELRRLLYTAAMSASRTRVWAPVYQRALARGLSRIQALVILARHIARTAWSVYTHKTQFDPARVHSS

SEQ ID NO: 149382 - protein, 435 aa, unidentified
MSSRAYRATRVNDVNWEQIARGKEGLGVTLGVDVGKFDVLVVCRWADGRFERPWRIKNPWEIATLVALVRQVKADRQLVVAMESSGTYGDALRQALRDNGIEVQRVNGKAAHDYAEVFDGVPSQHDGKDAAVVAELAALGKAKPWAYQAADPWEEELTYWVEEMVAQRQMVTLWQGRLEGLLARHWPEASQVLKLSSGTLLRILKRYGSPQALALDAEAAQQLARWGRSLLSPEKIEELLAGARSSVGVRMGQWQQRQIQEYAERALAARQQSDRAQRRLSQLAVGHPVLQAQGKVVGVSTACVLWVSTGDPRRFDSAAAYRKAMGLNLVERSSGTYQGTLRISKRGSARARQWLYFAAMRLVQKCGVRPWYEAKKARDEGDARRVLVAVMRKLAVALYHVGVRGEEFEPRRLFGRIGRGGGKSAECSVASKGPA

SEQ ID NO: 149383 - protein, 271 aa, unidentified
MKLHVIGIDLGKTIFHLVGLDSAGRVVIRKRCSRTQLLAFTANLQVQLIGMEACSGAHFLGRALREQGHEVRLMPAQYVKPYVQTNKSDYLDAEAIAEAVQRPRMRFVSIKTEEQLDLQGLHRVHERWVMRRTAVVNQIRSLLLERGLTLPKGRSHLEEQLPRILEDAALRLSGSFRVLLAQLKLGLEQLAARMEQMDRVIQRTAKENEACQRLTEIPGVGMVTATALIAAVGNASAFGKGRKLSAWMGIVPTEYSTGGKQKLLGISKRGN

SEQ ID NO: 149384 - protein, 433 aa, unidentified
MVNQEPEIRGCWVLGVDCGEQKHRFVMLDESRARQGALWVTNRMDKVRDALLKMLIKLPEGYELEIVTEGLRSIGGMLMQAATELGLRIYQVNPKALDSYRSVEGQPRKDDDRDAELLAKMRLNTAQGCRLALDTRPQERVLCRLTRLHTQLVGQKRQAVSRVRSRLLELSPEVVDPQWDGPGYSSTGMRMLLERWPGFEGMEKTRASTVERILRPVTRQGEACTKMAKAVLEMACRITLGAQERGVISMELDMAMQQLRLTETSLAKVDGEIKTAVEAHPKGRNLLEMSGVGRYTAGVLIGEILPLARNQSEGKAATYAGITPLSRRSGKNEGRSKLARGVNKHAVRAVYLSAVSARQCSALDSAYFQKQLERHKGHPKPHVKSFLSLARQRFKVMYKILTTDARYDKETLIRSHLKRQELERTKKTDHLIA

SEQ ID NO: 149385 - protein, 427 aa, unidentified
MEEVTDEPLYRDRVCGIDIGKAGMAATIRVPSDANPPRRAQETRSFGTTKREVLALADWLRSWQVPAVVMEATGDYWKPVFYRLEAEGFECVLADAKQVKHLPGRPKRDPSDSRWLAACFERGAITSCFVATPEFRIIREHTRYRRDLTAERTREKQRAEKLLESAAIKLSSVVTDLHGVTGRDIMDHLIAGERNPKVLAQLARARARRKISELEAALEGAEFFTPQLAALLARMLARIDQLNASIGELTAVVETLLEPYEEQLQQAESMPGWGRRSAQDVVAGTGAGMTRFRTGGHLASWAGRTPLDNQSGSRSGRAKSKKGNRYLAAITGETAVAAGKTQTREGARYRRIARRRGKPKAGVALGNTQLKVYHKLLSTPGMRYEDLGVDYYDNRASTRRQVRALQKRASELGYTLVPDLTGCPEIA

SEQ ID NO: 149386 - protein, 351 aa, unidentified
MVTVGLDLHKRYITACALDAAGTVLAEHRRLEPSLDALGRWLGGLPQLVTVVMEATLYWHWLERQLTARGFAVRVAHPYQVKLIWQARTKTDPIDARKLAELARVNLLPAIWIPDPATRGLRQLLRGRVFLVRQRTVMRNRIHAYLTAENLRCPELDLYSKAGQAWLATVDLPAVVRAQVTLVLANHALLTTQIQALDRHIKQTMRRDATARRLQTIPGVGPFGALLLQAEIGPIARFGSAQELAAYAGLVPSTRSSGDKTRHGRVGRGNPWLKWLLIEALQTLKLAPGPVGDHYRKLLRAKGKPKATVAAARKFCTYLYWMLKEEWSYTEWLRQHDRSEVRPMQPLGSAA

SEQ ID NO: 149387 - protein, 355 aa, unidentified
MSQEKYIGMDVHQATISVAVMDAAGKLIMECLLETKASTIVEFIQGLQGTLSLTFEEGTSAAWLHDLLKPHVSQLVVCDPRKAALLKEGNKSDRIDARKLAELLRTNQLKPVYHERHGIRALKELGRSYLTITKDVTRVMNRIKALYRSWGIPCTGSSVYAPSHRAEWLAKLVEPGVRVRAEHLYQQLDSLQPLRLQARRELLRESYQHPAVKLLHQIPSIGPIRAALLVALLQTPHRFRTKRQLWAYSGFAVETHDSGEYRYVRGKLQRNRERITVRGLNDNHNKDVKNLFKSAAISASTRPGPLRDFYVARVEKGMRPTMARLTLARKIATITLTMWKKGVGFDPQNLHRQAA

SEQ ID NO: 149388 - protein, 386 aa, unidentified
MSESTVTTNVQTTSSSAVLMLAFELGEESWLLGFSTGLGQKVLRRKLASRDTKTLLNEIARARKKLGLGREVRVVSCYEAGRDGFWLHRFLEAHGIENFVMDSASIEVNRRKKRAKTDRLDVVKLLGLLARHLAGEEKVFSIVTVPSVADEDLRQIGRELKLLKKDRTRVSNRMKGLLANQGLGIDRRKDLGEQLERLRLWNGEPLPAHLRERLEHYAEDFAYHTQRIRCLEQKRRELMRARESAVVEKVWRLFSLRGVGIESSWIYATEFFGWREFNNGKQVGSLAGLTPTPFDSGTKAREQGIGKDGSRWVRGVAIEQAWGWLRFQPESELSKWYARRFGHGSKRLRKIGIVALARKLLIALWHWVEHGVLPEGAVLKTDLRLA

SEQ ID NO: 149389 - protein, 342 aa, unidentified
MKHTTISVDLAKSVFEIAVSEQPGRVSERRRLSRARFLRFFAERRPAVVLLEACGSAHHWGRQIQALGHQVLLLPPHATRPYVTRSKTDRADAKGLLEAHRNEAIHPVPVKSPEQQALTALHRLRSRWLATRTARLNTVRGLLREFGIAIPLGARNVVPRVRQLVDEIESTLPELLRPVLLEACTEIRQLEQRLVAVERQLKRAARQTPVVKQLLAIPGIGLISATALVGFVGDVQRFPSGRHFASYLGLTPREHSSGCVRRLGRISKYGDVYLRMLITHGARAVLWAAKRRKPTDRLRVWALKVEALRGHNKAAIALANKLARIIWAVWKNGQVYREARAV

SEQ ID NO: 149390 - protein, 374 aa, unidentified
MADYSEVFVGIDTSKLRNAVAIAEGGRNGEVRYLGEVENTEAATSKLVKKLAAQHRRLTFCYEAGPTGYGLHRLIKTLGHECVVVAPSLIPRKPGDRVKTNRRDALNLAKLLRAGELTAVWVPDARHEAMRDLVRAREAAVDDLKSKRQQVLSLLLRLGRHFTGKRTWTRAHMNWLVSQKLAHPEQRIAFEEMLLAVRQAGERVSRLEQAIVAAVPDWSLAKVVTALMAVRGLDLISATIFLAEIGELSRFASPRQLMAYLGLVPGEQSTGDRVWRGGITKAGNHRARRILVECSWSYRHPPRVGKKKLAKVEAAPPAVQEIAWKAQARLTARYRALARRGKRPTLVVTAIARELSGFIWAVSRAAGTPAPSAT

SEQ ID NO: 149391 - protein, 341 aa, unidentified
MSIVGAFDVHRRQLTFDYLDTVTGEVKRGRVVPADREHLRAWLGRVPGCDDVHFALEGCTGWRYVVEELAAAGITPHLAEPADTAALRGRKRHAKTGKTDSRHLRVHLAAGDLPECWIPPAHVLEARAVVRLYKDLLDERGAWHQRIAATLFHQGVPVTASMSTAAGRAAVTEMDLSAAGRQAVGTGLRQPGRLTAELDPIRRQLDMISRRQPGCRALRATQFGVGAVTSVAIWAELGDVRRFPSSSDVVRHTGLDITVYSSDGKRSAGHLSRQGPQLLRWALYESAKCAARPAAPDYGYYTATRDRRTGGLATLPVARKLARRCYHTLRELGEEAIAPAA

SEQ ID NO: 149392 - protein, 386 aa, unidentified
MQRSTVDTPTAAHCGTIFVAIELSQRSWLVTLHSPDKDKISRHQLESGDHAGLLALIDRMRERAVRALGREPAVVSCYEAGYDGFWLHRRLLAAGITNYVFDPASIAVDQRARSAKTDRIDGERILRTLMAYLRGEPRVVRIVRVPAAEQEDARRATRERDRLITEQTAHTNRIKALLRLVGMAVGNPRRRDYLAWLAAQRDWQGQALPPRMLTEIKHEHARLMLLREQLAELAQPQAETDLSPAAAQMAERSERLQRLKCLGPAFSTKLTNEVLYKDFRNRREVGSYVGLAPSPWKSGGIDREQGISKAGNPRARCATIELAWLWLRHQPDSKLTQEYRRRTLGASKRIRRIAIVALARKLIVALWRYLTTGLVPEGAKLKAVEM

SEQ ID NO: 149393 - protein, 428 aa, unidentified
MNEVERVRLEGFRQLNKEIRGSKEHLIVGIDVAKEKHNAFFGTATGKTLLKRLVFGNDIKGFQRLLTYVEAVKIKHGLEKQVFGLEPTANYHKPLGEYLIKCGLDVVLVSGVSVKRNRELLDGRWDKHDTKDSANVADLISQGKCLFYEYPPMALRDLRNLLSLKRRLKKQEHGLKVRIRNHLLARYFPELDRYYGRSGSEGLAIVRWCLNPSVIAGLEYEQFVGLVAPGSRRIVQHKRLKAIWLKAVDSIGCDVGEAVEFEAKVMVEGLKEIRQAISATNDKIEDICLQFAEYSYLLTIPGFGPDVSSKVLGAIGNPFRFNTQKQVLKMAGMDLNAQRSGNRSDAAIPVISKKGKADLRYALYQAALVASTKDLNFIVYYTNTLRGREREKGIKIKMRVKLAAKLLVIAWTLMKKKEPFDPDYLNIE

SEQ ID NO: 149394 - protein, 342 aa, unidentified
MEEVVTIGLDIAKSVFQVHGVNSAGEVVLRRQLKRSRMLPFFAKLSPCLVGIEACNNSHYWARELSALGHDVKLMPAQYVKPYVKRGKNDAADAEAICEAVTRPTMRFVAVKSPEQQSLMMLHRVRLMLNRQRTQISNAIRAHMSEFGVVAPVGRLGVDRLLAVIEDHEDDRIPEDARICLQMLAAQLAVVKRQILENDRRVLASARRTELGRRLMDIPGVGPLLASAFVASVADPTVFKTGRDLAAWIGLVPKQNSSGGKNRLGNITRAGNRYLRQMLVVGAMAVIRYAERHGTNRPWLVQLLARRPAKVAAVALANKNARMVWALMTSGERYREPQAIAA

SEQ ID NO: 149395 - protein, 342 aa, unidentified
MKFYCGIDLSARDCHVCVIDEQLKIVVQQKLRNELVKICQLLGPYKAKLKIVVESTFNWYWLIDGLQAEGFEVVLAHTLGLYLITGAKVKTDRRDAYALAKLLLVGAVPAAYIYPVETRPVRDLLRRRLHLVQVRAGEYGSLRRLLLRQGILSSKQQEIKTATEAELEQWFEHPLVRLHASQELRRIELYSQQIGELEKTILALAQTAPSYELLLQLPGVGQTIALTILYEVGELTRFANVKVFSSYCRVVPGIAQSGQVSRRGRASKQGNHYLKAAFSQAAVHAVRCYPKVRRYYERQLKRHQGRGRQMICYNIIAHKLAQAAFHVLKEQTEYREELLFGR

SEQ ID NO: 149396 - protein, 342 aa, unidentified
MREPHYIGIDLHRRRFTCCVRLESGRNYLSTWNLEQLPQFVKKLRPRDEIAVEVTGNTRLFYEAVRPHVARVVVVDPNQFQVISHSVKKTDPNDARSLALYLAKGLLPEVRMKEKAQAEVASLTQTRDRLVKLRTALKNKVNNLFSARGIEIAKEELSSEKGLCRALEHTLEGLAQVELQIIVEQIRSLNRSIGRLEQVIKEAAQKLPGFTNLTSIKGIGVLGASVLLSVIGDVKDFQEEGKLASYFGIVPRVQNSNETEHSGHITKRGTKLGRTTLVQCALTAKRYSPYLDRYYERIRSRRGTGRAIIALARKFLGIIYHTLKNHWVFEDFPNFVLADIKT

SEQ ID NO: 149397 - protein, 372 aa, unidentified
MESVNYSAYVGLDVHKDTIAVAVASPERQGEVRFYGNISSAKDAVIRLMKKLIKLHSTLLVCYEAGPTGYGLYRLLLSMDIECVVVAPSRIPKISTNKIKNDHRDAVALARLLRAGELVDVWVPDMTHEAMRDLVRARSCAKKDTKVAKQRIQSILLRTGKKYEKKMWTVRHRVWLANQSFPLASQQIAYEHYRQSLEQIENRIEQLDQEIDRLLPNWSLYSLVNQLQALKGVGRTIAISVVAELGDFSRFSNPKQIMAFLGLIPGEHSSGSVTRKAGITKAGNVELRRLLYEAAWAYRNNAKVGSWLITNRPDSVCQEAKDISWKAQQRLCFRYRSLVAKGKKSQVAITAVARELLGFMWDIAVTTRNQSA

SEQ ID NO: 149398 - protein, 362 aa, unidentified
MPDNTLLVTGGVDTHKDFHVCAALDERGRVLGTEQFPTTLHGYRELLDWLREFGQLSAVGVEGTGSWGAGLSRFLTQAGVEVIEVNRPNRQTRRRRGKSDLADAEAAARTVLAGDAVGIPKSASGAVEAIRLLRIARRSAMKARTQAANQIHSVIDTAPEELRSKLLGLNERERITKASKMRVGDASVPLGAAKLALVCLARRWIMLTGEVTVLDKQLTELVESTAPSLIAIKGVGIETAGALLAAAGDNPTRLRSDRSFAAMCGSSPVTASSGRRQDRHRLNRGGDRQANCALFVIVLNRLSWHQPTKDYMAKRTAEGKTKKEIIRCLKRYVAREVYRAIMLDMTEQDAPLETVQTFQQAA

SEQ ID NO: 149399 - protein, 316 aa, unidentified
MATYAGIDIAKRGFDLAFEPKRKVQHFDNNAKGIAQCCKLLKRRQPELIVMEPTGGYEVALVTQLQAAGLKVAVVNARRIREFARATGRLAKTDKLDAEILARYSAVLKPKPQEPLDEQSRTLKALVARRHQLVTMHTAEANRLEHASNTGVKESLDTVLKTIEDQIETIEQQIAEQIESRPELKNKTRQLQSTPGIGPTTAALLVTELPELGRLNRRQIAALVGVAPINRDSGTYRGKRMTGGGRRDLRARLFMPMLSAIRFNPAIANFYRRLLDKGKAKMTAVIAAMRKLLTILNLMIATNESWDPEKACPNHA

SEQ ID NO: 149400 - protein, 337 aa, unidentified
MKFCGIDLHSNNSVVVVTDETDRVLVSRRCPNELTPILSLLEPHRAELIGVVVESTYNWYWLVDGLKAAGFEVKLAHPVAMKRYDGLKHADDKDDAAFLAHLLRLGILPTGYIHPPQERALRDLARKRIQLVRSRTQHILSVENIMARQFGQRLSCNEVKGLSATSVDRLGLPTDVALAMKANVAIVQALQTQIDFLEERLLHEARLRPEFSLLKTMPGIGEVLATIIMLETGNIERFADAGHFASYARCVKSAHYSNGKKKGEGNAKNGNAYLIWAYIEAANFARRFSEDAKRFFEKKKAKTNAVVATKALAHKLARASYHILKERQPFDARRCFA

SEQ ID NO: 149401 - protein, 387 aa, unidentified
MPEDAPRPAQAAIRTDLGAIFVSLELSRRAWLVTSLSPGGGEKMSKHSVQAGDIAGLLRRFAQLKEKARARTGRDFPVITIQEAGLDGFWIHRVLQSEGIESHVVDAASILTSRRRRRAKTDKIDGETLVRTLLAYKRGEPRVCSMVKSPTPEEEDRRRICRERRALVAERVQHTNRIKGLLFAQGAFDYEPLKRNRRAHLEDLKTGDGRPLPVNLKAQISRELDRLEVVLQQLQTVEAERDALLEPASEASPAPAAMLSQLKGIGPEFATILYTEGLFRGFDNRRQVAAYAGLAPTPWQSGSVDHEQGVSKAGNPRLRTTMIQLAWLWLRHQPDSALSRWSQDRVQRNGGRMRKTTIVALARKLLVALWKYATSGVVIEGAVLKAA

SEQ ID NO: 149402 - protein, 314 aa, unidentified
MNASEKKYLGIDVAKESICAFLSPTKEVWDVKNEPCEISKWIKTLPEDIELAVMEATGKLEELVAAQLNNAGIPIKIVNPRQIRDFAKCIGRLAKTDRIDAEVIAMFANAVKPDPQKLPNEMESALKELVIRRLQIVDLIVEEKNHMSSARSKFVKKDVQELIRQLEKRLNDIESRIKDMIRQSPAWCEKVKILTSVSGVGPITAFTMIAIFPELGALTGREAASLAGLAPMARQSGKWKGKFFTQGGRKHVRSSLFMAALSASRYNPVIKVFYARLLANGKPRMVAITACMRKLLTILNALLRDQSMWRLAKI

SEQ ID NO: 149403 - protein, 615 aa, unidentified
MTTLLSEPVHLGVGIDTARYGHFVSFMNAERELVAPGLSIAESADGYERLKKQLDKLRRKYPDVHFHVRIDAGGQYATNLEHFLRASDLPLTLSIGEPKRNKDYHRAMSPKRKSDASESQAMARFAVVERPAETPATPQEIYILREIASRLESQVKTATQAVNRLHNLLSRVFPELANITANIAVGWVLKLLDKYPTPARIERAALASLEKIPYLGSDKAKKVQAAAGRSVTSLGGAVAEQLVRQAVAEIAHAQQGQQTLEKLLSEAYEALPESGHLQVATIPGIGQVTAAVLVAKIVSIDRFATPENLVGYFGVFPEEHSSGVDRNGNPRRRSMHMSRKGNDLVRRYLFCAAKSAITHNPAVKALYARLRARGTRGDVALGHCMRKLLHLVFAVWTTDRPFDKNHYRWEFPAENLAADTTTKSHAAQQEAAGPRRDVIPANKEVTAAEVSIDGTAESVNLQQADARNAELHGNPKCRTRGSIDYAYLRSQITIEQVLRQMEHLDRLRGGVQRTGPCPLHGSDREKSRSFSVNLEKNVFRCLNPTCAAQGNALDLWAQHCGLPIYEAALALADTFDLEIHPDREEATRNSAPHHQRSVTAGSETKTLGVITPEAT

SEQ ID NO: 149404 - protein, 438 aa, unidentified
MEHVIIGVDPHKLSATIEVVDGQEKLLGSGRFTTDQAGYAAMRTYARAWPDRVWAVEGANGVGRPLAQRLLEAGEHVVDVPAKLAARVRLFDTGHNRKTDARDAHSIAIVAVRTGGLRVLKVDGELEALRMLTDRREALTRRRVQTVNRLQALLAELLPGQAKKDISALQAKAMLAGVRPRDIAGKTRRRIAGEELAELIAVDAKIKKATAELKAMVLARRSRLMDIHGVGPVVAARVLADVGDVSRFADRNRFASWTGTAPLDASSGEQNRHRLSRAGNRRMNHMIHIAAVTQLRLDTEGRAYYRRKRAHDKKPMEAMRCLKRRISDAIYRQLVADAQRATLAASGDAGPGGHCGATQESSAVDLPPHIDTSDQPLPGPARPTLPGTRTRANPHTGGSAPRPTRRRARAVKVERPTGRTTLTATSVGAHSKAPKRRP

SEQ ID NO: 149405 - protein, 408 aa, unidentified
MRVIGLDVHRSMAVVAILENGNLNSGGRIDLTRDAVIAFGRKLRSDDEVVIEATVNTATIVRLLRPFVGRVVIANPLQVRAIAHAKIKTDKIDAAVLAKLHASGFLPEVWMPDEATETLRRLVAQRTQIVQQMTRVKNRIHSVLHANLIPPFAGELFSIAGRRWLEAQPLAQDEKLAVRRHLADLDHRAADLAALEQALAKRALQDERVERLMTISGVHVTVALGLLAAIGDISRFASPENLVSYLGLNPSVHQSGNGTAHHGRITKQGRRHARAMLVEAAWAARRAPGPLRAFFVRIQNRRGKQVAAVATARKLAVLAWHLLSKAENYAWARPALLQAKLRQVELLAGQPAAKGRKLGRAHAYNSRAVRDRERAWLEQTEQAYTRFVVNWQTKPTRRTGAANGTRSS

SEQ ID NO: 149406 - protein, 391 aa, unidentified
MIYVGIDVAKEKNDCHIITSKGEILIGLLAFPNTREGFELLYETVRKCCNGDFKKIKVGLEATGHYSSNLLSYLAKLRWEVVVFNPLSVSRSRKALTLRRTKTDKNDSRYIAEMLMADRSSTYQEKEYHISVLKSITRARHRLVKESQPLKNRYRKSVHLLFPEIDKLFCNLYISTVLNLLRKLPSAKDIADCNITRLTNLLSSYSHGKLKRDKAEQLKFAAKNSIATYNYGDALELRFTVERILFLETQKARFDEEINALMSKLHSPITTIPGIGNILGATILAEIGDISAFQTSAKLLAFAGAEPATYQSGKFTATNTPMVKHGSKYLRNALYLATTMAQVHSPSFKAYIDHKRAQGKHYYVAISHGMKKMTRVIFAILNSNASFVEVI

SEQ ID NO: 149407 - protein, 437 aa, unidentified
MAKKGKKTTPIPENMPVIHPHAAGIDVGAEEHWVCVPADRDAQPIQKLSAFTCDLHRLADWFTTCRVTTVAMESTGVYWIPLFQILEARGFAVALVNARHVKHVPGRPKTDRFDCRWLQKLHSYGLLAPSFRPPEDMCQLRSLLRHRDNLVHLSVKHIQHMQKSLDQMHLHLHHVMSDVTGVTGMRILRAIVAGERDPRTFAKSRDYRMKSSEDTIAKALEGDYRPEQVFTLTQSLALYDFTQQQIAACDQEIERVLDTFDSLVDLDAHPLPPPTTAHRQPQRNAPAFDLRAHLYRITGVDLTQVPGLQALTIHTVLSEVGLDMSTWPTDKHCASWLGLCPDNRISGGTVLATGSRPVQNRASRALRMAAQSLRTSPSSLGAFHRRMRSTLGPAKATTATAHTLAKILSHMLKEKTPYRERGADYYMYKDQERKLRQ

SEQ ID NO: 149408 - protein, 355 aa, unidentified
MEDTKYIGMDVHKDSISIAVLNSSGKLVMECIIETKAITILEFVHGLRGSLHLTFEEGTWAAWLYDLLKPHVTKLVVCDPRRNGYLKQGSKSDRNDARKLAELLHSNMLRPVYHGEHGVRSLKELARSYLTITKDQARVMTRVKAVYRSWAIPCVGKQVYGQRHRLEWLGKIEEPGVRRRAEFYYAELDALRSLRLVVLRELLLESKKHSVSTLLSQIPSIGPIRAALLIALLQTPDRFRTKRQLWAYSGLAIETHDSAENQYVNGQLQRSKKKQSIRGLNSNHNHDLKNIFKGASAVAAVKSGPFQRFYAAQISKGIRPEIARLSLARKIAAIILTVWKKGASFDASYLNPQTA

SEQ ID NO: 149409 - protein, 348 aa, unidentified
MTMEVYIGLDVSLASTAVCVLGEKGEMVTEAQVASAPDALVSFLRELPHGIAAIGLEAGPLSNWLHKGLTDAGFETVLMETRQVKAALKAMPIKTDRRDAEGIARLLQMGWFRPVHCKTVSSQEMRALLTSRKSVKDALIDMELSLRGVLRNFGLKLGQVSKGRYEARVWELVSGNAMLEAAAEPILRARAALRRELARLEKLVRNLASQNPVSRLLMTMPGVGPVVALTFVSAIDDPRRFRRSKDIGPWVGLTPGRNQSGERDIVGRITKAGDAGLRTALYQAATVMLNRAGPNWLKAWALRLAVLRGRKRATVALARRIGVVLHRMWRDGTEFRFSREAAMALHTA

SEQ ID NO: 149410 - protein, 460 aa, unidentified
MAPRKQKAVQTPPALPPQLAAVNLHAAGIDIGAEAHFVAVPPSDDPQPVRSFGAYTADLEALADWLATCGITTVALESTGVYWIPLFELLETRGFEVLLVDPQQVQKIRGRPKSDVHDCQWIQRLHTFGLLTSAFRPADPVCVLRSYLRQRAMLLTYAGQHIQHMQKALTQMNIKLQHVVSDLTGVTGMAIIRAILAGERDPVTLARLRDYRCQHSEETIAKALYGQWREEHLFALAQAVALYEVYHQKMTECDQQIEAHLGTFVEHSGGPTPPSRPPRKKKRKRNQPAFDVRGSLQRVTGVDLTTIEGIDDTTALIVISEVGLDMSRWPTVKHFTSWLGLCPHQRVSGGKVLSRRTKSCANRVATALRLGAACLHHSHSALGAFFRRMKARLGPPKAITATAHKLARLIYTMLKHGTAYVQQGMDEYEQRYRDRAVESLTRRAKAFGYTLVQIPVRTFS

SEQ ID NO: 149411 - protein, 409 aa, unidentified
MLLVGVDWAEAQHAACLMRPDGTVVHRLTIPHSAAGLARLREAIVAVEVEPAGVLVAVERPDGLLVEALLDTGYVVYALNPKAVDRYRERTRVAGGKTDPADAELLARVLVTDRDRHQPLRPSSPMVEEIRVLARQDERASRDQRRVLNRLRHDLLAVFPAALDAFPDLTTISALAFLERWPTAAAARDQERAAIEAFLRQQFHSQARAAAGRIHAALQADALTAPLHLAAARAGAIQLAARQLLLLHRQRAAWEKRLRELLEGDGAHPDGEVLLSLPGLDARLAARVLGEIGDRRERFPTPAALQCYAGTAPTTKASGRSRVVVARGACNRFLRQALVRWAFCSLPRSAWARTFYEGQRAAGKGHFKAIRALANRWLEILHHLLATGQRYDEEVHQRNRARASRPAAA

SEQ ID NO: 149412 - protein, 321 aa, unidentified
MRYIGIDVSKATLMVAYPQDNKKYKTREFQNTSTGIHSLIATLQADDHCVMEATGNYGYLLLYLLDKAGICTSMENPLKVKNFARTMLSVTKTDKADAKLLSLYGERMKPEPYKIPSEALLLLKQKRAVLRQFKKQLLANNNLKKALEAMPEQDHKAIKAIEKVTNTLEEQIKAVEEELNTLTQAEFNQQMSRLTTIKGIGTTLAAALIITTGGFTYFDNAKQVSRYLGLCPTYQQSGTSIHVKGHINRNGDPYLRAQLYTASWSMIKYNTACRELFTRLKERGKSGKLALVAVMNKSIRQCFAVVKHDTDYQEDFVSKKP

SEQ ID NO: 149413 - protein, 411 aa, unidentified
MDVFCGIDWAEGHHDIALADRDGQLLARRRISDDAAGLAALLGLLAEHGDSAEDPIPVAIETPRGLLTACLRATGRPVYPINPMAVARYRDRHSVAGRKSDHGDSFVLANVLRTDIHAHRPLPADSELAQAIAVLARAQQDAVWTRTGAHNKLRSHLREYYPAFLAAFAGSRGGIMRPEARVILAAAPTPAAASALTLAQLRGLLRKAGRSRGIDAEATRLRGAFCAPQMRQLPLVEQAMGRQAIALLGQLDAACAAADDLEQAVIESFNQHPDAGIITSFPGLGTLTGARVLAEIGDDRSRFSDAKGLKAYAGAAPVTRASGKTKAVMHRRVKNQRLAAVGYVWAFSAITASPGARAHYDRRKDAGDRHTAAQRNLFGRLLGCLHTCLVTGQHYDEHIAFPASTKLPAAA

SEQ ID NO: 149414 - protein, 393 aa, unidentified
MGPARYKRPRNGPRMCEQHPKSEEGSEMEVTTIGIDLAKSVFAVSGADSRGRVVIRRQLRRAQVLGFMRGLPRCVVGMEATGGAQYWARQFTALGHAVRLMSPALVMPYRKGNKTDRNDADAILEAVSRPSMRFVTVKSVAQQDLLALHKVRAQLVKSRTALCNQLRGLLRERGVAVRMGVAALKRGLPAALADESSELSGEMRELLSEMSQWLGTLEQRIASCEARITQKFKHDERCVRLAEVPGVGPLTATALVAAVGNAQRFKNGRELSAYLGLVPRQHSSGGKTVLLGITKRGDRYLRTLLIHGARSALRQCKLKGDARSDWARRISAARGPNVAAVAMANKNARILWALLSRGDRYRSSRVLTRAVLRPGSPPPVKRARGANLRVAKD

SEQ ID NO: 149415 - protein, 409 aa, unidentified
MDIMYERCCGLDVHKKTVVACVLVPGSGRQPTKEIRTFGTMTADLLELGDWLAAKGVTHVALESTGVYWHPVWNLLEGNVELLLVNAQHIKQVPGRKTDVRDCEWIANLLRHGLLRASFVPERPQRELRELTRYRTSLIRERAAEINRIQKTLEGANIKLGDVASDILGVSARRMLEALIGGTTDPAELADLAKDKLRKKLPQLERALKGQFRAHHRFLLAQQLAHLDGLDELIDSLGSEIAERVRPVEQVVERVDGIPGFGRRTAEIVVAEIGTDLSRFPSYKQLASWVGLCPGNNESAGKRMSGKTRKGDVWLRSALIEAAHAASRSKDTYLAAYYHRVAARRGKKKAIVALAHTLLTIIYYLLTRDCDYEDLGPEYLNEHDREQTERRLIRRLQGFGYTVTRETAA

SEQ ID NO: 149416 - protein, 335 aa, unidentified
MKQEKYIGMDLHQATIAVAVMDSMGKLIMECILETKAATILEFIGGLNGSLWVTFEEGTSAAWLHDLLKPHVSHLIVCDPRKNALLKDGSKNDRIDARKLAELLRGNQLSAVYHGEHGVRTLKELARTYLTISQDLVRVMIRVKALYRSWAIPCSGKQVYGVRHRSLWLDKIGEAGVRRRAEFYYQQLDALRSLRQQVRRDLLTESARHQATKRLRQIPSIGPIRAALLVALLQTPHRFRTKRQLWAYSGFGIETHDSGEHRYVDGELRRSKKKATVRGLNRNYNRDLKNLFKGAATQVTAKPGPFQEFYTALLAKGIRPEMARLTLARKIAAIS

SEQ ID NO: 149417 - protein, 408 aa, unidentified
MEVIYPRCAGLDVHKQTVVACARIASDGPPLQQVRTFAITTSGLLALADWLESFGVEHVGMEATGVYWKPVWHVLEGHFELILANAAHVKNVPGRKTDVNDAIWLADLLAHGLIRASFVPPTAVQELRTLTRTRKQFVRERASHVQRIEKVLEDANLKITSVLSDITGKSGRAVLQALIDGCSDPERLASLVRGNRLKASPAELAEALSGRVRAHHRFMLKLHLGHIDALDKAITDIEKEVGLGLEPFRAAAQLLSTMPGLSDVSANVVIAEIGVDMSRFATPAHLLSWACLCPRNDESAGKRRSTRLRHGGTWLKTTLVQAAWAAVKVKGGYLQAQFHRIRARRGAKKAIIAVAASMLTAAWHMLRDGTEWRDLGAAHFDRADATKTANRLIRRLQQIGYTVQVVPA

SEQ ID NO: 149418 - protein, 367 aa, unidentified
MKDSITVVGLDVHKNSIEIVTADTFGVMEVRRFGNIGGTMNALDQAVRKLASRGSTLHFVYEAGPCGYEIYRHLTGKGYSCKVVAPSKTPRKSGDRIKNDRRDAETLARMERAGELTAVHVPTEEDEAMRDLTRAREDSVKALKTAHQQLGAFLLRYGKRYPGKKSWTPAHMRWLSDIALAHHSQQIVLQEYITAVRECTERTARMTDQILQLLPEWRWNPVVKALQALRGVAPIVAVTTLAEIGDLSRFENPRRLMAYLGLVPSENSSGESISRGSITKTGNGHVRRALMEAAHAYAFPARVSRHLLKRQEGLPEPIRAIAWKAQVRLCGKFRRLTARGKLKTKVVTAIARELSGFIWAIAREVKA

SEQ ID NO: 149419 - protein, 335 aa, unidentified
MLAGVDAATGEVLEARQIAASDDGHRDAVRWARELGCERVWAIEDCRHVSRRLEQALIAAGERVVRVAPKMMGESRRGERQAGKSDEIDALAVARAVVRDGVERFPSACLDERAMEIRLLSDHRDQLVAERTRIQNRLRWHLLELCPELEAQLPNGGLTRQVVQERIATRLRNIRDDPRARVARDQLRHICTLSSQINELERELGTLVAAHRPALLAEQGCGVLTAATLIGRTAGAERFPTDAHFARQTGTAPIPASSGQVVRHRLHRGGDRRLNSALHMIAITKARLDPQTKAYLERKRAEGKTKREALRCLKRHLARRVHHLLSMPAVGPDPS

SEQ ID NO: 149420 - protein, 348 aa, unidentified
MKKSLKQVVGIDVAQKELVVTLGKLHEDLSIELYAYKVFSNKEKGFEALLKWVKKLTDDQTSVHYVMEATGVYHQKFAYYLDENKLNLSIVLPNKISNYMRTLDLKTITDKSCSEAIARFGLERQLNLWKRPKEVYKKLQQLTRERNQIVEERVMVKNQLHAEESEAEPNTGSVKRIKARIKLLNSQELEIKKEIDLIVAKDESIIKEIETICTIPGVGKLTAVIILAETNGFELIKNKKQLVSYAGLDVKEKQSGTSVKGKARISKQGNRNLRKAMHLPALVAIKHDEHFKEIFVRLVSKSGIKMKGVVAVQRKLLELVYILHKNKSVYQKHYEENKRGQPQVVAAL

SEQ ID NO: 149421 - protein, 422 aa, unidentified
MKRITEFTKKVKGQVKNTVLNKASWIVGIDIGKAKLSCVLMKKDQTVLYRFNARSSMSGYKKILDQVKEKTKGRGRVVYAMEPTGHYWMVLGQFFEDHNQKYVLIHPLAIARSREVVRLNRGKTDPMDARLIGELACREIATQTQIPEDYYATLRFLAREYMDREKDIVREKLRINSYVETTLPDFLDVFPNPLCLAGRACLRTLSNFNGAIKGDFSSFEKQVRKHYTGRRLLISRVRQVYDTLRQNHCMGLRAGRYAMFWRIVNSLERLEVAERQQETTEQSLLSHYNQSEYKQYLNSIQGTTSTTNALILGFMGNPTVYDKPKTLIKLAGCDPVLNESGKYRGKTSISHRGRSLLRKAADRTAFSIEKRNVVFRNFFHRLVTRNKNKLTKRQARIACINKYFRIIWVLCNHRVTFNPSLA

SEQ ID NO: 149422 - protein, 312 aa, unidentified
MNHISIGINISKDHLDIHRLPDGASIRLANSKAGHKALIKWLLADVPERVVFEPTGAYHRKLERCLAEAGISYVKVNPRRARRFAEATGTLAKTDRADAMMLARLGAVLDPAATTIRSQTLDVLAELVTARRALVKDRTAARNRQHNLMSALLKAQAELRLKQIDTDLSAIDAECRKLVQTGEDLKTRFDIIISIKGIGDVTAMTMLAEMPELGTMDKRQTASLAGLAPITRQSGKWRGKSSIQGGRRTLRQALYMPALVAVRFNLQLKEKYQSMIDAGKPHKIAITAIMRKLITVANALIRDQRKWTEINP

SEQ ID NO: 149423 - protein, 341 aa, unidentified
MAEVRVIGLDIAKSVFQLHGVDAAGATVLKKQLKRSRLLPFFEKLPPCLVGIEACATSHFWARELTKRGHEVKLMPAQYVKPYVKRQKNDMADAEAIAEAVTRPSMRFVGPKSAEQQSTMMLHKVRLMLNRQLTMLTNAIRAHMAEFGIVAAVGRGGADQLIAIIDDEADARIPTEARQCLLMLVAQLRIVKVQILENDRRVMALARATELGRRLMEVPGVGPLVASALVACVPDPAIFRCGRNMAAWLGLVPRQNSSGGKERLGSITKAGNRYLRQMLFVGAMAVIRRAMQGTRRTWLSRLLERRAPKVAAAALANKTARTVWAMMMSGERYREPMAIAA

SEQ ID NO: 149424 - protein, 464 aa, unidentified
MSIDQKRQNRKERKELARRLRSKDPGLEVVHPQAAGIDVGNSAHYVAVRPDCDPEPVRRFECFTADLHRLADWLQSHNVKTVALQSTGVYWIPLYDILEERGFEVYLVNARHTKNLPGRKSDVQESQWLLKLHTYGLLNNSFQPTSEIRVLRTYWRQRAEHVGGLTTCIQRMQKALTQMNLQLANVISDLSGVTGQRIVRAILAGERDPRRLAELSHWRIQASKEDIAKSLEGNWRAELLFVLQQEVEMYDIYQQRISECDSQLQKHLAHFESIAFPQPKQKEFKTKKGRRNKNTPQFNLRDELERITGVDLTRIDGIDVMVAQTLVSEVGLDMSRWKTEAHFASWLGLCPDNRVSGDKVLSRGTRRVVNRAATALRVAATTLLKSLTYLGAQYRRLRTKLGAPKAITAMAHRLARLVYRLLKYGQHYVDKGAEYYEQRHREQQIAFLSKKAAQLGLQVTALHP

SEQ ID NO: 149425 - protein, 404 aa, unidentified
MVDTTVSDFMKGRYNLMIYVGIDIAKLNHFAAAVSSDGEILIEPFKFTNDYDGFYLLLSKLAPLDQNSIIIGLESTAHYGDNLVRFLISKDFKVCVLNPIQTSFMRKNNVRKTKTDKVDTFVIAKTLMMQDSLRFLTLEDLDYLELKELGRFRQKLVKQRTRLKIQLTSYVDQVFPELQYFFKSGLHQHSVYALLKEAPTPNAIASMHMTHLAHILEVASHGHFGKDKARDLRVLAQKSVGVNDSSLSIQITHTIEQIELLDSQLFHTELEMANLVTCLHSVIMTIPGIGFVNGGLILGEIGDIHRFSEPKKLLAFAGLDPSVHQSGNFQAKKTRMSKRGSRVLRYALMNAAHNVVKNNTTFKDYYDSKKAEGRSHYNALGHCAGKLVRVIWKMLTDNVEFNLE

SEQ ID NO: 149426 - protein, 341 aa, unidentified
MLYSGIDLHKRSLVIHTLDADGTTTREAQLKSDRGAVLAYFGTLAGPHRAVVECVQSWYWLRDLLGPTGVDLRLAHAKYVKAISYAKVKTDRVDARMLAQLLRTGLVPEAHMIGAEHRETRDLLRSRLQLVTRAVRCRHAVGSLLEKYNVPTPEELPELARMQAALQEEQRTLIRTHVRRVEAVLKTRLLPTADVQRLVWIPGIGKLSAYALVLEIDTISRFPTVRHFHSYCRLVPGADNSAGKVRHKRSRDGNRYLKQVFHTAAIRAAQYHPEIRQEYRRLSRRKGKIVARALIAKELASIVYWVLRKQEAFNGKFRGHVLTAKPAVWPRLASPESLTDA

SEQ ID NO: 149427 - protein, 416 aa, unidentified
MTFKIVRFICGGMDVHKNLIVATIGTTDKQTLTTEYIQQSFSTFYSDLIRLKEWFISHDCYDVCMESTGKYWIPIYNVLETELNICLTHPKYVKAIKGKKTDKRDSKWICDLYKCDLVKHSFIPEKEIREMREIARYRCKLVYMRSSERNRYQNCLTVSNIGLASAVSDPFGKTATNIMKELMQSEVIEDDKILKLIHKNCKDKDKILDSLQGYHIESDQRFKMDTVMNHIEYLDKQIQACEAELIKRAYPLRDYFQHITHIKGISALSAILIVSEIGTDMNQFESDKQLVNWAGLSPANNESANKKKSVRISKAGQYLKPLLVQCALSSIKDKNSYFGIKYCRIKKRRGHKKAIIAIARMMLVCIYHMILTGEEFNPCDYESLTNPKPKKEPTMTVESALQFLKDSNFDFSSIQL

SEQ ID NO: 149428 - protein, 607 aa, unidentified
MSTTASLDRIGVGIDTARYGHRVSFLRPDRKPAAKPLTVMENRAGYQALQDRLNQLHEQYPITNFHVRIDAAGQYAVNLELFLRGLKLPMTISVGEPKRNKDYQKAHFPKRTTDDTESQAMARFAVIELPNATPAPSTPMILLREVAGRLQSKVKQTTQAINRLHNLLARVFPELATLTEDISVGWVLKLLDKYPTAERIAQAQIASLEKIPYLSVEQAHAVHQAAKQSVASLRGELAEALVRDLVNQLRLCQKAEQHLHQLLLEAFADLPASPHVQVLTITGIGEATAAALVAKIVDINRFATPNHLVSYFGVFPEESSSGVDKHGKPLPPGTLIMSPKGNDLVRFYLWNAARTAIQHNPAIRALYRRLRAKGKRGDVAFGHCMRKLLHLVYAVWKTDRPFDKEHFPWEGSSDTQPSATTPPSADAGTTPSANEEAVGHKRDLPAEEVVTTADSTLEPASPAVKPASQSAAPRPKVDFACVREHVTMEQVLQHLGYFASLRGRGRQRRGPCPVHSQPTAPERTFSVHLGKNAFQCFHAECAVKGNVLDLWAAIHRLPLYEAALDLAETFQVPRNREEEPVKGTSSPRTATAKTSAPAAATATDGAK

SEQ ID NO: 149429 - protein, 432 aa, unidentified
MKKIRENAAGIDIGAKKVFVAIEGQEVRCFYTFTEDFEKLRDYLFENEIKTIAMEATGVYWGILYEMLEEGGIDVWLVDGRQTKQVPGRKTDVKDCQWIQQLHSYGLLNRCFVAESDIKELRSYQRLREDHIRSASMHINHMQKALTEMNIRLKEVLDQIHGVSGLAIIEAILKGERDKEKLLKLCHTKIIKNKKDEVLKALNGRYTKQGLFALRQAFESYCFYQNQIEQCDHMINEVLQKISRGKPDRKTDPRRKPVRHNKPDIDNLGSMMLKIFDGRDATTLSGITDYSWLQLLSETGSDLTRWPTEKHYTSWLGLAPGQHNSGKMNKNRRKSGRPKAGQIFRQIAQSLLTSKRIALGAFGRRLSARKGSPIAIKSIARKLAVLYWRIMVKGMAFVEEGAKKYEEQMLIHKQRSLNRLAKELKVQVVYNM

SEQ ID NO: 149430 - protein, 440 aa, unidentified
MAMRKREEPVFPNAAAVDVGASSHWVAVPPHSTDVPVREFGAMTDDLNAMADWLLACGVDVVALESTGVYWIPVYEVLEQRGLKVWLVDARQVKYVPGRKSDVQDCPWLQKRMSHGLLRAAFRPGADVCVMRAVARQREVLLTEQASGVQRRQKARVQMNLQLTEVISDVMGQTGQAILRDIVAGERDAQSLARHRHRRIEASEEDIVRALTGNWREEPLFVLKQALGMYDDLARHLRECDEKFRELLAERAAVSVDIGKTPRTGSQARAAFDVRQQLANWAGADLTRINGLGLDTVMKILSEIGTDLSHFVNVKHFCSWLGLCPATKISGGKVLSARTKRSANRVRQALKMAAMSLSHSDSALGAFYRRLCSRMDKPRANTATAHKLARRVYFMLTRGEAFVDQGQQRYEEQQRERSIAALKRRAAALGFQINPLQAAA

SEQ ID NO: 149431 - protein, 405 aa, unidentified
MDAATPSRVAGLDWASRLHAVCVLDFDGQVRARFDVPHTGTELRGLTRRLVRLGVRKVAIERPDGPVVQALLAAGLEVVVIPGRQVKALRGRYGTAGNKDDRFDAYVLADALRTDGHRLVPLVPDAPETTALRVVSRARKSLVATRVALANELRANLEIAFPGAATLFSEVDSPIALAFLRRFPSVTQAAWLTEGRLAAFLRRMGYPGRKAAAELLGRLADAPAGLTGPEGEARAMVTLGLVAALNTVRAQIDELEGEIVERLGTHADAAIFTALPRSGRVRAAALLAEIGDCRARFPDAESLTCLAGAAPSTRRSGKHKKVVFRFACDKKLRAAVMDFAGDSRHDNLWAAHVYQQARARGHGHAHAVRILARAWLRVIWRCWQDHTPYDPARHGSYQGGVRSLV

SEQ ID NO: 149432 - protein, 403 aa, unidentified
MSPEHSIDIFLGLDVGKSEHHACALDRDGNKVFDKPLPQLESELAGVFHQLQKLGTVLVIVDQPNTIGALPIAVARDCGCEVGYLPGLAMRKAADLYPGRAKTDKRDAFIIADTARTMPHTLRAVDRNDEVLSALKMLSGFDDDIARDCTRTVNRLRSVLTQIYPSLERVFAGSTLTRTPILELLIHYKGPQGLKRAGYQRVLNWMIKRTRKDPTPLVDDIFTALKAQTVTVPGSDAAELVIPQLAANIQALKEQRNTIAEQVEEMLADFPFCEVLMSMPGVGIKTAAQILLAIGDGSDFASAGHLAAYAGIAPVTRRSGSSIRGEFPARSGNKRLKNALFYSAFAVIRSHEPSRRYYERKRAEGKRHNAAVICLARRRCNVIYAMLKNKEFFREIPPRPVAA

SEQ ID NO: 149433 - protein, 310 aa, unidentified
MDATFVGIDVSKDRLDVHVRPSGEAFAVPRNGKGLSELVERLRSIAPALIAVEATGGFEMIVAAAIAGAHLPLAVVNPAQVRYFAQAVGRRAKTDPIDAAVIAHFAEAVKPEPRELPDEAARLLAELVSRRAQLIEMVVAERQREKRASSVRVRKSLARHIAALEKELPVIDRDIDTMVRGSPLWREKEDLLVTFPGVGNTIARSVLADVPELGRLDRRKIASLIGVAPFTRRSGKWKGKSMIGGGRPAARSAIFLAALSAIRCNPVLRAFYQRLLAQGKPKMVALIAVARKIVTILNAMLRDKKQWQPA

SEQ ID NO: 149434 - protein, 364 aa, unidentified
MSYIPDPTTNKKGGEKMYIGIDLHKETCYATTLDKEGEIVDRREFKNEREEWEKFVEGIPRDSKVAIEACSYWYPVCDFLEERGIEMVLSHPSKTRIIAEAKIKTDKIDSKNLAKLLRADFLPRSYIPSKEIRENRELLRLRVQLGKDRTVVKNRIHALMAKNGVKHEFSDLFGVEGMKFLKEIELAESQRIALDVLLRQLESVDKEVEYVQKRIAIVAKGDEVVIILMTIPGIDYYSAMIIKNEIGEIERFPGYKELCSFVGLVPRVHQSGNTRWEGHITKEGNALLRWILIQAVHQVVRYPGELRKFYLRLKKQKGTKIAVVATARKLLRVIYCMLTRKENYRYERKALTESKLKRLEKTAC

SEQ ID NO: 149435 - protein, 392 aa, unidentified
MICVGIDVAKDKHDCFITNSDGEVLFNPFSISNNRDGFETLFQRILSVSDDLTKVKVGLEATGHYSYNLLGFLLDKGLTTFVINPLHTNLYRKSLSLRKTKTDKVDSRTIATMMMSDMNLKSYSDTSYHNEELKSLTRYRFDKVKERAKLKSSVSRLVCILFPELETLVPTLHMASVYALLCEFPSADAVANAHLTRLSNLLFESSKGRYGKDTAIMFRDAARSSIGSHMPAKSLELKHTIKLIRELTIEIDEIEAAIKRIMDEEIQSPILTIPGISYRMGAMILAEIGDFSRFDSADKILAYAGMSPSTYQSGQLDNCYSHMEKRGSRYLRYALYNATKYVCHWDKSFGAYLEKKRSEGKHYNVAISHATKKLVRLIFAMEKSGKAYLPTA

SEQ ID NO: 149436 - protein, 359 aa, unidentified
MDGSKVQPKVTAGFDLGDKYSYLCLIDTQSGEIMQEGRLRTTPEALRRRFSSELQPLRVAIEAGTHSPWVSRVLEECGHEVVVANARKVRLIYTNKRKTDEIDAQKNLARLARVDPKLLYPLKHRGEDSKAHLAIIRSREALVGCRTQLVNHVRGAVKSFGHRLPKCPARSFHKKVVEHIPAALWVALGPILELIGSLTERIRDYDRKLETISKEHYPETDLLRQVEGVGTLTALTFVLTLEDPYRFERSRSVGAYLGLVPATDQSGDRDPQKRISKEGDEMLRRLLVGSAHYILGPFGSDSDLRRHGQKIASRGAKNANKRAVVAVGRKLAVLLHSLWLSAELYEPLRNTQSSGGQAA

SEQ ID NO: 149437 - protein, 313 aa, unidentified
MMASQDVFVGIDVSKDRLDVHVRPLGVGFSVGNEAAGYAGLIARLRPLRVKRIVLEATGGYERALWLALSEAGLVAAVVNPRQVREFARAAGRLAKTDRLDAAVIAHFAETFAPRIGKPDAVADRLGEHVLYRRSLQDELVALDHQRRRLETPALRERADRRLAALRAEVKEIEREMRAIVDSDPAKKALFACLTALKGVGLVLACTLIANMRELGSLSRHQAAALIGVAPLNHDSGTRRGYRAIAGGRRRVRNVLYVATLSAVRSNPPIQEFYRRLSASGKPPKVALVACMRKMLVMLNGRVRDELAAATIP

SEQ ID NO: 149438 - protein, 348 aa, unidentified
MKVTTLGIDLAKNIFRIHGVDGRGAVVLRKQLSRKQMLPFLARLEPCLVGMEACAGAHYWAREIQKLGHTARLMSPHFVTAYRKNQKNDGNDAEAICEAVGRPSMRFVPIKSASQQDIQAVHRIRFQLIKWRTALANKVRGLLDEYGIVVAQGLAPLRRELPLILDDEENQLSGLFREMLGEMAERLKLLDQRIRQYDSKVERVFSQDERCPRLAQVEGVGPLVATALVAAVGNAHEFKNGRELSAWLGLVPRQHSSGGRNVLLGISKRGDRYIRTLLIHGARSAIRVVERRRDPRSLAISRLKARRGSNVAAVALANHNARVLWALLKKGEDYRPRAARRTDVAQSG

SEQ ID NO: 149439 - protein, 353 aa, unidentified
MTVYVAVDFHAREQTVSYCDLADGEIHRRKLRHQHDDVRAFYQQFTGAVIVAFEASGYSAWFEQMLAELGHPVWLGNPAEIRRKAPRRQKNDRRDADLMLDLLLKGDFPKVHGFSEESRTVLRQLRYRHKLVKVRTIAKNSLHAIGINAGLPLKRRLLTEQGIAQLQALSLSPVLTQQRDEWLQLIALMNQRIATVEAQLQQRAKDDADIALLQTHPGIGLLTSLALRYTLLPTSRFSTTRQVTAYVGLDCMEDQSAERRRMGSISKAGSKLLRFLLNEAGHTAARHDPELKKFYRRLLHRRDKPKAKVAVARKLLVRSFIMLRDQIDYAEFVRRGVAARVAREAHSLPMTDL

SEQ ID NO: 149440 - protein, 426 aa, unidentified
MKSTTQNAKIAAITEKTLIIGIDVGSETHYARAFNWRNYEFSRRPLEFSNSEEGFKTFMTWINELKEKHGMDKVIPGMEPTGHYWFNLGKFLQDNGMRPVHVNPHHVKKSKELDDNNPSKNDRKDPKVIAALVNEGRYLYPYIPDGVYAEIRVLSGLRVRAQNELTRLKNQLARWFSIYFPNYKDVYGNAGAVSGLMILKAAPLPEDIVKLGVEGVNRIWRDAKLRGAGLKRAKTLVEAAEHSIGNREAQEAARIELRILLADYELQASREAELMAVIEEKISEVPYIDKLLEIKGVGMKTVIGFVAEVGDIKRFDDPKQLQKLAGYAVVKNESGKHKGESHISYRGRKRLRYVLYEAAVSVVSHSPEFRDIHRYYTTRERNPLKKMQSMIAVACKLVRVFYLVLKTGASYDAAKMMGDIRRPAAA

SEQ ID NO: 149441 - protein, 348 aa, unidentified
MRFIIGCDFHPGYQQIAMLDTETGELVKNRLAHVGEEVRKFYAGLPGPALVGIEASGHSQWFEKQLRELGHEAWIGDAAKIRAAADRKQKTDERDALLILDLLQQGRFPRIWVPTPEERDARQLLLHRHKLVRMRTQVKNQLQALALNQGVRRKSKLWSVLGRAQLESLALLPWAARRREDLLKLLDDLGQGILELDRAVAQQAWARPAARRLMTHPGVGPVTALAFVLTTGPVSRFRRGKQVASYFGLIPSERSSGGKQRLGHISKQGNAFLRGLLVEAAQSAVRHEPELRRDYQRLAQKKCRALAKVAIARKLAVRLYWMLRTDSDYAQLLQGLHAGQPESSCGRS

SEQ ID NO: 149442 - protein, 420 aa, unidentified
MIKNVKTMLIFTGRNEVFGFPQPRNVMFNGLKIPIKCMPMKTVCGLDVHKDSVFLCILHENGEKIQHKFGILTDELECMRDLMLSEGVEECAMESTSIYWIPIWRVLEDHCKLYLANPYFIKQLPGKKSDVKDAEWIATCLSNNLIAGSYVPEERIQRLRQYDRRIFDLTASISRNLVKLDACVQRCNIRLSNYVSTVDSKSYREVVKKISEGQTDPQKLMEAVHGRIVSKHGEETILRSLTGVINETDIDIISQLVEEIELQQRQRDAAQQKMTTLTKEWFPEQFENLQTIPGVKERSATSIIAEVGTDMSNFQSPKKLVAWVGLRPRNEESAGKIKSRRIVHGNKFLRRTMVECSWSAAKTRDSFYNAFYHHQTVVRRKNKMKIQVAVARKLLTVVWYVLSTNSQYKPYDHTAAGEES

SEQ ID NO: 149443 - protein, 413 aa, unidentified
MAAVEFTQVVSRGCGMDIHKEVVVATVRGEGIQKETRSFDTFTSSLTELREWLVSLGITHVAMESTGVYWKPIYNVFEGHIPHVWIVNARHIKNVPGHKTDKNDSEWICQLLMAGLLKPSFIPPREQRELRDLTRYRRKVIQMVSANKNRIIRTLEDGNVKLSSVLSDTSGKTGATLIEMLCDGKELTLQDIEDVRHGRCHHTSEEMLEACTGYMNDHKRYMLQRIRECNRKLTVEIVELDRHIKEIVTPYAEVMERLDEIPGLHDRTLEDLIAEIGLDMTVYPSAESLCKWAAMCPGNNESAGKKKSGKTNHGDKYVKATLVEAAWAASRTKGTFYKERFERLSKRKGGKKALIAVGHSILKAVHYVISTGGRYHELGEQYVPSKIEKKRRDYLKSELQKLGYEVSIIKKKD

SEQ ID NO: 149444 - protein, 430 aa, unidentified
MLGVGIDWAEQFHLVALGSPDGGVSQVVRIEHTAPAVAALIARLGRLEPDPAEVRVVIETSHGMLVEALVDAGYAVLPVNPDLIARRRGPARKKDDTEDARIACLLALDRFTTLRPLIPHGPVAAELRAIARDDERASRDERRLLNRLRADLIATFPAALTIAGEDLGAPTFLRLLQSWPIAAALRAATREEITALARAGRHGWPDHFADRIEHALNNTDVFTARDYLVRAKADTIRLTAGQLLAIGAQRRTWEKRMGALLLGAPRRGRARQPSPTPDGGPRPNGFPGGEIYLSFAGLGDRLAARVAGEIGDHIDYFTSPNALQCYAGKAPVTRRSGKSEYTVAHRLACNRHLRDAVQTWAFCSLNTSGWAREFYDAHRARGHTHHATLRALGNRWLELLWHCLTKGVLYDEAIHVANRNRALAPKPAAA

SEQ ID NO: 149445 - protein, 404 aa, unidentified
MIFVGVDWAEDHHDICVMDEGGVVLGKRRIADSVEGLAQLLELVGHHAEEPRDVAVGIEIDRGLIVTALLGADFVVYAVNPLASSRYRERHGTSGAKSDPGDAKVLADLVRTDRHNHREISGDSELVDGIKVLARAHQSAIWGRQRQVNALRSALRDFYPGALAAFGTDLSHPDAVSVLAIAPTPTLGRGLSRSKIASALRRGGRSRYVEKRAEEIQVALRADYLEAPRGVAEAHGLVARSSIALIEVFTKEIANLEVALSEHFEQHPDAKLVLSLPGLGTVLGARVLGEFGDDRTRYANAKSRKNYAGTSPVTKASGRSRVVLARFARNRRLGDSLDRWAFCSLSGSPGARRYYDQLRTRGKTHHQATRQLANRWVGILHYCLEREELYSEEIAWNQGSSLAA

SEQ ID NO: 149446 - protein, 402 aa, unidentified
MNCVGIDVSKGKSMIAVMRPFGEVVVSPFEVRHTASELSELARLLKSLDGETRVVMESTGNYHAPVAWLLHDAGLYVSVVNAMLVHDYGNNSLRRAKTDKKDAVKLANYGLDHWLTLPRYVPEEDTRLMLKTCYRQYQQYSKVQTMLKNNLISLLDTAFPDVNRLFTSPPRADGSEKWVDFVATFWHCECVCGLSEKAFTAKYQRWCRKHRYNFSEEKALDIYASACGHFGVIPKTDTAKLLVEQAIFQLRATSAALAALKQEMQSLAASLPEYPVVMEMFGVGPTLGPQLMAEIGDVRRFHSKKALVAFAGIDAPPYQSGQIDVRSRSISKRGSASLRRALFLVMGVILQCAPGDEPVYQFMNKKRSEGKPYRVYMMASANKFLRIYYASVKAYLDSLEHA

SEQ ID NO: 149447 - protein, 350 aa, unidentified
MKYIGCDFHPSFQVIAMLDTETGELCERRLLHTEEARTFYGELSGPVVVGVEASGNTQWFESLLASYGHQLWMGDAAAIRRQDGRKQKHDGRDARLILTLMEQGRFPKIWIPTVAERDLRQLLIHRQHLVRMRTRVKNQLQHIALNQGWQKKRKLWSEAGLELLRKLELEPWARQRRDTLLEMLAELEGRIQPLNQAVEKEARACPAARRLATHPGVGPVISLATALTMGDVGRFANSRSWVSYLGLNPSEQSSGQRRRLGAISKQGNPFLRYLLVEGAASAARGDKSLARMYARLKAKKHHGVAKVAVARKLAVRLYWMARTQKSYPEVVRTQGSQSHLVAERCGRPVE

SEQ ID NO: 149448 - protein, 368 aa, unidentified
MDRKSSKLYVGMDVHKESIDIAVADEGGEVRHHGQIGGEMNALWRAVRKLESLGRQLVFVYEAGPCGFGIYRGLTARGHGCWVVAPSNTPRRVRDRIKTDRRDSLKLAGLARAGELTPIYVPDVRDEAMRDLVRTREDAVMMQRQARQRLAALLLRNDVRYAGKTAWTAAHRRWIADVKLPQSAQRLAFEEYVQAVEEASARVQRLSQCIEQELAHWCWRPVVGALQACRGIQLIHAVRIVAELGDLSRFSHPRQLMAYLGLIPSEDSSGEHRQQGAITKAGNSSARRALVEAAWAYQYTAKVSALIARRQADVPKAALDIAWKAQVRLCARFRRLAARGVNRNKIVVAIARELAGFVWAIAQQVKPI

SEQ ID NO: 149449 - protein, 347 aa, unidentified
MNITTVGIDLAKSVFQVHGVDARGKAVLRRQLRREQVAAFFVNLPPCLIGMEACASAHHWGRTLERFGHTVRLMAPQFVKPYVKTNKNDAADAEAICEAVSRPSMRFVPIKSIEQQAVLSVHRVRQGFVKARTAQANQIRGLLGEFGLVIPQGIRHIAQRVPALLEDASNELPLEFRQLIDRLTCHLKELDQQVRELERQIVAWHRSSELSRKLEKIPGIGPLAATALVASIADARSFNNGRQVSAWLGLVPRQNSSGGKSTLLGISKRGDVYLRTLLIHGARSAILAAKRQGECKCKNVWLANLLNRRHANIAAVALANKNVRTVWALLAHGRDFKADYVPARAAA

SEQ ID NO: 149450 - protein, 359 aa, unidentified
MGERDRRAAAKPAGNPNSRRGRACEPELRKAGGRPARKWVKVMEQYTELFVGIDVAKRTLEVALSSGESWTVKNDEAGVAGVVKELARRAPALVVLEASGGYERKVWLALIEAGVPTARVNPRDTHHFAQAHRQLAKTDRLDARGLMLFAAQVRPQPDAAPGAADERLKELVMRRQQLTAMLTAERNREQQARTEANRRGIQTVIRFLERQRKAIEEAIEKHLRANASAHELSELLQTATGVRGVVAGRVLALLPELGRLSGKQAAALVGVAPYDRKSGDWEGRSHIFGGRTQVRCALYMATLSAVRWDPYLRAFYQRLLKRGKEKKVALTACMRKLVVMLNAMVKTRTPWSPPCPALR

SEQ ID NO: 149451 - protein, 488 aa, unidentified
MGCDVSKGYADFVVLNSREQVVERSFQLDDTFDGHNTICEFLNGFFKRYKDAVLYVGVESTGGYENNWFALFSRLGAHDNVKAVRLNPLAVKAHHNASMRRIVTDDISALNIATYLIAYKNRTRFEQDTGFESLRKQWKLTEMLKKQHTQLLNQLGFLMYQSNPQLVHYCKDGVPRWILLLLSSYPTAAKLARAKAATVAKIPYISDQRAQSLINDAAQSVAAYVDETAGFIIKELVKQIMALADAIQTQKNHMENNCAIKEVARLCTIGGIGSYSATGLLINIVAVERFSTVKKLAAYFGIHPVYRQSGDGEFGFHMSKKGRVEPRAILYMAVLSAINSNPVIAQLYKHCVSNGMEKKAAIGVCMHKLLRIIYGMLRTHTDFDPKVDEQNRKKAHRPAATSHLQKKRRFQQIDPMAPISKRQTKTRNEKGKIPEPHKNDVLKCGVIQDLPVEKNIISRHETKSNFHMPVPVASLVAAELERYELVTH

SEQ ID NO: 149452 - protein, 341 aa, unidentified
MAKNIFFIGLDIAAYDFAASIYQAPEKPIMTKESIKNSPEGFSMLVLWLKEYDIDKTNSLVCMEATGVYSEAVAYYLTSCGFKVSIEPPLKVKRAFDPVGHKTDALDSRQIAEYAYRYNDELKFWQPKEEIIEKIRQLLTAREQFTKQKVALKNAMHAYSRQMVQVALIKKAHQETLTQIKKQIARIDQELSKMMKQDPAISQKVNNLKSIPGCGMLLAANLIAITDNFKQISNHKKLAAFIGIVPYQHQSGISIAKRPRIRHFGPRYIRKLLRLAAQSIATHDITFRRYYLRKVTEGKAKALVLNNIANKLLKVACATIRDNTCYIKEYKSIHPMYLKTT

SEQ ID NO: 149453 - protein, 350 aa, unidentified
MTTIARRITGGVDTHLDVHVAAALDERGALLGIASFATTPAGYRRLLRWLESFGTVELVGVEGTGSYGAGLTRHLLGNDVAVVEVDRPNRQLRRLAGKSDPSDAEAAARAAQGGHATGLAKSRDGNVESMRVLRVARFSARRSRTQAINQMRSLVSTAPDDLRAELRDLSIYKILTIASAYRHTGRTDVTTLTKLALRTLARRALSLEEEVKEIDGLLKKLLAETAPELLAVDGVGTDVGTAILVAAGDNPERLKNEATFAKLCGVSPLDASSGKQVRHRLNRSGDRQANSALWHIVFTRMVNDPSTKHYIERRMKDGRTKKEAVRCLKRYVAREVFAALPRSQFGVDNP

SEQ ID NO: 149454 - protein, 387 aa, unidentified
MPDVTACLQPDEVRRWISFDQHKFSIVAAVLPPEGGKPDVQRIETTEKAIRRFVEKQGGPVGLSVCYEAGPGGFALWRLLTKLGVACDVVAPSLIPVRAGDRVKTDRRDAKKLVGLYRAGMLRFVHPPTPELEGLRDLLRARDDLRGARLAARNRVLKQLLRHGRIFREGKTAWTQLHRAWLARQRLDDPLAQEALEQSLVHVDGIERQLDLLDARLAEIAGSERWGAQVQILTRFRGIATITALGLIAEIGDFARFGHPRELAAWLGIVPSEYSSGDQQHRGHITLSGNKHARRLLIEAAWHYRHAPRIPKNGPPPDERAWQAQVRLHHRHRHLTDHGKRSTVANVAVARELTGFLWAAMTNQPLRTTDTATSSPSTTDQLQEAAA

SEQ ID NO: 149455 - protein, 350 aa, unidentified
MYFAGLDAHLKYVTVAVLDRLGTIVLETTVSTREPERLLAVLAPFRPLEVVVETCPFWPWLYDLLVPAGIGFHLAHAKRLRAIATAPQKNDRVDARLLARMLLSGLIPEAYPRPGDQRELLRLLRHRTTLVRFRTRLAGRIHSQLHQQRLLLPREQLLRQATRTWLRETAWPHLTTEQQAIVTTHLELIDHLTPLIQALERRIDTAAGANPTAALLATIPGIASYRSLLLAAELSPVSRFPRVEQLASYAGLAPVTRSSGGHTRHGSIPQGANRWVRGALVSAIPSHVRWAPTSPVTRAYGQLTARLGWRVARVAAARKLLRIVYIMLRRGEPWRGAGRVEADVRDEVHA

SEQ ID NO: 149456 - protein, 413 aa, unidentified
MSPDLLLREVPAGRLVVAIDPGKVSNRVWLTTGERGLIGEPVSLPVLRDGVDELDRLIAASGVSGPPVIGIEATGALHRAWATEVERRWPGSLRLFAPSETQAARGQLGSRRFKTDDRDCAALVWLLRQGAGRPSAPSAIEALLGAVRHRRQLVDARRVLQQRLHDQLNALCPGLSAPAGHGRVLELENPSGRAVLACAVAFAGRAPSVRSLLARSPGRLTEANAQFWAGRWKRLLAPPVDAELRAHRLGRDLERWLGLREDITALEGQLAELLAGTDGQILTTLDGVAVVRAAAFAAHSLPIERWASPEQLYSATGLAPASYQSASVTRRGRISRQGLAEHRDALMGIAWGLSQHSVAFAERDREYRARGFRPIQARVALARHACRLAWRLMISQQPYDDRRYDRARHRRGR

SEQ ID NO: 149457 - protein, 342 aa, unidentified
MAIAVVGLDLAKHVFQVHAVDETGRAVLRRQLRRAGVEAFFKILPPCIVGIEACASAHYWARRITALGHEVRLIAPAKVKPYVQRGKKNDANDAAAIVEAVMRPHMVFVPIKNEEQQAVLMLHRTRDLLVRQRTMLVNAIRAHLAEFGIVAAQGRRKVKELIAGLDNTEMPELARIALWQIADQIDECDKRIDALERRILAWHKSDESSCNLATIPGIGPITASAMAATVPSPSAFRNGRQLAAWLGLVPRQNSSGGKDRLSGITKTGNTYIRRLLVIGATSVIRFARSKAPGTAEWLKKLLDRKSARLASVALANKMARIAWSVLTRGEVYRDIHPVPKPT

SEQ ID NO: 149458 - protein, 334 aa, unidentified
MLETVYVGIDVSGDSLAVAYVDSRRDPIALGNFPNTGAGRHRLLQRLRKLGQTLHCCLEPTSCLHLDLANLLDHAPGVILSVINPRAVKDYGRSLMLRAKTDPGDAIILALYGEANRPDAWVAPRREALDLRSLSRRIEDVTKRRTSLKNQRYSAHKAHACAPVIADIEHELAGVVERLKELKRTARRMIRQDELLNHRYNLLVSVKGISLTTGIRILAELSVLPEGLSKKQWIALCGLDPMPRDSGKFAGKRRISKQGNAHLRSALMMPALVAISHVPQVRAYYDNLLSRTRCVKMQGVCAVMRKLLQALWGMLQTNTTWNPELFYAGSLTVN

SEQ ID NO: 149459 - protein, 408 aa, unidentified
MELIYTICCGLDVHKRSIQACLRRLGPDGRIHQEVRSFGTMTRDILEMADWLAAAGVTHVAMESTGVYWKPIYNLLEGRFTLLLVNARHVKHVPGRKTDVKDCQWLAQLLQCGLLKGSFIPPRPQRELRELTRHRTQLVAEKTRAANRIQKVLEDANIKLASVASDILGASGRDMLRALIAGEQDPVKLADLARRQLRSKIPQLALALEGQVTEHHCFVLGELLDHLGYLESQIERFTRRIEEVSHPFASAINLVTQVTGFDQRAAQNVVAEIGADMSPFPSEGHLASWSSVCPGSNESGGKRKSGKTTKGNRWLRSTLVQAAWAATRKKDSYFQAQYRRLAARRGKKRAILAVAHSLLVVIYHMLKTGSTYKNLGGDYFDKLNKNRLLPFLLKRIKDLGYQVTLEAA

SEQ ID NO: 149460 - protein, 353 aa, unidentified
MGLDVHAAKVVAAIADSESGELAVRKMGGATEEVADFCAGLPAPVRVAYEAGPTGFGLARALQERGIACVVAAPGKIERPAQDRVKTDRRDAERLVRLLMIGGLHAVRVPTPAEEAMRDLVRAREDVRGDLMRARHRVGKLLLRHDLRFEGNNWTERHREWLAGIELPEPVAQSVLLDGVGSIEALLVRRDDLEARMVALVPGSPWEQQVARLRCLRGIDTLSALGLCAEVGDFERFERPAQLMSYLGLVPSENSSGERRRQGSITKSGSRHARRLLVEAAWHYRRVPRRSRELRRRQEGQPQAVCAISWKAQQRLHRSWARLDSERGKRRTLCAVAVARELAGFCWAVSTAD

SEQ ID NO: 149461 - protein, 456 aa, unidentified
MHKFYLGADVSKGYADFVIIDAKKQPVEKNFQLDDTFEGHCLLYNKLYTFCKDHPDSIIYAAVESTGGYEKNWHHSLVKFQSTLSLNTAHLNPFGVSHNRKAGMKRNITDKISAQNIAEYMIAHPEKVSYQPQDYLASLRKQWGFVKMLTKQSTQLLNQLESVVYNANPEALIYCKDGMPDWILKLLKSYPTASRLAKAKIKSVAKIPYISSERARNLVAAAKKSVACTTDKVTEQLVIATVKQIIHLKKVIKRQSEIMANECPIHEVELLKTFKGISDYSAIGLILNMEAVERFASTKKLASYFGIHPVYKKSGDGVWGIHMSKKGRKEPRHILFMVAMSAIKCNPLIRSIYLKHTQKGMKKMAAIGVCMHKILRIIYGMLKHNRAFDPDIDRRNREKIVQCKADVCRDKNRRYQDYDPKAPISRRQKMQRKERELSHSDKHTKSGISAPVPKAA

SEQ ID NO: 149462 - protein, 321 aa, unidentified
MQGKAHVDAMAAVYVGIDVCKAQLDIYLHPIGGRFTVANDAGGWRCLRRQLGDLTIAVAVMEATSKYHRAVHRHLDAIGICVAVVNPLRARLFAEASGALAKTDAIDARMLALMGAQLDPAGTPPISPAAEATDELVRARSAAVDERVALANRHGITATPFLRAELTRRIRALDTHIRRLETQISRLIAADPDMAARHAILRSIPGIGPVNAATLCAGLNELGRVDGKQVAALVGLAPFASDSGPKRGHRHIRGGRPHLRRSLYMAALSAIRFNPDLKRFHTNLVSNGKPPKVAITAVMRKLLVLANALVTQNRTWACRPA

SEQ ID NO: 149463 - protein, 406 aa, unidentified
MKVVYEHCCGMDVHKKTISACAITPRDKELKTFSTFTPELLKALDWLKSKGVTHVAMESTGVYWKPIYNLLEAEGFEILLVNAKHIKQVPGRKTDVKDAEWIADLLRHGLLSGSFIPDRDQRELRELVRYRRSLIDERGRELNRMEKVLEGANIKLSAVVSDISGVSARSMIEAIISGIEDPMVLAALARGRMKKKTEQLEQALVGLVGPHQKMMLSAQLAHIDFLDSQIAGLDKEIEERMRPFEEEIALLCTMPGVARRSSEEILSEIGVDMDRFPTDDDLSSWAGMSPGNNESAGKRKSGKTTGGNKHLRCALVQCAHAAARTKGTYFQAQYGRIASRRGAKRAAVAVGHSMLISCYHMLKKHESYRDLGPNHFDELKRTQHVSRAISKLQSFGYIVILEKGAA

SEQ ID NO: 149464 - protein, 337 aa, unidentified
MKYCGIDLHSNNSVVIVSDEEDRIVFHKRLPNDLRQIAGAVEPYREELVGVVIESTYNWYWLVDGLMDAGYRVHLANTTAIKKYEGLKYSGDFADAAYLAQLLRLGLLPEGYIYPREQRGARDLARKRLQLVRYRTAQILSIENTLARQTGARLSGEAVKRLTAEQVEALGFVPDVTLALESNRAVSQVLQQRIEVLEQRLKERVSLRSEYRLLKTTPGIGEVLATTIMLETGTVARFAQVGNFSSYCRCVDSRRESNGKKKGEGNAKNGNKYLAWAFVEAANFALRCCPEAKRFYERKKRKTNTIVATKALAHKLARACYHMLREQKPFDVSRCFA

SEQ ID NO: 149465 - protein, 368 aa, unidentified
MKTYTLEAAPAASAKELKTQEAPKAKRIVIGTDVHLRGYQAARKVDNAAIGAVANLRSETELLLYVDKQCEQAEEVVVVYEAGPLGYGLYRKLRARGVKCLVCAPDSSQQQRKRRKNNQIDARTLTSNLFNYLNGNEAALQLVRVPTPEQEQARLASRQHDQLVEERKRLGAEGNALLLSQGFGSCKHWWRSKALSRLEQLLPGWLFEMLQTWVDLLRALDEKIQRAKAALAKGYSGPRPKGAGANSLVQLGSEVLDWDLYTNRRKIACLAGMVPSEWSTGESQRRGSITKVGVPAIRRIMTEMAWRIIQFRPQYPPVQKWQEVLGGTNRTLKKKAVVAIGRQLIVDLWRLQTGRASAKELNLVMIGG

SEQ ID NO: 149466 - protein, 354 aa, unidentified
MMIIGCDYHPAFQQIAFVDTDTGELQERRLGHREEAERFYRDLAATGVKVRVGMEASGHARWFERLLAELNFELWIGDAAEIRTRRVRKQKTDRQDAQLILKLMLKDDFPRIWVPSWENRDLRQLLWHRHRMVQARTRIMNQLQAVALNEGLRCKKRLWREAGREQLESFRLAPWASRRRRDLLELLDRLSPTITELTQTIEQEAEKCPEARRLMTHPAVGSLTALAFVLIIGRAERFQCGKQIASYLGLVPLEESSGNRRRLGHITKQGHALLRFLLVEAAQVSARSIPEWRNKYFHLAMRRGRKIAKVAMARKLAVQMFWMWRKGWDYEQVKRFGPHAGQPGTGHGEHSNTE

SEQ ID NO: 149467 - protein, 402 aa, unidentified
MNAVGIDVSKSKSVVAIMRPFGEIVSTPFEIKHTASDIHSLIELINSVEGESRIVMEHTGRYYEVLAHQLLEANLFVSAINPKLIKDFDNDSLRKVKSDKADAVKIARYTLDKWQNLKQYNVMDELRNQLKTMNRQFGFYMKHKTAMKNNLIGILDQTYPGVNTYFDSPARSDGSQKWVDFASTYWHVDCVRKMSLNAFIDHYQNWCKRKKYNFSQSKAEEIYGKAKELVPVLPKDAITKLIIKQAVDQLNSASTTVESLRTLMNETASKLPEYPVVMAMKGVGTSLGPQLMAEIGNVSRFTHKSAITAFAGVDPGVNESGTYEQKSVPTSKRGSADLRKTLFQVMDVLIKTHPQDDPVYQFLDKKRAQGKPYYVYMTAGANKFLRIYYGRVKEYLASLPES

SEQ ID NO: 149468 - protein, 368 aa, unidentified
MNTVKFIGMDVHKNSITIAICDADRSDQPRIYGAIDNDLSALDKFCRKMVSTASRLHFVYEAGPCGYGIYRHLTRNGFDCMVAAPSMIPKKSGDRIKNDRRDAKKLARLHRAGELTAVYVPDQQDEAMRDLTRAREDAVIASRKAKQRLRAFLLRNRVIYTGRSRWSQAFFNWLSDVAMPHPAQHIALQEYIDAVHENLKRVERLTDQIRLLTSGWRLAPVVSALQAARGVSLIVAATLLAELGDLSRFNNPSELMGHLGLVPSEYTTGDSIKRGGITKTGNSHARKVLIEAAWSYRMPARVSRLLLKRQQELPDQVRQIAWKAQLRLCARFRKLVAGGKSQQVAATAVARELSAFLWAMAKQVQPAV

SEQ ID NO: 149469 - protein, 464 aa, unidentified
MQSKRVSGKRARRSRPLLERVNANAAGIDCGAGAHYVAVPPERDPEPVRCFKSFTDDLHRLADWLVACGVTTVAMEATGVYWIPIYEILEGRGLEVLLVNARHVKNVPGRKSDVTDCEWLQQLQSVGLLRGSFRPTAEIAALRSYLRHRETLIQSSATTVHRMQKALVLMNLQLHGVISDITGTTGLRVLRDILRGERDPVLLARHRDPRCQASQGEIAAALTGHYQPEHLFVLGQNLELYDVLQGQIRSCDTQIEAYLRRLAVDTPVPKDSLPPARSRRKLSRNEPTFDIRSVLHQLSGTDLSQVHGIGSYNALRLISEIGTDMARWPSEHHFTSWLTLAPDNKISGGRLLSSRTQPSANRAAAILRGAAMSLGRTQTALGAFYRRLAYRIGKAKAITATARKLAILVYRILKGTLIYKDPGADAYDSRRREFVLRRLRDRAAGLGFSLVSRQTGELLEEGVS

SEQ ID NO: 149470 - protein, 339 aa, unidentified
MEITTIGLDLAKNVFQVHGITEDEEVAFNRPLRRAQLLPFFSKLEPCLIGMEACSSAHHWGRELTALGHDVRLIPPIYVKPYVKRGKSDAIDAEAICEAVTRPTMRFVAIKTVEQQALLSLHRARSLLVRQRTQLINGLRGMVAEFGVYIARGLARVIGFAEDILMGEVLDLPEIANEVIHNLCEHLMALHLRLRWYEDRLKLVAKEDARVRLLRTIPGVGAVTASAIIASIGDGHQFSNGREFAAWLGLTPANKSSGGKEKLGRITKMGDQYLRSLLVVGMTSLVRQTKSHPERASKWLISLLERKPARVATVAMANKTARIVWAVLTRNEPYTPHTA

SEQ ID NO: 149471 - protein, 348 aa, unidentified
MVIGVDTHKYVHVAAALDTIGGVLDSRSFAADSSGYEQLIDWAAGFGAKHLVFGIEGTGSYGAGLTAAVRRRDIGVIEVLRTDRRDRRLRGKSDTLDAENAARAVLSGSATATPKTSDGTVEMLRQIKVAKDVAVKARTAAMVSLKQVIVNAPPELREQLQPLPKMTLISRCAGLRPGQVNSVAAATKHTLRSIARRWQQLNDEIKTHETLLGELTGNLVPQLVAAFGVGPDTAAELLIVAGDNISRVRSEAAWARLCGVAPIPASSGMTNRHRLNRGGHRQANAALYRAVIVRMQHHEPTRAYVARRTAEGKTKGEIIRCLKRLLARETWALMRPLRTRPKQDQQAA

SEQ ID NO: 149472 - protein, 414 aa, unidentified
MEVLVERCAALDVHKDTVMACVRRPGSGRVREQEVREFRTWTSALAELRAWLTAQGVLQVAMEATGVYWRPVWSALEAMGGVEVLLVNAQHVKNLPGRKTDVADAVWLAQLLECGLLRGSFVPPPVIARLRDLTRYRTRLVQDRAREVQRMQKMLEIAGIKLDSVVSDVTGKAARRMLDALVAGNTDVEAMADMALARMRSKIGELRLALDADVTDHHRLMLSLHLGHIDQLTATIARLDEEVVREIDPFVEQVQLLCTIPGIGQRTAEIVIAEIGVDMSRFPTAANLASWAGMCPGLHESAGKRRSGRARKGDRSLRVALCEAAWSAARTRDTYLGAQFRRFSRRMGKKNQGKAIFAVAHTLLVIIWHVLANEVPYDELGADYFDQRDEQAETRRHVAALRRLGHDVTLTPAA

SEQ ID NO: 149473 - protein, 387 aa, unidentified
MIEEAASPDAVLGLDVGKSSHWACLVTRAGEVLVNRPVANREPDLDALMSRVPAGTLVVVDQARNIGWLALRRARLAGLPVAYLPGSAAHGAARLFAGEAKTDERDAAVIAKTALGIPDALLPAPEPDGRLEAARSLASQRDHMVTCATRDKNRLRSVLLESCPAFEALADLSDDRWLAALEALGGPWGILDAGKRALGAATRGGDRAAFDAAWAAAESSTRPSEYMVAAENPQVEVLARRIREASAEARRLDGEIAALLREDGTYGCLPTAPGIGPRTASELVIAIRIEDFPDHGRLASYCGVAPRNRRSGTSISSVTASRQGNRRLKNLLIFSCNSLARSGGRFGEYYRSCRGRGMCHGEALKATARKRMKVIYAIMRDKVPYAA

SEQ ID NO: 149474 - protein, 377 aa, unidentified
MKKDNIAKLQVTKSQIRRMAAKQRLTVGLDLGDRSSRYCILNEAGGKESEDQLATTKAGLEWLFGKMAACRIALEVGTHSPWVSRHLAGMGHEVIVANPRKVRLITQSVKKNDRMDAQMLARLVRVDPRLLRPIQHRSEQAQEHLRVIRVRAALVEARTMLVNAARGLTKATGERLPSCDADQMGVERVESLPAGLQNSLRPLLEEVESLTEKIQALDQQVEQIARTDYPETSLLRQVSGVGSLIALTFVLTVEDRERFQKSRDVGCYVGLRPRQSDSGESEPQLRITKEGDPYLRKLLVQGAHCIMGRRGPDTDLKRWGLKLSARGGKNAKKRAVVAVARKLAILLHRLWVTGEVYEPLRNNQAEPPVKETGKAAA

SEQ ID NO: 149475 - protein, 427 aa, unidentified
MDAMRECCCGLDVHQAQVTACLLKGPLSQKAKKQSREFSTVTVGLLALRDWLLENDCKEVAMESTGVYWKPIYNILCDTCEVTLGNAADIKNKPGRKTDKKDAEWIAELHRCGMISKSFIAPPDIQELRDLTRYRSKLIGQSTGERNRILKQLESVNIKISTYMSDVFGVSGRQMLVALMDGEVIEPKAVAELAKGVLRKKIPELVDALNGQVTKHKREMIRYSYEHLLYLEKQIEQLEEQITNHLLPYQKEAMLLDTIPGVGPKIAAMIIAEIGVDMSIFPSPAHISSWSGVSPGNNESAGKKKSSKIQKGHKWIRAALLEAAWSAQKTRTFLGAKFWKLAGRGGKKKAAVAIAHKILIIAYYILLTGEPYRELGKDYLEQRRPVSREQLAVNYLKKLGYTVTESSTSLTQEQLQASQTIAKDKAG

SEQ ID NO: 149476 - protein, 387 aa, unidentified
MRSTPPKTSAQSRAATHGDTAMLYASLELSSTTWLVTSLAPGSDKMSKHKIEGGDSCGLLELLHRLQSKAAKRLGAPVRIVTIQEAGFDGFWIDRLLKSEGIESHVVDAASVAVPRRRRRAKTDKIDGELLLRTLLAWLRGEPRVCSMVVPPSPEEEDRKWLARERDILVNERTAHTNRIAGLLSTQGIRGYRPLRRDCRARLEDLKTGDGRPLPQRLNAEIGRELDRLELVKQQIAEVEAARDALLVAEDRSPGKLLLQLRSIGPEIASVLWLEGLYRSFDNRRQLAAFSGLAPSPWRSGKIDHDQGIAKSGNAKLRSTMIELAWLWLRYQPDSELSRWFRTRVRGNKTRRYRKITIVAMARKLLIALWRYVTEGVVPEGAVLKAA

SEQ ID NO: 149477 - protein, 341 aa, unidentified
MEYCGIDLHAEYSQICILDEDGEVMETSRVRTSRKALERFFRRDHMRIVMEAGGSSPWVSRLLDSLGHEVVVCSPRRVRLIAESKLKNDRVDAEVLARLVRLDPEFLKPIQHRSEEAQLLRANLKVRSAMVEARTKWINTVRGLLRGFGYKVAGKVPNTFAERVDQMELPGELRAVIEPLLEQLDLLSGEIIRRNEHLEEMVKELPEVDHLREIPGVGPVVATYFVLTIDDPNRFSNSRDVASFFGLRPSMRESASVTHFGRITKEGDPEMRRLLVQAAHACLLTKADSELKSWALALAERKGKGKAAVALARKLAVLMHHLWVTGEVYQAFPNKQATQAA

SEQ ID NO: 149478 - protein, 420 aa, unidentified
MRNAGIHANSLLEVRRMYNAVGIDVSKSKSTVAVLQPGGTVIRKPFDISHTSQNLNELADYLSSLDGTTKIVMECTGRYHEPMVKALSEAGLFVSIVNPHLIKNFGNNSLRKVKSDPADARKIARYTLDNWTELRQYSGMDNTRTQLKTLNSQFSFFMKQKVAAKANLIALLDNTYPGVNKLFESPTREDGSEKWVDYAYSFWHADCVRKIGLKAFTERYMSFCKKHHYIFQQDKPEKLFNASKELVAVFPKEKTYKLLIQQSIQQLNLASEHVERLRREMNELASTLPEYSTVMGIYGVGKTYGPQLIAEIGDVSRFTHREALTAFAGVDPGVDESGQHKSKSNRASKVGSARLRKTLFQIMTTLLQNAPEDDPVYRFINKKRSQGKPYYVYMTAGANKFLRIYYGKVKECLRNLEQTE

SEQ ID NO: 149479 - protein, 385 aa, unidentified
MTATTRSFDPTAFENTLFVSFELGEGRWILSLTSGFGEQVLRRSVRSRDREAVVRVMEVMKERFGLSSDCHVVSCYEAGRDGFWLHRFLDSQGVENLVVDSSSIEVSRRRRRAKTDRLDGESLLDLLLRHQARSRKKVWSVVRVPTVEQEDRRHLHRELTSAKKDRTRVTNRMKGLLANHGLTLDLKKAVPAQLAALRQWDGSPLPAGLQARLAREWERVQFYTGLIERLEAERRELLRRAEDPVIEKALQLNTLRGIGVNSAWLYVMELFGWRELRNRKEVGSIVGLAPTPHDSGQSERERGMSKAGNRHVRAMAIEIAWGWLRFQPNSELSKWYQRRFGSGSKRLRKIGIVALARKLMIELWRFLETGVIPEGAELKTDVRIR

SEQ ID NO: 149480 - protein, 466 aa, unidentified
MRQLETNTRRQRRAAMRAAAKGEAFPLVRPNAAGIDVGSRVHYVAVPPELNLPVRSFDCMTEDLNALRDWLKTCGVKTVALEATGVYWIPLVEKLEDSGFEVYLVDARQTRNISGHKTDVKDCRWIQKLHSYGLLAPAFRPEKSITVLRSYWRQRQGLIASCAQQIHLLHKALDQMNVQVHKVLSDITGQSGMRIVRAIVAGERDREKLASLCHSGIKCTQAQVARALEGNYRPEHVFALGQALEAHDFFQHQLEAADRALEAQIATVPSRHTEPQEGRPQAQTRAKRRKNQPHFDLREQLRRIAGVDLTRVEGIDALTAFSVVSETGMDMTRFPSEKAFGSWMHLCPNNRITGGRVHSRRVRPGVNRAGQALKVAAQSLHHSKSALGAYFRRMKARLGPQKAIVATAHKLARLIYRLLKYGEAYVAQSEAQYQQLTRERALQQLTRRAQHLGFALVCTATGEVVS

SEQ ID NO: 149481 - protein, 366 aa, unidentified
MLQKAELSCEADSENYLGGSSETMYYIGLDVHKRTISYCVKDAAGRVHMEGKIGSTRRELDGWIKTLPQPRTIAMEATIFTGWIYDHLLPHAQQVKVAHPLMLRAIAAAKRKNDKIDASKIADCLRCDFLPECHMASTEIRDRRRTLRYRGLLVKQMVQMKNRISGLLLEKGVTHTKRRLHKVGYFAELMAGNEEIDQSIRPLLKLSREHIVRAQKLDYALVSSLERDPLLMERLKRLRTVPGVGPIKALTWALEIGDVSRFRSIKQAISYCGLCGAEKSSADKMLRTPISKQRNKHIQHVLVEAAKLAPRQCHELALIYEKEMQRGNRNRATLAVARKIVAYLLAVERRQQDFVPSEEFGGTAAA

SEQ ID NO: 149482 - protein, 354 aa, unidentified
MATTSKQNDFTLASVGIDIGKDVFHLVGFDLNGKIVLRRKIRRLALIGEFEKLPPCIIGMEACLSAHFVSRTLRKLGHEPRIIPAIYVKPFIKGQKNDYNDAEAIAEAAVRPNLKFVREKTQDQLDLQALHRVRSRLVSRRTATINQIRAFLIEQGITVRTGAHALRNSLFAILENRKDEISPRMSDLITGLYEDWLRLDERIKIITGEIEMISKSEENCQRLMSVPGIGPIISTAVVAAIGTGDAFRRGRDFGAWLGLVPRQYSTGGKTVLGRISKRGSKYLRTLFIQAAHVILMRPNNWHKFSFGPWLTEAATRLHRNKLATALANKLARIAWSVLANQKAFDANRKEVTAI

SEQ ID NO: 149483 - protein, 461 aa, unidentified
MQIIHRCCCGLDVHKKLIVACLISLNEAGEFQKEIRHFTTMTKDILVLADWLTSVGCTHVAMESTGVYWRPIWNLLEGLFELLLVNAQHIKAVPGRKTDIKDAEWIADLLQHGLLRASFVPPAPQRHLRELTRYRSTLLAERARLVNRLHKVLEDTNLKLTAVVTNIMGLSARDMLNALLQGETKPEVLAKLARGKLRKKREDLEQALVGRVDDHHRFLLTSLLTHIDFLDEQVGDCNGKIEQFLSAPSDQKAEQVSCASDDQPQEQAPVSSTLVGTEAALAQDRVPEQGPKVPLSSQQAIALLDSIPGVNQRIAEIFLAEVGTDMQRFPTAGHLASWVGICPGNHQSAGKQIRGTTRKGDRWLRQALIEAAQGAMRTKDTYLSAQGRRLTHRRGKKRAVVAVAHSILIIAYHVLQRQQPYQDLGSNYFDERERSAIARQSVHRLEQLGFKVTLEAAGEAA

SEQ ID NO: 149484 - protein, 400 aa, unidentified
MISVGIDVSKGKSTVCILKPYGEIVSKPFNITHTQKDLSELSSMLFRLNDEVKIVMEATGIYHLPVLTYLQEKGFFVSVINPYLMKSYRNESLRKAKTDKIDSRIIANYGIDHWFKMKEFQTSGEIYEELKLLGQQYRHYMKLHLLSLAELTHLLDLTMPGIKNLLASWNETNRKDKRSDFVERFWHYDVITSMSEQEFTEEYILWAKEKKYVPSQEKAKVIYTLAQESIPTLPSETSSVKMLVTEAVRVLKEVDATLGLILSRMQEIAKTLPEYSVVREMGGVGNTLAPKLIAEIGDVRRFRNGKALVAFAGIDPPPYESGQFVGCNRKISKRGSASLRKVGYETMRSLKMRSRPEDPVYRYVVKKESEGKSKKSAKIAGLNKFLRIYYARVTELYKNL

SEQ ID NO: 149485 - protein, 412 aa, unidentified
MKDLLEISCGLDVHKEKIVACILTGPLGKPTRSEIREFSTLIPDMIALRNWIVSKNCHHVAMESTGIYWMPIYEILEDAFSGDITLLVVNARHMKNVPGKKTDMRDSEWISTLLRAGLLNGSFIPEKRIREFRDLNRYRKSVIRDITSQKNRIEKFLQSSGFRLSSFISDIFGTSGRNIILHLIEHGQIDKTALDSCLKTKTRNRIDEILMSVNGTLSEHQKAFLRILMTHYDSLKKHLAEIETSLEEDMAPFALQVEQLNSIYGISTTASCAIIAEIGIDMKPFKTAEHICSWAGLCPGNNESAGKRKSTSVTKGNPYIKSMLCEIAWVIAGKRNTYLSAWYWRIKQKKGAKKAIVALARKLLVIIYTMLKQGTVFDESCFETRRKHCEQKQLSRYIRELEKHGYHVEAQS

SEQ ID NO: 149486 - protein, 424 aa, unidentified
MKRTQNEKILQIKNETLVVGIDIGKNNHYARAFDYRGMELAKLLRFSNTKQGYEALNDWMRKIMQENNKTESTVGFEPTGHYWFTLGDHLQKEGHRLGIINPFHVKCTKELDDNSPTKNDHKDPKTIAMLVKDGRFRDVYIPEDLFQELREAVLERERLLEQLIRISNQVIRWLDIRFPEFNEVFKDWSRNGAWLALKHYPTPAKVVTAGATGLMNTWRQEMKKPSIKKAERLVQAAAESIGRTSGSKAAEAALQNLLTQYEMINQQKQNIERLMQELLLKIPNASKLVDIKGIGMVTAAVIVSEIGDINRFQDPRQIQKMAGLSLRENSSGKHKGKTTISKRGRKRLREGLFRTIITMLATNKEFRTIHQRNLNREKNPLIKMESIVALCGKLIRVIYAILTKGNDYDADKMMNDMNRSMKAA

SEQ ID NO: 149487 - protein, 286 aa, unidentified
MDTLYAGIDLHSNNNVVVVTDDEDNVVYRKRLQNELGDVLDALSPFEKNVAGVVVESTYNWYWLVDGLMDHGYQVHLANTGAIEQYSGLKYSDDESDARWLAALLRLGILPEGYIYPKGERPVRDLLRKRAHLVRQRTSNILSIENLFARNTGRRLSANGVKRLTDADVDAMLPNCDLALAVKSSVALMQCLDAQIKTLERVALKRMRLHADFKRLLTVSGIGPVLGLTIMLEVGDIKRFAEVGDFASYARCVGSARISNGKKKGKGGSSYESVHQRAIILDRITG

SEQ ID NO: 149488 - protein, 315 aa, unidentified
MHQHAEQSRAVAGIDVSKNELHVAMGNEVVTLPRTPHGLRKLTKHVAQAKLVVMEASGGWEQSVFKALHAQGIAVAVINPRQAREFAKALGRLAKTDRVDAKMLAAFAERMDPRQTALKSKELEHLCDLLTRRQQLLDMRTAEKSRLGHGRWDESIGAHLGWLEAQLQQLNGDLEQCTQQTHAIRQRVGRMRTIPCVGPILSMELTGFVPELGTLSGKQISALVGVAPLSCDSGTRQGKRRIWGGRARVRRVLYMAAVVGTRFNPVLKVFYERLLAAGKPKKLAIVACMRRLLVWINAMMRDQCDWNPALFSAST

SEQ ID NO: 149489 - protein, 361 aa, unidentified
MTKIKQKKLETISYEGQTIHVGLDVHKKNWSVSLYLNDSFIRTFHQESNGQALLQHLQSHYPGGHYKACYEAGFCGFSIQRELSLLGIDCSVVNAADIPQTNKGMLSKTDAADSRRIGEAFAKQLVKPIYIPKQEIEADRNLIRYRKHVQDDLRAKKHKIKSSLFTMGLKIPLEHDKPYWTNNFITWLKALSIADSGNKLTIDLLIDDVLVLRKRLFTTNKEIRLLSQSERYKSTYTLLTSAPGIGLITAMTMITEIGDINRFDSFTKFNSFIGLCPSEFSSGERIHKGKMTTRNHKTIRALIIESAWIAKRNDPALTLKYHELLKTKTAKRAIVIIARKLLSRLFTVWKTKIEYEKGVLK

SEQ ID NO: 149490 - protein, 344 aa, unidentified
MECYVGLDVSLKQTSICVVNEKGLVVREGVVDSVPEAIAGFVRSRAPGAVRVGLETGPTATWLWTELARLDLPVICIDARHAKAVLKMQVNKNDRNDAAGIARIMQTGWFKEVHVKDLDSHAVKALLASRALLVKIKRDLENQVRGLLKNLGLVVGHGTFNVFAVRAKELIADRPELTSAVSPLLTARTAIEQQIGELDRRVLKLSRQDAQARRFMTVPGIGPITALCFKATIDDPARFRRSRSVGAYIGLTTRRHASGELDWSGRISKCGDAMLRMYLFEAAGVLLTRVPKWSALKAWGTRLTKRNGLRKAKVAVARKLAVILHRMWVDGTEFNWSNNKEVAA

SEQ ID NO: 149491 - protein, 350 aa, unidentified
MIIIGVDFHPAYQEIASVNTDTGEYQEKRLAHPKEAEEFYRSLASVGQAVRVGMEASGQAQWFERLLEGLRLELWRGDAEVIGAKRGRKQKTDREDARHMLKLLLKDDFPRIWIPSWENRDLRQLLWHRHRMVQARTRVMNQLQAVALKEGLRCKKRLWRASGRQQLESLQLAPWSSRRRRELLELLDRLNPTIAELSQAIEREAEKCPEAQRLMTHPGVGALTALAFVLIIGNAERFGCGKQVASYLGLVPLEKSSGNRRRLGHITKQGSSLVRFLLVEAAQVTVRSLPEWRSKYHHLVMRRGRKTAKVAMARKLAVRLYWMWRKGWDYEQWKKFGSYVGQPGNRDGVR

SEQ ID NO: 149492 - protein, 354 aa, unidentified
MNTTQVFEKRKIAVAIGIDLAKDHCDVVAYNADNKICFTKSNWAYPHLMEWLANAQPAVVLMESCKGCHVRARDIADLGHDTRLVKGADVKALRNVCQKNDIRDADFIARLLYVPGTKFVFVKNQRQQSLQFLQNEYKSFQELRIQVGNQIHAGLEEFGCPAPKSQKFVQTRMMAHLEKNAELIPEAVMASFHRRREMWLNLFEQEEEAKKRMEEIAKTDDDAKRIMTVPGVGAQTAVGMLVHIGGDIGRFKNSGQFAASIGLVPKQNSTGGNTTLNGITKCGPKRLRANLVQCGQVILMHADKLKGNFGDWVRKLRDSGKKRGVIACAIAAKIAKIIYRLMKDKVDYTPVPSR

SEQ ID NO: 149493 - protein, 291 aa, unidentified
MDRYIGIDVSKAMLDIATLPDGESWTVTNDDQGLAELLPRLGALAPTLVVLEATGGFELLAALTLAKAGLPVAVVNPRQVRDFARAMGRLAKTDALDAGLLATFAERVRPEPRPLPDEAALHLESLVTRRRQIVDMLTAEKNRLGFARDPVKRDISQHIRWLEKRLADVNGDLQDAVTASPLYHAKAALLRTVPGVGQVTTLTLLATLPELGHLSRHQIAALVGVAPLNRDSGTRRGKRMVWGGRAPVRAALYMATLVGIKHNPVLRSFYDRLRAAGKPFTVAATACMRRR

SEQ ID NO: 149494 - protein, 384 aa, unidentified
MGEPSTFVGLDAHKDTIVGAMLLPGAVHPVEWKLVNEPGAVRRLARKLEREGPDGVRCCYEAGPGGYVLQRQLMAAGIPCTVIAPSLIPVKPGQAIKTDRRDARKLAEWFRAGLLTEVHPPTEDEEAVRDLCRARDDAQRDLTRAKNRLSKFLLRRGCVYCVGRKPTWSQKYWRWLHALTFAWPADQIVCEDYLLAVEQVEARLEPLDDQLERVSTTAPYRAPVAALRCFHGIDTVTALALVAELHDPRRFPSARQLTAYLGLVPRENSSGGRRRQGGITGAGNRHVRRLLREAAWHYRHKPQIGRALRLRRCSQPPAVDRTRRPGAAAADAAPSPHDVPGQAPQHRHGRHRPRTGGPSLERTAGHDASTELSLKRTEGAADGG

SEQ ID NO: 149495 - protein, 330 aa, unidentified
MEQQYIGIDLHKASFHACAVTETGTRLWEASFPRSAEGIAALAAREVAGAQLAVEATGPTWAFVDAVTAIGVQACVVDPRKTKLKAGFAAKTDRLDARRLADALRRESVVSIYIPPPAIRQLRELCRGRQQLVRLRTRVVQAIRALLLRVDAPEPPVTSLIGVRGLAWLTTVHVDDASEATLRRLERVLRAVHAEARTAEAAVKATAAADPIAVALTQIVGVGPILSVVLRAEIGTIARFASGAALASYAGLVPRVDASAGTIRYGRITRQGSPWLRWALVEMALHATKRSDARGRWVRRLAVHKGIQKARVALARRMCEEVVQTWRQVS

SEQ ID NO: 149496 - protein, 370 aa, unidentified
MGNRSMFVGLDVHKETIDVSIADGERQGEVRHYGVIASDLEPLDKVVRALRAPSRTLHFVYEAGPCGFGIYRHLTGRGEDCVVVSPSMIPKRSGDRVKTDRRDSQMLARLHRAGELRAIYVPDDTDEAMRDLVRAREDAVSVGTQAKYRLKAFLLRQGRRYPGREGWTLPYRRWLTDLSFPSAAQHIALQEYRDAIAETEQRIDRLTEQLRQLAPTWRWAPVVAALQALRGVSFLTAVALIAELGDLTRFRHPRELMAYLGLVPSEHSSGPSVRRGAITKAGNPHVRRLLAESAWAYQGIPRIGRQHAYRQEALPKVVCDIAWKAQLRLTTRFRRLVARGKAKPKVATAIARELAGFVWAIAREVSPTPR

SEQ ID NO: 149497 - protein, 332 aa, unidentified
MKKIIHFIGIDVSKETLDIALIKNNDKSNIYSSKVTNNKTGFKKMKQWLKLEKVSWQEAVFCIEHTGMYSKPVGQFILSLQGNLWMEMSLKIIRSMGVQRGKNDKIDAMRIALYAQRCQDEMKLYEPPRPIVEKLRTLLQLRKRLINSRNSLQVPCNELTTIDEQAGKEATRLIRSSVTALEKNIDVINEKIDELIASDEQLAHEFEIGTSVPGIARITLAYMICFTNEFKNYAGGKQLACYCGVVPFEYTSGKSVKGKPHVHNMANKFLKKLLHMGAIAAVTYYDEFKCYYKRKLKEGKPKMLVLNNVRNKMVLRLAAVIKNNKPYQKIAA

SEQ ID NO: 149498 - protein, 367 aa, unidentified
MEEGITYVGMDVHKRTIAVSVRFPGGGFDERTIPHEARSVNRLVRRWKREAPGAILCAYEAGPCGYGLQRALREQGLACQVVAPSLIPRKPGDRIKTDRRDAHMLAELLEGGLLTEVHPPSPEDEAVRDLCRAREDAKEDQVRARHRLGKFLLRRAFHWGRKNWTVAHQQWLRGLRLEHPADQAIFDAYCIALDQATERVRMVELALQDWASIEPYATPVSWLRCFHGIDTVTAMTLVTELHDFRRFRRPRELMSYLGLIPSEHSSGGHTQRGGITKTGNGHARRVLIECAWHYRHQARVSRALHQRREGQPARVIAIADKAHRRLSGRYRRMTARGKERNKVVVAVARELVGFLWATLAVKERATV

SEQ ID NO: 149499 - protein, 453 aa, unidentified
MSQHRGKGRGLSLECIEPNAAGIDVGATEIYVAVPPDRDVEPVRCFKTFTGELQAMAAWLVRCRISTVAMESTGVYWIPPYEILEEAGIRVCLVNSHYVRNVPGRKSDVNDCQWLQYLHSVGLLKPSFRPHASICALRALSRHRASLVESAAVHIQHMHKALTQMNLQIHHVLSDITGVSGMAIIEAIVAGQRDPLLLANLCNSKVRADQQTVVASLTGHYRVEHLFTLKQSLTAYRNYQQLLAECDGEIQRLISAMPSNSDGSNPPSSSSRQKRRKNQFHFDMRSELHRIFGVDLTSVPGISALTAHVLLAEIGPDLSRFPSAAAFANWLALCPGNKKSGGKVLSSKTRPTNSRASHALRLAAQTLARCHSHLGSFYRSMRARLGGPQAITAAAHKLARIVYHLLTTRAHYDETVFAVEQQKQKLRLHKRLSKQAQLLGFQLIPITSEEHCS

SEQ ID NO: 149500 - protein, 316 aa, unidentified
MSAKKRFIGIDISKQLLEVAAHGSDYRFCCPNEESAFGELIVELVLLKPKRIVLEATGGLEIPVATALYAVGLPVVVVNPRQVRDFAKALGQLAKTDRLDAAVLAHFAAAIQPALRPVKNAAALELDALVTRRRQLVEMLAAEKTRLSTTATSSVRAEVQTHIDWLKERLAAIDMQLRAQLKDSPIWRVKDDLLQTVPGIGPVTALSLVANLPELGQLNRQQVAKLVGIAPLNRDSGSLRGTRHIYGGRSSVRTALYMATVTAVRCNPVIKEFYQRLLARHKPFKVAIVACMRKLLSIVNVMIKTQTPWQLVQKSV

SEQ ID NO: 149501 - protein, 364 aa, unidentified
MKKLVLKNSEAQPRAAARPEPGERVIIASDLSRSKWVHAIWWQGERRRVVTTPGELHHLKALVAQYSGCSVELVYEACGFGYEIAWWAQEQGLPVLVVAPSTIERAPGAKVKTDRYDANTLAAGAERKLLKGAHIPTREQHEYRQLSRTYTQVLKDRRRQQTRLRLLLQEHGRVSPRKQSWGEYKSWLSTQTLPTPVRACVDELLVLRDAAEASRARTERALREVSRLPQYAPLVQALSDQEGVGWFTSIRFILELGDIQRFPNADSLPNFLGLAPSEYSTGETVRRGHIRRCGPKHVRSWLIECAWQVIRRGLDTTLVAFYHRLVERTGKKRAIVAVARKLAIRLRARWLEFEASTPGEAHAA

SEQ ID NO: 149502 - protein, 351 aa, unidentified
MKTEHTASPKLFIGIDIHKRSWKIHCSTDISGGKTFSMSPSPEGLKKYVDKYFSNHEVSTAYEAGCCGYHAHRCFESYGWCSLVVNPADVHRKGKEKHTKTDKIDAQLIARELKDGRLDGIHVPDIKREQLRSLFRRRNDLVKDYRRIKSLIKSQLLYFGVEVPQQFDNSHWSHGFRHWLDALEFEYSPARATLDSRMRQFRFVDQDLRDVSTQLRRFCKTYYKKDYKLLRTIPGIGGIVACGILCELGDLRRFRSLKHLSGYVGLAPGIHQSGDNMRTTGMTRRAHRLIRSYFIEASWQAIRTDPVMQSYYRSHLGKNVKKVIVKVARKLLSRTLAVIKTEVPYTIGVIE

SEQ ID NO: 149503 - protein, 338 aa, unidentified
MKLYGGIDLHSNNSVIHLIDENGDAVLKKRITNSLPMILALLEPYADAIEGLVVESTYNWYWLVDGLMEASYKIHLANTDAIQQYSGLKHGDDDSDANWLANMLRLNILPEGYIYPKKERMVRDLLRKRIQLVQQKSLNLLSIQGLYVRHLNQRLNANKLKKLTPQNIADDFADINVQLAVNGNLAVQQCLAQQINGIEKSLKQQLRLRDEFIQLTSIDGIGLILALTIMLETGEISRFEKAGNYASYCRCVNGARYSNGKKKGSTNTKNGNKYLAWAFIEAANFAIRYNDTVKKYYQKKLAKTHMMVAKKTVAHKLARACFYVLRDQVEFDVNKAFG

SEQ ID NO: 149504 - protein, 340 aa, unidentified
MDVVIGIDPHKATHTAVALGEGELELARLEVRSGRSQLERLLDWATPFPQRRWAIEGAEGLGFLLAQQLVAADQLVVDVPATLAARTRLLGNGRTNKNDPNDALSVAVTALRHRELRTVTTAGYSELLRLLAKRHIDLSNQRTRLVARLHALATELSPGGIGKKLNSTDAAKFLAAITPTDAVAQLRWDLIAELADDIARIEAQTKQSERRLRDAVAVSGSTVTDIYGIGPIIAAMLIGNTGDINRFANRDRYAAYNGTAPVEFSSGGRVVHRVSERGNRTLNHALHLAAMCQLRQPRSDGRAYFDRRVAEGKTNKEAIRALKRQISNIVYRHLVADAAH

SEQ ID NO: 149505 - protein, 428 aa, unidentified
MKFKQSDGQNQRIERITPLHLVIGIDMAKETHVAQATNFRGIVVSKRHLSFSNTIVGFEKLERWIAELQQKHRLMKVIIGMEPTGHYWFNLANWLVDKCLNVVMVNPATIKRNKENRDNCPSKSDPKDALVIADVVSRGYYYEYSRQALVFQRLRTMMSDREFWVTNSVRLQNRIVRWLDIRFPEYPSVFKDWTCKRSLATLKVFPCPRDLEKFTVPEVIEAWRAYMQRAGGSTGMEKAAQLIAQARRSVGDQTAIHEAKMDLQRLVEEYERIISMLEQIETDIQALFTEIPLVKQLRTIKGLGTIFIAAILAGTGDLRQYAHGRQLLRKAGLNLAECMSGKRKGRIVLSKRGDSTLRKYLYLATIQLVGSNPVFRKLHEHNVQIKRMKKQQSIFKLLGKLARILVGLVQRGEKFSPEKTVRNWAQVA

SEQ ID NO: 149506 - protein, 371 aa, unidentified
MEEFSKFVGLDVHKETIAVSIAEAGRGEVRYFGEIANTPEAVAKLARQLGKGGARVSFCYEAGACGYGVYRQLRELKHECMVVAPSLIPKKAGDRVKTDRRDSLSLARLHRAGELTPVWVPDGAQEALRDLTRAREDMKHLQRQAKQRLLAFLLRHGNRYAGKSNWTQAHYRWLEKVKFGQPVQQIVFQEYVDIVKAITKRVEAFDTQIERAAAESVFWPVIEGLMALRGINLLTATTVIAEIGDLRRFASAPQLMAYLGLVPSEHSSGGTKSRGGITKTGNGHVRRVLVESAWTYRHPARKTAVLQRRAERAPDAVQDIAWNAQKRLCARYRRLEGKGKLKVQVCTAIARELAGFIWAIGQTLPQPAANA

SEQ ID NO: 149507 - protein, 428 aa, unidentified
MNVEESNRLKEFRQLRKEIRGSKEHLIVGIDVAKNKHHAFFGMATGKTLLRRLVFENDLAGFEKLHMHMEALQVQHCLAKVVFGLEPTANYHKPLAEYLIRCGHAVVLVSGVAVTKNRELLDGRWDKNDDKDSANVADLISQGKCLYYDYPSIPIRDLRSLLSLKRRLKKQEHGAKVRIRNHLLAQYFPEFDRYFGKGGSEGLSIVKWCLKPSIIANLEYDEFVHLVAPRVKTIGQENRLKAIWDLAIESIGCSAGEALGFEGKLMVEDLQQIKESIRAVDDHIKDICLGFPEYSYLLTIPGFGPDVSSKVLGAIGNPFRFDNGRQVLKLAGYDLSANRSGKTSDSGVPVISKRGNAYLRYALYQAAFIASTSNRYFIVYYTNKLRSREREKGIKTKMKVKLAAKMLIIAWTLMKKKEPFDTKFLDID

SEQ ID NO: 149508 - protein, 375 aa, unidentified
MDEITRAQIARVGVDLAKQVIQVHAVDASGRRVVARAFKRDQFFTWCTQLPAGCVVAMEACSSAHHWGRKLRAQGLEPRLIAAHFVTPYRMEGKGGKNDATDAAAICEAASRPTMRFVPVKTCEQQGVMSLHRVREGLKEERTACINQIRGVLTEFGLVFGKSPKVLRAVLADIIEDASNELSTTARLVVQRAFEHWRELDEHMRWCDRQVGQHVRASPEAKRASKVIGIGELGASALTAGVGDFSQFKSGHQFGAWLGVVPRQASSGGTIRLGRITKRGDDYLRTLLIQGAKAAVMSADKRDDPISRWLVQLTARIGWQKACVAMANKNARILWAVMTREDGFDCKHVSVKPQAKLPDRQPIVDPASISASCLA

SEQ ID NO: 149509 - protein, 349 aa, unidentified
MMVAGDEFLLFIIHHKISKTMQAHTNIYVGIDVSKDELVICYPAQKGWGKAQVLNTLPAISNWLKAFDVQGKHFILEATGPYSQRLIHGLNQAGAIVSVVNPAQSRAMAKVLLKTNKNDDQDAQTLSILGEKLELTAYKMPNDIQKKRKEAFSALASLQKQERQLKNQLHAFSYYVEPNPVAVQALQEVLKSTQLAIESLEKELKPEQDEDEARRTVAQITSIISVGPKTAEAFVALFGNFQHFEKTKGFVKFIGLSPTEFTSGSSVRGKRSITKKGSSKIRALLFNCARNAIQHNPSCKALYERLLEKGKNGKVALTAVMHKLARLIFAVAKSGTIYEPQFVKNLTKS

SEQ ID NO: 149510 - protein, 423 aa, unidentified
MPTYLEPTTGPITRVAIDIAKFSHQALIESSNGRRKVVVFSNDRDGFEVFAKQLDRAGMPADVAFEATGDYHRALAAFLSTKSGVHLHLVSSIATNRTREALYNSWDKNDPKDAQVILHLLKTGGTQIYHDPFVNGYHDLQELANTYHQASLRKVRIYHSIVTHYLPMYFPEAEPYMSSSRSDWFIRLLLMTPCPAAICGYSKSDFIKAASAIQYRKFDRARWLADFYEAAKSSIGVPVRPDCAAIKAFQLTLKEYLHVCQVREQLEDQAALELRDHPDFQRLQTIPGIGPVLALTILAEAGDLRRFPHHRQFLKYCGLDLCTDQSGRARGATKLSKRGNARLRYAFWMAGAVAVNKRENTFRQKFDRYTSNDPKNRDLKRKAYTAVAAKVARVAYGILKAGTSYRRFYEPAIPSGKTPSLGR

SEQ ID NO: 149511 - protein, 375 aa, unidentified
MKEKLRFLGMDVHAETIAVAIAEPDGEVRSLGTIPNRMESVRKLMKKLGPVEKLRACYEAGPTGYVLYWQLAELGVQCEVIAPSLVPIKAGDRVKTDRRDAEKLARSYRSGDLTAVWVPDEGSEALRDLVRAREAAKQDQLRARHRLGKFLLRSGQRPPAGVRAWTHLHLIWVSQIRFAQVAQESTRLDYLHEVEHMRERVLRLEQAIVEAVKLASPALQEVIQDLQALRGIAHISAVTIAAELGQVSRFPGARELMAYCGAVPSENSSGKRTHRGSITKSGNAHLRRIVVEAAWSYDRPPAIWAGLRKRQQTASEEAKEIAWKAQHRLYKRYARLTATGKDKRKIITAVGRELLDFIWAIGTKAEATARQRIAA

SEQ ID NO: 149512 - protein, 312 aa, unidentified
MTYVGIDVSKAALDGADATGQAWQHANDGAGIAATVAQLVARAPTLVVLEATGAYHVPLTAALAATGVPIAVVNPRQVRRFAESVGQLAKTDRLDAALLARFAATVRPVARPLPDAATQELAALVDRRRQLVEMLTMEHNRLAVARRSVQPSVRQTIRALERALRALAEETDRWIQDSPLWRAREDLLTSVPGIGPQTARMLIARLTELGALSAKEIAALVGLAPFAQESGRWRGVRRIRGGRADVRTGLYMATLAAIRCNAVVRAMYRRLVAAGKPKKLAITACMRRLLVILNAMVKHQTRWQASPTPTTA

SEQ ID NO: 149513 - protein, 412 aa, unidentified
MKVLFPRCAGLDVHRDTVVAAVRIQAGSGKTTTEVRTFETTGGALGRLSDWLTENRVALVGMESTGVYWKPVFQILEDRFECWLLNAAHVHNVPGRKTDVADAAWIADLVAHGLVRASFVPPKPFRDLRDLTRARRTVVEEKTREVQRLEKLMQDAGVKLTSVASKLLGVSGRAILEKMIEGERNPQYLAELARGRLRGKIPQLAEALAGTFRSGHHGFLAAQLLERIDLCDEQITDLDHRIEVMIAPFRSTVDRIQTITGVAAVTAAILVAEVGLDMSRFPTAGHLASWAGICPGNNTSGGKRLSGRTRHGNKWLRTALTEAAHAAARSKNTYLASHHAQVRGRRGVQKAIGATRHDILIAYWHIVKNDTDYHDLGGDWHARRRRNPERRKNTLVTELEKLGYTVDIKPAA

SEQ ID NO: 149514 - protein, 309 aa, unidentified
MENIAFIGIDLGKNSFHIHCQDRRWKAVYRKKFTRSKLIEFLATCPATTIAMEACGGSYFMARKLEELGHFPKLISPQFVRPFVKSNKNDFVDAEAICEAASRPSMRFVQPRTESQQAMRALHRVRESLVQDKVKTTNQMHAFLLEFGISVPRGSAVISRLSTILEDNNLPLYLSQLLLKLQQHYHYLVEQIKELESQLKRKLDEDEVGQRLLSIPCVGTLTASTISTEIGDGKQYASSRDFAAATGLVPRQYSTGGGQHCWASASEATRRYEPCWFSAPEYLYKNWNTSQAGWPTGSGSYCAGKVTLS

SEQ ID NO: 149515 - protein, 291 aa, unidentified
MLDRDTGEIVERIVKHEGTAVRDFYAGLPPPIVVGIEATGSMGWFLRLMEELGITCRVGDPAKVRAVETRRQKHDRRDARLLLQLLTEGRFPAIWMPSAELRDLRALLLHRDQWVRMRTRVKNALQGLALAHGLRRGASLWSRDGQARLTALPLPPHAGSRRSELQALHDHLTTHIEALDQQVSAQVDGRPQARRLMTHPGVGPVTALATEVFLGDPSRFADGKAVASYIGLIPSESRVAIASVAADSPSRAIRCCAFCGAKRPFMPRGAIRHSRASIDGSCSSRGSAKRA

SEQ ID NO: 149516 - protein, 417 aa, unidentified
MVDRCAGLDVHRDEVVATVRVPGTGRRRFDQETRTFRTTLAGLALLAGWLGDVGVTLVGMESTGVYWKTVFQVLEDRFECWLLNAQHMRNVPGRKTDVKDSEWICQLVQHGLVRPSFVPPTEIRRLRDLTRLRKAQANERTRTIQRLEKVLQDAGIKLSSVASTSYSKSARAMLEALLAGVTDPAQLAELSKGRMRAKIPQLREALQSRFQIEHHGIMVAQLLSHIDALDAAQRNLTERIEHVLAPHQQIVELLCTIPGVQAHAAQVLIAECGLDMSVFPTSGHFVSWAGACPGHHQSAGRRRSGRMRPGPRWLTAQLTESAKAAVRTKETYISAHYAQLRGRRGEPKAIGAIRHDLLIAYYYIVKDKVPYRDLGPTWQHKRYSVEHRARRLQRQLEALGYAVTLDKTDQPEVEQAA

SEQ ID NO: 149517 - protein, 356 aa, unidentified
MLYLGIDQHARQVTISLRDEKGDVVQARQVSTAPDKINDFFQQLTRERIRNGEPFVAVLEVCGFNDWLIRMLQDYRCHKVILIQPDDRKKRKTDRRDAAALSELLWANRDRLLQGKPVRGLRQVDIATSTDQENRRLTTLRKDAGGARTRIINKIKQILRRYNWQWEMPTKTFPTVSAIAWLKKLVLPEIDRLEMNHLLADLEQVEKRLKELEQVIARRVAASKEAAILSSMPGMGGGFTALSLACRVGRVERFPRAHSLANYWGLTPGCRNSGENSQRLGSITKAGSSTARWLLAQLVLKVLRKDARLREWFKRIKRRRGASIARVAVMRKLATIMWHMLNKRKTYAECRELAAA

SEQ ID NO: 149518 - protein, 358 aa, unidentified
MMTSKLLVWCGIDVSKETFDVSIVFDQPLSDFAKVPVAKFKRDKHGVEGMNFWLADHLRGSHVDIQRVGFVMEATGNYSLELFELLQDQDWENVSIVNPRLVNDYIKSLGKRSKTDRIDARALGFFGRERTPVVHVPRKPEYQQLRDLVRYRRVLIKEKTAISLRLRTTKNKFVIKGLKRQIKSQERLIEGCEKEIKKVIKENPDLSRDAKLLRTMSGVGPVTTWTVLAELGDLRLFQKSRQLSSLAGTAPVVYESGSSVKRKTRLSKNCGKAVREVLYFAALSAVRVPNNQFAHTYERLVKAGKSKKAALCAVMRKMLVVLRAMLISNEPFNRDQDDPCGKPSEKKENKQRNLPISA

SEQ ID NO: 149519 - protein, 311 aa, unidentified
MNSEAYIGVDVSKDLLDVKVLPSNKAQQFSNDDPGIKKFITFIKKIGPQLIVFESTGGLEMLAVSSLVEKHLPTVVINPRQIRDFAKATGRLAKTDSIDADTIARFARDIRPEIRPIKDEHTQLLSALNARRRQIVDMLVAEKNRLYSAPKPNIKSIQKHIQYLERTLEDINKDINKTIKKSPTWHENDRILQSFKGVGPVLSATLLCDLPELGTLNRKKIAALVGVAPLNCDSGRFRGKRRIKGGRADVRRKLYMAAVASIRHNPRMKNFYHKLIDAGKPPKLALTACMRKILTILNAMIKNRTYWIATC

SEQ ID NO: 149520 - protein, 340 aa, unidentified
MLEVKVEKCAGIDVGKKFLAVCILIGLAKQKPVGEVRRFGTSVKELERLRTWLLESGCTEVVMESTGSYWKPVFNILEGSLKVILANPEQVKALRGKKSDPNDSRWLASLLRHGLVQGSFIAPRDIRELRDLTRRRRRLVGDGAAEKNRVQKILEDANVKIGNVLSDVFGSSGQAMLEALLENKQGPAEIAQLGHWSLAPKIPLIVEALEGHRMSDHHRFMIRQCLGHMRHIEEMIEELDKEIGVRLKPYPQQVKLACTVPGIKPTAAASILAETGMDMSPEGPFPDCHHLASWATVCPGNNESAGKRKNGRTRPGNRWLRATLTPTGWAGVADKKSRKF

SEQ ID NO: 149521 - protein, 377 aa, unidentified
MEKDSRFVGLDVHAETIAVAVAESGGEVRSLGTIPNTPEAVRRLAKKLGPPETLRVCYEAGPTGYVLYRQLTALGVPCAVIAPTLVPVKAGARVKTDRRDAEKLARSYRSGDLTPVWVPAPGHEALRDLVRAREAAKKDQLRARHRLGKFLLRQGRRAPTGSKAWSVKHRAWLQTIRFAHAAQDATLLDYLTEIDHAADRIVRLEHAIATAAAVAPAPVRAVIAGLQALRGIAKLSAVSIVTEVGALSRFAKPRQLMGYSGAVASEHSSGPHLRRGGITKTGNAHLRRIVIEAAWAYRHRPAIGGTLRTRQQGLSEEVKALAWKAQHRLHGRYARLLAKGKAPTQVVTAIARELLGFIWAIGVHIEHHTAGGAPAAA

SEQ ID NO: 149522 - protein, 321 aa, unidentified
MNDEIFIGIDVCKAWLDVAQVPALATGEASAFASRVDNEDGARAVLVEQLKRLRPTLVVLEATGGFETALASQLCLAGVPVAVVNPKRVRDFARAAGILAKTDKLDAQVLAVFAQRMRPQVHALPDEAQQELTELVDRRAQLVAMRAQEKARLTTVKPVARKSVREHIAWLDARIKQIERDLDGRLKDSPLYRPKYDLLDSVPGVGRVTITTLLSRMPELGTLERKRIAALAGVAPFADDSGKRRGQRYIQGGRADVRCVLYMAALSAARCNPVIKAMYERLRAAGKPFKLAITACMRKLLVILNAMLKTEQPWRADAVAR

SEQ ID NO: 149523 - protein, 327 aa, unidentified
MYVCILSHEGEILLHRNMKAAPEPFLKAVAPYREGLVVAVECLFTWYWLADLCAAQGLPFVLGHALSMKAIHGGKAKNDKIDSQKIAMLLRGGLLPQAYVCPAEMRATRDLLRRRTHLMRKRADLLAHVQNTNSQYNLPEIGKKIAYKANRAGVAERFDDAAVQKTIEVDLALITYDDALLKDLELSILTTAKHHDAHTLSLLPTVPGIGKILSLVLLYEIHDIRRFPRVQDFASYARLVKCSKESAGKRYGTSGQKMGNAHLKWAFSEAAVLFLRHNEPGQKLLARWEKKHDKGKALSILAHKLGRAVDYMLKRKVAFDMDLFLQP

SEQ ID NO: 149524 - protein, 391 aa, unidentified
MIYVGIDVAKDKHDCFITNFDGEVLFKAFTIANNLDGFNDLYQKIESVMDDVTKVKVGLEATGHYSYNLLGYLIDKGLPTYVINPLHTNLYRKSLSLRQTKTDKVDARTIASMLMSDVNLKSYSDTSYHNEELKSLTRYRFDKVQERAKLKTSISRLVNILFPELEKLVPSLHMVSIYALLAEFPSSAQIASCHLTRLTNLLANASKGHYNKEKAIEIRNAAKHSIGSNMPAKSLELKHTIRLIQELTSEIDEIECFIKSIMDEIRSPILSIPGINYRMGAMIIAEIGDFNRFSSPDKILAYAGLSPSTYQSGQLDGCYSHMEKRGSRYLRYALFNATKFVCIWDNQFSAYLAKKRSEGKHYNVAISHAAKKLVRVIYQLEKSGQLYHRAA

SEQ ID NO: 149525 - protein, 340 aa, unidentified
MTITTVGIALAKNVFAVHCIDQNGKAVLVKPKVSRAALSELIAGLPPCVIGMEACSGAHYWARLFRQYGHDVRLMAPKFVSPYRMAGKTGKNDAADAIAICEAVQRPHMRFVPVKDESQQAMQCLHRTRQGFIQERTATYNRLRGLISEFGVIAPQSTDALRHVVSDQKETLPVQVRLCIDDLLAHVTNIEEKIAEYDRVLSRVAKTDHRSQQLMELKGVGPTTASALVASIGNAHDFKNGRQLAAWLGLTPSQYSSGGKSKLGRITKAGDAYLRTLLVQGARSVMVGAENRTDSFSRWVCSLIGRRGYWRAVVAIAAKNARLCWASLHYGDDFRLYSTT

SEQ ID NO: 149526 - protein, 334 aa, unidentified
MENVALIGIDLGKHSFHIHCQDKSGKALLRKKFTRMKLMQFLATCPPAVVVMEACAGAHFMARRINEIGHEAKLISPQFVRPFVKSNKNDFVDAEAICEAASRPSMRFVQPRTETQQAMRALHRVRESLIRDKVKTTNQIHGFLLEFGISLPIGDAVIKRLSLVLAEHDLPEYLSRLLVKLHTHYLYLVEQITALESELNHSIKADDATQRIMTIPGVGPITASLLSSQLGDGKQFSCSRDFAASTGLVPRQYSTGGKSTLLGISKRGDKNLRRLLVQCARSFMMQLEHQQGRLAEWVRKQLSNRHSNIVACALANKLARIAWAITTNHNEYQA

SEQ ID NO: 149527 - protein, 339 aa, unidentified
MNFIGVDLHKRIITVCVMNEKLSVVTRKTLYSIRPEEIVEFFRQHAPFKVVVEATASYLWFAELLEPLAEKIVLANPKKLRVIAESTKKTDRLDAQTLAEFLARDMIPESYMPTLRQRQHRSLVRHRQYIRGRMTSVRCKIRRILGDYNVDRKDLFSIQCGKAYLKQVSLSDADRFVIRQLWTEYEQHQARLLAMTKKIKMFAAKAPRREAEARQIIKTAPGVGFVTAEVILSELGDVSRFRNAKTVCAYAGLVPVVRQSGGKKSHDLHITKEGSGLLRWALVESAWRLVNSSPKWTVVFLRLRKRSGNKRAIVAIARKLLCVLYAMLKTSTPYKVMAA

SEQ ID NO: 149528 - protein, 312 aa, unidentified
MEKLSYGGIDVSKDRLDVVVLPEGWFFSVSNDTAGWAELVARLRPLAVCAIGLEPSGGYERGIIRALLAAGLSVRRINPNKLRQFARARGVLAKNDRLDARLIAEYVAIMPTRVVQRDAAVERLAEIVTMRRQLCDEHVAAENQAAHLEDAMLRRLSKRRQTRLEADIRLLDKRLAEMVAANVALAQRYELLTSMPGVGPVLAFTLIALLPELGQMSRKQIAALVGLAPYDFDSGKLRGHRCIYGGRMPVRNVLYMAALSACRYKPAIKVFHNRLATANKKSKVIIVAVMRKMITTLNAMLRDNAAWQPQSN

SEQ ID NO: 149529 - protein, 523 aa, unidentified
MPDQQYGSGVPAIVCLVAASRLDPVGESVSIRPPGRTANQEEDHRAMTSRRTSTSENKVTQKQKRKLQRQIWTDNPGLDVVHPDAAGIDVGNSEHYVAIAPEKSDEPVQRFGCFTSDLRNLARVLKAHGIRSIAMQSTGVYWIPLYDVLEEEGFEVYLVNARDTRNLPGRKSDVQESQWLLKLHTYGLLRNSFRPTSEIRTLRTYWRQRAEHVQAASECVNRMQKCLTQMNLQLANVITDIMGQTGQKILRSILTGERNPEKLADMRDYRIQASREEIVASLTGNWRPELLFVLKQEMDRYDFCQQQLTECDLQIQPHLETLSSRPKVSQAPVQLAVAPRKKKKAQGNSPAFPLDKELVRISGVDFTRIDGINVMTAQTIISEVGLDMTRWKTESHFASWLGLCPHNAVSGGKVLRRETRKIVNRAATAFRIAASTLRLSDSYLGAQFRRFRGKLGAPKAITAMAHKLAVLFYRMLRLGQEYVDRGQKFYEDRYRQQQVSLLNKRAAQLGFSVVPTSTSPGTA

SEQ ID NO: 149530 - protein, 432 aa, unidentified
MTTHRLQAGIDFSQKKADFCLLFPDGRPLEQHRSFDNSLPGYSLAKALMIDALETYQFDGLDVSGEATGFLWLPFFNQLAADPDLEAYDLNLFLLNPRWVKWFKKCFPQDDKTDQKDSFYIADRTRTRRPDATWSPQLDTLPLRFYTRLRFHLVQNLAREKCYFSAFLFLKASSYRRLKPFSDVFGITSRRVLSQYTTLDELAAIPVEVLAQTLHEMSGHHLPDPFDNARKLHRVAAESFPLPDALALPVHRILDLTLEHIRFLEGQIAQVEDWISTEVQSHSTIMKLTTIPGLGPVFSCGTGAEIGDTQRFLQRQKWDKKRKRHRPTNLRDAEDAVAKLAGLWWPRSDSGDFEAQDRRMAKTGNRYLRYYLIQAANLMRQHIPEYTDFYRRKYREASKHHHKRALVLTARKSVGLVVGLLHRNEAYRPKEV

SEQ ID NO: 149531 - protein, 364 aa, unidentified
MDVVHERCCGLDLHKRTVVACLFVAGPRGKPQKEIRTFGTMTAELLDLADWLAEAGCTHVAMESTGVFWKPIYNLLEGQFTLLLVNAQHIKAVPGRKTDVKDCEWIAELLRHGLLRPSFVPERPQRELRELTRYRTTLGRERSAEVNRLQKTLEGANIKLAAVASNIVGRSARAMLDALVAGAAPPAGVAQLARGRLREKLPQLEQALEGRFTEHQRFLIAQQLAHLDYLDDPSAAHLAAWAGMAPGNHESAGKRLSSTTRKGSPALRALLVEAGHAAGRTKSTYLAAQYHRLTARRGKKRAAMAVGHTILVIVYHLLKRGTTYEELGGGYFDERDRQAVERRLVRRLEALGNKVVLEPRDPAA

SEQ ID NO: 149532 - protein, 446 aa, unidentified
MPIHQLDTILPGFAALDLGATQIHAATAGTPVAVFGTTTAELRRLGAWLAAHGARHVAMEATGVYWIPVHDQLQHAGFEPTLFHGAHARNLPGKKSDFSDCQWHAVLHSHGLLRPCFIAPEAVRALRAYARLREDHLEQAAMCVAHLQRALDCMNVRLHTVISQLHGVSGLRVIEAILAGERDPKALTALCDAQILKRSRAEVEASLEGHWQEHHLFALRQALEAYRFHHAQIAGCDARIEEQLRALTAPLPVPAPVDKKKIKKVRHNAPKIEGLHGHLHRLCLGHDASVLPGLTPLSWMKLTAELGPDLSAWKTPKAFTSWLGLAPNRHQSGQRRRRVPRRHTRAGQIFREAAQSIARSKHLALGGCYRRLRGRRGEPVAMVAIARKLAELYYLALTRGLAYVETGLQRYEAHCREQEKHRLRKFAARLGCDLVPRKPANQEPAA

SEQ ID NO: 149533 - protein, 347 aa, unidentified
MGIVVALDVHRNQITYKLLDRDTGEVRRGRVAPAARVDVRTWLAQFAGHEVEFALEGTTGWRFVVEEIERAGYRAHLADPAETAAKRGRKRRAKTDNADCDLQLRLLLAGELPESWIPPAHILELRARVRMRKTLIDQRTAWLQRVQAQLFQQGVPAGLRLRSEVGRQALAAADLSPAGRELVELGLRMIDALDQELVPLTRELGVFARRQAGCRALIARLYGVGPVSATAILAELGDARRFSSSDDAVRHAGLDVTVHQSDSKRAPGHLSHQGPEVLRWALFEAALSGARVGSPDHGYYLQVAERIDHTRACLSLARKLCRRAYHVLRELGDEALAPVEEAIAAAA

SEQ ID NO: 149534 - protein, 336 aa, unidentified
MSQYVGIDLHRRRSQVVILDETGVKLSSVKVENSAAALALAVGEAGPAPEVVLEATWGWYWAAELLTDMGARVHLAHPLGIKGYQNRRVKNDERDATLLAELLRVGSLPEGWIAPSELRETRELVRYRHKLSRLRAGLKSQIHAVLGKEGVIPDLKTLWGPAGSDWLDNQNLAEAYQHRVVSLRRLIGRYDIEVSELDRRIHARLADHTGYQVIQQLDGVGPVLAAVFVAEIGDISRFPTPKRLTSWAGLTPRHRESDTTIHRGPITKQGSALLRWAAVEAVARYRGGAPIRDTYQRVAARKGNKVARVAAARKLLTLIYYGIRDGEIRCLNKEAA

SEQ ID NO: 149535 - protein, 425 aa, unidentified
MSTRNGTSWSDAFVLGVDEGATMGTVAGLDWAAEKHDVLIADEHGAVLEALVIDHTEQGICELIDLLLKQQVDRVAIERPDGLLVGRLLAAGIEVLAIHPNQVKAARDRFRPAGGKSDPFDAFVLAELARTDHHRFPRLAPSGDETVALRALSRSREDLVATRVELANRLRGELERFWPGAAQVFTDVDSPIGLAFIERYPTPADARHLGAKRLKAFLARNSYSGRRSPDQLLERLRSAPTASCGETETEARRAIVLSFVKTLAPLVEQISLLTSQIKGAVHAHPDGEIFLALFRDPKSSVTAAGLVAEIGDNRARYPSADSLAADAGMAPVAVESGKRRTASFRRGCDHRLRSHFATLADSTRHWHPWANDVYKRARARGCDHPHAIRILGRAWTRILWRCWQDQTPYDPTKHGNLNRLQTTKG

SEQ ID NO: 149536 - protein, 334 aa, unidentified
MNFKNFIGIDISKGTFDYALIKDGDQLHPISGETTNDTSGLAKLEEFLKRQGLNMSETLICMEQTGIYCRLLSQYLVENNYHVWLEMPIQIIRSQGVQRGKNDRIDAIRIAEYAFMKKDKAVLWQPPREVVLQINDLLTLRDRLIESRKLLKQPIKEFLDAGFKDTAKLIESRCSGTLKALDKEIEQIEKELDKLINKDSNLKKLYKLATSVPGIGKITALTLLYFTNEFSLYTNAKQLACYCGVAPFGHTSGTSVKGKPRVSNFANKRLKKLLHLVAMTTISCDKQLSHYYQRKVGEGKNRMLVINAIRNKVLHRLCAVIKRGTPYQVEFQTA

SEQ ID NO: 149537 - protein, 338 aa, unidentified
MPLYGGIDLHANNSVVVLLNEQDQRIYHKRLPNDLATIVEQLAPHHADIEGLVVESTYNWYWLVDGLMDAGYRLHLANPAAIQQYSGLKYTDDHSDARWLAHLLRLGVLPEGYIYPKAQRPVRDLLRKRAHLVEQQTANVLSVQNIIVRNTGARLSANRIKSVSQAEVNALLPDADQALAVSSALAVLHCLAEQIKTVETRVRTRLQSTLLYELLQTVDGIGPILAQTILLETGDIGRFPSVGDYASYCRCVDSTKVSNGKRKGQGNVKNGNPYLGWAYAEAAHFARRFNLKVQRYYQRKQAQTNVTVAHKTVAHKLARACYHMMRHQAPFDAAKAFG

SEQ ID NO: 149538 - protein, 332 aa, unidentified
MQHFIGIDIGATNCVAAVCNSVSASEFATFTFTNSVEGIAKFTNWLATQGCKTESSVICIETCGVYAETVCYQLKSANWNIAAEPPHKIARTAQANSAKTDKIDAQKIARYAARFLDQLHFWRPPSQTIEHITTLLTLREGYTKQSTALQNQLKSIERKYVRTSLAEKMLATDITRVKERIIEIDKELKRWIDSDDSLKKMFDAIDSVPGIGQSLAIYMIVITDCFHPGYTDKQLAAHLGIAPLDYQSGTSVYRKARSRGFGHQTIRKLLYLGAMSVAAHNKSFKDYYDRLVQAGKNKRLVINNIEYKLISYACAVVRDETVFDKNYVPVFK

SEQ ID NO: 149539 - protein, 343 aa, unidentified
MNEITAVGLDLAKRVFQVHAADREGRAVSRKRLRRSHVLSFFAKLPACLIGLEACAGSHFWARELQALGHEVRLIPPQYVKPYVKTNKNDATDAEAICEALIRPTMRFTAVKSVEQQSVLMLHRTRELLVRQRTMLINALRGHCAEFGIVAAQGRSRARELIELVEDPADDRLPSIARQALQCLTSQVGSIQIQIASIEKKLLAWHYSCEASRRLAEIPGVGLITATAVVASAGNATQFRSARQFAAWLGLVPQQRSSGGRERLGRISKRGDGYIRRLLVHGARARLAWSRRKKEVRSAWLTGLLARRPANVVLLAMANKTARVAWAMLNRGERFDNRIGAAA

SEQ ID NO: 149540 - protein, 428 aa, unidentified
MNQEDRTRLEEFRQFRKEIRGSAEYLLVGIDVAKDKHYAFFGTATGKALLRRLVFDNDLEGFQKLLVQAEAMKVQEGLKKVVFAMEPTANYHKPLGEHLIRCGHQVVLVSGVAAHENRKTLDGRWDTNDTRDAANVADLVSQGKCLFYEFPVGALQDLRNLLSLKRRLKRLEHGYRVRIRNHLLAKYFPELDRYYDQSPSTSLAIVRWCLDPSVIAGLEYKQFVQRVGSGQRRLSQERRLQAIWKMAVDSVGCEVGPAVEFEAEVMVEGLKQIRKSIEDIEEKIREVCSEFSEYEFLLSIPGFGPDVSSKVLGAVGDPFRFQNGRQVLKMAGLDLSAERSGKTSASAVPVISKKGKADLRYALYQAAFIASTRNQNFIAYYTHKLRGREREPGIKTKMRVKLAAKLLIIAWTLMKKKEPFHPDYLNLE

SEQ ID NO: 149541 - protein, 366 aa, unidentified
MKKNSTVVIRRKQIFSEKKLTIGMDLGDRVTYYCILDEAGEVLVEQKVATTKQAIQQVFSRIPRSRVALETGVHSPWVSRLLAALGHEVIVAHARNVRLIGESSRKDDRLDARKLAQLARLDPRLLSPVQHRSAEAQIHLTVIRARAALVGARTALVNAARGLAKSYGEQLRKCGTQQVSKDLAAGLSAELRVALEPLLAEVASLNQRIAEYDRRIEQIATQVHPEVARLKQIKGVGTLIALTYVLTVADPQRFRRSRDVGCYLGLRPGRRNSGSSQPQMHISKEGDRYLRTLMVQGAHYILGPFGQDSDLRRWGLKLCERGGSNAKKRAVVAVARKLSVLLHKLWVSGEIYEPLRNHRAVESAVA

SEQ ID NO: 149542 - protein, 426 aa, unidentified
MAVPPDRSPEPVRRFASFTADLHALADWLQACRIETVVMESTGVYWIPLFQILEARGVEVHLVNARHAKNLPGRKTDIADCQWLQKLHTFGLLNRSFRPTDDICVLRSYLRQRETLISAAATCIQHMQKALTEMNVQLANVISDISGVTGLAMIRALLAGERDPTKLAALKDYRIKASTHTIAKSLEGNWRDELLFNLRQSLELYECYQQKIAECDIRIAAHLHPFDSKIEIPDHPLPAPTRRPKKARRHEPKVDLHTQLYRISGVDLTRIDGIEVLTAQTLISEIGLDMSRWKTDKHFASWLGLCPDNQMSGGKVLARGTRPVVHRAADALRLAAQNLLHSQSALGANYRRLRARLGAPKAITAMAHKLARLVYRMLKFGQQYVDKGMAHYEARFRQQRLQWLQRQARELNLQLVPNQPVRSAVS

SEQ ID NO: 149543 - protein, 312 aa, unidentified
MMDAVYVGIDVSKDRLDVHALPQGAAFMVARNGEGVAQLVERLKGLSPALIALEATGGFETVVAAALAAASLPIVVVNPAQVRHFAQALGQRAKTDPIDAAVIARFAQATQPAARPLPDEMTQLLADLVARRRQIVEMMAAEGQRERRADIRLKKSIARLRKALEKELAELDGEIDDYMRGTPAWAEKQDLLASVPGVGPVIARTLIAELPELGALDRRRIAALAGLAPYTRQSGQWRGKSFIGGGRKTVLSMLFLGAMVAARHNPFLKAFRDKLVNSGKPKIVALIAVARKLLTILNAIIRDAKPWRTQNA

SEQ ID NO: 149544 - protein, 413 aa, unidentified
MTMSETRFAARIGLDWADEKHDYCLQEAMAQTVEYGTFKHNPAAIDEWVSALQLRFDSQPVAICLELKSGPIVSCLSKHNFISLYFIPPQALANYRKVFTHSGAKDDPTDAFLQLDYLTKHSASLRKVSFDTNNTRILETLTTHRKSFIKEKVKLTNRITGALKAYYPLVLELFNDLDTFIFCDFIERWPNLSKLKIVRHDTLDNFFKTHRCGREHLIKQRIELIKVANHLTKDEAIINPYQRYTLALISLLRPMLNTIKQYDTEIFTLFEQHEDKELFNSFPGAGKTLAPSLLVAFGTDRSAFSSADEVNRYVGIAPVVVRSGKSTWTHWRYKCSKLLRQTFIDWANQTIRYSFWAREFYDKKRKSGMSHQATIRALAFKWIRVMFRCWINRTAYNEAKYLFTLSKRNKKMA

SEQ ID NO: 149545 - protein, 339 aa, unidentified
MRFLGEVDACEESMRRVVKRIAAKHGRIHFCYEAGPTGYGLHRLITALGHNCIVVAPSLIPRKPGDQVKTNRRDAIALAKLLRAGELTAVWVPDEGHEAMRDLVRTRAAAVETLRVHRQQVSAFMLKHGRIFQRKKGWTMRYLRWLQEQKFNHPAHQIALQEMVEAVRLSKERVERLEQTIEEFVPNWTLAPMVRALQALRGVDLIVAVTFVTEIGDVRRFESPRQLMGYLGLVPSERSTGATVRRGGITKAGNGRVRHMLVESAWTYRHPPRVGKTKLYRLEQVTPKVREIAWKAQTRLTARYRALSARGKKTTVVCTAIARELVGFMWSVAREAQTV

SEQ ID NO: 149546 - protein, 339 aa, unidentified
MNRIVVGVDIAKRVFQLHWVEPETGEIVALQLKREKFLEHFANRSRCLIGMEACGGSQHWARSLQKLGHEVKLMSGRMVKPFVVGNKNDAADARGIWMAVQQAGIKAVAVKSEEQQAVLALHRMREQLVKFRTAQSNGLRGLLTEYGEVMPQGRAGIRRDIPGALGRLSDRLPAIVIETLREQYARLGELDEQIGQIERRLRQWQREDSATQRIAQIPGVGLLSATAAVATMGDAKVFKSGRAFAAWLGLVPGQTGTGGRVRLLGISKRGDKYLRTLLIHGARSVLTNSKSPPEWLSELVKRRPKNVAVVAMANKMARTIWALMAHERAYQSGYVSRPA

SEQ ID NO: 149547 - protein, 370 aa, unidentified
MKKNNTCQQSSKRRGKGRKECLTIGMDLGDKTSRYCVLEGNGEVVQERGVGTSKKAIMQVFGAMPRCLVAMEVGTHSPWVSRLLSRLGHEVLVANPRQVKLITSSSRKDDRMDAQTLARLARVDPKLLRPIRHRSEKAQGHLMTIRVRARLVEARTGLVNAARGLAKAVGERLPACDTDQMGAEKLQSLPVELQETLQPLLQSVESLTEKIKACDVKIEQIARSEYPETELLRQVSGVGTLIALTFILTGEDRERFQKSRDVGCYVGLRPKRSNSGESQPQLRITKEGDIYLRKMLVQGAHYIMGYRGPDTDLKRWGVKLSARGGKNAKKRAIVAVARKLGILLHRLWVTGEVYEPLRNSKQGQPLGTAA

SEQ ID NO: 149548 - protein, 422 aa, unidentified
MFYVGIDIAKSFSVCSVIDDKEEMIIKPFPFKSTTIGFKKLINNIVSLNCSKDKIIIAMEATGLLFENLYRYLKDLNYNVILLNPYQTAQYRNMITMKYVKNDNIDSLVIALLIKSGRYSKGYVNEEQLQSLKVLFRHKENIKEKLKSLKRETSSLLAVVFPELEKVIKDPYSVTGLILLDKYPTAKHFEYVSVDRILKLFRNIKGNNFNQAKAELLLSVAKNTIYSGTAKDARAFFIRSNITLIRALQEQIKSLEDEMIKIFSKPMPETISKEDEHYVSTVLDNLRTIPGVSDGTLLAILSECGNLDRFKDEKALIGYIGLYPTQEQSGNTLKYGKLAKRGAKYAKKALYLAAVCAVRHNNELKQIFRNQLSLGRAKKEALIIVARKLARIIYSIYKHNKPLLLVYDEINFISKVLLLIVL

SEQ ID NO: 149549 - protein, 427 aa, unidentified
MKEPTTVCGIDVHKVFLQVCILSRSGETSQHRFHNTPNGILALKDLVLAEGCEIVAMESTGIYWYRLFLELESDIRTIVANARQIKSIPGRKTDMNDARWIAELALHGLIRPSRIFPRRDREFRDLTRNRETLVRTRTTIKNRIHKILDSAGICLNLVLKDLFGKSGRHLLLGLAEQKDLETTLATIPSPRILRRADQLREILQGSPLSPIQVQLLTTQLHLLDEIAGKIAHLDELILASLEDPQLEAVAICTSVPGISITAATTILAELGDVRDFSTASRLVSWAGLAPSVYQSADTLVCGKITKQGSKSLRWILVQAAQAASRTTNTVFSSFFRRIAYRRGRNKAIVALARKILSILWHLLVNREHYVEPGLKRMRKLPVRMTLQKISIDDAVETLLSAGYRIYSPENQKSTGKGVRAERATRPL

SEQ ID NO: 149550 - protein, 326 aa, unidentified
MKAVTWIGVDIAKDSCVVAQRCPEGFQTEEFPITPQGLKALGNWLPQQPRLQIVLEATGPYWRAFTSGFNSVAPEIPIAVVNPRRVRDFAKASPHASKTDLLDAQVLVHFAETFQPGLMEASANRADRQLRALTRHALQLTQQRVQVRDQMEKAQADPDTPKFVLRSLKRHLQHLQKALKLCWSQARVNLDQDPQLTQCSRLLLSIPGIGEKTALTLISEYGAGLRQVGPKQLTRYAGLDVVFFQSGSSVYRLPRISKQGNWRIRRALYMAALSAIRHNPVVRSYYLKLVANGRPKKSALVAAMRKLLHQCYGVLKNQSPFDPAYA

SEQ ID NO: 149551 - protein, 399 aa, unidentified
MFCGWDWGSTLHGVCLLDEDGATIKTWMVKHTEEDLSALFTELAQLGEPGLMPVAIERGEGLVVGLIARAGHPVLMVEPTAFKAARPRWGAAGAKSDAADAFMLADYARTDGHRLRRVEPLAQATRELAALVRARTSLVEARTAASNQLWAVLAEHWPGAALVFQKLTSQIALAFLADYPTPQAAALLGEGRMRQFCRRHSYRGGKSPAELMSRLRAAPASANPIAEKVLEAIVRSQVAQIGLLNVEIRGLERKTADALAAHPKTALLKMLPRVATVSLAALIAEIGPLLERCENPEQVAAMCGAAPVTRASGKSRTVGFRYTANKPARVAITSFADNSRHSSAWAGDCYRRARARGARHPHAVRILARGWVRVIWACWTTDTPYDPARHRGEQRLAAA

SEQ ID NO: 149552 - protein, 344 aa, unidentified
MVIIGCDFHSGFQQIAIFDNQTGEFQERKLLHPAEATEFYRSQPEPVRVGMEAGAPCQWFRRLLQECGHELWVGDAAKIRAAEVRKQKTDRRDAELILKLMLEERFPRIWLPSEAERDVRQLLMDRHHRVRARTQVKNQLQSLALNQGLQKGKKLWSEAGREQLRELPMMEHAARRRDHLLAKVEQLDGEISGLDALVRQQAEARPEARRLMTHPGVGPQTALATVLTLGEVSRFASAKQVASYLGLIPGEYSSGNKQRLGHISKQGSSLMRFLLVEAGQTAARNDAQLRRAYARLAAKKCRAVAKVMIARRLAVRLYWMLRRNWTYAELARHAGEPGSFCGAQ

SEQ ID NO: 149553 - protein, 367 aa, unidentified
MPMLADIIDAVIGVDTHRDSHHAEIAHPTGAVIATCSVPDTSTGYAQLLRWAGQHAPGPRLAACIEGTRSYGAGLARAAAAAGLTVIECEQPTRRARRGKGKSDPIDAHLAVLTALRLDAGKLPSPRADGDREALRILLCARQELTATATAQANRLRALLRDGGDQDRALARSRLSDTTLACLARRRQPGAGRAVAVRTGEIRRLAVALRAAARALKANHAELDKIVTELAPGLTSRPGIGPVSAAQAIVSFSHTGRCRHDAAFARLAGTSPIEASSGQITRHRLNRGGDRALNRALHIIATTRMRADPATRAYLTRRRAEGKTDREIRRCLKRYIARQLYRALTAAMPPAAASPERLARGLSVTEG

SEQ ID NO: 149554 - protein, 330 aa, unidentified
MEREYIGIDLHKQFFQACAVTPTGIRAWEQRFPRTDGGLVLFRERCTSMTAIAVEATGPTWAFVDALRPSGATVCVVDPRKTRLKAGYAAKTDRLDARRLADALRRESVVSIYVPPPAVRELREVCRGRHQVVRLRARIAQMIRALLLRSGVSDVPVTRVFSARGLAWLSQVQLPSEAAASLERWRRVLIAVQAEAAVAEALVKAQASADVVARTLDELVGVGPVLALTLRAEIGDITRFPRGAALASYAGLVPRVDASADRYWSGRITREGSPWLRWALVHTAIHAIRRQDGLGRWARQLAMRKGVYKARVALARRLCDEVVTVWPRCA

SEQ ID NO: 149555 - protein, 410 aa, unidentified
MTYVLALDISMGKSYAVIYEDETCLWEDSIIHTKTGFSYLLAEIMNLPSIPEVVFESTGIYSRPLETFCQDNQLPYILLNPLQAKKQLEEATLRSWKTDKQDAHQLARSHWRNKRKPKLIQIDIYLVLRELSRFYQEIEADIKRNRMYLHNCLQLTFPELEHFFSNRLTPYALTLIGLYPHPDLVLESTPTKIKNRLMKTTRKKISENRARKKAEELVSYAKDSYPATQVDSVHCQRAEYYAEKLQDLLQQKADLRIQLIEKAHHLEEFALYATIPGIGELTSALLIGELGDIRRFETSNQLNAFVGIDIRRYQSGKYIGKDHINKRGNPKGRKILYFTVRNMIRQQRSAPNHIVDYYYKLKRQPTPKKDKVATVACMNKLLKCMHSMVRNHTSYAYAHPVSKTNNIPVV

SEQ ID NO: 149556 - protein, 342 aa, unidentified
MYYIGLDVHKKTISYCVKDASGQVHQEGKVGATRRELDSWIKTLPQPRTMAMEATIFTGWIYDHLLPHAQQVKVAHPLMLRAIAAAKKKNDRIDAGKIADCLRCDFLPECHMASTQIRDRRRTLRYRHLLVRQMVQMKNRISGLLMETGVSYNKQRLHKVGYFRELLSTNEDVHESIRPLLKVSRDTVVRLQKTEYALVSSLQRDPLLADRVKRLRTVPGVGPITALAWALEIGDVARFRSIRQAISYCGLCGEEKSSADKVMRTPLSKQRNKHIQRVLVEAAKLAPRQDHDLALVYETEKQKGNANRATLAVARKMVAYLLAVDREERDFVPAENYQRAAA

SEQ ID NO: 149557 - protein, 416 aa, unidentified
MTVFCGIDWAERHHDIALVDEAGTLLAKARITDDAAGYHQLLNLLAEHGDSPEDPILVAIETSHGLLVASLRTGSRRVFAINPLAAAARYRDRHGVSGKKSDPGDALVLANILRTDMHARRPLPADSELAQAITVLARAQQDAVWARQQVANQVRSLLREYYPAALLAFQGKQGGLTRADARVILTLAPTPVKAAKLALAQLRTALKRSGRLRGCDTEAERLRNIFRAEYAHQLLAVENAFGHQLLALLKQLDAVCQAADGLAEAATAAFHQHTDSEILLSFPGLGPMLGARVLAELGDDRARFTDARALKSYAGSAPITRASGKKRFVGRRFVKNNRLINAGFLWAFAALTASPGANAHYRRRREHGDWHAAAQRHLLNRFLGQLHHCLKTRQLFDEQRAFAPMALPLEASSAQT

SEQ ID NO: 149558 - protein, 346 aa, unidentified
MMIIGCDFHPSWQQIAWLNSTTGETGEHKLVHASGDAKRFYEQLSAPVLIGMEGTGNSQWFIEQVEDLGHEIWIGDAAQIRASYVRKQKTDKRDAAHILQLVVQGRFPRLWTPDREHRDLRQLVLHRHKLVEIRSRVKNELQHLALNKGMQKKRTLWSQAGQQRLRELPLKPWASCRREDLLGLLAMLNQQIGKLDAAVQTAAEENPQARLLMTQPGVGPNTALAYVLTIGDVSRFRRGKQVASYLGLIPREESSGGRQKLGAITKQGNRMLRSLLVEAAQTAVRYDPGFRQQYLHRCHQKPKGVAKVAAARKLAVRLYWMLRSQVGYPEIVRIESSPRVALVGAS

SEQ ID NO: 149559 - protein, 420 aa, unidentified
MKSFVPVAGVDVSKRFSDLCVLSPDNNVLLRQKIYHDMVSMKLAEKKLHEIELECGARPVVVMESTSHYHLILFQFFTDAGFEVVVVNPIQSGALKNINVRKVKNDRVDAYRIAMLYRLKVLRPSQIPTSSLRGLRLLTRQRSELKGDVARFKNRMTAYLDQIFPGYGEVFSDVGGSASRAVLHMCPTPEELLNADGSLLAKVICEAGNKGPKFGAEKAAKLREASGSAQVIGVRSASNASLIKNVLDIIEGLLAAIQRIEGEIKELVTQDTRLDEDVKLLCSIPGIGFSSAVVIVAEMGDISLFRKPKQLAAYFGLDPGERQSGTFKGRKNKLSKRGSPQVRAALHMAAVSSVSRNRDGTYRNPVLAEYYERKCAEKPCKVARVAVMRKLSNIIYAVLRDRRPFELRTPQEHMALLAAA

SEQ ID NO: 149560 - protein, 428 aa, unidentified
MSNQEIIRRRQYCQIVKDITGSDQYLVVGIDVGKDKHHAFMGSATGKSLFRKLIFENNMDGFSMLLKTAEAIKSQNSLSKIVFGVEPTGNYHKPLARHLIRCDCNVVLVSGVAVKRNRELLDGRWDKHDTKCAANIADLVSRRRCLYYDSPPPGIIELRSLLSLRRRLKKEEHSLRMRIRNNLLAQYFPELDRFYSACESESLAIVKWCLEPNKIAGMDFESFFQMVTRTRRGTAQLLRLRKIHQQAIESVGCPMGSAAAFEAQLLVEKLKQVRQQLKETETAIKDVALEFAEYSYLLTIPGFGPYVSARVLASIGDPFRFENRKQLIKLAGYDLCAKRSGKTSDKAIPVISKKGNGELRYALYQAAKVASARVDLFRTYFTRLLRGRERERGIKTKMCVKLAAKMLIIAWTLMKKREVFDPAHLNIE

SEQ ID NO: 149561 - protein, 396 aa, unidentified
MVNRMLYLGIDIAKNNHVATLINEQAKPLFKGFSFANTTDGGESLIAKLDSHIQTVADVEIGMEATGHYWLSLYSFLVEKGFNVHVINPIQTDGWRKGVEIRKRKTDQIDSFLIADLIRYGDFAETSLSDENMLSLRNLSRFRHYLVSSIGDLKRKAICVLDQTFPEYQSVFSDIFGQTSSELLLNFQTADDFHNITAKQLEVALENVSFKGFAKNKLTQISELAANSFGLKFCRDSFSLQLKLLLEQIRFIEAQVSDVETEMAKTLDTLNSPITTIPGIGPVTGSTILGEIGDINRFSNPSKLVAFSGIDASVSQSGENAGIGNRMSKRGSPYLRKALFQAALVASTHDPVFKAYYQKKRAEGKHHLTALGAVARKLCYTIYAILKSNNPYKPQN

SEQ ID NO: 149562 - protein, 363 aa, unidentified
MIVIGADVHKSTHALAAVDASTGQLIAEREIVAREQGHLEALRWAHNLDGELAWAIEDCRDLSHHLEQALVAAGERVLRVAPKLMGASRRGEREPGKSDQIDARAIARAVLREGIERFPTAFLDRDAAEIRLLCDHRGSLVNERTRLINRLRINLVILDPELEAKVPSRKLDYPGQLQRITRRLRTMPQTARVRIARQQVKRIDVLTREAEELKRELRDLIREHRPELLAETGCGPLCAAILIGQTAGAERFATDALFARVAGVAPIPVSSGRHDRHRLDRGGNRQLNRALHIIAITRGRIDPETRAYLARKEAEGKSRIEAMRCLKRHLARHYHRLLLRPPAAPRSAPVISGTAPAPMRCLT

SEQ ID NO: 149563 - protein, 349 aa, unidentified
MIIGCDFHPRYQQIAMMDTETGELVERRLEHENGEAREFYASLPKGTLVGMEATGYSQWFERMLAELGHELWIGHASEIRAGVVRKQKTDARDAAHLLRLLLEKRFPRIWIPSPAERDTRQLLRHRYKLVCFRVSVKNQLHGLAMSQGVCRKKKLFTVQGREELEKLSAGPWASRRRRELLGMFDRLNPVIEELDRAVQQEAESRADAARLMTYPGVGPVTALAFVLTLGPMARFQRSKQVVSYLGLNPKERSSGDKQHTYSISKQGNTMMRWLLVEAAQTAVRFDPELQRVYRRLKFNKGASVAKVAIARKLAVKLYWLLRAPASCAQMAPMQGSSRGTLVPNLGSTV

SEQ ID NO: 149564 - protein, 347 aa, unidentified
MLHAGLDLSRKKLDVCLLSDRGEQLDQLAVAPDVDSLRTLARRIDVVHAEPVCAVVESMTGARMVHDTLEQQGWEVEIADAQKVKGLAPLACKTDKIDSMVLAVLSHRDLVPAIWLPDPHIRKERELARFRLHLVKHRSMLKHRIHSTLINFGWPCTVTDLFGVEGRRLLERLEVPEPWRGNVTASVELIDDLERQIAAINKRLKQGHADHPYIPLLMSAPGIGWVLAFTIAAEIGEIERFPSPAKLAGYTGLCPRVNQSGDKDRRGPLTKHGPTYLRWALLEATMHALKHPAYAQRYQRNKRRLGKQRGAKVAQIDIARRLTHAIWHMLTRNQQFAPRGAAFRLAA

SEQ ID NO: 149565 - protein, 416 aa, unidentified
MSSEWLPFTIKTHKGECIMNSVGIDVSKGKSTVAIMRPFGEIVASPFEINHTEEDFEKLVSRIKSLKGESRIVMEYTGRYYEPLANYLYNSGLYISVVNAILIHDYDNSSIRKVKTDKKDAIKIANYGLNRWLDLPEYIPEELRQALKIYNRQFTQYTKLKVAMINNLIALSDQTFPGIDGLFGKTPRKDGHQKWIDFIKDYWHKDCITTKTIKSLERSYQKWCSKNGYNYQSNKVNDIYQLANQTVASMPANANTKLIITETAKELISLIDVLEKIRQEMNRIASQLPEYPAVMSLPGVGTTLGPQLIAEIGDIRRFHSRKALIAYAGIDSSPYQSVTIDIKSRGISKRGSSALHKTLFTVMDCILRHQQIDDPVYQFFDKKRAKGKHYYVYMIAGCNKFLRIYYARINAYLNSI

SEQ ID NO: 149566 - protein, 428 aa, unidentified
MNCNTQNAKIASITEKTLIIGIDVGSETHYARAFDWRNYEYSRKALEFSNTEAGFMAFRAWVEDIAEKHGKTAVIPGMEPTGHYWFALGKFLQDNGMRPVHVNPHHVKKSKELDDNNPNKNDRKDPKTIAALVNEGRFSYPYIPTGIYAEVRSLSNLRFQTQEELTRIKNRIARWFAIYFPEYKDVYGDLKAASGRMVLKVAPLPNDIIKLGAEGVNQIWRDAKLRGVGMKRAKTLITAAEHSVGSKEAPETARIELRHLLGDMDVYTSRLEELFRSIEGKLREIPYVDKLMEIKGIGLTTVSGFIAEVGDIGRFDNPKQLQKLAGYAIVANDSGKHNGESRISYRGRKRLRYVLYEAAISLIGKNAEFREIHEYYRTRKENPLKKMQSVVAVACKIIRVFYTILTKGVGYDANKLMGDIRRPQIQTA

SEQ ID NO: 149567 - protein, 348 aa, unidentified
MGLYAGIDLHSKSNHLAIIDENRKRVLKKKLANDPDLILGVLAPYQGEIAGIVVESTYNWYWLVDLLQENGYRVHLANPAAIQKYAGQKHVDDTHDAFWLAELLQLRILPEGYIYPKETRALRDLLRKRQSLVRVRTALILSLQNIVTRNCGIKLSSADLKALTEDRVQPYLQENEDLLLAGSANKSCIDSLTLQIVRIEKAVEKKLKLLSPYIQLLTLPGVGRTLAMTIMLETGPISRFDRVGRYASYCRKVASQWTSNEKVKGHGNKKNGNRYLAWAFSEAAEHARRHHAGSRNFYHRKLRQKKNMMVAHNALAHKLARAAYWILRDNVPFQEAKMFGQAEAALYN

SEQ ID NO: 149568 - protein, 347 aa, unidentified
MRFYTTQHPFYCGIDLHARMMYVCLLDQSGEILVHRNMKTDPDTFLKAIAPYRQGIVVAVECMFTWYWLADLCADEGIPFVLGHALYMKAIHGGKAKNDKIDSQKIAALLRGGMLPQASVYPAKMRATRDLLRRRMPLAHQRAELLAHVQNTNSQYNLPAIGKKIAYKANREGVAERFADAAVQKSIEVDLALITYYDELLRDVELTIVNTAKHHDPNTLYLLQTVPGIGKILSLVLLYAIHDVNRFPRVQDFVSYCRLVKCARESAGKRYGTSGAKIGNAHLKWAFSEAAVLFLRDHPAAQKHLARLEKKHDKGKALTILAQKLARAVYDMLKRQGAFDKDKFFQR

SEQ ID NO: 149569 - protein, 386 aa, unidentified
MQKLNDLSRSLTPLKPDSTLIAVIEMSLSSWLVAGIVPGVERQPLKKLEADESTLLKLLNRWREEAKKSGHRIERIAVAFEAGRDGFWLARWLRARDIEAHIIHASSVAVSREHRRAKTDRLDTELLKRAFLGWLRGERDHCKMVAIPTIKDEDAKRPNRERESLVGEQSRIVNRMKAALVRLGIRGFNPKLKKAVERLDGLRTPEGEPIPPNTLAELRRDMARRRLVSDQIRQIEDTRLERLEQAPSDGPHAMVRLLARVIGVGIETADMLVQEVLSRNMRDRRAIARYAGLTGSPDESGRKRREKGLARSGNARVRRGMIQLAWRFLMFQKDSTLAQWFRARTENARSTRKTMIVALARKLLIGLWRLVREGVVPDGVVLRPVS

SEQ ID NO: 149570 - protein, 388 aa, unidentified
MFFLGIDVGKNTHVASLLDEKAKVIFKAHSFANTLDAAEALLVKLEPYKDSLEIGMEATGHYWLSLYSFLTEHNFIVHVINPIQTDGWRKGIEIRKRKTDVIDSVLIADLIRYGDFLETSLANEDILSLRNLTRFRAYLVNSVSDLKRKAIAVLDQIFPEYASVFSNVFGQTSKELLKSLSLPSDYENLSATKIEEVLSNITQKKKASETISTLSDKASRSFGISFCKDSFAFQLKLIIEQICFIEEQITSVELEIEQLMSKLGTNIKTIPGVGNVIGAVILGEIGDIERFDNPSKLVAYAGLDASISQSGEYEASSGKLSKRGSPYLRKALYMAAQRAEFCDPVFQAYYEKKRNEGKHHLVATNAVARKLCHTIYAILKKDIPYEIQ

SEQ ID NO: 149571 - protein, 387 aa, unidentified
MGIRKETRTFDTFTSCLTEMKEWLLANGITHVVMESTDVYWKPVMRVLEADIPNVWIVNARHIKNVPSHKTDKMDSEWICKLLIAGLLKPSYIPPKEQRQLRELTRYRNKLIQAIATEKNRMMRVLEDCNIKLSSVVANTSGVTATALIDMLCEGRKLTLEDIESVYHKKLSASPQELLEACTGFVEEHHIYMLQMIRKSIAQTQGLVDELSKRIKEILIKYENVLELLKEIPGFNTKVVEDLVSEIGLDMSAFPSEKHLVSWAGICPDYNESASKKNGRITHGNKQVKAVLTEAAWAATRTKNTFFSERYHRISARRRKKRALIAVAHSQLTAAYLILSTGARYHELGAQFMQAKIEKKRKLYLTAELKKLGYKVSLEKKKEATKS

SEQ ID NO: 149572 - protein, 356 aa, unidentified
MSRDIKYIGMDVHKEATVIAVLNGSGKLVMESIVETQASSILQFIHGLRGELHVTWEEGTWAAWLYDLLQPQATQVLVCDPRRNALLKEGNKSDKIDAHKLADLLRTGMLRPVYHGEHGLRTLRELGRSYQTISQDLNRVMNRIKALYRGWSIPCAGTQVYAPRYREEWLQKIEHAGVRRRAELLYQQLDGLQALRRTLRPELLAESRKHKAAKLLRQIPCIGPIRAARLIALMQTPHRFRSKRQLWTYSGLGIETRDSAQYRFVRGQLQRTKKPQQIRGLNRNHNHEMKEIFKGAATRASCGVGPLRDFYVALLDKGMKAEMARLTLARKIAAIALTLWKKEERFDAEQLKLQAA

SEQ ID NO: 149573 - protein, 338 aa, unidentified
MTIEILGVDIAKNVFQLHGVNGKGSVVLKRRVMRDQLLEVLAQINRCTVVVEACTGAFYWARKFEALGHQVKIISPQYVKPFVRRQKNDSNDAEAICTAARQPHIPFVPKKTLEQQDIQALHRARQRMVNHRTAVVSQIRGLLLDRGFAMAKSITRARRLVPDILANSDNELTPMARDAIGELYDLFRDLDRRIASFDKKIEQVFRNSETCQRIATIKGVGPKTATAIIAAIGDGAEFKNGRHLAAWVGLVPRQFSSGDRKVLMGISKRGNQHLRSLLVHGARAVVRTAPDKTDLNNQWVNQLRERRGFNRATIAVANKNARIIWAVLRTGEPYRAAF

SEQ ID NO: 149574 - protein, 355 aa, unidentified
MSQEKYIGMDVHQATISVAVRDVQGKLIMECMLETKAGTILEFVQGLSGTLALTFEEGTSAAWLHDLLKPHVSRLVVCDPRKNALMKDGNKNDRVDARKLAELLRTNQVKPVYHETHGTRALKELGRSYLTVTKEVTRLMNRIKSVYRSWAIPCAGTSVYTPRQRGEWLAQLVEPGVRIRAEHLYQQLDNLQPVRLEARRQLLLESRKHAAVKLLRQIPSIGPIRAALLVALLQTPHRFRTKRQLWAYSGFAVEVHDSGEYRWVRGKLQRNRERITVRGLNNNHNKDVKNLFKSAAISASTRPGPWHDFYLARVESGMRPTMARLTLARKIAAITLTMWKRGANFDPKQLQSQAA

SEQ ID NO: 149575 - protein, 368 aa, unidentified
MKVTVRYVGLDVHADTIVMAVAEEGRAAAKVLATIPNCWKTLHARLKVLAAKGQLLICYEAGPTGYVLYRQMRSAGFEVQVIAPSLIPQKSGQGVKTDRRDAAALAHFLRSGDLTQVWVPDEACEALRDLSRAREAAKKTELAARQQLGKFLLRHGRRWELSTWTKKHLDWIRGQKFEYVAQNRVLADALRAVEDATARVERLQKDLEELAPQVQHLWPIIRALQAVRGIAFVSAVTLISELGDLKRFGAARQLMAYLGLVPSEHSTGLTQRRGSITKSGNSHARRILVEAAHHAARPSTTSKILRERQQGLAPEVIRIANKAQQRLHQRFFALLHKGKSKPKVVVAIARELAGFLWAIAQQPQLLAA

SEQ ID NO: 149576 - protein, 482 aa, unidentified
MGHVGDIGESVATDIPFERVSTTTYLNQRDIPIEIMEDVMAKFKQSKLELIHPNAAGIDIGSASHFVAVPPDRDNKPVREFKSFTADLNGLADWLEACEIDTVAMESTGVYWIPLYELLESRGLTVYLVNARHVRNVSGRKSDVLDCQWLQQLMSFGLMSGAFRPKDEICALRAISRQRDMLIRYQARHVQHMQKALAQMNIQLANVISDIVGETGQKIVRAIITGERDGHILANLKSNRIRAGKDEIEKSLVGNWREEHLFALKQAMSLYDAYSERLTECDRQLETMLAALQVHKVEICQKKRRSNVKNAPKFDLRAHLIGMCGVDLTRIDGIEVMTAMKVLSEVGADMSRFKSAKQFASWLGLCPGTKISGGKVLSGASKRTANRAAQALRMAAVSLKSSQSALGAYYRRLCGRLDKAKAITATAHKLARLIYTMLTKGTEYVDKGQEYYEERYRQRVLHHLTVRARKLGFNLTPVPEAT

SEQ ID NO: 149577 - protein, 383 aa, unidentified
MGGECSNTPRVTNSIKRCPQDTPTLNAAMKYYTSTTEFNCGIDLHARQMYVCVMDRQGKKLVHTNVKDNDFAYFLKLIKPYQHSLTVCCECMFGWYWLADACQAAGLTFVLAHALYVRAIHGGKNKNDRVDSEKLTHLLRSNLIPPAYVYPTQMRPLRALLRQRIFYVWRRSELLARIHCHQLAHNRIPVKQSRWDRDPWEEELLKAEVDPLRQLALSNDLAMIRHFDRQIYEVEKALQRQTKQVAAREYALLQTVPGIGEHLGLTILYEIGDIQRFPTVKDFLSYSRLVKGTVASAGKIKGLRGAKLGNPYLRWAFGEAAVIAKRDHFRIRPLAQRLEAQMEGNKFKANTVLAIKLARCVYFMLKNQTVFDPDRLVAALARN

SEQ ID NO: 149578 - protein, 315 aa, unidentified
MGISIAAGIDAGQKFLDVGFAPSGKGFRVPNAAAGIARIVARLVEAGVRRVVLEAIGPYAQRLVQALGLAGFDVGVVNPRRIKAFRDAEGRRAKTDRLDAGLIARFALTMTQAFRPLPSDDQIALKALSLRRRQLVEMIAMEKTRLKQASQPLLIDSHRKAIADLSQARAAIEAELASRLKADPDLAATLAILTSIPGVGVAIASLLATDLPELGQTDRKAIASLAGLAPHISQSGNAPPRAAIAGGRPCVRAALYMAALVAVRHDPQRKAEYQAMRQAGKPAKVALVAVARKILVTANALVKTRSPHQKIKINA

SEQ ID NO: 149579 - protein, 337 aa, unidentified
MEYFAGLDVSMAETHVCVVTRNGAVIHQAKVPSTPADIAAELAQVPTCRRILFETGRMAPMLYHGLRQLGLPVVCVESRQAYQALKSLATHKTDRNDARGLAHLARTGFFKPVHVKSLPAHAVRSLIIARKKLVGQRVTLENQIRGLAVVFGVRLPRALSPAFIKQALGASEGIPGLSAAMRGLAAARAAVLAAVVAIDGDIRRMVRASDACRRLMSIPGVGQLTALAFTAAVDDPRRFRRSRDIGAYLGLVPRRYQSGEVDYSGSISKCGDRRVRTLLYEAANVMLTRYNAPLKLKDWAFAIAKRSTMRKARIALARRLAIIMHAMLRHGTEFKPA

SEQ ID NO: 149580 - protein, 346 aa, unidentified
METIVRIGLDTSKSVFQLHGVDETEQPVLRRKLRRGQVLEFFSRLPPALVALEACGASHYWARELQSLGHEVAMIPPQYVKPYVQRGKSDAADAEAICEAASRPKLRKNFVPIKSPEQQGAQMLARVRNQFIGRRTQLANSIRGYAAEFGFTAPKGLSRLQQLLIDIQADATVPDLTKELVDALAAELARVDDQIAKLDKKLIQLHRSNEMSRRLATIPGVGPIGATLLSIKVVDARGFKSARNFAAWLGLTPKNHSTAGKNRLGVITRAGDAMLRTVLVAGATAVIADMRRRETRSWPWLKDIIARKPPKLVAIALANKLARIAWKLMVSGERYRPASSVMPVPT

SEQ ID NO: 149581 - protein, 412 aa, unidentified
MKDLLEISCGLDVHKDKIVACILTGPLGKPTHSEIREFTTLIPDMIALRNWIVSQNCHHVAMESTGIYWMPIYEILEEAFGGDITLLVVNARHMKNVPGKKTDMRDSEWISTLLRAGLLNGSFIPEKRIREFRDLNRYRKSVIRDITSQKNRVEKFLQSSGFRLSSFISDIFGASGRNIIRHLTEHGQIDRSALDSCLKTKTRNRIDEILMSVNGTLSEHQKAFLKILMDHYDSLKEHLAEIEKSLEADMAPFSLQVEQLSSIYGISTTASCAIIAEIGIDMKPFKTAEHICSWAGLCPGNNESAGKRKSTSVTKGNPYIKSMLCEIAWVIAGKRNTYLSAWYWRIKQKKGAKKAIIALARKLLVIIYTMLKQGTLFDESCFEAKRKSSEQKQLSRYIRELEKHGYHVEAQA

SEQ ID NO: 149582 - protein, 391 aa, unidentified
MIFIGIDVASNKHDCTITDQHGTVLEDSFTIKNDYQGFSLLSQRIEKHKGNHQVYAGLESTGHYGNNLISYLVEREYLVYVVNPLLTSIARKSTSVRKTKTDKTDSQAICTYLRTHFGTLTPYTLKSYHTKKLKALSRLRLNLVKQQSLFKVEYARLVSIVFPELSAFSHTIHSNTNYILFTEVGLPEDIARQRIDKLTNILYSSSRGHFTRDKALKLKSIARNSIGAKDDFFKVQFLTTIRSIQHFKAQIDLIDQQIQSLMDELYRHVMSIPGISYTTGAAIASEIGDISQFKSPDQLLAFAGLDPSVYESGEFSSNRNRMSKRGSKYLRNAIWTSASVIIHNDPTFSSYYLKKLKQGKHHNNALGHVCKKLTRVIYSIMKNQKYFVENY

SEQ ID NO: 149583 - protein, 340 aa, unidentified
MHILGLDAHSATFTLEIVNPRGRVCREVKRETSAENLIEAVREAPGPKVVVVEESHLAQWVKRTVERYADKVVICDPKRNKWISGDEFNDDASSAHKLAELYRGGYIKEIRHPDDGGATLRGLFLHYYDLNQQLTRFKNKLKAVFRQEAIGTAGQGIYAEAGHEEWLQKLRGLPHLQHAARQRFELVDTLEALKQQTYEVMVKLARRKAAYRLLDGIPGAGAVITTGYLALIDTPHRFSRKNKLWSYAGFGNKRHTSDEEVYEEHASKNGNRPLKWVVCEHFLHAVEQPRNANRFKRCYEELRRRGLDETAARREVCRKLLSTVRALWMKGEAYRDDPLS

SEQ ID NO: 149584 - protein, 341 aa, unidentified
MKIIGCDFHPSYQQFAMVDTETGELREGRLEHEQGEARRFYQALQGQTVRVGIEAVGNSQWFEQMLAEMGHELWIGDAAQIRRLVVRQQKTDRRDAKHILDLLLDGRFPRLWVPSQQIRDVRQLLRHRQKLVELRTQVKNQLQHLALNQGVRRKRRLWSVQGRAVLEQLPMQGWTARRRSDLLAMLDRLDEQIGELDRAVRAEAEQRPEVRLLMTHPGVGPVVGLAYVLTLGPTTRFPRGKQVASYLGLIPKERSSGGRQSFGPISKQGNTMMRTLLVEAAQTAVRFDEELRRGYGRLKAKKHSAPAKVMVARKLAVRMYWMLRENKSYAQLYAQRPVARM

SEQ ID NO: 149585 - protein, 409 aa, unidentified
MIFQPLHLPVRAGGRAIVGIDIGKQHHAAVAVNSHGDKIASVASFQNTREGVDILQVRVLEPAGTPPQVLFAMEATGHYWMPLYHELVRRGYQGAVLNPIQTNGEARTRIRKTKTDKRDAEGIARFILTGKAKAARIPDEATLELRILTRRLLQLLQMKGDAERAAQSLSDRIFPEYADCMSKPFLPSGRTLIKEIGLIPASIAEQPDAVRDTLRRASRGRLSSATIDGLLQKAADSIGIGYAEAVINEELHSSMELIENIEEQICSLETLIADLMENRDSPLPSIGIGISLAAAIHAESDPASDFPSARQYAAYAGLEPSTFKSGNMEGTRTHISKRGSPHLRRALYLAAFGCYRRHEYFTRIYNRFRKKGHTHNSALIVVARHLALVIWRLLVDNRPFTKRSPKKNA

SEQ ID NO: 149586 - protein, 420 aa, unidentified
MTRIQTKKTQAVNQKSLIVTVDIGKKTNMGYYRFSNNRGAKPFPFGNHAHGFGLFWDRIAQVQRQNQLEEIVVGFESTGAYGEPLMHFLKRKGVKLVQVNPMHTKRLKELTGNSPNKTDRKDPKVIADIMELGHALTVIVPEGSAAELRRLTQARERNVVRRTGLLNQLQDLVFLVFPEFLTIMKGVKSKTARYLLNRYSTPGDFVACGDLDLLCSRVKKISRGRIGRERIEPLYLSACSSVGIQEGRDSLVLEIRQILSWIELVDGFIARLEEAMIPHLRQISYSDSILSIKGVGPVTTAGLIGEVGDFGSFRTIPEMEKLAGLDLFEISSGLHKGRRKISKRGRPLLRKLLYFGAINVVRRGGILHGWYHRALDRGMPKTKALVAVARKLLRIVFAVVRDHREFTYDYMNQPKLRMTA

SEQ ID NO: 149587 - protein, 328 aa, unidentified
MTMIATRSEFNHIVAFEVSKAELLVHKLPEDEQCTIVNTATTVRRLLMAELKRLRRNPQARPLVVCEATGGYERHVLEACLDLGIACHRAHGSRVRYFAHYLGIGAKTDGIDARLLAAYGLRSDKLRLYAPPSAEEQALKDLKARRDEIQAMIIAESNRLEHATNVVVLRSLKLHLAALRRAFAGLEADIAALLRSCPPLMQKAQLMRSLKGIGPVTAATLIAYMPELGTLTKGEAARLAGLAPMNRDSGKLSAPRHVVAGRGSVRRCLYMAAVVAMRRNPLMRDFAARLRARGKPFKVVVTAVMRKLIVTLNAILRTGKPWRAAHAA

SEQ ID NO: 149588 - protein, 325 aa, unidentified
MHILGVDIAKASFDAALTQNNRSFQQENFSNNNKGFKKLARWLTTQQVEEVHVCLEATGRYGEALANFLHGQGYQVSMVNPVQIHAYGRSKLRRNKNDRLDAQLIADFCYTQQPQTWMPPSLIQRESQEISRHIATLKEDRQRKRNQLGSGLTSPRLRRSIEKTIGFLDKEIELLEEELYELLSQDPDKAQEIDLLLSIPGIGCLTACRFLAEVDVSRFAQASHLAAYAGLVPTEHSSGTSVRKKSRMSKVGNRHLRTLFFMPALSAHRFNPIIADLHTRLTERGKPKMSVIGAVMRKLLHLAYGVLKTGEPFDPHYMQSIPVGG

SEQ ID NO: 149589 - protein, 377 aa, unidentified
MSITQTVLQGQDTVIQADLYLSFELSDKQWNLTLSDGRRGPSRYSIEAGDTSAVMQCIVKAKARCKLDPRAKVHSCYEAGRDGWWLHRWLREQGIDNIVVDSASIEVNRRARRAKTDRLDGDKLLAMLLRHRAGERVWSVLHEPTAQDEDARRMHRELERLTHERTAHTNRISSLLVLHNLRPRLIIGGRKWAPWWASHSEQVPPALRAEIERESARLALVKQQFKALEAARRQDLADGKQPLVAQLSQLRAIGPKGAWILVKEVFGWRRFANRRELAGCLGLAPTPYASGDSQTEQGISKAGNRRARALLVELAWSWLRLQPDSALSQWYNRRFAQGKRTRRVGIVALARRLAIALWRYLERGEIPDGAGLKPSGA

SEQ ID NO: 149590 - protein, 391 aa, unidentified
MVCVGIDVAKDKHDCCILDSDGTIRADCITIPNNMDGFKQLLQTIRDCTKRSDKIKVGLEATGHYSYNILGFLLDNDLAVYVMNPLHTNLYRKSLSLRKTKTDRVDARTIATMLLSDVDLKSYTDTAYHNEELKSLTRYRFDKVRERAKLKQSVSRLVTILFPELEKLVPSLHIASVYALLSEYPGAKQISEIHLTKLTNLLVTASKGRYGKDKAIQIRDAASTSIGSVMPVKSLELKHTIKLIRELTSEIDEIEVSIQKIMDELNPPILSIPGVGIQSAAMILAEIGDFSNFESPDKVLAYAGCSPSTYQSGKLTNCYAHMEKRGSRYLRYALYNATKYVCYWNPVFAEYLAKKRAEGKHYNVALSHATKKLVRLIYALQKSGKAYLTAA

SEQ ID NO: 149591 - protein, 345 aa, unidentified
MEKFSLFIGIDLGKREFYAAFRSQSLLVKERKYENTASGISRFIQDIQAFGLELNQVLVALEHCGVYLEKLVMALYAEGIFTWLWNPLIAKHAPLDLNRHKDDPRDAKAMAFLAQSYQAKAKRYIPPSVAEREIKALSLLRRQLIKQRTQFINQQKNNRDKALPLPLAAEVFQQLIDSINEKIKRVEKQLKKIIVQSDRLKRVYKILTSIPGIGPVTATQLIEISRGFTTFNSEIALAKYAGTLPLKHLSGSSIKRKPRSSKKANKQLKVNLTMGATSQIRKGMFFENFYRYKTQVQKMEHLKVINIIRNTLLKLAVKLVKLDQEFDPDTFRNNKKSWQVFLTLS

SEQ ID NO: 149592 - protein, 397 aa, unidentified
MIAVGIDISKAKSTVAVIDSDGTVLASPFTMAHTQPEMEAFVTYLKGLGEPTTILMEYTGHYHYPVLKKLQGEGFPVCIVNPYQMKKYGDVEIHKAKTDKKDALRIAAYALEKSYKLVPYSSMEQKYEDLKFLSRQYSQRITYVAKLKVQLIALLDQTMPGITRILPLNSRNPEKCALLLFIRRFKSFDEIHRIGKTRFLASYDVLAKKTSERSASSKGLSIYELAVDSITTRGEDPYIWLSQNQCVDLLSTTQNAADEIISQMRNIAETIPEYKVLRAMRGVGDRLGPIILAEIGDIRRFHSGKALNSYAGNDAPPYQSGQFESRNRHISKRGSSALRKACYEVMQALKLTKPQDDPVYLFMLKKEQEGKPFNVAKMAGVNKFLRIYYARAMELYK

SEQ ID NO: 149593 - protein, 395 aa, unidentified
MVYVGVDLHRKSSHVAVLAGDGELLASRRIRSHPEEFLRVFGELEAEPIEVAFEATYGWGWFADLLSDAGIPAHMAHPLATKAISSARVKNDKVDAKTLAHLLRTNLLPEAWAAPPEVRDARKLARTRISLARISSRLKCQTHALLADQAISPPVSDLFGPGGRQFLQGVGLRPIPQARLEANLRLIDLLSPEVATADRELRELFGRDPRIGKLVPIPGIGFTTAAVVLAEVWDISRFPSPRHLCSWAGLTPTEHSSAEHTRRGHISKQGSRWLRWAMVESATRPYLKDPVLRRFRDGIARRRGAKIAKVALARRLLTLCYYALRDRPGRMTIMGPARIDDRSHRPFVDARPRPPVPFHDGPRRRQGRSSAGRSTLTPAPVRRPWQPGGDARESP

SEQ ID NO: 149594 - protein, 341 aa, unidentified
MQITTIGLDIAKNVFQVHGIDAAEKVVVRKQLRRGQVTKFFAALPPCLVGMEACATAHYWARELRKLGHQVRLMPAKDVKAYVKRSKNDAADAEAICEAVRRPTMRFVEVKSAAQQGRLMQHRTRDLLLRQRTQVINALRAHMAELGVVAAQGREGLKSLLTIIADEKDERLPVDARASLIVLAAQLQALQTMIGSIEKRIIVQHRASEESKRVATVPGIGTLGASAITATVTDASAFRSGRDFAAWIGLVPRQDSTGGKPKLGPISKQGDRYLRRILVVGAHSVLRRAKQNPEKHPWLMQLLARRPFKVVAIALANKMARVAWALLARGGIYQVPRLAAA

SEQ ID NO: 149595 - protein, 388 aa, unidentified
MTQAPGVLPTPTVLDYERTLILAIELSNTSWVLAAQIPGLPGVKAKRSIEPTPEALMAAIEDYRTRAVKAGRNVERVVAIYEAGWSGFWLARWLAQYGIETHVIQPSSVPIDRRARRAKSDGIDAELLLRTLLAWLRGEPRVCSMVPIPAEADEDARRRVRERAELVAERVGLVNRIGAVLATLGVGEYNPLRRDRRQRLDELRTALGGSLPTHARAKIVRMLDRLELLLIQITELEKSRDAVLEDENPDKAASMIQQLAKLRGVGVQSATVLVREGFVREFANGKAFGSYAGLTSTPYSSGGTEREQGIGKAGNVRLRTLMVELAWLWQRYQPDSAQVSWFRERVSGTGRRMRKVMVVALARKLLIALWRFATQGVVPEGAVMKPAT

SEQ ID NO: 149596 - protein, 318 aa, unidentified
MASFLGIDLSKETFHAFLLGDRADAKKVFPNTPKGFEQLTTWLKNRRADDVHVCMEATGAYWEALALYLHGLDQHVSVVNPARIKAFAQSELLRTKTDAVDAALIARFCKSQNPDPWVPSPPEIRVLQALMRHCDHLKKTRAQQSVYAQSSDAAVVTASIREVIATLDEQIAQVERKIRRHFDDHPDLRRRRDLLTSIPGIGETTAGSILSEIPHLDRFESAKAVAAFAGLSPRERRSGTSIHGRPRMCKTGNARIRKALYMPAIVALRCNPILRIFAERLSAAGKHKRLIIGAVMRKLLVLAYGILRSGAPFDANYA

SEQ ID NO: 149597 - protein, 406 aa, unidentified
MRRQARRGPGSSSTLITPDRAGNVVGIDPHKRTLTATVVDPRGGIVASEHFRVSGDGHRALEAWARQFGPIVRVGIEGASAWGRHTAIFLIDRDYDVRDVCPNRTAHHDRARQRGKSDTLDSERIARETLAHPLLPKAFKRAGQDAGPDQHTELLAVWWTARCSLLKRRQHLLTESEALLRELPLELIERLPAAKRVRPRLAALPRVTRRRCFDPPTAARLHILAGYREEIANLDAQDRQITRQLAELVAQSGSTLDQLCGLSTVSVAELLVEVGDPRRFTEGGFGRFNGTAPLAASTAEGPGEPVRHRYNPGGNRRINAILYRMAITQLRCDPRAKRIYANARAEGHTKKEARRIVKRHLSDVVYRRMVRDLAAHPPSQPLLVAQPRAGAAQSRVARQGRAQRAA

SEQ ID NO: 149598 - protein, 317 aa, unidentified
MQTPIVYGVDVAKAELVIAGPGANCVKLANRASEISQWLDEIPDGSFVAMESTGSMHRLLAQLAHRHGMTVFVLNPRDIHHYARALGSRGKTDRNDAEVIARYVAAEHCGLRPYVPASELQERIDLLLRKRASVVRHRDALRKALRELPGLNDAAMRAMRSLAELLTCIDDQIEELVRSEQALVQRSELLRTMPGVGPLTSVSLANLLERVKLANADALVAFVGLDPKPNDSGQHRGRRRLSKRGPSEIRRVLYCAALTAARGAWKPLYETLRHRGLASTQAVCIIARKLLRVAWAMCRTNSPYDPALAPKALDATT

SEQ ID NO: 149599 - protein, 399 aa, unidentified
MISVGIDVSKGKSTICILKPYGEIVRSPFDVQHTNSGLESLVQILEGLDEDFRIAMEATGAYHYPILYYLKEKGYFVTLVNPLEMKRYRCQGLRNPKTDRIDAKIIATYVLDYWNSIKDYAVSDEAYAELRLLTRQYRKYMDFRVGAMTSLTDILDMTMPGIRTVLIDWNKYSNNDPLSDFSYDFWHYDNVKKFSKEEFIEEYAKWAKEKGFRRSETKAVAIYELAHEEIPTLSSGTPSTKMLVQEAVKVVREINASLYEILTRMQELAKEFPEYQIVRNMSGVGDTLAPRLIGEIGDVRRFPNASALIAYAGIDAPPYQSGRFTGTERHISKRGSSNLRKIGFETMTCANVAKKSDDPVYLYMQKKKAEGKPGKVAKIAGMNKFLRIYYAKVKELYRE

SEQ ID NO: 149600 - protein, 305 aa, unidentified
MKSYLGIDVSKLHLDLSHPAPAKRLANTEKAILPWLKSLPPETILVCEASGGYEALLLSLAHALHRPVIQLNARQVRDFARAQNRLAKTDRIDAGLIADFAETFQPKPLPLPDPLQEELLALVKHRSHLLTQITQNNNLTQTVTDKNLLRLIAKTVAFLQKQVTQLEALMQTKLAASPDLLAKVNRLRQVQGIGLLTATALVALMPELGSLSDTQAAALAGVAPFNHDSGQFRGQRHIFGGRAQVRSILYMAALVASRHNPILRPLYLRLLDRGKAKKLALTALMRKLIVLANHLLKYSDFTLAA

SEQ ID NO: 149601 - protein, 343 aa, unidentified
MEIHAIGIDLGKTLFHLVGVDSCGNVVVRKRCSRSQLLAYTANVRVQRIGMEACSGSHFLGRALREQGHDVRLMPAQYVKPYVKTNKSDYIDAEAIAEAVQRPTMRFVPIKTEEQLDLQTVHRVRERWVMRRTAVVNQIRGLLLERGLTLPKGRSHVDRALPDILADATLRLSDSFRVLLAQLGLEMDQLTARIEQMDAVLQHTAKDNEACQRLTTIPGIGPVTATALIAAIGNGSGFRRGRDLAAWVGMVPREYTTGGKQKLLGISKRGNSYLRKLFVQGARAVMQRRHNQPPGLSAWLAQLLMRTHQNVAIVALANKLLRMAWAVLCKNETYRPPALVPSS

SEQ ID NO: 149602 - protein, 463 aa, unidentified
MAKLRKSRKKQALKVDVTAGLEALHHHAAGIDVGNAEHYVAVPVGRDPQPVRTFGSFTADLHRLAQWLQACRIETVVMQATGVYWMALYEVLESYGFEVNVVNAKYTKTLPGRKTDVLECQWLQKLHTFGLLNNSFRPPEEIRVLRTYLRQRENLVAAAGTCIQQMQKVLTEMNVQLANVISDLSGLTGMTILQAILDGKRDPQQLAALADPRIHASRKAIAQSLEGHWREDLLFVLRQVHELYFTYLQNIPEGDQRIEAHLKTMDAKVDVVAQPLPEARPKDRLPNRKHIPQFNLRGELYRITGVDLTRIDGIQVQTAQVLVSEVGVDMTRWPTEHHFASWLGLTPNNQITGGKVIRRGTKKVHNRAATALRLAAQTLHHSKSYLGAKYRRLRAKLGAPKAITAMAHHLARLTYRLLRFGTQYHDKGIEYYERKYRETEMKWLQKQAAKLNMQLIPSQALVK

SEQ ID NO: 149603 - protein, 423 aa, unidentified
MNCDQPELAAFVGLDWADEQHAVCLRVAATNEIRTFSVEQQAHKLHAWVASLHQEFGGLKIGIAIEKSRGGLIYALMGYDFLILYPINPKALAKYRESGCVSGAKDDPSDAALLMDLIYRHRDRYRPWVPDTAKTRMIQLLSEHRRRIVNDQTALTNRLESLLKGYFPQALEWAGALDTLQACDFLTKWPSLQSVQSAKPAQLRKFYLDHGCRRAELIEERLQGIRDAQFLTEDDAVVRSSVLMVQATADALRPIIAAIKRFNQELEAAFQQHPDHELFESFPGAGAVMEPRLLAAMGSDRDRFDTAIEIQQFSGIAPVTKRSGKMCYVHRRYACPKFVLQTFHEWSRITIRYSVWARAYYEYQRGIGKRHHAAIRALAYKWIRIVFRCWKDNVFYNESIYLTALRRTKPAWAVKAGITAQAA

SEQ ID NO: 149604 - protein, 324 aa, unidentified
MNKPVLGIDISKLKFNICLINSNQKPRHKVFPNTLSGFEQLITWLSAQNAGDAQTCLEATGTYGEALALFLLQAGYCVSVVNPAAVKAFAGAGLSRTKTDKVDADLIARFCLSQEPEVWKPPAPEIRELQALVRRLESLIEMRVSEENRLSSGIVVEVVRRSLEEHIAYLIEQTKHTERMIREHIDNHPDLKRQSELLDSIPGVGQTTAALFLAEIVDIRQYKSARQVAAFAGLVPRERRSGTSVRGKVRLSKIGNARLRKALYFPAITALRCSEFFKQWASGMRERGKCKMSVIGAAMRKLIHLAYGVLKTGKPFDPNWAKTA

SEQ ID NO: 149605 - protein, 361 aa, unidentified
MSTIAEDDVRVVAGVDTHKEFHVVVVLDELGRQLDMATFAATPRGYRELTGWVTDFGEVLAIGVEGTGSWGAGLCRHLRERGLNVIEVNQPDRHKRRRKGKSDRLDAEVAARAVLAGDATALPKSGDGPVEALRQIRIARAGAMKARTAAANQLHSVCDTAPDQIRSQLRGLSTRRKIAIASRYRPGDPLTPTGAAKRALVTIARRWAALDAEIAELDRAIKTILDAIAAPLLARHGVGYETAGALLCTAGDNPERLATEASFASLCGTAPVPISTGNSNRRRLNRAGDRRGNSALWTIVMARLRSGHAPTVEYLQRRVAEGHSKRDAIRCLKRFVAREVYGDIQAITAAETTTSPLEIAA

SEQ ID NO: 149606 - protein, 428 aa, unidentified
MNQTELSRVKEFRQLKNEIQASDTYLIVGIDVAKERHHAFFGTGSGKTLLKKLIFNNTSAGFSELIARAEALRAQSGLSEIVFGLEPTSNYHKPLGRYLISKGCHVVLVGGKAVKNNRELLDERWDKHDTKDAANVADLVSRGKCFYYDTPSREIEELRELHSLRARLKKEEHSLSLRIRNNLLAKHFPELDSFYSACERETLAIVRWCLNPQKIAAMPFDQFFKLVATNGRGIAQKLRLQKIHRLAYESIGCPVGCAVELQAALLVEKIKQVREQIAEVEQVIQQLCAQFPAYEYLLSIPGFGPYVASKVLATIADPWRFDTAKQVIRTAGYDLCADRSGKRSDQAVPVISKKGNSQLRYALYQAAMIASSRHRFFIAYFARMLQDRERERGIKTKMRVKLAAKMLVIAWTLMKKGEPFNPEYLNVQ

SEQ ID NO: 149607 - protein, 342 aa, unidentified
MAALIKHVVGIDISMNTFDACFGSIDSEQSIKLSTGKSFKNEAKGFEELIKWALKLKDSSTPIWFVMEATGIYYENLAFYLNEHEHLVNVVLPTKTKHYKQTTEIKTKNDKIDAQSITRFGLERQLEEWNIPDAKMRIIKELCREHESLNDQASQIKNQIHSKMNSYKPNESTLKRLKQHLHILEEQQKDIVKELKGIIAKIPDVKQKIELIEISLKGVGFMSLVKIIAETNGFACITSAKQLASYAGLDIVENQSGTKSGKTRISSKGNSHLRRSLYMPSMCVVRFTDAFKIFYARLRKKNKNGKVALTAVMRKLLTLIYSLWKNNTAFDPEYYLKKAVLN

SEQ ID NO: 149608 - protein, 528 aa, unidentified
MPYQVRRNRRANPKSKLNARNRRSLQKPNGVISPRVQKVGGERFAIVCVDPAKHRSEWMMADYFGNLLIQQQTLEHQATFFKLAVAQIREAQQQHDIQDMIVVVERTGNYHLPAKRAFAKAGFETRVVHPFATKQYRMPANPGNKTDGNDLDAQHRAAVAGFGLCELELESPYQELQLKARHRRNLVEKASALVCQIREHLHLAMPGFGTLFDHLLKHKSAIAIARRCDSPAKAIELGHAGLSQHLREKKIRHQPRTIDKVLAWAAQAVDDSAQDGPLHHAIWTDLEELYQHFQRQITALERELAGDLVQTPYVRLMAIPGINVVSAAELAGEMGPITRYANANAITGRCGLYPSRSQSDQTDNDRGPIIRQANRRLRCVLMRIADNLALHCAYYRGQADADEARGIDKRASRVKIAKKFSRLAFACVAGDEPMKHPCFRKPDSIMEKLREFHHQHQTPVDRLLSDLETAVGQLPYNTCSHEAEIVAHVLQQQTNRHRGAVAIGELLPAVLARLEIKITKQNKYGDRS

SEQ ID NO: 149609 - protein, 389 aa, unidentified
MLNSEGSTVDQRWIEHTGDSLHELTEWLRTKASQTPNTVAVAIEVPRGAVVETLVENGFAVFSINPKQLDRFRDRYSPAGAKDDRRDALVLADSLRTDLHCFHRVKLDEPTLIGLRELSRLEEDIAQEQNRLHNQLREQLHRFFPQLLALSPAANEPWLWDLFQAAPFPAKAAKLSAARIEGILKKHRIRRVDAVKVQAAVSTRALTLAPGAAEAASEHALLLLPRLRLLEQQREHIAKRVQTLLEELTQKADDEESLEHRDAAILLSLPGVGRKVAATMLSEASEAIAERDYHALRCYAGSAPITRQSGKKTVILMRQGCNERLRNALYHWARVSVICDPKAKTMYAGMRARGHSHGRALRGVADRWIAVLISMLRHNALYDSQKRAA

SEQ ID NO: 149610 - protein, 338 aa, unidentified
MDRQYVGIDFHRRRSVIVRLSGDGERLGLHRIVNEPFELAEVIALCGEAPRVVIEATYGWYWAVDLLQELGAVVHLANPRALNWGDRRVKNDVNDATDLADMLRLNRLAEAWIAPPALRELRELVRYRAKLVQLRSGLKAQVHAVMAKEGVLPAVTDIFGPAGTRQLDQLELGAPFARRIGSLRQLIVAYDGEITALEREIHEHLRHHAGYRAVQAINGIGPISAAVLVAEIGDVTRFPTPAHLCSWVGLTPRHRESDLKTRRGRISKQGSRLVRATLIEGISRYHGGPHLNAQYHKLAKRRGRNKARVALARKVLTLVYYGLRDGEIRRLAPVETAA

SEQ ID NO: 149611 - protein, 429 aa, unidentified
MNYTQNEKIEQVTDSTMVVGVDIGSQIHYARAFDNRGRELTKRIFSFHNDLEGFNSFNLWAETLKTENKKTAVLIGCEPTGHYWFAFAKYVNDHQKRLVMVNPFSVKKIKELDDNSPKKTDSKDPKTIAKLVVDGRYSIPYMPEGIYAEIRDLVYSRDRIMKQHNISANRIQRWLAIHFPEYLGLYTRFDAISGLAVLEKAPLPKDVIALGVNGLRKIWHDKKMRGRGVTEDRAKTLVEAAHNSVGLDGGIGTKSELYMLLEEHRLWTSQLEAVNKVLEEMILKVPHVEKLLAIKGVGSITIAGFIAEVGDIRRFDSPKQIQKYAGLELVENSSGKHKGRTRISKRGRRKLRKILYQVMVPLLARNKEFRGIYDYYVTRVKNPLKRRQAMVAVSCKLIRVFYAVLTKGVEYDRFKMMSDIHRKSDIIAA

SEQ ID NO: 149612 - protein, 326 aa, unidentified
MFFIGIDVLKAKLDCSLLLEVASGKRRAKTVANSQAGVSELLTWCVKHHAFPQALHAIREGTGVYHEQAALALADAGGTVSIVNPAQIKDFGRSLGIRTKTDGVDSRVLARYAALLKPRPWTPPAQEARVLQALLSRREAIVQALQRERNRLEKAEATETPSTIRQSLLDSIAFLERQLAKLQQDIDDHINKHPDLKADRDLLISIPAVGPQVGNQLLAVMHNHRFQSAEQLAAYLGLVRVERQSGTSLLGRPRLSKTGPARIRAVLYMAAIVGTEHNPHIKALYQRLQARGKSKMSAQGAAMRKLVYLCFGVLKTRQPYQSNYAI

SEQ ID NO: 149613 - protein, 360 aa, unidentified
MAKARSLVGLDVHATKVVAAVLDAETGQLQTFAMSGETAKVVAFCAGLPRPVRVAYEAGPTGYGLARELAQRRVECIVAAPSKIPRASGDRVKTDRRDAEHLVRLLLAGKLHAVRVPGPEEEALRDLVRAREAVRVDLMRCRHRLSKLLLRHGIRYEDGGAWTQRHRDWLATITLAWPAAQTTLLDVRGAIDALVHRREQLERAIVALLPDSSWAVQVGRLRCLRGVDTLTAVGLCAEIGDFERFAKAQQLMSYTGLVPCESTTGQQRRLGAITKTGSGHARRLLVEAAWHYRSRPSIGRALTDRHDGQPPEAIAVAWSAQKRLHRTWTRLEARAKRRALIAVAAARELAGFCWAITQIE

SEQ ID NO: 149614 - protein, 441 aa, unidentified
MSNRRTLTRGDRRRNEKLTRLRSIVRPELAIVGVDLASARQAVVVADHDSVTLERRMFDGDAWVIDEIVEWALPIAVAAGFAGVVVGCEPTGHRWKPVLERCQAWGVEVVCVNPMLVHRGREEEDFTRDRSDFKDATIIARRVADRHCYIPYALEGDWCRLRHLGARRNDQLVAATAARQQLRDLLECVWPAALRAAADPLDAITWRAAMAVTVDPEVIVAMGYDAFCDAVRGELGQWGGQRRNHRILRAIWAAALEPGGVERERPAALERAGYAISDWRRALDELDDVTTRMLAVLDSLELTDLVTTIEGVSAIGAAAILAEAGDPARYDTARTWVKHAGLCPRANESGTFTGKTKVSGRGRPALRTAAWRAVWGALHANRVYAARYQHLRTRAHNPLRDGQARAAIAAALLRQLFVVVTQRVAWNPAIAAGEEVVNQAA

SEQ ID NO: 149615 - protein, 350 aa, unidentified
MKKHSKAEKRIPVETIGIDLGDKMSRYCVVNQNGEVVEEGSFRNQVSSLETHFKGAPRRIALEAGAQSAWISRELKQLGHEVIVANARELKWITASDSKNDPADARKLALLARADVQLLAPVEHRTVEQQAELAVIRARDAILRTRTLLINSARGIAKGFGVRLPKSITATFGERAVADLPEILRTALRGLLQQIDALSQEIRNYDQQVGVLAEQHAEVKRLASIPGVGQLTAVTFVLTLGRAERFVHSRDVAGFLGLRPKQRQSGARDPQLGISKSGDPYLRKLLVQCAHHVLGHWGKDSALRQWGLAKGEGGKRATLRAIVAVARKLSVLLHRLWVSGEFYKPFPQMV

SEQ ID NO: 149616 - protein, 309 aa, unidentified
MKQSVVYIGIDVAKAHLDVAWQEQSRRFANDKCGQVALIKWLKQSAFPVQLICEASGGYEQALVESLEHTDITASVVQANRVRQYARAAGILAKTDKVDARVLAGFGAAMQPKPTPPLCPEQKRLRQYEAQRRHLSAVLVAEQNRLAQLSYAELRGLSRSLISKIKKQIATIDARINALIAQDKQLCQKAQKLTSITGVGARTAALVLAQMPELGQLNRRQAAALGGLAPFNRESGTLRGKRTIFGGRRALRSGLYMAAMVAARHNPILCSFYQRLRAKGKPHKLALTAVMRKLLLALNQNLKPITSPA

SEQ ID NO: 149617 - protein, 342 aa, unidentified
MSVMIGIDPHKGSHTAVVIDQDEVVIDEIRVKATANQVRDLQEWASGHNDRCWAVESARGMGYLLAQQLVGAGERVIDVPAMMAARVRLLGSSKSQKNDPNDARSVAIAALRHPGLTLVHRDDHTRVLGLLAKRHRDIARLKNKAACRLHALLTELTPGGLATEMTVNKANTLLAGIAVTDEVTRQRVVIATELVDDIGRFETQMRASKRRIRAAVVASGTSLMNIRGVGPIGAAIILGAVGDIARFPSPGHFASYNATAPIDASSGERKRHRLNPRGNRKLNYALHIAAVSQLGYPGAGRDYYDKKLAEGKTSKEAIRALKRRISDVVYRHLVADTKQSIS

SEQ ID NO: 149618 - protein, 414 aa, unidentified
MDCEALGPINHSTKEGSHDRCWNRRIEIQEYRCHPQLGWYTACPSIQHGNTLPEMNSFVERLRAFDTPVTILMEYTGHYHYPVLKKLQAEGFPVCLINPYQMKKYGDVEIHKAKTDRKDAVRIATYALEKAYKLTPYSAMEQKYEDLRFLSRQYGQRIADVSRLKTQLLDHLDQTMPGITSLLALKSRTPDNCVLLLFIKRFNSFDEIHRIGKPRFLSAYSSLVKKTTDRYAASKALAIYELALNSITTRGDDPYIWSVQNQCVDLLASAQNAADTIILQMQNIAETIPEYKVLRSMHGVGDRLGPIILAEIGDIRRFHSGKALNSYAGNDAPPYQSGQFESKNRHISKRGSPALRKACFEVMQALKLTKPQDDPVYLFMLKKEQEGKPHNVAKMAGVNKFLRIYYARAMALYK

SEQ ID NO: 149619 - protein, 410 aa, unidentified
MEPILISCAGMDVHEKKVDVCIAHGPLDKPPIFEIRTFSTMTSDLEVLKLWLKKYEVTTIAMESTGIYWKPIFNILEDEFDVVLANPQHIKALRMNKTDIKDCKRIANLLRHGLVPRSFIPPREIRELRELNRTRRKLVGIMASEKNRVVKILEDANIKLSSVVTKIYGVSSLSMIHALLEKDKLSRDEICEMAKGKLKKKVDLLEKALDGKLTDHHRFLLRMHLEHIQYLAGQIKKLDDEIKQKMVPFHQESKLIQTLPGINEVSASAILAEVGIDMSQFPDESHLCSWAGVCPGNNESAGKRKSGRTKKGNSFLKGTLTEVAWAASRTKSSAYHAIYNNLAKRIGKRKALVAVAHRMLIDIYRVLKMGEPYHEIGAEAAHERAVERREQSMIRLLERAGYSVSRAAIA

SEQ ID NO: 149620 - protein, 372 aa, unidentified
MSSSIIWIGMDVHKDTVMAAVYAGGAREAEVVQQLPYDLRRLRRFFQRWAGHGEVRACYEASGAGYVLHRELTDWGIHCDVVAPSLTPIRPGDQRKHDRRDAIQLARLYRAGELVTIRIPTPAEERVRDVVRCRQCFQREILRSRHYVLKFLRRRGFVFREGSHWGRKHRRWLESLLHGEKLAREDRAVFGEYLALLDYKISRRDELDEQITEIAFSPQYRAAVDRLCCFRGINTLAAITLVTEIGDWRRFERPGQLMAFLGLVPKEHSSGDRDRKGPITKAGNSRCRHVLVQGAWKYRHRPAVGVDLKRRQKGQLPEVIAHAWKAQHRLYKIFHRIAYRKSNQIAAVAVARELVGFLWAAMRDMEQREAAA

SEQ ID NO: 149621 - protein, 379 aa, unidentified
MHASKLHLGLDVHKDSITIAIAQAGLKGEIRVFGTITNDLHALEKALTRIRKAHRGAPLEVAYEAGPCGFGIARRLQQLAVPCLVAAPSLIPKQPGSPFKTDQRDARTIARLLRAGELTAVYIPEPTDEAIRDLCRARTDAVDDLRRCRLRLKSFLLRHGYRYHGKANWSQPHMRYLRELVLPHPAMKAILEEYLQGIDAAHQRVQRIEASMLSLLETWRLKPAVHALMAFRGFQLVAAMITVSELGDIHRFAHPRQLMTYLGLVSVEHSSGPRQHLGAISRCGNGHARWLLVECAEHYLAPPKVSKELSRRQQDQPPQVRALSWKAQNRLHLRFTRLLARRLQRNKAKVAVARELCGFIWALLRTQDCYRQATGGAAS

SEQ ID NO: 149622 - protein, 361 aa, unidentified
MTAAATAPTSETRTGPDVVIGVDTHRHTHMAVALSANGGWLGSLKLDAKRSGYQELIRWAAGFGSHPVFAVEGTGCYGAGLCRALQTAGLEVVEVNRPDRSTRRRLGKDDTIDAEAAARSFIAGQATVIPKAGDDLVEMIRMLKVAKDSATDNRTAALNQLHAIVVTAPAALRERLQRLKGKELVECCSGLRSGDISTPLAAAKMTLRTLARRIQQLDQELKDTVAQLDRLTMQHCPELRNTYGIGVDISATLVVAVGDNQERMKSEASFAALCGVNPLPASSGKVVRHRLNRSGNRQANCALHRIVICRLQRHQQTREYVERRTAEGRSMKEIIRCLKRFVAREVFGILRGGPAVRTAAA

SEQ ID NO: 149623 - protein, 411 aa, unidentified
MRRIVGMDIHRTFAEVVFWEDGRLRPAGRVDMTRAGLEGFGKLLTREDEVVIEATGNSMAVVRVLSPFVAQVIVANPLEVKAIAHAHVKTDRIDAGVLASLRAADFLPDVWLPDAETERRRRLVTRRNQVVRHRTRIKNEVHSILHAHLVPPCPHADLFGRRGRTWLTQQALPADELTAIERHLRELDRLGEDLDGLDREIAQAVREDPAVKRLLTISGVNLTVAAGLAAAIGDIHRFDSPQKLVSYVGLNPRVHQSGLGLAQYGRISKRGRSHARALLVEAAWSAARAPGPLRAFFLRIRARRGHQIAAVAVARKLAVLCWHLLTKETDYLWARPALVAKKTRAMDLQAGAPTRKGNRRGDAYAYNVKELRNREIEVARHAQHAYEEFVRGWKPHGPKRSAAPRAKTNGP

SEQ ID NO: 149624 - protein, 343 aa, unidentified
MPIVGGMDIHRKQITFDYLDVVTGEVQRGQISPADRQHLRAWLKRFAGVPDVAFAFEACTGWRYVAEELAAAGVAAHLAEPADTAAARGRKKRAKTDRADAKLMRELLADGRLPECWIPPAQVLECRALLETYHALRREHTAWVQRAHAVVFHQGAPVFHALGEADGPAQLAALARAHLSPAGQQQIGLYLRMLEVTETELDVLRGQLTATARRLAGAKALQDKLYGAGPITALALTCWLGGKDRFSSARKAVRFAGLDITVYSSDGKRSPGHLSRQGPPVLRWCAYEAGKTHARGSAPDHGYYAQVKDRKGGKRAALSEARKIVRQACHLLAGLGDDAFTTV

SEQ ID NO: 149625 - protein, 311 aa, unidentified
MTEHTIGVDISKSHLDVFDAERREAKRFENSISGFRAFVKWLGKARIARVVYEPTGPYHRNFEERFCDKLPLVKVNPLQARRFAEACGTRAKTDALDARGLARMGVALELEPDIPVAKATRILKDLQVARAALIKERTRLNNRAHVQTNAVLKRQTKARLALVEKQLRELDREIDTLIKADKTSERRREIVQSIPGLGSVASAAILTYLPEIGTLDRRQVGSLAGVVPYNRDSGQWKGKSFISGGRKPLRDALYMPALVAMRYNPDLKAKYEALRTAGKPAKVAIVAIMRKLIETANALVKADRVWVPKTS

SEQ ID NO: 149626 - protein, 343 aa, unidentified
MQTITTIGLDIAKSVFQVHGVDAGGQVIVRRQLKRRYVLTFFQKLSPCLVGIEACASSHHWSRELQALGHTVRLIPPAYVKPYVKRQKNDAADAEAICEAVTRANMRFVETKTPEQQGGLVLHRARHLFIRQQTAVINAFRAHLAEFGIVAPVGRHGVEELLNVVADPNDKRVPEMARACLLAFGAQLRRIKEQILEFDRMISAWHRSNEMSMRLDEAPGVGPVLATALVAAVADPKSFRSGRNFSAWIGIVPKQHSSGGKNRLGNISKQGDRYLRGLFVAGALSVIRYAKIHGTKHRPWLTALLARRPTKVAAIALANKIARMVWAMMARGERYKEPVALAR

SEQ ID NO: 149627 - protein, 410 aa, unidentified
MAERFVGIDVGLREHRIAILDRDGEAVGPSFTIAASTDGVATLVRALAAREATAAPTLIGLEASGHLWENLEAALGGAGYRVLVLNPLQTRRYRDVVRRKAKTDDIDAHVIAGLLRSGVAQASYVPDEPIQSLRELARLRARLMADRQDYQRQLVAQLDVVLPEHRAVLGDLLTARARGILAQFPTAQHLAKANPRAIRRAAEDAGARGFSLDDATGVRDRARRSLYSGKAAAARAHVVRTLVSQLERLTSAMDEVDHAASTLLPPSEPGTGPSDAELLQTIPGIGPQTAATLLGELGALTRFTDARALVAYVGFYPVIHESGDRAATPSLSRVGSRLARRSLYLAAVNAVRGSGEWRTSYLRKKAQGKTAKQALVVVAVKLLHALYAMLKHRQPYNPSRLLVAPATIGS

SEQ ID NO: 149628 - protein, 322 aa, unidentified
MNKYKETYGVDISKDVFDVHGDLTGHSQYENNESCFNKILKALPNDALVAMEATGYYHYRLAQFLYRNGVIVSVINPLSIKRYIQMKLSKVKTDKSDAKAICEYAMVNEVPIYNALTDIQSECLQLFRLLDAYIKQRTATKNKMHGEEVLGLPSKFVYRSLRRNRKQLDGEVAAIEAKILSLVKEDQQQQLTLLTSIPGIGQKTALFLIVVTDGFSKFEKASQLCSYVGITPIIRESGSSVRGRARISKVGNRKLRNLLFLCAFNACKHNKACRELYERIVNKGKSKKLALIAVANKLLKQCFAIATSGRPYDETYVSVLPR

SEQ ID NO: 149629 - protein, 384 aa, unidentified
MRTDQTDMTNAGEVVLAVSLELATAKWKVALHDGRRDSPAIHTVTQLQSAARLQAVLSLIEQHRQKWALPASTRVVVSYEAGQDAFWICRALQARGIECYVVDPASIPVERHKRRAKTDRLDVIKLVINLRAWLRGERDRMHVVHVPSPQDEASRHLMRDRGQLQKEVLQHRDRMRKLLATLGCQDEVDSRKFAGRLARSEVRCHDGAPLPAELHERLLRECERLALAEAQLAALEKARPTSLPEPARERIDHLTRLNGIGPVGASRLALELFWRQFSNRRQVGACVGLVPQPYDSGESQVDQGISKQGNRRVRALLIEMAWSWLRYQPGSTLTKWFKERTQGTGPNRRARRIAIVAVARRLAIALWRYLKDGVIPEGARLKSA

SEQ ID NO: 149630 - protein, 316 aa, unidentified
MSASPLFVGIDVAKAELVVALGPSGDLLTATNDESGIRQVLEHLQAASPALIVLEATGGYETAVVAALAAAGLPVVVANPRQVRAFAKAMGILAKTDNIDAHVLALFAERVRPTIRPLPDEALRMLDALLTRRRQLIEMLVAERNRLAHALPPVEKSLKQHIRWLERRLADVDSDMDQAIQQSPVWRAKEDLLRSVPGVGPVVSRTLLADLPELGALNRKQIAALVGVAPLAKDSGTLRGKRMVWGGRAPVRAALYMGALIASRHNPVIRDFYQRLVAAGKPKKVALTACMRKLLVILNTMVRNNTRWGERYALSA

SEQ ID NO: 149631 - protein, 391 aa, unidentified
MVQSGRVVIGMDPHKRSVTIEVMAGDETVLGGGRFATDPAGFEALGRYVHRWPDRTWAIEGCNGIGRHVALRLLAQGQDVVDVPPKLSARARVFATGQGRKTDATDAHSVALVGTRMTGLRPVVDDEQLAVLRTLVDRRRSLGEEHTRMVTQLRHLLLELVPGGAKRFLSAAQAKQILAGIRPRDTAGKVRRRVAVELVSDMERTYKRKKATDKELTELVRATGTGLLGLNGIGPSGAARLLVEVSDITRFPNRGHFASWNGTAPIDASSGDHVRHRLSRAGNRQINRVLHIMATVELRHPGIGRDYFDRKKADGKTSMEAMRCLKRRLSDIVYRTMFDDAVAALGTGPGGHRGASADSSAAGSHPHTGTSDQSHPGPATNEPRTALPAAS

SEQ ID NO: 149632 - protein, 431 aa, unidentified
MEVIHPRVAGIDVHKKIVWVAVRLPGERPGERTVTAKRFKTFWRSLRQMAAWLAELGVTDAAMESTGVYWWPVYHALVQAGIEVCVCNAAHMRNVPGRKRDIADCQWIAELHEHGLLRPSFIPTGAVAELRSRTRYRKKLIEQRTSEGQRLAKVLEDAGIKIDSVASRLLLKSGRAMIEALIAGERNPGRLADLALGRLRRKTEELQLACDGRFTAAHGQMCRLHLDAYDHLTAKIAELDALVAEAAAPFAALIARLETIPGIGRRTAEVIVAETGGDMARFATAARLAAWAGLAPGDNESAGKRKHAAARKGNRHLRVAMVESAWATARTRTRPGARFRRLARRFGKGNEKKAAIAVARTLICIAWAVLSRGQDYADAGEDYYEQRDRRDREHLIRHHQQALARLGYQVTLIPPGDGSPPPSATSKQPAA

SEQ ID NO: 149633 - protein, 343 aa, unidentified
MQTVTTIGLDIAKSVFQVHGVDAAGQVVIRRKLKRRYVLAFFQKLPPCLVGIEACASGHYWARELQALGHTVRLMPPAYVKPYVKRQKNDMADAEAICEAVTRANMRFVPIKTPQQQSGLVLHRTRHLCIRQQTAVINAIRAHLAEFGIVAPVGRKGVEELLRVVADETDQRVPDVVRACVAALGTQLLSLKKQILEFDRMIMAWYRSNETSKRLHYIPGVGPLLATALVANVADPGAFRSGRNFSAWIGLVPKQHSSGGKDRLGSISKQGDRYLRSLFVAGALSVIRYAKAHGSKHRPWLTALLARRPTKVAAIALANKLARMAWAMMARGERYRNPVALAA

SEQ ID NO: 149634 - protein, 458 aa, unidentified
MKLYLGGDASKGYTDWVIISETKKKLLDNFQLDDTFEGHNQLYNAIKSCIDKYPNVEIYAALESTGGYESNWLNTLKGYQKAFNIQVARVNPLAVFHDSKANMTRTVTDAVSALSIAEYQINHPDKIRYEQDTSWKSLRRHWNFVELQKKQRVQTINQLDALLYSANPMLLTYKTDKLSNWLLEVIIQYPTANLLAKASAEELSKIPYLSLSKAKEIIAGVQKSVASATDENTGVLITQIALQIKMFDQTIESQMSLIEKEMICPEIDILKTFKGIDTTSAIGLVLEIGAVERFYCVKSICSFFGLNPKFKQSGDKIIGVRMSKLGSKNMRKILFNIAMGAIVHNPLIYEVYQRKLSEGMSKMASIGVCMHKILRIVYGMLKNKKAFDAQVDKHNASRSTSKQDEKNQLKNAYIVKTRRFQEYDQNAPISIRQTKKRKEHVLSQCEIESHGAGSTHSF

SEQ ID NO: 149635 - protein, 342 aa, unidentified
MEYYAGIDVSLECSTVCVVDGSGKIVREAIVGSEPEALIGWFGTLGLGLTRIGLEAGPLSQWLYAAMKQAGLAVELLETRHVHDAFKAMPVKSDRNDARGIAQLMRLGWFRPVHCKSIGAQEVRAVLTARKLIQTKCQDVENSLRGILRGFGLKVGKMTDRSFAGRIQELVKGHPNLETIGAALLSVRAVLLRELNGFEKRARAMSRLDVKARLLMSTPAVGPIVSLTYAAAIDDPARFKSSKQAGAHFGLTPKKHQSGETDRSGRISKIGDAAVREALYQAAHVMLTKPVKGCSQLKSWAMRIARRAGMSKAKVALARKLAVIMHRMLANRTPFNAAAAAA

SEQ ID NO: 149636 - protein, 359 aa, unidentified
MDIQGTSVGLDVHALSVVAHAVDEETGKVSKARLCPDHGEVLGWLHQLRAPVRMTYEAGPTGFGLARAINEAGMECVVAAPSTLQRPAGDRVKTDARDAAHLARLLRLGEITAVTVPEREIEAVRDLVRAREDARVDLMRVRHRLSNCFCGRGSSIFGGTPCTCAHEKWLRRQRFDDAHLKAAFDHGFDAVLAATAARDRLDEHLTEVAASPRFADPVNRLGCLRGIAALTGLALTVEIGDWSRFTGSSIGAYVGLVPCEYSTGTSRVQGSITKVGNTHVRRLLIEAAWHHRKSYSTSGPTLRARWAVVEPALRARGHAGNRRLYKRWRHFTERGKNPLVANVAIARELAGWCWSLATM

SEQ ID NO: 149637 - protein, 435 aa, unidentified
MAKASRATAEQAHTTAPSLAHESLYVGVDIAKSQHIAGFVSHTLLSRHGRFEGCPALKFANSRMGFRLLIDRIRDYVPLEQCFVLMEKTGHYHRALQEYLLEMDVSVYVMHVHARPRGMVKTDKRDALGLANNLYNQLEKGAQMGDRTEIVHRAVPPTEAASLLKGLMGHRYELQHESTKHRNQLTAICDQLFPEMTDVLKDPNSPTALGIRERFPTAQAIATATIDALSQAKGTSATKPGRAGLARLQDVAATSIGTKDVGRVRTLIFEQRQLIAELKLIREHTEQIDAEIEHIVETAREGRILMSLPGIGLTTAAAIVAAVGHVDNFPNGGFLKAYFGWAPKRTQTGTTKDSDKLPRGGERTMRALIYMAAWRCVNTDEDFAAIYKRLVARKCPCDERKRDYVGKNVVMARICGQLCRRTGVTSPYALRPGNP

SEQ ID NO: 149638 - protein, 672 aa, unidentified
MVTGMAAVTAGASPAAGPDRRSPVPARTTGAAAADRSPASARPGRTLRSWPLLVLAAPAAAEVWSGWVGVAQKTGFGLVSPLPGIWPALHLDTTVTLPVGVEAYAAYALRAWLSGEPRIGDRTRRFAKWSAICSFALGMAGQVAYHLLAQAGAARAPWPVTMIVSCLPVLVLAMGTALAHMLRADTAPDAPDSDATGPATAWSPDQSAGDQSGQDQDQHADHGSGPPAVTTRPVQPETRAVVRTTAPEPRDARMQADQAHLIAGGLAATGKPISRRALRDAGVKDDMLRPACGWLSWQSAPALNRGGLPSTGAPCGVSANRLWSMRRSLMPIVGGMDIHRKQITFDYLDTATGEVMCGQIAPADRAHLRAWLQRFAGIPDVAFAFEACTGWRYVAEELAAAGVAAHLAEPADTAAARGRKKRAKTDRADARLQRTLLADGRLPECWIPPAQVLECRALLETYHALRREHTAWVQRAHAVLFHQGAPVFHALGEADGPQQLAGLARARLSPAGQQQIGLYLRMLEVTEAELGALRGQLTATARRLAGAKALQDKLYGVGPVTGLALTCWLGGKDRFSSARKAVRFTGLDITVYSSDGKRSPGHLSRQGPPVLRWCAYEAGKAHARGSAPDHRYYEQVKDRKDGKRAALSEARKIIRQACHLLAGLGDDAFTTV

SEQ ID NO: 149639 - protein, 368 aa, unidentified
MEKFITFVGLDVHKNTIDVALADAGRNAEVRHYGTIGGGLDDLDRLVKKLSTANRELHFVYEAGPCGYDIFRSLTSKCLDCAVVSPAHIPKKPADRIKTDRRDAMMLARLHRAGELTYVFVPRADDEAMRDLTRAREDAKKAQRVAQQQLNGLLLRLGFRYPRDNWTRQHFLWLADQKMPMPAQQVVFQEYINAINEATARLERLTKQIEALVPAWRLAPVVMALQALRGVSLVVAVTTIAELGDLTRFEHPKKLMTYLGLVPSEHSSGEKTQRGKITKTGNGHVRRVLVEAAQAYSHPARVTRPLLKRQEGLSQDVLDIAWKCQVRLCTRFRRLMAKGKNRNAVITATARELAAFIWAIAKQTLIAA

SEQ ID NO: 149640 - protein, 420 aa, unidentified
MADFAAYLGIDWSDRKHDCCLIEPVSGSKERFVIEHSAQAIDELASRLRSRYPLDEQQIAVSLEQSRGPLIYALLKYGFFVLFPIHPTTLARYREAFSPSRAKDDPMDAEYLAELLVSHRSRLKAWRPDTEQTRTLQYMAEHRRRLVGDRTRISNRMTSLLKCYFPQVLTWFPDLRTDLVADFLLRWPSLESLKGVRRSTLERFFREHNSVRREVIDRRIQQIKESRPLTTDRAVICSSMLMISALASQMKATLAAIRSLDREIERICRAHEDFQLFNSLPGAGEIYASRLLAAMGTDRQRWATAEELACFSGIAPVIERSGRSVWVRWRYFCPKFIRQSFHEYAGESVRHSFWARAYYEQQRAKGKSHHAATRALAYKWIRIIFRCWKTRTPYSEVKYLESLRRSSSPLLAFAAGNIPT

SEQ ID NO: 149641 - protein, 352 aa, unidentified
MATTAQIAIAVIGIDIGKNSFHIVGLDHRGAIVLRQKWSRGQVEARFANMSPCLIGMEACVGAHHLSRKLKALGHDARLMPARYVRPYSKGQKNDFRDAEAIAEAVQRPTMKFVVTKTADQLDLQALHRVRERLVSQRTGIINQIRAFLLERGIAVRQGQRFLRVELPRILATPPDVLSPRMVRVIEGLASDWHRLDERIEVLSSEIEELAKRDAGCERLMSIPGIGPIISSAMVAAIGTGDSFSKGRDFAACLGLVPRQISTGDRTILGKISKRGNRYLRVLFVQAAWVVLVKVKPTRWQGHGLRPWIEAAKKRLHHNVLAIALANKLARIAWSVLVHGRAFETNKRQAAA

SEQ ID NO: 149642 - protein, 335 aa, unidentified
MQITHFIGIDVSKDTLDFSVVIDGKNMQHYKIKNNSREIKSTIKKIFKAFSATIDDTIFCMEHTGLYNLPLVKWLQSQQAKIWLESGVHIRKTLGLVRGKNDKVDSERIAMYAFTNQHQIKLWKAPRKIIEKIAVLLSQRARFIKAKKQLYTANEEQKQFIDKDIMKSLNKYTSKTLVVIDKQIEAIEKEILELVKEDEKLNRLFQIITSVNGIGFVTAAYILVTTNEFVSINNPKKYACYSGVVPFEHSSGSSVRGRNRVSQMANKKIKTLLHMAALSSIRIQGDLQDYYTRKVAEGKNKMSVINAIRNKLILRVFACVKGNREYKKIYDYKFV

SEQ ID NO: 149643 - protein, 336 aa, unidentified
MVVGVDTHKDSHSAAAVDGQGRLRATLEVAASGSGYRSLLRWAARLPGSRCWAVEGTGSYGAGLASYLAAQGELVLEGDRPKRRARGAAGKSDQLDAIRVALEALSREHHAQPRSRGQREAIRVLLLARQGAVSGYKQGLNQLYALVVTAPEPLRERLIRLHGERLVSACSRLRPQGDLETSVTATTLHAVARRLGELRAEAAAYERQLAGLVASTAPDLLAEPGVGTLVGAQLLVSWSHAGRIRNEDAFAALAGVAPVPASSGRVVRHRLNRQGDRQLNRALHVVALTRSTCHRPTQAYIARRRGEGKSSREIRRCLKRYLSRRFFRLLQRLDKT

SEQ ID NO: 149644 - protein, 432 aa, unidentified
MTAPPYDLVIGLDRSDKKADLCLLDPRNGERRSAVIDTSPEALWEWLLELRQQHPGARVGLCLEQPAVHLIPFLEAYDWITLHPINPITLQKYREAFVTSRAKDDTKDAEYLADLLLTHPAQLPAWAPEDSATRAVQQLVFHRRTVVDERTGLSNRLIALLKQYYPQALTLCGEDLWRPLATAFLLKWPSLQAVQKAKPATLKQFYHLHGSRSATLQKQRLALVEHAVPVTDESAVIQSFVLRVQLVCRQLQLVQRSVTEFDRQIAAAYAAHPDRTVFASLPGAGPVLGTRLLASLGAQRERFDSAASLQRYTGVAPVTKKSGGSCRIHRRYLCPKFHRQSFHEYAKESILWSRWAAAYYLQQRTKGSAHHTAVRALAFKWQRVIWRCWQDRKPYDERIYEAALRKSGSPIVSLFDKVELGKSPWKNPAKKN

SEQ ID NO: 149645 - protein, 368 aa, unidentified
MTMPVVSDARVQVTLGVDTHAEVHVAVALDQLGRRLGACTVATTPAGARELLCWASQFGPIQQVGCEGTSSWGLGLARFLRAQGLAVLDVNRPSRQTRRRRGKSDPVDAEAAARAVQAGTATTVAKTADGQVEMIRTLRLVRRSALKARTQAANQLQSLLVTAPDGLRGLPLDRLVAAAAQLDPDGRVTTTLGACRLALRSVAARYQQLTAEITALDEQLDRLVATAAPALVALPGVGTDTAAALLIAAGDNPERLRSEAAFAHLCGVAPIPASSGKTTRHRLHRGGNRDANRALWVVAMGRLRWDQQTRAYMARRTAEGKSKPEIIRCIKRYLARELYGVLTAPAGQPATRPADGRARPAPPGCQAS

SEQ ID NO: 149646 - protein, 400 aa, unidentified
MRVVFGIDVSKVSSEVAILVNGEKVHGYTMPNDAIGFSRLLGDLKTVHKPEIIFEATGVYSRRLQAFLEDNGYAYTRLNPLEAKKQLDSLRVRKTDQIDAEKLAQSQFVLNRKPTYVQEEVYQDLRDFSRFYQNLTEDIVRAKNRLHKVLQVTFPELETILSTPTGEQYWNLVITFPCKDFVLELSKDKLSESIRQSTSKRISDKRVAYLAEKLIALANQSYCAVKKTSPMLEEVRYYTKELLRLSEQRQSVLDEMVELAQPLPEYDILLSIPGIAETTATSIIGELGDIRRFQSANQINAFIGIDLRHYESGNFIAKEHITKRGNPYARKILFKCIHNIASASHTNPCHIADFYEKRKRQSQTTSTKPHTIASIHRLIRTMYYLITHNKLYDYTSTQNR

SEQ ID NO: 149647 - protein, 326 aa, unidentified
MTLSHSTDNTFVGIDVGGAGLDVAWHRGDSAHYANRPDAIATLVERLRTGPEVTRIVLEPTGGYEKALVKALRQARLPVEIIHTTRFNAYRALVGVKAKSDTSDAKLLASYAAAPDEVRGRKAGHVELPEDAVREELSELASRRDQLKHMIHAETCRLGTVRKDELRQMITTHLETLHAEDKQVHRMMLELVRQRDDLRRDQRLLKTIKGIGAKSALVLLASVPELGRIDNKAAAALIGVAPFVRKSGTMNAPARIHGGRAPVRSILYMAAVTASKHNPLLSPFYDRLITKGKPPKVALIAVLRRLVVFANAVLRSGQPWKGASAT

SEQ ID NO: 149648 - protein, 343 aa, unidentified
MEGSQGLVVGVDTHKDTHSAALVDELGGVVASTDVAATQRGYVQLLEWARCHSPHPTWVVEGTGSYGAGLTSFLAGCGEVVYEGDRPQRRKRGAGGKSDQLDAIKVAREALAREHHAVPRQRGNREAIRVLLSTREGAVSAYRQALNQLYALVVTAPEPIHERLIRLKGDQLVNACLRLRSTTGDIETSVTKRVLQQVAKRIQTLQAEAASHEALLEKLVVETVPALLAEPGVGAITAAQLLVSWSHAGRIRNENAFAAMAGVAPVPASSGRVVRHRLNRQGDRRLNRALHVVAVGRSRFHGPTRDYIARRTVEGKSSREIRRCLKRYLARRFFRLLQGLDNP

SEQ ID NO: 149649 - protein, 339 aa, unidentified
MSIVGAFDVHRRQLTFEYLDTVTGEIKGGRVAPADREHLRAWLARFTGCEDVHFALEGCTGWRYVAEELLAAGITPHLAEPADTAALRGKKRHAKTDKADARHLRTHLLAGDLPECWIPPAHVLEARALVRLYKDLLDERGAWRQRIAATVFHQGAPPAAGMPTAEGRATGMGLSAAGQQAVEAGQRQIGRLDAELDLLRRQLAMLSRRQPGCAALRAAHYGIGAVISVAICAELGDVRRFANSDAAVRHTGLDITVYSSDTKRSAGHLSRQGPPLLRWALYEAAICAARRTAPDHGYYTAVRARRDAGRATLSMARKLARRCYHTLRELGEDALAPAA

SEQ ID NO: 149650 - protein, 387 aa, unidentified
MPQPNDLSRSLVALDQDSTIIAVVELSQSSWLVGGILPGIERQPCKKLEPSPERLLALLHRWRDESVRAGRTITRIAVAFEAGRDGFWLARWLAARGVEAHVIHPSSVAVSREHRRAKTDRLDTELLKRGFLGWLRGERGHCSMARVPTIAEEDAKRPNRERECLVKERTRLVNRMKGTLARLGIRNFRPTLRNAAEHLAALSTPEGSGLPPNVAAELERDIARLRLVIGQVKQIEEARRQRLEEQPERGRHAMVRLLARVVGIGIETADMLVNEVLSRPMRDRRAVARYAGLTGAPDESGARRREQGLAKAGNARVRRGMIQLAWRFLRFQKNSALAQWYQARTADRRGATRKTMIVALARKLLIALWRFVTIGEPLDGVTLRPAS

SEQ ID NO: 149651 - protein, 355 aa, unidentified
MDSKKYIGMDVHKESISIAVMNGAGKIMMESLIETKASMILQFIDGLRGDLQVTFEEGTSAAWLYDLLKPHVTKLVVCDPRKNASMKEGNKSDKIDARRLAELLRLNHLNPVYHGEHGLRSLKELVRSYLTITKDLGRVMTRVKAIYRSWAIPCTGKQVYAVRHRAEWLGKIGEAGVRRRAEFYYQQLDALRTVRQEVRRELLAEGKKHKAWKQLCQIPSIGPIRAAVLLGILQTPHRFRTKRQLWTYSGFGIETHSSADHRSVNGQLERAKKQISIRGLNRNCNHDLKNLFKGAAIVASSKPGPFQEFYTALLDKGIRPEMARLTLARKIATIVLMVWKRGACFDAQHLKLQTA

SEQ ID NO: 149652 - protein, 318 aa, unidentified
MAESHYAGIDVAKETVDLALGPSGAVESFANAPNAHEAIIERLLEHKVALVVLEASGGYEFALACALQAAGLAVAVINPRQARDFAKAMGYLAKTDAIDARVLAQLAQVIAAHPNRGRFVKVLADAEQQRLQALVLRRNQLIGMLTAERHRLAMSHAVARKSIEKLITAIRKQLDELEAQLAQHIEQHHADLAALLQSTDGVGPATTATLIAELPELGMLDRRQIAALVGVAPFNRDSGKLRGKRMICGGRAQVRRALYMATLAATRFNPVIARFYQRLVIAGKPKKLALVACMRKLLTILNAMVRSGKPWDESLHGA

SEQ ID NO: 149653 - protein, 420 aa, unidentified
MDSRRPMQFIFLGGTIMYNAVGIDVSKDKSTVAVLQSEGTFVGKPFDVSHSSSELKSLADYILSLNGKTKVVMECTGRYHEPILRYLSDAGIYVSAVNPRLIKNFGNNTIRKVKSDSADSKKIARFTLDNWAQLRQYSSMDTTRAQLKTLNAQMDFFTKQKIAAKTNLISLLDMTYPGVNELFDSSPRDDGSDKWVDYAYAFWHVDCVRNLGQSRFTTRYRSFCKKHGYNFQPAKAIKLFNDSKELVPVFPKEKQYKDMIRMCINQLNVISANVETTRQEMNRLASTLPEYNIVMSMKGVGPTFGPQLIAEIGDISRFNHREALTAYAGVDPGVNQSGNFKSKSNRASKCGQPRLRKTLFLIMKALLQLKPDDPVYRFMDKKRSEGKPYRVYMTAGANKFLRIYYGKVKEYYREHPEIES

SEQ ID NO: 149654 - protein, 452 aa, unidentified
MKDKKISMEIVNPNAAGIDIGSRSHFVAVGQGEEDVKEFGVFNEDLRAIAVWLRENDVKTVAMESTGTYWQSLFAVLQAEGFQVILCNGKFTKNIKGRKSDVQDCQWIQKLHAIGLLTGSFLPDHATEQLRTYCRHRTNLLDQAADTVRKMQKYLRLLNLRLDVVVNDICGITGMSILTAICQGETNPEKLASFRNGNCRKSEEEIAKALQTNGRKDYLFALKQELEMYNHLQSQITLCDKEIEKMLNEQIDNNDEKRQHHIDKKSHKRINKNTPKNIDLNLMSYQYFEGVDLLAIEGVSHSTTLTLMSEVGLEGIKKFPTAKQFASWLRLSPNNKISGGKVLSHKIPKGSNRLKIALRNAANAIGNLKESTPLADFFRRINFRKGRVSAISATARKLAVIIWNMVTKKVPYINPENYLFLDQKRKLKVVARIKKQITKFALTNEELGVVPT

SEQ ID NO: 149655 - protein, 345 aa, unidentified
MTSVATIGLDIAKSVFQVHGVDAAGQVVVRQRLARRRVLAFFEKLAPCLVGIEACSSSHYWARELMARGHEVRLMPAQYVKPYVKRGKNDAADAEAICEAVTRPTMRFVPVKTPEQQSVMMLHRVRLMLNRQRTQLSNSIRAHLSEFGIVAPIGRRGLDQLLAVVADEKDTRVPADARLCLQMLAAQLAVVKEQILDNDRRVLASARATELGRRLMEIPGVGPLLASALPATISDPAAFKTGRDLAAWIGLVPKQNSSGGKERLGSISKAGNRYLRQMLVVGAMAVIRYAERHGTRRPWLVQLMQRRSTKVAAVALANKTARIIWALMTSGERYREPATTGAIAA

SEQ ID NO: 149656 - protein, 388 aa, unidentified
MIYFGIDISKYKHDCYILTSFGDVINEGFTFKNNAEGFGQLQRELEKCSNNEIRIGFEATGNYAINLKLFLERIGYDYMEINPLLVKEYIRSNTLRLTVTDKLSAKVIANYLNDKTYKPNTTSFYSKFALKQLTRLRNSLISVRSRYLIQATNVLDCIFPEFKPFFGNKFSATALYILAYYPSPKAISNMNSNSYDILRRKSRGKFSMEKFVKLKALAKNTVGVYDKCYGIELETLFDLYSQIDSKINELETEITQIIETLNPPTLSVKGIGTVSAAVIVSEFGDFHRFEKPDKMLSFAGLEPGYFQSGTTEYHTHIVKRGSHSLRNVIMNCANSVKLHNEVFAAYYLKKRDEGKPHLVALNHVAKKLIRLIYALETKGVMFDADKLR

SEQ ID NO: 149657 - protein, 311 aa, unidentified
MTVPQDFIGVDIAKGWIDVFSLTTSKHERIATTKQALARFARRANGALVILEASGGYERPVTEALARAGTDYARVNPRQAREFARATGCLAKTDRVDAAILARMGRALELSPTPPTDPAVARLAELVARRTALVGQIRAEKNRAGTTRDPWLSKEIAMLIKVLTEHLHAVEARIEAQIEEDQALATQSVRLCSVPGIGPAVSAVLIARLPELGQLDHRKITSLTGLAPHATDSGLSRGKRHIWGGRPDVRRALYLAAFVASRFDPAMKAFRESLAAKGKPTKVILTACARKLLTILNAMARNNQNFRKNVT

SEQ ID NO: 149658 - protein, 356 aa, unidentified
MDVHKETISFAYLTSKSKDVVKEQQIKHNEVQIKKFVNKLKSEWNEIHCCYEAGVTGYPLYRYLNSLGVNCTLVAPGKIPRQNSDKIKTDKRDAIKLARLLRSGDLESIHVPNEEDEAVRDYLRSRDSLRLDLGRNRQRLMKFLLKKGNVYSATKYWTTSHYKWLNNLHFENEILQETFNDYYSRVRVQEENLKAMDQKIQEIAKSEAFKERVGILRCFRGVDYLTAMFLLCEVCDFKRFKTAGSFMSFLGLVPGEYSSGSKRKQTGITKTGSPRLRRILTEAAWQHRFLGTGSKIVAARRTGQPALVVALAEKASLRLHKKFRNLQLRGKSPQVMITAVSRELSGFIWAAMNLAA

SEQ ID NO: 149659 - protein, 347 aa, unidentified
MNKPEYYVGIDVASVQFTAAAGCMDQKWKIVVPAVEFPNDYDSFGQFLHWMQAHKLHPDNAIVCMEATGVYNEVFAHFLVVNHYTVAIEPPLKVKRAFAPVGHKTDPVDSCQIAEYAYRYYDELSPWQPRNEVLEQIQTLLTTREQFSTQCAAHHNALKALKRKKVRTPLAEKAHQDAICELRQHIKTLEKEIERLIDQDPDFRNMVNLLLSVPGVGLLLAAHMLVLMQSASQPPDAKQLAAFIGICPYEHKSGSSINSKPTSRHYGPPALRKLIFLAALSVRTHRQQFKLYFLRKIAEGKPKKLVINNIANKLLKIICAVVRSGTPFVPNYHSINPGLLKKALTVS

SEQ ID NO: 149660 - protein, 399 aa, unidentified
MEQFIGCDAHKKYSVFVTVDERGEASPAIRVGHDREQYRQFLEGLPAGSQIALEAGGHYYWMVDDMEAAGHHPRLAHPLEAKKRMGKTSKKTDKIDANGLGILLRNGTLPEVWIPPALLRDQRESLRLRMFLVQQRTRLKNRIQGTLARYNVEIGGVSDLFGVEGRLRLGKRLGELPEHTWQSVEVELVAVDFLEVQLEDIEKRLEALMKVTAEADLLKTLPYVGRILSMVMTLEIGKVERFPTAAHLASYAGLVPRVHSSGGHTRLGQICGDVNQYLKWAFIEAGNLVVIHQKHLAGQHVVRLYQRIKRKKNHQKAVVAVARHLAEAAYWILKKQEVYRDPQTKPKAPVKAQAANSLVGAGVSAEPDIAHAGPSAATSVPGIRVEVQPGTSVGGKRCS

SEQ ID NO: 149661 - protein, 355 aa, unidentified
MMIIGCDFHPRFEQIALVDQETGEYEERRLGHPEEARQFYRSLAGRKVRVGVEATGNFRWFRRLMQELGHEFLLGDATQIRASNPRRQKTDKRDARHILTLLVEDRFPAVWQPPVDNEETRQLLLHRCRLVRMRTRVKNQLDSMAKNEGLLSSRVWSPKRRSEIEALPLPGWYAHRRTDLLELLDELDERIGPLDEAVRKAAEDSQEARLLMTHPGVGPIVSLAYVLTIGDWRRFPRGKQVGSYLGLIPAEESSGSKRRLGEVSKQGSVLVRWLLVEAAVHAQRHDASWHRQYVRLSMSKHHGVAKVAIAHKLAVRLYWMLRSGESYSKVLERGSHPSDEDLSLGTRGSHAGQSE

SEQ ID NO: 149662 - protein, 339 aa, unidentified
MNAVGIDVSKGKSMVAIMRPFGEIVSAPFEIKHTASDIHSLVELINSVEGESRIVMEHTGRYYEVLAHQLSKANLFVSAINPKLIKDFDNDSLRKVKSDKADAVKIARYALDKWQNLKQYNVMDELRNQLKTMNRQFGFYMKHKTAMKNNLIGILDQTYPGVNTYFDSPARSDGSQKWVDFASTYWHVDCVRKMSQNAFIDHYQNWCKRKKYNFSQSKAEEIYGKAKDLVPVLPKDDITKLIIKQAVNQLNSAAATVESLRTLMNETASQLPEYPVVMAMKGVGASLGPQLMAEIGDVSRFTHKGAITAFAGVDPGVNESGSYEQKSVPTSKRGSSDRS

SEQ ID NO: 149663 - protein, 340 aa, unidentified
MFTNCVGIDVSKSKFDLALIKGQDKDHVIQGVFDNTRNGIKSMSKFLEKEHHVQLSETIFCMEFTGVYCYPLTDFFVKKECHVWIEMPVNIIRSLGLQRGKNDRVDAHRIALYAYKNRDDVKLWKPQREAILKLRDLLALRERLIVAQKSLQMPINEKISMGDKKGAEMLRKGCQKSMYSLENEIGQIDKNLDDIIKDDPQLKELFQLATSVPGIGKLTALFMICFTNEFSMYTNPKQLACYCGIAPFEHSSGSSIRSRTRVSHMANKVLKRMLHMGAMSVISRDPEMREYYQRKVAQGKNKMLVINAVRNKIIHRLCAVIKRGYEYQSENIFKERLVLS

SEQ ID NO: 149664 - protein, 445 aa, unidentified
MLSIIYQRVAGLDVHKKTVVATRMQVTEAGQVEWETKTFGTTTPDLLELNDWLLAWSISHVAMESTGDYWKPVYNVLENGFEVWVVNAQHVHNVPGRKTDAKDSEWLAELMLHGLLKASFIPPKPQRTLRDVVRYRTTVIQDRARVINRVQKLLEGANIKLASVATDIMGVSARAMLAEIVAGQTDAALMADLACGKLRNKLPELQKALTGLVEPHHRFLLAQQLAHIDFLDEEVEALSAEIERQLAAMSGPSGSAGPETGASSTEEVADSTEPEPPLTWNEAVALLDTVPGINQRAAEGILSEIGIDMSRFPTARHLASWTGRAPGNNQSGGKRFSGRRPKGNKPLSGLLTQVAHVAARSKNTFLSARYRRLAARRGKKRAIGAISHSIIVSIWHILTYRQPYHELGGDYYDQRKKETKVNYLIRRLERLTGGTVNIEIQPLAA

SEQ ID NO: 149665 - protein, 348 aa, unidentified
MSKSNQYVGLDVSLKETSICVIDDAGKIVWRGRVDSTPEAIATAVKQHAPHAVRIGLESGQLSSWLFHELKGAGLPVICVDARHAKAALSLKVNKTDANDALGLAQIMRVGWYREVTVKGLDCQAVRALLVARAQIVSQITTLKNCVRGILKTFGRVLPKGLRSQFPARVRTAIDGHPVLGTIIEPTLRVLEAMRAQLLVYDRAVIQRARSDDTARQLMSAPGVGTVVALAYITGVEDPARFKRSSSVAAYFGMTPRRYQSGEVDHAGRISKCGDGMVRSLLFEAAKVLLSRSARPSTLKTWGEALGKRIGAKKATMAVARKLVVILHRMWTTGTTFQWNAEAASSAA

SEQ ID NO: 149666 - protein, 376 aa, unidentified
MNEFNNIYVGLDVHKETIAVAVARAGRGESEYHGEIAHSAAAAGKLLKRLSPNGEVLNVCYEAGPCGYGLHRQLTALGHECAVVAPSLIPRKAGERLKTDRRDALMLARLHRAGELTAVWVPDEEQESVRDLTRAREDMKSLELKARQRLSAFLLRHGKVYTGKSRWTQAHWRWLEGVKFDRPVQQLVLQEYIDTVKSSQRRVAELEGQMREALQGWSLGPVAEALMALRGVSLITAMTTLAELGDITRFDTPRQLMAYLGLVASEHSSGGTRRQGGITRTGNGHVRRVLVESAWNYRFPARKTRDIEKRAEKTSVQVQAIAWQAQKRLCGRYRTLMQGGKEKKLVTTAVARELAGFIWAIACEVSGKAHASKALA

SEQ ID NO: 149667 - protein, 394 aa, unidentified
MEVFIGVDAAKEAHWACAVDRDARALFSRAVTNDPEGIAGLLAEIAALEAGRVTVALDLLGGSATLLCAMLADAGLAVVHAPGLAVNRARQGMRGGENKSDPRDAATIAELARTRSDLRAVEIEAEIDVDIRLLVGRRREIVVDQTRRLARLRDVLSSLFPALERRVDVTTKAGLVFLSLFAAPHELRRANPARMARQLARAAKNLRGVDALARDAVDLARAQRTDVPGAETRARLVKELAAEALRAREARARLDADLEALLARHPDAALIQSLPGMGVVLTAEFIACAGNRARFQSADALAAASGLTPVLRQSGKSRAIRRSTGGDRGLKRVFFQSAFVALSHPESRAFYDRKRAEGKRHNQAVIALARRRVNVLWAILSTRQPYRENTKLAA

SEQ ID NO: 149668 - protein, 433 aa, unidentified
MQDVQDEPLFCERVAGLDIAKAGAEVTIRVPSDTTAGRRQQETRAFATTRAELESLGDWLTCWGVTRIGMEATGDYWKPVFFVLESRGFDCHLYNAAQVKALPGRPKTDRADSIWLARITERGTVCSSFVPPEPIRRLRTHTRYRRHLTQARTAEKQRAEKLLEDGHLKLSSIISGIHGASGRDMLDALAAGERDPKVLAQLARGTMRAKIKRLEEALDCAFFTSEHAGVLAMMLTTIDHYTTQIDSLTAKIEVLTRPYLHQIAQLDEIDGVGTICAQDIIAETGTDMTVFPTAAHLVSWAKWSPQVKQSAGKRKGSNATGRGNPYLGAALGEAAISAGRTQSFLGAKYRRLTRRMPKKKALVATGNSMLTIIHALISDPDARYQDLGPGYYEQRMHVRRQARNHVLGLQRLGYKVTIQPVNPDTGELLAATA

SEQ ID NO: 149669 - protein, 344 aa, unidentified
MTTIQLKQIDPESKPVLFAGIDVGAEELILVIRKNGKPFDPQKFANTPADRTRLVKKLVKLPGIIVCLEATGVYHFDLSLALHDAGVLLMVVNPKAAHNFAKVLMKNSKTDAVDANTLAEYAARMDFVAWTRPSNETIALRSFARRIDALTSQKAAAKNHQHALTATSETPKAVLKDVKLAIAQLEKRIDRLTAEALILIGKHPDLERILTLLVGIKGIGNTSAIALMGELLLLPPDLSHREWVKFAGLDPRAFDSGKSVHKKTRISKAGNRHIRSALYMPALSAKQHDPHVKAYFQHLVANGKKPLQAVCAIMRKLLHAIHGMLKHNKPFDNTRFYAIPECTG

SEQ ID NO: 149670 - protein, 375 aa, unidentified
MNYNTVYVGMDVHKKSFSLCCYTNEKEQAEYPQKTAPHYSKVLNYLEAMRFHYGDDVLFICGYEAGCLGYTLYHELMDHNVKCILLAPTTIPQPTGRKKFKTDKRDAALIARCLAHHDYSPVHIPSEKDEQVKEYIRMRNDHKIALKKVKQQISAFCLRHGYRYDATVNQWTQAHLKWLRALKPEGLYLDILMEYLSTYDQLTDKIERMDRRIEELAGEPQYREGVKKLSCFLGIKTQTALSTMVEVGDFKRFSSAQRFAAYLGLVPGERSSSESQNRLGITKAGNSHIRTLLVEAAQSYTRGRVGFKSKALKERQYGNPADVIAYADKANERFRRKYYTMVLTKGKKVNVVKTAIARELACFIWGMMVGNLTER

SEQ ID NO: 149671 - protein, 315 aa, unidentified
MKEVTTIGLDLAKAVFQVHGVDAAGAVTLRRAVRRRQVLSFFTKLPPCLVGMEACATAHYWAREIAKLGHDVRLIPPAYAKAYVRRNKNDPADAEAICEAVSRPSMRFVAVKTEVQQAAAGIHKVREMLIKQRTMLINTLRGLMGEFGIVVAEGPRHVGELIAILADPADRRIPTPLHEGLLAIVETLRGIERRIEIVDQQIVGWGRDNATFSASLGLVPRQDGTGGKVKLGPISKRGNGYLRRLLVNGAMSVLCSKRAKEDPWLVKLLETKERKVAACALANKMARIGWAVMRRQEDFRGRRHNQPCPDGETAL

SEQ ID NO: 149672 - protein, 400 aa, unidentified
MLLFFEVITMIFVGIDVAKDTHYAAVSDDSGAVLVKPFAFQNNAEGFCLLLKKLSEFDRSKLLIGLESTGISSENLICFLYESGFRLAVINPIQTATLRKTAIRKTKTDKVDTMLIIKSLMVNSYRLYSQRDADSLKLRTLCRFRQNLKKSKARLKIQLAGYVNLVFPEFGKFFKSGIHIAASYALLKKYSSPKEIAALRTSTLCTLLSKASHGRFGKDTAEALKSLALSSVGVKNPYISIQIAQTIAQIELLEQQIKDLNSAIEEAMESINSVLMTVPGIGAVNAACILGEIGDIKRFSKPCKLLAYAGLDPTVRQSGQFSAKSTRMSKRGSALLRFALINSAWQLTLNDTTFKAYYDLKRSQGLNHYGALGHVAHKLTRVIFKLLTSDTPFNPAKLLA

SEQ ID NO: 149673 - protein, 426 aa, unidentified
MQNCLFIGVDIALKGNQFCVMNFDQHIYFNLKFPNNPEGNDMVINKIKDIENKFFFEKIIIVMESTGMYSFHPACYLSSNEYLNKFHTEVYQINACDFDKYKKSFHDLDKEDGIDAYILADYARVGRTKVLYPFRGSQYIALQRLTRQRYHICKELIREKTYVLTNLYLSFSGLMSLDKNELPFSDLFGTTSSAFLEEFVSPDQIAESSVEELINFISEKSKNHSSNLNDKVTALNKAMRASYRLDQTAYEPINIAIACSLNTIKFYQQQLKNIDKAILNAALGLDSNTYHILLSIRGIGKVYAAGIMAEIGNIDRFSHNSKLAKYSGLYWKRNQSGEFDSQDKKSSKKSNKYLRYYLVEATASCVRQNFPFLKDYYNLKYKEVTKHQHKRALVLSARKLERLIFGLLRKNQYYKPIDSVQNSKIS

SEQ ID NO: 149674 - protein, 327 aa, unidentified
MTASVSSHNHIFIGIDVGGASFEAAWHRGGCTQYQNRPDAIAAFVARLSLEKQIIRIAVEPTGGYEKPLVKALRGAGLPVEMVHTSRFAAYRTLIGAKAKSDTSDARLLAAYAAAPEEVRGRKAEYVVLPQDAVREQLAELAARRDQLKHMIHAETCRLSTVRNQSVRDEITAHLQALRQADCKIHDTMMQLVRQRDELRNAKRLLQTIKGIGDKTALTSIAAVPELGLISNKAAAALVGVAPFVRQSGTMRAPAHIRGGRAAVRNAFYMAAVTASRHNPVLAPFYARLIAAGKPVKVALVAVMRRLVVFANAVLRSGQPWKGAQII

SEQ ID NO: 149675 - protein, 355 aa, unidentified
MNSEKYIGLDVHQATIVVAVTDSSGKLMMESILETEAATILQFFAGLRGTLAVTFEEGTWSAWLYDLLNPHVDKLVVCNPRKNALLKDGNKSDRIDARKLAELLRGNQLKPVYHGESGVRMLRELSRSYLTIVKDLSRVMNRLKAVYRSWAIPCAGRDVYYRRHRAQWLDKIREAGVRRRAERLYEQLDMLQHLRQQARRELLAEARKHAITAKLRQVPYLGPIRSALAVALMQTPHRFRTKRQLWAYSGLALETRISAEYRMVEGQVRRSKKLLCIRGLNKDHNHDLKGLFKGAATMASVRPGPFQDFYQAALAKGIKPTMARLTLARKIAAITLTLWKKGESFDAEKLKSQAA

SEQ ID NO: 149676 - protein, 355 aa, unidentified
MTSTKYIGMDVHKETISIAAMNSAGKLLMESIIETKAGTILQFFAGLQGDLHVTCEEGTWAAWLYDLLKAHVREIVVCDPRKNALLTDRNKNDRIDARKLAELLRLNYLKPVYHGEHGLRMLKELSRTYLAISKDLVRVMNRLKALYRGWGIACSGRSVYAPSHREAWLNKIKELGVRRRAEYFYQQLDTLQRLRREARRDLLIESRKHSATKLLSKVPTIGPIRAALLVALIQTPHRFRTKRQLWAYSGLAVETHDSAQYRYVDGQLLRSRKPQQLRGLNEDHNHDLKNIFKGAAQKAVGATGPFHDFYERLLVKGMKPSMARLTLARKIAAITLTVWKKGVRFDPEQLKSQAA

SEQ ID NO: 149677 - protein, 354 aa, unidentified
MSKILAIDLGNFKSVTCLLETDTNATEFWTMATERHYLETVLKRYAPDLVVIEACAIAGWIHDVCTSLGYRVLVCNPAQEPWKWKHLKRKTDRDDALKIAKLAALDQLVPVYVPGREQREFRSLVKYRKAVLGRRTRVQNRIRAIFAQRGMAMTGGLKAWTLGRREELTCHGKPLADCTTDELWRGELDLELAELARLSEQLAQIDKKLDALGTDDQRVRLLRTIPGVGRRTAEVVVAYLDDPRRFKNARQVSSYAGLVPRRYQSGQMDRQGRIHKRGPRLLRSALVEASWVMLRLNPWARALYDRLCGGQKTRKKKAIVAVARKLLVRCWVMLLRKEPWRAVTPLAEPAGACV

SEQ ID NO: 149678 - protein, 409 aa, unidentified
MEVLHARCAGLDVHKDSVVACARIATNTGVEQHVDTFGTTTSGLLALSDWLEGHGVTHVAMEATGVYWKPVWHVLESSFELVLANAAHIRNVPGRKTDVNDATWIADLLAHGLIRGSFVPPTAVQELRALTRTRKQLVREKATHVHRIEKVLQDANLKIGSVLSDIIGQTGRAMLEAIVGGETDPEHLLACVGKRRLKASRAELLEALRGRVSPHHRFLLKLHLQQVDSLDRAIQAIETEVGESLRPFRAAAELLTTIPGVSDTAAAVIVAEIGIDMSRFPTAGHLISWAGLCPKNDESAGKRRSTRIRKGAPWLKTTLVQCAWAAARAKNTYLHAQFLRLKSRRGPRKAIVAVAASILTAAYHMLRNGTTYQDLGSLYFDHQDRRQAAIRLARRIQRLGYEVELREAA

SEQ ID NO: 149679 - protein, 425 aa, unidentified
MNYKQNEKINQVKESTLVVGIDIGSTTQYARAFDWRGIELGKVFTFSNSREGFEAFKAWMQHLQNKYRKSDVIVGIEPTGHYWFDLGAYLEDEGILLVMVNPYAVKQTKELDDNSQSKNDRKDPKVIAKLVTEGRYSAPYTPDGVYADLRIMVANRKRLIREMTQIKNRFARWFAIYFPEYTDVFGDYEAQSSMLLLKKVCTPEAIVELGAEKINQIWRDAKLRAVGMKRATTLCETAKRSIGLKKGSSAARYEMKLLLEDYEYKKAQLDAVMEEIEKLCRKIPESEQMLAIKGIGVITVAGFLAEVGDVRRFESPRQIQKLAGLSLRENSSGKHKGQTTISKRGRSKLRAVLFNAAIPLIAKNPEFKSLHEYYTTRANNPLKKKQSVIAISCKLIRVFYAILAKGVTYDAQKLISDIHRQPQVA

SEQ ID NO: 149680 - protein, 310 aa, unidentified
MDTVTFPSVISRGCGIDIHKKVVVATIDGSGIRKETREFNTFTSSLTALKDWLLANGITHVAMESTGVYWKPVYNVFEPAGLRVWIVNARHIKYVPGHKTDKADSAWICKLLLAGLLKPSYIPAREQRELRDLTRYRTKLIQHVASEKNRIMRILEDCNIKLSSVLSDTSGVTATKLIDMICLGKPVTMSVIESIYHGKLSASREELYEACDGLVEEHHIYMLGIIRRDIAGTEQIIEDLNERIKTMLSVYDNVLELLKQVPGLSTKTVEDLVAEIGLDMSTFPTEKHLASWAGMCPGNNESAGKKKADA

SEQ ID NO: 149681 - protein, 410 aa, unidentified
MDVFCGIDWAEDHHDIALVNRDGGLLARARIGDDAAGLTRLLDLLAEHGDSAEDPVPVAIETPRGLLVACLRATRRVYPVNPMAVARYRDRHSVAGRKSDHGDAVVLANILRTDLHAHRPLPADSELAQAIAVLARAQQDAVWGRITAHNKLRSHLREYYPGFLAAFAAAKGGITRPEARAILAAAPTPADAAKLTLAQLRALLRKAGRSRGIDAGAARLRDALRKGQMRQLPLVEQAMGRQALALLRQLDAACHSADDLEQAATESFNLHPDAGIITSFPGIGPLTGARVLAETGDDRSRFTDAKGLKAYAGAAPVTRASGKTRSVTRRHIKNNRLAQAGYIWAFSALTASPGARAHYDRRRDNGDRHAAAQRNLFGRLLGCLWHCLATGQHYNEKTAFPNQAARPAAA

SEQ ID NO: 149682 - protein, 343 aa, unidentified
MDQYIGLDVSLKDTAVSIREDRKRIWRGKCPSDPKALSQIIRKHAPHAKLVVFETGPLSTWFYHALTAEGIPAVCIEARHAQKVLNETINKTDANDADGLAQLAEAGFYKVVRVKTFDNMLTRTLVAARSQLVSISKQLSNQIRGLLKTFGLIVPKGEGRVFDANVRELLNENRGLAAVILPLLDAWRDIRKRAANLDHQLLAASRQSRAAKLLMTIPGVGAVTALSYIAAIEDPENFPTSRSVGAWLGLTTRRYQSGETDYDGHISRRGDGRLRGLLYEAATVLLTRTTARTGCSLKTWGLKLRERLGFKRAAVAVARKLAVIMHSMLKTGEVFNPLAGAAE

SEQ ID NO: 149683 - protein, 342 aa, unidentified
MKHFAGLDVSVKETSICIVNDTGRIVREVKVVSEPDALLKVLGNPAYRFERIGLEAGPLSQWLFSALAEAELPVICVETRHMQAVLKAQINKTDRNDARGIAQMIRAGLYRPVHVKTLRSQKLRMLLTHRKLLQSKAIAIENDLRGTLRNFGLKVGMVGKARFEARIQELVENFPDLVVLVEPLLIVRRALREQIVLLHRRLLAIVREDEVCRRLMTTPGVGPVVALTYRATVDVPARFRKSKSVGAVFGLTCSKYQSGEIDWSGRISCCGDEMMRVMLYEAAQSMLHSKKWSWLKAWAMQIARRRGMKKAIVALARRLAVILHRIWVDGTEFRWTRETAAA

SEQ ID NO: 149684 - protein, 427 aa, unidentified
MSERKSLEIRVSVDVGSRSHQVAIGLSSGEVLEEFEIAHRVEGFEDLFSRIERHRKGNSYRVAVAMEGFNGWARPLDSMVRGRGYRLYNINNLKLARFKEIFPGAAKSDRIDARKGLELFQLRDHLPLAKEVLQEVVGTPHENEVLKRLSGRRRRLVDERVRVVNNLQADLQAVCPGLLEITKEAGNQWFLNFLISADTLPQLARLRRTTLLKIPSVGVKYARLIQDWQERAHFSEEVEWVSAMIQEDARRILELDETIKALEVKTAEVAETSTIAKLLRSIPGYGAICTSELAGEIGTIERFNKEGSLALYLGMATLDNSSGKYQGTKRPKHINTRAKAAMMTALDRHRKYVPQSQKYYEKKRAQGKSHNQAIRALGRHLCRIIYKMLKEKREYEVRPLKRDTQAKVTSRSSRIGQIGKKKISAKG

SEQ ID NO: 149685 - protein, 494 aa, unidentified
MNAAFYKAGRCLIFLPLIELGLRMESKAYLGIDVSKGYSDFVLVDGDCNVLETLFQLPDTADGHRELKKLVDRWKKDGLEELYCGVESTGGYENNWHSLLKGLQGSGGGLWVSRLNARAVKAVSDATLRRTITDGVSALNIASYLAKYPEKVDYGVAAKPSDDRFKEGRQFLSSIDMWLKQKVQLGNQLEKLLYQELPELLVYCRHGIPSWLLRLLVKYPSQEALRNAGAARLADVRGVTVEKAGAILKKLAESTRHTSAALRHLISVTATEVLHQQGLAESGKRHLGEMYKEDKDVRLLDEIKGIGLDSAVSIILEIEDIKRFGSAKKLCSFFGVHPSFKQSGDGFWGNHMSKTGRGRLRSVLYMAAMSAVRHNPLLKEVYARFRAKGMTHNQAMGVVMHKLLRVIYGMLTSGKPFDPETEKRHREEASKKQEAKEKEGKETKKTARQTKHRFQADIESAPISGRNSRARKKQLASQTSNEVNAGSPTALANI

SEQ ID NO: 149686 - protein, 366 aa, unidentified
MKKSSTRKPSMKSKAIKSKPERTVGLDLGDRTCYYCLLDSEAELVEEGRIQTSEASLRKQFDNEARMRIALEVGTHSPWIAPLLESMGHEVIVANARKVRAISSNENKNDREDALLLGRLAAADPKLLHPLQHRSIQSQQDLGLIRARAAVVRARTLLVNCLRGLVKSSGYRLPSCSTEALPEQARQHLPADLKPACLPLAEQIGKLNQTIAEMDRKVVQLGNTYPEIGVLRTVPGVGPLVAACYVLTLDHPSRIRDSRQAGAYLGLRPRQEQSGDSNPERGIAKNGNTYLRSLLVQAAHYTLGRFGPDSALRRWGLKLAGTSKRNKKRAVVAVARKLAVLLHRLWRSGQTFVPFPHPLTAAVAAA

SEQ ID NO: 149687 - protein, 348 aa, unidentified
MESVAGLDVGVKHSTLCVVSRDDRSMKPGSRHRTVTTPLAIGEWLTAQGIGRVGLEAGGQSAWLARELEQRGVAVTVMETRRQHAFGSYSKIKTDERDARLIGEALATGLYTKVHVRSAWSQEVRALLGARLQLKRQAQQSRQFIRGQLRAVGVELGRAIGKKWLLAAETAMAERGGVLGLALKALLASCRVLAEQITVLDKEIRRLARQDAPCRRMMTAPGAGLLSSLALRASLDDADRFARSAEVGPYLGLTPARWQSGAIDRRGGITKQGDGLVRAYLYEAAVSLLERQKRDCALRRWGLQHQARLGKRRTRVAVARKLAVLMHKLWRSGQTFDWNRGMEVPSTY

SEQ ID NO: 149688 - protein, 349 aa, unidentified
MLADQLDYVVGVDPHRDLHALAVVHVLSGAVVFEKTVAANGDGYALALKLVDAHASGRRAFAVEGTGSFGAGLTRFLSGRGERVLEVSRLRRERRSGGKTDALDAVRAARSVLAQERPATPRAGGERQALQALVAAREGAVNARCAGLGQLRDLLITTPEPLRSELRPLTQARLLRRLAATRPDTRRDPELRGSMLALRSIARRVLELTAEERALGREIEALTRKLAPQLLEQPGVGPHAAAQLVLSWSHQGRIRSEAAFARLAGAAPIPASSGQTVRYRLDRSGDRKLNRALHMILVTRKRLHPPTIAYIERRLQEGKTRREANRCLKRYLARNLYRLLEHGAPPLAT

SEQ ID NO: 149689 - protein, 343 aa, unidentified
MGEVSTIGLDIAKSVFQIHGVDVDGAVVIRRRVSRAKVSEFFAALPPCLIGIEACPTAHHWSRKLQAFGHTVRLMPPNYVKAYLKRSKNDANDAAAICEAVTRPSMRFVPTKSEQQQSGLMLHRSRQLLVRQRTMLSNAIRGHLAELGIISAKGRNGTVELLEVIANQEDDRIPAVARFSLEVLARQYAATAAEIGVIEKRIHAWHRSCEESRRLEEIPGVGPIVATALVAEVGDWRAFASGRSLAAWIGLVPRQHSTGGKERLGGISKQGNRHLRWLLVAGAMAVIRYARQHGTKRPWLVRLMATRPIKVAAVALANKIARMAWAMMVRGERYKEPTLMIAA

SEQ ID NO: 149690 - protein, 405 aa, unidentified
MGKVFVGHDWAETHHDVYVEDGAGQRLGKARLDEGVSGVARFHELVSSFVVDPGEVTVATETDRGLFVGALVAAGYRVLAVNPMSAARYRERHSTSGAKSDPGDAFVLAELARTDGHHHRPVAADSELAEAVKVLARAHQSMIWTRQRQVNQLRSTLREFYPAALAAFDDLASSDALAVLALASTPSLGRGLSRSKIASALRRGGRQRRIDERAAEIQTILRADTLQAPGPVAEAMGASVRALVAVISEQVAQTARLEAELADHFELHPDAKIIRSLPGLGMILGARALGEFGDDPNRFADAKSRKNYAATSPITRASGKHRVVLARYARNRRLADVTYRWAFSALSASPGARAFYDQRRARGDTHNRALRALANRLVGILHGCITHGTLYDEHLAWDHRIEAAA

SEQ ID NO: 149691 - protein, 431 aa, unidentified
MKKLSSEPPAQPIVAFVGIDWADQKHDIVWSAATSAAATEHQVVANRPEALSQWVTEMRQRFGPQGRIAIFLEQSRGALIYHLMNYEGLMLYPINPLQMAHYRKAIKVSGDKHDRLDATLLCQFGRLHLDGLKPWQPDDALTRKLALLNEDRRQAIEKRSALANELKSALKIYYPLALELLDNDTSTLLAADLVLHWPALDILQKQSQSKLRRFFYAHNCRSEQKMLQRLEAIRQAQPIIRDRAIIEAAALKVQLVSQQLKSLLPYITLYENQIAQLFGSHPDGFLFSDLPGAGPALGPRLLTAFGTDRDRFSSSTEAATTFGIAPICDSSGKRTPKQPGTVCYRHACPKFLRQSWHEFAACSIRSCPWANAYYEAQRAKGKSHHTAVRALAFKWIRIAYACWKNRTPYDPNRYALALAQRGSPFAPATDQ

SEQ ID NO: 149692 - protein, 421 aa, unidentified
MRGLRAKRAKMVKEGTLIATVDIGIASNTGYCTTLDGRSIKSFKFDNTKQGFEKFWCMTMASKNRFGCDEVLVGYESTGPYAEPLVHYLVSKQVKIVQVNPMHTKKMKEVNDNSPLKTDDKDPRVIADIIRLGRALTLVVPEGDAAYLRRLTNARERHVGEQTAFLNQLQQLVFLIFPEFKTVLKNMKGKTAQYLLKRYTTPERIGTLSKEALGEEMRKRSMGKFGIKEAESLIGLARETVGIKEGIAGIFMDIRHILMQLEAEGRFISEIEAEMGATLERIPCSVKLLSIKGLGTVSVAGLIGEVGDFSKFSTQSEILKLAGLDLYEISSGKRKGQRRISKRGRSLLRKILFYAAIQMIRKNGIMYDYYARLTGRGMERMRALIAVSRKLLRIIHAIVRDNRDYVKEYQGSQGMVIKEAA

SEQ ID NO: 149693 - protein, 348 aa, unidentified
MKNNITIGMDLGDQSHFVVVMDEKGNEIEMKSIRNTENSLRKFFTPYNEATVAIEAGTHSPWISRLLKEIGCTVYVGNPRKLRIIWDSNDKSDQRDARVLAMVCRVEPKLLWPIKHKNRQAQIDLGIIKARDALVRNRNRLISHIRSVTKTHGFRIPKCTTCCFHKRAPEHIPTDLIESFQPLISTIEDLTKRIKDLNRQINKLCKKYPETDKLLQVSGVGPVTAIAFILTLEDPHRFTKSRQVGAFLGLTPKRDQSGKSDKQLKISKAGNTYLRCLLVNCGHYILGPFGPESNLRKYGLAIAARGGKNAKKRAAVAVARKLSVLLHRLWLSDKPYTAFYNEMNPYAA

SEQ ID NO: 149694 - protein, 403 aa, unidentified
MSPEHSIDIFLGLDVGKSEHHACALDRDGNKVFDKPLPQLESELAGVFHQLQKLGTVLVIVDQPNTIGALPIAVARDCGCEVGYLPGLAMRKAADLYPGRAKTDKRDAFIIADTARTMPHTLRAVDRNDEVLSALKMLSGFDDDIARDCTRTVNRLRSILTQIYPSLERVFAGSTLTRTPILELLIHYKGPQGLKRAGYQRVLNWMIKRTRKDPTPLVDDIFTALKAQTVTVPGSDAAELVIPQLAANIQALKEQRNTIAEQVEEMLADFPLCEVLMSMPGVGIKTAAQILLAIGDGSDFASAGHLAAYAGIAPVTRRSGSSIRGEFPARSGNKRLKNALFYSAFAVIRSHEPSRRYYERKRAEGKRHNAAVICLARRRCNVIYAMLKNKEFFREIPPRSVAA

SEQ ID NO: 149695 - protein, 308 aa, unidentified
MKLYSAADLHSNNHFLTIIDEQDRRLLEKRLPNDLAVTLRTLEPYRAELVGVAVESTFNWYWLVDGLAEAGYSVKLVNTSKVRQYEGLKYADDRHDAFWLAQQMRLGILPTGYIYPKEQRAIRDLLRERRRLVRQRTTHVLTTQSTLWRHTAIRVPSKVILGEKEAPWPELPDRNVKLGVQAHRATIKVLTKQIETIEATLLKQVKTIPEYKILLTVPGIGPVIAWTIVLEAGDLSRFANVGHFASSVAAWTARGSVTRRRKARIIEKMAIHIWPGRSSRRRTLRSNICPRPRAFTRGRLHSVIQYSP

SEQ ID NO: 149696 - protein, 346 aa, unidentified
MDKTTINLSAVVTVGLDLAKHVFQVHAVDVAGRVVTTRAIRRKDVLTFFESLPCCLIGLEACGSAHHWARELTKFGHEVRLMPPAYVKAYLRRQKNDAADAAAICEAVTRPSMRFVPVRSVENQAALMHHMVRELLVAQRTQLLNALRSHLAEIGIIAAQGPNNARALATLVIEGNDMIPVAVRSALLPLVHQLTELDDEIRQSDRAIMALAKADETARRLMTVPGIGPVTASALVASVQDISAFSGPREFAAFLGLTPRQNSSGGKERLGRVSKMGNRYLRKLLVVGAHAVLFHRRRSSDALRSWADRLLEAKPFKLVAVATANKLARIVFALMRDVTHYAGTPA

SEQ ID NO: 149697 - protein, 347 aa, unidentified
MNHYAGLDVSLEETAICVVDSTGQIVKEARAASEPETLIAALREIDLPLERVGLEACSLTAWLHDELHSAGLPAVCIETRHANAAMKTMPNKTDRNDARALAQIMRTGWYRQVHVKSRQCRLWRSLLVARRTVLNEMRSIENVVRAVLREGGLKLGTPSRAAFAERVRDLMAEDASVKPLVDPLLTILVTMLDQFARLTKQVLDIVRREKVCRRLMSVPGVGPITALAFRATIDRPDRFRRSRDVGAHLGLTPARYQSGETDVSGRISRCGDELARTALYEAAHTLLVRSRKWSSLRAWGMKVAKTRGMARARVAVARKLAVILHRMWSDETEFRFGRNPAVALAAA

SEQ ID NO: 149698 - protein, 311 aa, unidentified
MDVYVGIDVSKDWLDVAVQPGDQVWRVAQEAERISALARQLQEEKPRLVVLEATGGYETPVVAALGAAGLPVAVVNPRQVRDFARALGKLAKTDRVDAQIIAQFGAAVQPAPQTLPEADAQELTALVARRRQVLQMLVAEKQRRQRAVPVVRQRIAHHIAALEQELADLDQDLTDRLRQSPLWRAREDLLRSVPGIGPVTAFVLLADLPELGILSPKECAALVGVAPLNQDSGHRRGKRTCWGGRATVRTALYMATLVATRYNPVLRAFYTRLLAAGKSKKVALVACMRKLLVILTALLKHGRAWNPAYAA

SEQ ID NO: 149699 - protein, 520 aa, unidentified
MATSRTRKRPGARRFYHSVAKPSGLLHPRVQQVGPEHFGIVCFDCAKVRSKFLLADFYGRVLIPPTTVTHNRPDLDAAVAQVRQAFAEHQLSDGLVAIERTGRYHRLVQRAFAAAGFETRIIHPFVTKQYRQPVDPGNKTDDTDLSAIHRATVTGCALLEATRDAAWTTLQLLVRQRRDLVRKGAALNCQIREHLEAAVPGFAACFDKLWDSPVPWHLLQHFPSAAHLGAAGLTALCQSLRQAGIRFQRRTVQAVLDWAERAAPGDVAADQHLRIALDYYGDRQQKTQQIQALERDLAAGLAQTPYVLLLSFPGINVVSAADFGGEAGPMDHYATAKAITGRAGLCPSRYQSDRVDKANGPLVRAANRTLRAAILGIADNLIVCNHHFQVLATQWAAQGKNPRHTRVKVGLRFCRIAFQMVAGRQVFRHPAIQGRHYILDKLTAFHRDHDTGMAEVLRDLQAAVAQVPPREHAAEARPLQEELQKIQDGRRRGPQLLGDILPIVLARLGVGVVPSEQSGE

SEQ ID NO: 149700 - protein, 371 aa, unidentified
MKKLTTFVGLDVHKDSIDVALADAGRDGDVRFYGTVGGDLESLHKVIRKLQSTGSELRFVYEAGPCGYELYRSLTNQGFDCIVVAPSKIPRKSGDRIKNDRRDALSLARLHRSGELAGVYVPTVEDEAMRDLTRGREDAVKALRVARQLLLAFLLRHGHRYSGKAYWTKAHKNWIAGIKMPHRAQQIAMQEYVHATQEQQERVQRFTRQIQELVPQWQLAPLVTALQALRGVSLIVAVTTVAELGDLTRFDSAKQLMAYLGLVPSEHSSGGAIRRGGITKSGNGHVRRALTEAAHAYSHPARESRALLARTEGLRQEVRNIAWKAQVRLCGRFKKLVARGKNKKAVITATARELAAFMWAIACATLPGTTA

SEQ ID NO: 149701 - protein, 410 aa, unidentified
MPVYCGIDWATDHHDVAVVDDDGRVVARGRVGNNAAGFAQLLTLLADAGDSATHPIPVAIETDRGLWVAALRETGRAIYPINPLAASRYRPRYALSGAKSDATDAVLLANIVRTDADAHRPLPADTELAQVIRVLARAQQDAVWARQQIGNQIRDLLKDFYPAALVAFDQLPNGGLARADARTILAVAPTPEAAARLTPARLRRLLAKAGRQRRLDRDIERLCAIFTDTYLHQPPQVENAMGIQLSALLRQFDAACAAAEELAEAAIAHFERHPDAEIITSFPGLGNLAGARVLAEIGDDRTRFADARGLKAFAGSAPITRASGKKTVVLHRHIKNRRLAVVGAIWALGSLRASPGARRHFDARRATGDWNRQAQRHLFNKFLGQLHHCLQTGQLYDEHRAFPPPLPLAS

SEQ ID NO: 149702 - protein, 317 aa, unidentified
MTYIGIDISKSWFDCFNSTTDTHHQYDNTVQGWNEFAGSLTDEAWAVMEASGPYYLGLASLLADRKIPVSVLNPLVIRRYSQMRLSRTKTDAKDARLIAEYAAQQPLTRWNPPSWVNQTMRQMISVCQGLIRQRAMLLGQKEAFTNSPATDPLVMDVIDDQIHRITSALSKLEDRLRQLIVTHYRHCFDAVTSIPGIGPKTAVLLICLTDGFSKFDDVRKLASYVGICPRIFNSGSSIKGRGSICKLGSSQLRKLLYMCTWTAKKCNPGCKQMYDRMKQAGKPERVIKIALAHKLLRQTYAVGTSGEHFAKEKALAA

SEQ ID NO: 149703 - protein, 338 aa, unidentified
METYAGIDLHSSNNFIGVINDKDKILYGKRHANRLDDVLKALDPFKDSLQGVVVESTFNWYWLVDGLQEHGYPVHLANPSAIQQYEGLKHTDDPWDSFWLAHMHRLGILPEGYIYPKEDRAVRDLLRRRLLFVRHSTAHILSLQSMISRNLGFKMSNNEIKKLKPADIESLFDCSNLVFMANNSLAAIEFLKKITKGIEKKVKSQVKLRKEFEMLLTIPGIGNILGLTINLEVGDIGRFPKVGDYSSYCRCVESKRLSNGKKKGENNKKNGNKYLAWAYVEAAQFARRYCVKAQSFYQSKEAKTKPVVAIKALSNKLSKASYYIMRDQVAFDEEKLFG

SEQ ID NO: 149704 - protein, 352 aa, unidentified
MCAAYDGSQVVGLDLHRQRTVMVRMTPAGEQLEQVRFMNSRAELTAQIAKAGSAPAVVLEATYGWYWAVDTLIESGAEVHLAHPLGVKGFAYRRVKNDVRDAADLADLLRMGRLPEAWIAPPEVRDLRELVRHRHKLRNVCSGFKAQVHAVLAKNGVDIGCSDIFGVRGRQRLAALQESGRLPVVFTDRIGSQLRIIDVLEAEILAADRAIAQRLRGLPGYEAIQRIGGVGPVFAAVFVAEIGDVTRFPTPRHLAAWSGLTPRHRESDTSVHRGRITKQGSKIVRWAAVEAVQRAPAGTPPRVLMDRIVDRRGKKAKNCARVAAGRALLELVYYGLRDGRIRRLDSPQRIAA

SEQ ID NO: 149705 - protein, 361 aa, unidentified
MHATTVAVDLAKSVFQIAVADDKWKVVAQHRLTRSQFEHWFENRAVGLVVMEACGSAHHWGRWFRCLGIEVKLLPAAYIRAYVKRNKTDAADACALLEAARCADIVPVQVKSLEQQALQGLHRIRSRWMGTRTSRINTLRGFCREFGLVVPQGARTGVEAMSRVLADPHSAVPLLIRESMKLLIEEIRLLEQRIAQLEKELNVQARQSPACTQLLSIPGIGLLTATAMVAATGGSVTHFKDARHFASWFGLTPKEFSSGNSRKLGRISKKGDRYLRMLLTHGARALLRAATLARSTGRALDGLRTWATEVQARTHHNKAACALANKLARVCYAVLRDHAPYGNPQPRQEKKLSRTAFAIAT

SEQ ID NO: 149706 - protein, 416 aa, unidentified
MAQLKIVYPICCGMDVHRDFVMACIASTDKRGVTQYSTKRFSTYSGGLRSLRDWLAANNCKDVCMESTGKYWFPVHNILEADFNVVVTHPKFVKAIKGKKTDKKDAIWIADLFKHDIVRNSFIPPADIRQLRDICRYWVKLTAYSTGEKNRAQNCLTVSNFKLDSVFSNVFGKSASALINYMLEHPGEQFDVAPFVDGRCKSPIEDIQAASDGVFNPWQAEKLKIIREHMEDLDKLKALLEDLILRLAEPYMRQIKLLLTAPGISDMMTAIRIIAEIGTDMNQFLSSKHLCSWAGLTPQNNESAGKKKTTRIGKAGQYIKPLLVQCALAAANPRSKKYPEILAKHQLLKKRRGSKKARVAIARRLLTAIHQMLLKNEPYAPYIAPAKHFIPKNRVLSPEQALALLRSKGYIIDVLA

SEQ ID NO: 149707 - protein, 360 aa, unidentified
MKIVGVDLHAKQQSIAMLDTETGELTEKVIHHEGNAVREFYASLEGRVMVGMEATGSMQWFLELLDELGVQYRVGHPAKIRAAEPRKQKHDRRDARLILELLTANRFPDIWMPCTEQRDLRILLRDRHQWVKMRARLQHTLQSIALNHALRKGTSLWTAAGLETLQRLPLPPYTSQRRNQLLRLYAQLQKRIQELDRQVEEQVQQRPQARRLLTHPGVGPLTALATEVFLGNPSRFMTAKQVASYIGMIPREYSSGQRQRLGNMTKQGNSLLRYLWTEAALHAVRKDPELKRFYRRKLIQKGMGKARVAAARKLGIRLWIMLRDQIEYEEFCRRGKLRQNGEAQAGMPDFNSGTATAVTG

SEQ ID NO: 149708 - protein, 397 aa, unidentified
MIAVGIDVSKSKSTVAILNSDGSHRITPYDMKHNHPEMNALVNYLNELDEPIIILMEYTGHYHYPVLKKLTDEHFQVCLVNPYQMKKYGDTELRRSKTDKKDAVRIATYALEKSYQLVPYSVDDQKYIDLKLLSRQYSQRMSTLTINKVYLVNMLDQTMPGVTSILPLRSRDPDTSLSMMFIKKYKSFDYICKMGKTRFLDSYSRLVKKARNRNASHLGLAIYELATQSITTNGENTYAVLAQTQCIDLVAEAQRAADSIITQMQAIAETLPEYKILRNMPGVGERLGPLILAEIGNVRRFHSGKALNAYAGNDAPPYQSGNFESHNRHISKRGNAALRKYCFEVMQALKLIKPQDDPVYLFLLKKEQEGKHFNVAKMAAVNKFLRIYYARVMELEQ

SEQ ID NO: 149709 - protein, 327 aa, unidentified
MKKLYFIGIDVSKEKLSCFDGKEEFSVKNDLDLEEFKRLLRRKYKDLKRIVLIFEATGIYSYFLKAFCNTKHIKAYILNPKKTPNLAKVLGQRSKTDKIDARTIYCFKDLISKEQIKVPQIDETLEKIYAYFSSYKFLIKQRVALSNHLDALERNPFAPRDLMKRMQERYLELRAEEKRLMEKMEQIIAEAEDTQEDLSNLCSIKGIGINNAICLLILFKRYQVENRQQVTALLGFDVKTRQSGTSVYSRGQISKQGNGMMRSMLYMAALNAVRTNLRMKFFYKRLIDRGKPRKVALIAVARKLALIAYVIYKTKEPFKEYVGINRH

SEQ ID NO: 149710 - protein, 435 aa, unidentified
MPTRFLRLQPQNRNHYLWKIVLHFSYQATVGIDWADRKHDVFVRFANGSSYRRKIGSRPEAIQEWLFELRSACAEGKIAIALEQRRGALFYQLCTHLSWIDLYPINPHSLSSFRLTFFSSRAKDDPKDGQLLEELLRTHCDRLRPYQPALTTERQLDLYCRQRRSLLGLATKTELKLISTLKQYFPVAVDLFEAVGMKSDIALNFLSRWQTMHELRRAKTHTVRSFFYAHNSRSQSLIEKRLQQIGAALEVTDDPALIEPMVLMTKCLVGQLRQFNQTINEFDRKIKGVFKSHPDHFLFEALPGAGEKLAPRLLSLFGSDRSRWPDAADIQKYSGIAPVIERSGKSLWVHRRLSRPIFICQSFHEFAQQSTRFSSWANEFYKRQREKGKSHHSAIRSLAFKWIRIIFACWKANKAYDESFYLNALAKRNASSSPT

SEQ ID NO: 149711 - protein, 363 aa, unidentified
MLYLSIDLHRKQMTVAVRNEKGDVILRRQVSTRWDKVREFLDGLKRDAEKAGGFIAILEVCGFHGWLVTLLKEYGCQRVVLVQPEKQSKKKTDRRDANALGELLWANRERLLAGKRVQGVRQVRMPTAEEETDRQLTFARKRAADARTRTINRIKYILRRHNVEWDCPTKGIQTKKARRWLEELALPELDRLAMNQLLAQWDLWEQQMEELEKEIVERFHKHEPAQVLGTAPGMNAYSSLGIASRIGPIKDFPRPRSLANFLGLTPGCRNSGEVTDRLGSITKEGSRMVRFLLGQVVLHVLRKDAWMRAWYQRIKRRRGAKIARVAVMRRLATIFWHMLTYNEPYVPGGPPRLRLPPRKETAS

SEQ ID NO: 149712 - protein, 489 aa, unidentified
MSTACIQQREKKGSDAQRSASKRKARGSYCQQGEGHRRRSKLTITNPDAAGIDIGAQVHYVAVPEERAEVSVRSFGAYTAQLDELVQWLKDCGIKTVAMESTGVYWIPLFQKLEEAGLEVLLVDARQAKHVPGRKSDVQDCQWLQQLHSYGLLRAAFRPEDSICRLRTLQRHRKNLVESAAMWIQHMQKALNEMNLHLHHVLSDISGQSGLRILDAIIAGERDPRKLASLADRRVEKSQAQIEAALTGDCRPELLFVLSQSLQNYRQMQEQVAQCDLSIEKQLAKMADCTKPNQASEPTQQSQNSAGCKPRKKKPKDALELSLAEHLKRILGVDLTTIPGLNVLAILTLVSEIGTNKAKWRNEKAFVSWLGLSPNNKISGQRVLSSRTRKVVNRAATTLRLAVMLLGKTNTPLGSFYRRKRAQLGAPKAITATARKLGCLIYHLIKSGQGYKEPDLHTYELKYKDQILNSLRKRANSFGFDLVEVPKAA

SEQ ID NO: 149713 - protein, 349 aa, unidentified
MHYIGIDYHKRYSYIVIKNEKGEVEYRGAIENTREAFEGLLKPYCPGKAVLEATRNWGLIYDWLEEVLDDVALAHPLKVRAIAEARIKTDKISADILADLLRTDLLPRAYAPSKETRSIKYILRQRMFYVRIQTMVKNRIHNILDRHPRLLSETSRFSDLFGASGMKWLGQLTLSGDDHDLLTSELQLMSLLKEKVHQSDAMVRKLVKRDERATLLTSIPGIGPFFSLLILYEIDDVSRFRDERKLCSYAGLVPSTYASGGKVFHGRITKAGSKWLRWALIEAAQTAVRSDPEFQAYHHKIRVRKGTNAAKVATARRLLTIVYRLLRRGRLYEKKSRRKNKALVALVSP

SEQ ID NO: 149714 - protein, 456 aa, unidentified
MMAKQKTHKPAVIETVNIGAAAIDVGSREHMAAVNPDVTDAPVRAFGTFTHDLHDLADWFKSLGVTSVAMESTGVYWIPAYEILEQHGFEVILVNARYAKNVPGRKTDVSDARWLRQLHSYGLLRGSFRPSSQIATLRAYLRQRERLVEYAAAHIQHMQKALMEMNLQLHHVVSDITGVTGMKIIRAIVAGERDLDVLASYRDVRCRASTETIKAALNGNDRPEHVFALTQSLELYDFYQAKMLECDRHLETVLETLATDQGHDLSQMPKIRSKTKKAGAPSFDVRAALFGVLGVDLTQIHGMEPSLSLKLVGECGTDLRAWPSAKHFTSWLCLAPGNKIPGGKVLSSRTRRSSSHAAALLRLAAVTIGRSDTALGAFYRRLAARAGKAKAVTATARKIAVLFYNTLRHGMTYQDPGAAHYEERHRNRVLGNLKRRAKSFGYDLQELPPQADIAVF

SEQ ID NO: 149715 - protein, 411 aa, unidentified
MVTQTASQVFLGLDVGKTQHWACAVTAEQKIVWNKALPNDEAKLVDMYTRLQEQGQLLVVVDQPATIGALAVAVAQHMGILVAYLPGLTMRRIADLYPGDAKTDEKDAFIIADAARSLPHTLRELTEADVDEATLGMLTGFDLDLSRQVNQVSNRIRGLFTQIHPALEKVLGLRLEHDAILEMLISWPTPDKLRKVGRARIDAKLKKHGARRHAVWTEEILQALKKQTVTVIGTQAAGIVIPHLARQLIHLHLQRADVAREVEEIVLNHPLYLVLTSMPGVGLRTAAVIIAEISGKTFTSASALASYAGLAPTTRQSGTSIKSERVSHSGNKRLKRALFLSAFAVIRTDPASRAYYDRKRGHGKRHQPSRHRTSSPQTRSPLRHAPRRHPLRPTRNRARGLTNNIGAPPRS

SEQ ID NO: 149716 - protein, 457 aa, unidentified
MRKKNKRTKGIEEAHPFSGMSRIHPHAAGVDIGAIEIVACVPGDENTQIVKAFGNYTVDLQELAQWMKSYHIKTVAMESTGVYWIPLFEELERQGFECLLISSRSLRRVAGRKSDISDAQWIQTLHMYGLLEGSFRPQGDLVALRTLLRHRSQLVEHRSPHIQHMQKALLQMNVQLSQAVTDITGMTGQKIIRAILVGERDPQTLAAMREPGCKKSAEEIGKALTGTWREEHLFILTQSMMLYDFYTEQIQACDLEIERLYGLTRPDWESGEVQPLTKRKKNSHSKNLPHNAEEVRKHLKRISGVDLSSVDGFGVSLAQTVIMEVGTDMTKFPDEKHFCSWLGLAPKHEISGGKVLKNNTLKTKNRAGQAFRMAAQSVKQAECVFGVFYRRLKARLGPSQATVATAHAIARVVYRMLKYQVEYEPLNVNEYQKHYEEQQIKYLKKRAAKFGFQLLPT

SEQ ID NO: 149717 - protein, 346 aa, unidentified
MVLIGCDYHPSWQQVCWLDQATGETGDEKLVHASGDAEKFYRRFSSSVRVGLEATGNCQWFLELLRKLGHEVWIGDAAKIRASDSRQQKHDKRDARLLLQLLMENRFPRIWTPTREQRDLRQLLIHRYKLVVLRARVKNELQHLAMNQGITRKRKLWSQAGEKVLRELPLAAWAGRRREDLFRIREMLNGQIDLLDGAVVEAAEKNEKARLLMTQPGVGPITSLAFVLTMGDVNRFQRGKQVASYLGLIPREYSSGGRQRLGSISKQGNRFLRMLLVEAAQAAVRYDRGFRDEYLHRCHTKAKGVAKVAAARKLAIRLYWMLRTNIGYPEVVRVESSSRVALVGAS

SEQ ID NO: 149718 - protein, 486 aa, unidentified
MGARRKSKQRPAVVEPVEIVDAEHELVIERAAAVDVAKAAGKVCVRLTGKSGRRFSRVWDVPARTGAITELAAQLVELGIGKVTVESTSDYWRIWHYLLEDAGLDVQLVNARDVKNVPGRPKTDKLDAVWLAKLTEKGLLRPSFVPPAPIRRLRDYTRLREDLTRERSRYWQRLEKLLEDAAIKVSAVASTLDTLSTRDMIEALIAGERDPRRLADLARGRMKAKRADLITALDGRFDEHHGELARLLLGQIDGLSDQIDTLSARIEELIAELPEAAGIIDDNGHGTSAGVSINADADADADADADLGGGNRFGVDSAAGADNAPSVLQRLDEIPGIGALNAQDILAEIGLDMSRFPTPEHLVSWAKLCPRTIQSGPISRGGKTGKGNPYLKGALGEAAVAAAKTNTFLGERYRRIVKRRGKLKALVAVARSILRIIWQLLSDPTARFFDLGPDYHANRVATDRKVRNHIAQLTAMGFHVTLEPAA

SEQ ID NO: 149719 - protein, 285 aa, unidentified
MKITTVGMDLAKNVFQVHGVDERGKAVLKKPLKREQVAPFFANLPPCLIGMEACGSSHHWARKLEAFGHTVKLMAPQFVKPYVKTNKNDAADAEAICEAVGRPNMRFVPIKNGEQQAVLAMHRARQGFVKARTAQANQIRGLLAEYGIIIPQGIGHIAKRLPDILEDGENGLPGAFRQLLHRLGDHLKELDRQVGELEVQIQIWHRENEASKKLAQIPGIGPITASALVASIGDAKSFENGRQLAAWLGLVPKQHSSGGKQLLLGISKHGDTEHGQQSQWYLPRI

SEQ ID NO: 149720 - protein, 398 aa, unidentified
MESLIVGADVSKESFSAAGLDGTGTRCFSVDCTMDGDGFSKFLKTIRSQQPDLSTVVVGMESTGCYHINLFSYLTSQGIRAVVINPLLIANFAKLALRKTKTDKKDALTIAQFLLAHKDKISQMSISQDMQDMRDLARERESLSHLISATKTEIKRVLQTTFPELERLCGVYTGTMLAFLKEFPSARLISLAKPERIAQALEPRGQGNRISAFTADDVIKLAKTSVGTVSPAKETILRGKISTLLHLEARREELTDMLRDYCNSLLVEDLDIVTSVEGISDGTGTSFLAELGKIDNYETHKHLIAYAGIDPTVYQSGKYQGKSKISKRGNKHLRHVLWLMTVSVILHNEKFRAYYQKKKQAGMPYKKAVMATMHKLIRMLFAMLSQRKRYAPESVNCI

SEQ ID NO: 149721 - protein, 354 aa, unidentified
MSQNSNTSIAVVGIDIGKNSFHVVGLDQRGAIVLRQKWSRGQVEARFANMPSCLIGMEACVGAHHLSRRLKALGHDARLMPARYVRPYSKGQKNDFRDAEAIGEAVQRPTMKFVATKTADQLDLQALHRVRERLVSQRTGIINQIRAFLLERGIAVRQGLRFLRAELPRILAAPPEVLSPRMVRVIEGLAGDWRRLDQRVESLSGEIEAVARQDAGCERLMSVPGIGPIISSAMVAAIGTGDVFSKGRDFAAWLGLVPKQISTGDRTILGKISKRGNRYLRVLFVQAAWVVLIKPKSWERHGLKPWIEAAKKRLHRNVLAIALANKLARIAWSVLAHGRNFEMRTISGATAQSA

SEQ ID NO: 149722 - protein, 367 aa, unidentified
MSFYAGLDVHSKKIVFEIQDGDGTIVATGEFDSTPDGLEHFLIKHKLPSGTPVALETGTMAFFVAKQLAGLGLEPVVIDAHEVRIKAHRPTQKSDRRDAHELCNGIRVGMYRSIVHIPPKEIQDLRLALSRRRHFVRVATAQKVAVKTLVRAAGLGTPVRFLKTEKHWASLNDVLEGHPDLQRHVEMHRKMHKTALDIVAELDQELRALCEPRQNEIKRLQTMPGVGPVVAMTVVATLSDAKRFKGSKPVASYLGLVPTTNQSGEHDRQGHITKRGSTECRAMLIEAAHHARLPSHPLNPYFAQICAKRGYKVATAAVAHRMLRILHAMLVKQEDFDVNKLRVERGPFVKTTTRVYRLRPKQNQASA

SEQ ID NO: 149723 - protein, 394 aa, unidentified
MQRMRRVVIGMDPHKRSATIEVIDEREQVLAQGRYGTDTDGYARMLAAGRQFPDRVWAVEGCAGIGRHIAQRLVADGESVLDVPAKLSARVRVFDTGQGRKTDPVDAHSVAVAGLRSPGLRQVQADGVTVALRLLVDRRDELGRARTETVSRIHQLLLELIAGGAKKFLTRGQASYLLRTAPTPVGIVAQTRHQLARELIDELTIIDAKIRAADKQLRQLVTAASSSLGQLNGIGPSGAARLLGDIGDIDRFATAAHFASWNGTAPIEASSGDQQRHRLSRTGNRRINRVLHIMAIVQLRHDTPGRAYYRRRLAEGKTTMEALRALKRHLSGVVYKRMVNDAKQARAGATGPGGQPGATLQSSAASPIPTADSSDKSQPGPATGKRRTILAATP

SEQ ID NO: 149724 - protein, 351 aa, unidentified
MKTEHTAEPKLYIGIDIHKRSWKIHCATDLFSGKSFTMPPKPELLRAYVEKHFRDYEVTTAYEAGCCGYYAHRCFERYGWHSLVVNPADIHRKGKEKYTKTDKIDAQLISRELKDGRLDSIVIPDKEREQLRSLFRRRNDLVKEYRRIKSYIKMQLLYFGISIPKEFDNDHWSHNFRVWLDNLDFDYPTARETLLSRMRSFRFIDKELRDVSTKMRAYCRKHYKKDYYLLRSIPGIGGIVACGILCELGDLRRFKSIKHLAGYVGLAPGIHQSGDSQKSTGITMRAHRLMRSYFIEASWQAIRTDPIMQAYYRKHVGKNVKTIIIKVARKLLSRTLAVIKTEIPYEIGVLK

SEQ ID NO: 149725 - protein, 345 aa, unidentified
MFVAGIDAHATYSVIAIVSNTGELVQKPVRIRNSEADRLDALLEPFRPLEVVVETSPAWPWLFDRLEGPGVHFVLAHAKRLRVIAESNYKSDDIDAELLARMRLAGLIPEVHTKSVEQREQAVLLRGRARLVRQRTQMANRIHSQLHNVGLCLERGRLLTQEGRAWVRSEAWPRLGEERRVFITMQWALIDQLEPMIKTLDRRVERMGRDNPAVALLETIPGIGAYRALVIATETLPITRFRTPAHLVSYAGLAPRSSQSGMRPIRHKSIPAGANRLLRGTFVRAVVSHVANAPDSWLSESYEQMKQRLGWQVARVATARRLARAVHAMLRTGEVWRDQPISQKN

SEQ ID NO: 149726 - protein, 461 aa, unidentified
MSKKKPGGRQKGSAQKKVDWKALEIVHPDAAGIDVGGSEHWVAVRPDRDAEPVRRFGPFTADLHEMARWLVEKGVRSVAMQSTGVYWMPVFEILEQHGLEVYLVNAQHTKNVPGRKSDVEECQWLLKLHAFGLLHNSFQPTDEIRIARTLWRQRGNLVAEASSAIQCMQKVLTEMNVQLSNVLSDIRGVSGMKIIGAILKGERDPQTLASLARPEVKATPRDIAKSLEGNWREELLFVLRQQVELYRIYQEKIADCDLQLRKHLESFGSKVDLQKQPIGPKPKGKKGGRNTPQFDLRTELYRITGIDWAQINGIDVLTAQTVIAEAGADLSAFPSEKQFASWLGLCPTNEQSGGKILSRRTRKVVNRATVAFRNAASTLLRSQSYLGAQYRRLRTRLGAPKAVTAMARKLACPFYRLVKHGQQYVDKGTEYYESRYREQQIRSLAKRAQKLGLQLVIPKTA

SEQ ID NO: 149727 - protein, 408 aa, unidentified
MEVLHARCAGLDVHKDTVVACVRLATGDEVQQEVRSFSTTTQGLLALADWLLASGVTHAAMEATGVYWKPVWHVLESACELVLANSAHVRNVPGRKTDVNDAVWIADLLAHGLVRASFVPPTPVLELRDLTRTRKQLVREISQHTLRIQRVLEDANLKITGLISDLLGLSGRAILDAIANGETDPERLVALTDRRLKPKRPALLQALQGHVAEHHRFLIRLHLGQIDALQRAVAEIESRLGEALIPFRWATRLLTTMPGVSDVVAQVLVAEIGVEMGRFPTAGHLVSWAGLCPRMDQSAGKRRSTRVRHGAPWLKTVLVQAAWAGSRKRDSYLRAQFLRLKGRRGAKKAIVAVAASMLTSAFYMLRDGVGYQDLGPDHFDRRDRTRIANRLVRRLEELGLKVQIEAAA

SEQ ID NO: 149728 - protein, 318 aa, unidentified
MILVGIDIGKNKHTFSIIDKNSGEILLSPSDFSNNLKGFLFLIPKLSSYTKSELLIGMEDTGHYHFALLKYLLDRRYTVALINPTTTDLTRKLQGGITKNDPFDSLTICDVISSNHRNKPYRVTTLNRFDLYEQKQLTRHHHNLKEELNTYKNRLQKCIDIVFPEFNSLFHSKYGIVYMNILKAFSSAKAIANADIRSIRKCFEFKGQGKRISLSAEQLKLTAKSSIGIPSVAEEIQIRHLVSQIELLEKQLSEIDKRIEEFSLKNNSPILTIPGISHFSGTSIISELGDICNYTKASQIIKFAGVAPYHYESSQFTA

SEQ ID NO: 149729 - protein, 475 aa, unidentified
MTSKRRTSKGKQTRVQKRHQKRTPPRQASAKSMPVMEANAAGIDVGAREMYVAIPPDRDTERVRVFPTFTSDLEALADWLVEQGITTAAMESTGVYWIPLYQILEDHGIRVCLVNARHMKNVPGRRTDWHECQWLQYLHAVGLLRAAFRPESEVVAIRSVMRHRKRLVETAGVHIRHVHKALTQMNLQIHHIINDITGVTGTAIIESILAGQRDAAELAKLRQPEIRADKETIRKSLEGDWRREHLFALRQSWELYGTYLSSIKACDQETCEMLGGHKPKADPAKKPLPNETKRRTKRKHKRTGDFRFDVRTEAYKQFGVDVTRIPGLEGIALVLYSEVGNDMSRWSSASQFASWTALCPDNDKSGGRVLWTGVRQVKNRAGQLFRQAANSLHHSQTQMGEYLRRMKAKLGAEAGITAAAHKIARIFYAVVKNQVEYDDTTWHQQDLARQRRFEAKVRRQARGLGFELVPIQPVP

SEQ ID NO: 149730 - protein, 342 aa, unidentified
MDYYAGIDVSLETSSVCVVDGAGKIVREAKVASEPEALILFFRSLGFELTRIGLEAGPLSQWLYAGLKEAGFQVELLETRHVRDAFKAMAVKTDRKDARGIAQLLRLGWFKPVHCKSAAAQEVRALLTARKLVQSKLYDIEMSLRGILRGFGLKIGPTRPKRFAGRVAELTQNHSTLKAIAEALTGVHEALLRELCVFEKQVRMLAKSDKRVRLLMTAPGVGAIVALTYVSAIDDPGRFSSSKRVGAHFGLPPKKYQSGETDITGRISKTGDGGVHAVLFEAAHLILTRPLKAGALKSWASKLSKRAGMKKAKVALARKLAVIWRRMWRDETAFDAAKASAA

SEQ ID NO: 149731 - protein, 391 aa, unidentified
MFYVGIDIAKQNHEASIIDSNGKLLDKSISFSNSQVGCNKLIALLERFEADTSNTVIGMEATGHYWVSLYSYLLDLGFTVNVINPIQSDAFRKMYIRQTKNDSKDSFIIAQIMRFGEFSTTSLADEDIMALRQLSRYRLALVDECSDWKRKCIALLDQVFPEYSKLFSDTFGVTSREILSKYPTPEDMLSIDTDTLVELLSKASKGRFGISKANEIQESASNTFGVSFAKNAFAFQIKQIIAQINFIEDQLEELEIEISTLLHRTNSVITTITGIGDVLGAIIIGEIGDISRFESAPQLVAYAGLDVAVKQSGDFIGTQTKISKRGSPYLRRAIWLAATVAAFKDPALSVYYQSLKSRGKHHLTAVGAVARKMCNIIFAVLRDNKPYVPHI

SEQ ID NO: 149732 - protein, 329 aa, unidentified
MKVTAIMGMDVSKKTLDCHLFVQQKSLPAVSNDNKGFKLIKRWLKKEVRNLDGLLVVMEYTGIYTYQVEHFLQQHNIQFVKRPALDIKRSLGMVRGKSDKIDARFISKYGWMRKEELQPMCVVSDSQFELQQLMSHRDKLVADHASYQSKLKELVLQMGKKINKEMVDSMKLVMEILKQEIKKAEKNIKQLISSDDSLVTNYELAYSVTGIGFATAVHLLIATENFTRFSDARKLICYCGVAPFEHSSGTSIRGRVRVSHLANKKLKSLLTMAAISAIQHDPELKAKYEQKVKEGKAKMCVINIIRAKLIERVFAVIRKQKPYELRLAA

SEQ ID NO: 149733 - protein, 345 aa, unidentified
MYCIGVDHHKQYSLMTVLDGEGREVKTGRMTNTRADIGEFLRGLEGEAKAVIEAGRASFEMAELLEDMGIDVTVAHAAKVKAIASARIKTDKRDARVLADLLRAGLIPAVYQRGGENREAQRVLRLRAFFVKQQTQVKNKIYGLLAHQGEEVRQAAERIRDLFTAKGLEALERLALGGKDQEILQALVKACRHLAALVKESDGLVRELYGELETARLIDTVPGFGVTLAVLVAVEIADIGRFRRASELHSYAGLIPSTYSSGDRTYHGRITKQGNGWLRWALVEAVYPAIKVDHDLRVYYQKIARRKGANVAKVATARRLLTVIHKMLKEGRAYVLYPREKTSAA

SEQ ID NO: 149734 - protein, 348 aa, unidentified
MRETVHMQITTIGLDIAKNVFQVHGIDAAEKVVVRKRLGRSQMLAFFKALPPCLVGMEACATAHYWARELTKLGHRVRLMPAKDVKAYVKRNKNDAADAEAICEAVRRPTMRFVAAKSAEQQGQLMQHRTRDLLMRQRTQVINALRAHLAELGIVAAQGDKGVKELLTIVTDKKDERLPIDARASVIVLAAQLEAVQTLIGSIERRIKTQHRANEASKRLETIPGIGVIGATAIAATVADPTIFRSGRDFAAWIGLVPRQDSTGGKQKLGPISKQGDRYLRRILVVGAHSVLRRAMQNPEKYLWLTQLLARRPFKVVAVALANKMARMAWALLAHGGTYRAPEPAAAA

SEQ ID NO: 149735 - protein, 385 aa, unidentified
MAKVVIGVDPHKRINAVVVVNSRAQVLARAQFVNDAQGFRELRRFSRQWRPRTWAIEGCNGVGKHVAQRLVAAGERVVDVSTRRAALVRVFAGGNGRKNDDTDAHSIALVGLHAPDLPAVRADDRRTALRLLSNRRRELIGQRTQCVNRLHRDLVGLVAGGAPRSLNAKKARALLASVKPRDEIGRLRRHLAAELLSELVTLDKKIGAIEAEVRALVRSTPTGLPKIYGVGPVITALTLGEVGDIARFADRNHFASYNGTAPDDKGSAGNPAHCVNIKGNRKLNHAIHMIAITQIRNRNSPGRAYYERKLAQSKTKKEALRALKRKISDVIYRQLVADAQLAMGPGGQAGTTLTASVTDPTPTAGTSDKPQPGPTENSTPLASTG

SEQ ID NO: 149736 - protein, 457 aa, unidentified
MKIINPNCAGIDVGSRSHFVAIGQGNKDVKEFGVYAEDLKSLAKWLHSQQITSVAMESTGAYWQNLFVELMNSGLEVILTNGKFTKNINRKKTDVLDCQWIQKMHTLGLLPSSFLPDETTEKLRTLCRHRAKMIAQKADTSHKMQKFLKWLNFRLDVVVRDVTGLTGIKIIEAICGGELNPKVLASHRHYNCRKSEEEIAKALVSNERKDYLFGLKQEFKRFRFYQTMISECDIEIADFLQNFIDDKIDVVDDLPEKKPYKRQNKNGLKGIDLNIISYQYFNGVDLLKIPGVSHSTVLTFMSEIGPEGLKKFSSAKKFASWLRLAPNNKISGGRTLSNRIPKGSNRLKIALRNAANAVGNLKDSDLGKFFKKVAFRKGRQAAITATARKLAVILWNMITKKEQYKPTNQYIFLDEKRRAIAQLRKKISKFGIDPNELGVFSRPEYKLAHEKKKLDNQ

SEQ ID NO: 149737 - protein, 337 aa, unidentified
MEPEKQYVGIDLHRRRSVIVRRSEKGKTLDTVRIDNDPITLAAEVAKAGEAPEVVLEATLGWYWAADVLADLGAQVHLAHPLGNNWGHRRIKNDERDATDLVDLLRMGRLAEAWVAPPAVRELRELVRYRAKLVNLRSGLKAQVHSVLAKEGVAVNVSDLFGVAGTELLDTVELGEAYTVRVESLRDVIEVVEREIAMLARRIDDWLADDDGYRAVQAIPGVGPVLGAVFVAEIADVGRFASARHLCSWAGLTPTHRESDTTVHRGHISKQGSRLVRWAAVEAVARQRGATAVRVHHHRVAERRGRNIGRVAAARKLLILVYYGLRDGEIRCLAEAG

SEQ ID NO: 149738 - protein, 363 aa, unidentified
MQNSITWIGMDVHAENIVLAAVRGSSDAVLFRAEFPNTSKGRERLAGRLAENVPVRCVYEAGPCGYELRRFLEEKSIDCQVAAPALIPRKPGDRVKTDRKDAEKLARCHRLGELATVFVPTPAQEALRDLLRTREDAREDLLRRRHRLSKFLLRQGRRYTTGERWTTRHWEWIRAQTFTERNAETVFHEYIVAIEQEVERIRRIEQQIVEESRSPEVGKAIARLRALRGVDTITAMTIISEVIDLNRFRSPRELMAFIGVVPRERSSGGRERRGSITKTGNAHIRRVLIESAWHYQRLPAGTPKAILARREGQPPEVIETARRAELRLHRKFMKLLGRGKPKGIAAVAVARELAGFIWALGRG

SEQ ID NO: 149739 - protein, 436 aa, unidentified
MSFTRILDPAFEDFNNPFKYYDAQGEPLEDKLYLPCGIDPAKKELGVVFVHPYPQNNNVLEKRIIKNLSFEDANWLIETGVTLADNFKATPIYIFEATGQLWVPLRRYIHLKGYPTATVCALQTNHARKTCIRKSKNDLIDAINIAKVFKNGESHASRMPHPVIANLREYTRLHLYFSQFLASVANRMHGTQFILNPEFETQFSKPMLSTSLALMKEELVVPPNILACQVEKLTQIINQASCGRLGEKLAKALIESAHTTFAFPFATEALSFSLKMLAEIYEQVKRVTIPALIAKVKESLLNLPFEHKLNTIPYFGPIVIGTFLGELGDYRWFSSVDKVVAWFGLDPSVSRSANQTTEASHITKRGTKIGRRMMWLCAKNFAFHTKEGKVYFAQLRERGFSFDAAICKIAAKLVRAAYAMLRDKSSFEVKSVFPNA

SEQ ID NO: 149740 - protein, 369 aa, unidentified
MAKPITYVGLDVHKDTIAVALAEAGLRGEVREHGKIPNTPAALKALTVKLAPSRRELRFCYEAGPCGYGIQRQLTEAGHECAVVAPSLIPRKPGERIKTDRRDAINLAKLHRAGELTAVWVPDQAHEAIRDLVRARQAAVRSLRQARQQLSGFLLRHGRHYHRPAWTQLHRRWLASLKFDQAVHHIVLEDCIAAVEAAMARRDRLEAHIEAVLPEWSLAPVVEALQALRGVRLVAAATLVAELGDIARFTNPRQLMAYLGLVPSEHSSGRTRRQGGITKAGNGAARRMLIEAAWSYRFPARIAREQLLRQERLAKPIRDIAWKAQERLCRRYRKLARAGKLPTVITAAIARELTGFIWAIAKQVQPTAT

SEQ ID NO: 149741 - protein, 353 aa, unidentified
MTNNTIETIGCDLGDKRSEICVLDRDGNVKERKSIRTTREGMMGYFRREAAHVVIEVGGHSRWVSQVLKELGHRVTVANARRVGLISNGDNKTDRHDAEWLARLGRADVKLLGPVEHRDAKTQADLAVAKARDELVTARTRLVNHVRGTVKSFGVRLPKCSAESFARQTRERVPVELTAALDPIYKALASIDEQVKEADRMIERVARKYADVDVVSQISGVGVLTALVFLLTVADKQRFAKSRMVGAYLGMRPRRNSSGESDPQLGISKAGDGFVRRLLVNAANHILGPFGKDSDLRRWGLALASRGGKNAKKRAKVAVARKLAVLMHRLWVTGEVYEPVGYHQRQLERKRAA

SEQ ID NO: 149742 - protein, 313 aa, unidentified
MNQILQVKKLYCGIDISGATLDICFQTEDGTLCFDKCANGPEGFKQIWRLTGKRYHFVMESTGVYQLPFCFFLETKKANYSVVNALQIKRYIQMKLERNKTDKKDAQHICMYGLENNPECYQMPDRLYFECRAINNAIETITKEITAFKNKMHAIMKLEIDTKVISATYRKLLRELQAELKKLETELYKKLEAWQPAMVKQVRSVVGIGKRATAILIVNTQGFKHTESYQQLISYAGLSPKEYSSGSSIRGRVRICKQGGGMLRHTLYMCALNAKTTNAGCKALFDRLVEKGKNKKLAVIAVANKLLKQVFGS

SEQ ID NO: 149743 - protein, 342 aa, unidentified
MNQVNQSIGIDVSKDAIMCCMGTLESGQHCFSKSKSFPNTPKGFEALLEWSTPGKTSAVFVMEATGVYYENLAYWLDSQGYQLSVLLPNKMKHYAKSLNVKTKTDAVDAQVLSRVGLERTLHYWHMPSAMMREIKFLSREYRETKAKLVVIKNQLHAKKHSFACPLSVEKRLIGQMALLETQLLEIESELRAAAISDPQFYDRVTRLNTIPGISFITIITILAETNAFALIKNAKQLASYAGLDVEHRQSGAKEGKTKISKKGNRFIRNALYMPALCATKHNPHMKPFYTRLCERKPAKKVAVTAVARKLLVLTFTLWKNNQEFIENYTEESRKALKPAYTG

SEQ ID NO: 149744 - protein, 354 aa, unidentified
MTSTKYIGMDVHKESISIAVMNVVGKIVMECVIETKANMILQCIDGLRGDLHVTFEEGTSAAWLYDLLKPHVTELIVCDPRKNASMREDSQNDKIDARRLAELLRIDHLTPVYHGEHGLRTLKELVRSYLTVTKDLARVKTRIKAIYRSWAIPYSGKEVYAACHRAEWLAKIKELGVRRRAEFYYQELDALRMLRQEVRRELVAESRKQKAWKRLCQIPAIGPIRAAVLLGILQTPHRFRTKRPLWKYSGLAIETCSSADHRSINGQLQRSEKNSVRGLNHNCNHDLKNLFKGAAVSASSKPGPFQEFYAALLAKGMRPEMARLTLARKIATIVLLVWKKGVSFDAQHLKPQTA

SEQ ID NO: 149745 - protein, 353 aa, unidentified
MTPLVIGIDPHSRIHVAAAVDEHGRLVDTCEVGASPTQLGQLLTWIQALAVTKVAVEGSKGYGLPLARLLVAAGHTVVDVSSNLTADERKRSRRRGKDDEGDAVAIARIALRESDLPIMDPAHLDADLKLLVDARDQLVQEEARVRNRLHALLLNMAPGYHDTTGPLNSRPAFARARSLALRARKSDPIRAKLALAAIRRLNALRDEQADLEKDIHGELEQRSTTHLQSIPGVGPLVAAKILGEVRDVRHYPSAAAFAAHAGVAPVPASSGNTQRHRLARGGNRQLNRALFTIAMVQARWHPPAREYLARKRAEGKTPAEARRCLKRHLANVVYRALQADLATVPSADLNPAA

SEQ ID NO: 149746 - protein, 361 aa, unidentified
MSYGSTEQMKMTAGMDLGDKYSHLCLIDTESGELIEESRLRTTPKAMRHRFDSERSLHVAIEVGTHSPWVSRLLEECGHEVLIANPRKTRLIYGERRKTDKLDAEKLARLARADPELLYPVEHRGEDSQAHLAMVHSREALVRSRTQMINHVRGTVKSFGYRLPKCSTPSFHKKVPGQLPSELAEVLGPIVETIGSLTEKIKDYDRCIEELAAERYPETRLLRQVSGVGSFTALTFVLTLEDPQRFAQSRSVGAYLGLTPGTDQSGEQDPQKRISGEGDELLRRLLVSSAHYILGPFAPDSDLRRHGEKIAQRGGKNAKKRAVVAVARKLCVLLHRLWISGELYEPLRNARRLGLQGEEVA

SEQ ID NO: 149747 - protein, 355 aa, unidentified
MTRTVYCGVDFHARMQTIAYCDSADGEIQLAQLDHRKDDVRDFYSKFTGQVIVGLEAGGYSTWFEAMLEELGHTVWMGHAAEIRRRANWRQKNDRRDAELILEIMLRGDFPQIHRHCRESVEVLRMLRYRARLVKMRTMISNNLQAIAISSGLSERSRMLSRSGQQRLKNARMSPAIRQQSEDLLSLLVPLNERITRVEKWLKEQASTDDRVKLLLTHPGVGVLTALGVVHTLEPFNRFTRQRSVVAYVGLEPMERSSAERKRYIGISKGGSRLLRFLLGEAAHTAVRLDPELKRFYERVGKRRGKPKATVAVARKLLIRCWIMLRNNIDYLEFRSRGVEARLARNIARPSVPAE

SEQ ID NO: 149748 - protein, 408 aa, unidentified
MEVVHSRCCGIDVHQASLAVCVAIKEKGNSEKHKLRCGTTTAELLRLADWLHGHQVTHVAMEATGVYWKPVWHILEGQFELLLANPTQVQALRGRKTDLKDGERIADFFQHGLLQGSFVPPKPIQQLRDLTRSRTTLKQEQVRIGNRIRKVLEDANIKLSSVMSDVMGVSGRAMLRAMVRGESDPETLAQLARKRLRGKIPVLQQAAAGSLNEHDRFLLEQWLAHWDELTERIAKFDQRIEEQIRPFAAAVETWNSLPGIDRITAWTMVAEMGADMNQFPTAAHAASWAGLCPGQEESAGKRKSGRTRPGNVWLRRALTQAAWGASMTKGSYFKAFYHRLAARKGKKRAIVAVAHALLSTGYMLLWTDRRFSDLGEDYFDRLDRERLTKRLVKRLEKLGHQVSIQPAA

SEQ ID NO: 149749 - protein, 346 aa, unidentified
MPETEVDTFAGIDVSARELSVALRRGKGEDKPEMAEFSNHPSGHKALIAHLLRGGRRVRVCLEASGNYSLDLALTLQAHRQVEISVINPRRARRFAESLGQRSKTDPVDARVLCEYAARMPWVAWQPPSSVALHLRAVARAIADLGVIHTQQNNRAHASAASQALPVLVVKEMQRHQKYLEQRMTRLRREALRLIAGDSELDRRFRLMLTTTGIAETSALQILGELAVLPDMLDARQWVAFSGLDPRLFKSGKSVEKRPRISRGGSRHLRRALYMPALVALRRDPYLRRFYQDLLARGKARLQAVVAVMRKLLHALFAMFRTNQPYDGSKLCCAVEMAGHAIAACA

SEQ ID NO: 149750 - protein, 374 aa, unidentified
MCERAVLTNRPSLDLSPNVLEGHRACRGAWDRSGVFLNPNSCKGLEPVPSKEGSWMMAQDDLVVVGIDVAKDKVDAHIRSLSSGRTLPSTAEGRRQLTSWLRRHKVGKAVMEASGGYERDWARALRAAGIEVRIVDPKRVRSFARSAGRLAKNDAIDAEMIAWFAETFHEAPGQVCDTAREKLVQIVNARQGLLDLQTRLQNRDEHAEVGPVQKMHERLLKKIALEIARLEAAIAALIKATPHFAELAEIIESVPGLAGTTSAGLIAMMPELGQVNDKIIAALLGGAPYDDDSGKRRGERHIKGGRRRIRNAFYMACLGASTQHNPVLKAFYRRLIAKGKEPKVALVACMRKLIVILNVMIARRQKWDASVQNA

SEQ ID NO: 149751 - protein, 346 aa, unidentified
MEHYVGLDVSLKLTSICIVDRTGKVEREGVVASDPEAIATFIKLHAPHVVRIGLETGATSTWLWTELNKIGLPVICIDARHAKAVLKMQINKSDRNDAAGIARIMQCGWYKEVCVKDLDSHATKALLVSRALLVKIKRDIENQIRGLLKNLGLVIGRAKMNMFAVRAAQLAEDRSELFAAVDPLLKAREAVEQQIFDLDRKVLRLARNNAQVRRFMTAPGIGPVTALCFLATIDDPTRFKRSRSVGAYAGLTTRRYASGEIDWTGRISKCGDKMLRSYLYEAANVLLTRVAKWSALKAWGIRLAKRSGLRKAKVAVARKLAVILHRMWIDGTGFKWSSKDAADQPG

SEQ ID NO: 149752 - protein, 324 aa, unidentified
MQVTTIGLDVAKNVFQVHGVDASGAVTLRRRVRRSEMVRLFGRLEPCLVGIEACATSHHWARTLQALGHEVRLMAPHYVKAYVKRNKNDAADAEAICEAVTRPSMRFVPVKSVEQQGTLMLHRSRELLIRQRTMLINALRGHMAEYGIIAAKGPANVAQLVALLGEPADDRLPAPALAALRGEIVAWHRSSAASCRLAGAPGIGPVIASAIVATVSDASAFTSGRHFAAWLGVVPKQNASGGRQALGRISKRGDSYLRRLLINGAQSVLRWAKKGKSSAWLIGLLERRPRSVVAIALANKMARIVWAMLRRGEDYRKEGMASVA

SEQ ID NO: 149753 - protein, 344 aa, unidentified
MCLKWFLERGRRRSNAPLLPDALHGVGQTGKPELLRPEVRRSKLLEVVASLPPCLIGMEACSGAHHWAREFQKLGHTVRLMAPKFVAPYRMSGKRGKNDANDAAAICEAVPRPNTRFVPIKTIDQQADLFMHRARQGYIEERTALINRLRGLLSELGIVLPLKASVMRREAHLVLEDLPGWCNTAVGDMLSHLGRLDERIAEYEKHLFQIAKQNEKARQLMKLPGVGPTTATAIVASVGNAHDFQNSRQFCAWLGLTPGQHSSGEKARLGRITKTGDSYLRTLLVMGARSLLMKAAAHADPVSRWALKLKERRGFGRAVVAIAAKNARMCWAALRLGDAFKIPA

SEQ ID NO: 149754 - protein, 355 aa, unidentified
MSKRGTEELSDLSVVGVDIGKDVFHLVGFDAEGNLVLRRRIKRLALNATFEALPRCVVGMEACLSAHFVSRTLRGLGFEPRIIPAIYVRPFIKGQKNDYNDAEAIAEAALRPNLKTVTEKSQDQLDLQALHRVRSRLVSRRTATINQIRAFLIEQGITVRKGLRALKSSFLTILDERQDEISPRMRVILTGLYGDWLWLDERIETVTGEIEDISRTEENCANAMTIPGIGPLISTAMVAAIGQGDAFDRGRDFAAWIGLIPRQYSTGGRTVLGRISKRGSRYLRMLFVQAANVVLMRPHHWPGFSFGDWLVRASSRMHRNKLAIALANKLARIAWSVLRHGTPFDATRDEIMLGV

SEQ ID NO: 149755 - protein, 375 aa, unidentified
MTADLQAKEYESAAVLYMAMELSNKTWRLAFGDGRRARQVRIDAGDIAALGEQIGKAKAKLGLGAEAGVVSCYEAGRDGFWLRRQLEALGIRNHVVDAASIEVSRRARRAKTDRLDAQALLDKLMRYEGGEHRVWRVVRVPPPDWEDLRQLSREREQLLEERTRHHNRLSSKLVAQGIRLVINGEFLRRLGEAKLFDGRPVPEHLKAGLEREWERLQLVQTQLKVLEGRIRELISEGGLLNGVGSLMLLCGIGWVGAWTLVGEIFGWREISNRRQLGSLGGLVASPYNSGTLARDQGVSGAGIRRVRSLTIQLAWLWLRYQPNSKHSRWFQERFGGGSKRQRRIGIVGLARRLLIDLWRLLEGGVVPPGARLKVA

SEQ ID NO: 149756 - protein, 397 aa, unidentified
MIAVGIDVSKSKSTVAILNADGSIRAKPFEIHHNLDELHSLALYIKSTNEQPIILMEPTSHYHYPILKIFQEEHLPVCLINPYLMKKYGDNELRKAKTDKKDALRIAQYALEKAYSLTPYESTEQKYDDLRFLSRQYNQRISTLTVAKVQLQNLLDETMPGITSILPLKSRDPENCVLLRFIKRFKSFDVIRKMGKTRFLESYKVLVKKTTDRYALSKGLAIYELVLNSVTTRGENPLSSIVQEQCVDLVSTAQTAADEINLQMRIIAETIPEYKILHDMPGVGDRLGPIILAEIGDIRRFHSGKALNAYAGNDAPPYQSGQFESRNRHISKRGNPALRKACFEVMQALKLSKPQNDPVYLFMIKKEQEGKPYNVAKMAAVNKFLRIYYARAMELYK

SEQ ID NO: 149757 - protein, 355 aa, unidentified
MTSAKYIGMDVHKESISIAVMNSVGKVAMECVIETKASVILQFLNGLSGDLHVTFEEGTAAAWLYDLLKPHVTRLVVCNPRRNGLLKVGNKSDRIDAQKLAELLRGNQLQPVYHGEHGLRTLKELVRSYLTVSKDLARVMTRVKALYRSWGIPCSGTQVYSRLYRVTWLSKITEPGVRLRAAFYFQQLDALRTLRQEVRGELLAESQKHKVWKQLCGIPSIGPIRAAVALGILQTPHRFRTKRQLWSISGFAIETRSSADHRHVNGRLQKVKKRVSIRGLNQNHNHDLKNLFKGAAVVASTKPGPFQEFYEALLAKGMRPEMARLTLARKIATIVLIVWKRGVNFDAQYLKPQTV

SEQ ID NO: 149758 - protein, 347 aa, unidentified
MRFYTQQHKHYCGIDLHARAMYGCLLDQSGTKLVHKNVPATPEAFLRVVAPYREDLVVAVECPFPWYWLSDLCAREGITFVLGQALYMKAIHGGKAKNDKIDAHKIAVLLRGGMVPMAYVYPPEMRATRDLLRRRCHLLRKRAELLAHIQHTNSQYNLPEIGKKLADKGNREGVEDHFPDPRVRKTIEMDVALIDHYDKLLGEVELYITRTAKGHDAQSFARLQSVPGIGQILALVILYEIQAIARFPRVQDFLSYGRLVKCAKESAGKRHGLSGKKIGNPQLKWAFSEAAGLFWRQNKPGQEYFAKLEHKHGKGKALTVLAQKLARAVYFMLTRHQAFDLQRCVPA

SEQ ID NO: 149759 - protein, 358 aa, unidentified
MNKLTKIDKFFNNVDFTADDQLFVGIDVHKRTYNVALYLNDAPALDFVMPAAKEKLSQKLKKTSSALKQVAYETGPTGYGLARHLHQDSLPVTVAATSRIPRSSGDDKTDKLDSRKLAEYAAKGLLKPVAVPTVKQEADRQLYRMRHRQARNRSKVKTQIKSFLLMHGIDEPAGLKSWSRNSVDQLRTLSLRKTLRLSLDELLEDLDYYSLRVKTLDRSLKEHLDKGLLARHISILKTHPGIGVVVSCQFAVELFHYRDFGSTRELSKYLGLSPRIHQSGDRSVCGGINKVSNSRIRSNLVQAAWQWIRVDIEAKKTYLRLLNNCGGIKQKAIIAMARKLSGHLWTMLVNDEPYDQNK

SEQ ID NO: 149760 - protein, 364 aa, unidentified
MKRKVYVGMDVHKETIQIAYLTSNSKEILKEQQIKHNEVQIKKFIKKLKTEWNEIHCCYEAGVTGYPLYRYLKSLGVNCILVAPGKIPRQSTNKIKTDKRDAIKLARLMRSGELESIHVPSEEDEAVRDYLRSRDSLRLDLGRNRQRLMKFLLRKDIKYSTTKYWTVSHYKWLNNLHFNNEILQETFNDYYSRVRVQEENLKAMDKKIQEIAESEPYREKVGILRCFRGVDYLTAMFLLCEVNDFKRFKTAGSFMSFLGLVPGEYSSGSKRKQTGITKTGSPRLRRILTEAAWQHRFPGTGSKIITARRSGQPALVVALAEKASLRLHKKFRNLQLRGKTPQVMITAVSRELSGFLWAAMNLVA

SEQ ID NO: 149761 - protein, 499 aa, unidentified
MPSRRKGKNTMTTAGKQPSKKEGFDPQRSALKRKARGSCCFEGKGKRRKSKLSVINPDAAGVDVGAQAHYVAVPEDRAAVSVRSFGTCTAQLDEIVQWLKDCGIKTVAMESTGVYWIPLFQKLEEAGFEVLLVDARQAKHVPGRKSDVQDCRWMQQLHSYGLLRAAFRPEDGICRLRTFQRHRKNLVECAGMWIQRMEKALNEMNLQLHHVLSDITGQSGLAILDAIVAGERDPSKLASLAHYRVKKSQAQIEAALRGDYRPELLFVLRQSLENYRQMQQQILQCDLSVEKQLAAMSHQSKPSEHLESKAQAEDSAHCRPGKEKPKNGLESTLAAHLKRILGVDLTTLPGLNVLASLTLLSEIGTNMTKWRNYKAFVSWLGLSPNNKISGQRVLSSRTRKVVNRAATTLRLAAMLVGKTDTALGSFYRRKRAQLGAPKAITATARKLACLIYHLIKNGQAYKEPDLRTYELKYQEQILQSLRKRAKSMGFDLVELPKAA

SEQ ID NO: 149762 - protein, 359 aa, unidentified
MPLLADLVDAVVGVDTHRDSHEVEIALPTGTPIATCSISNDSSGYAELLAWILDQAPGPRLVVSIEGTRSYGLGLTRAVTAAGLPVVECEQPNRKARRGRGKSDPIDAHLAVLAALRLETDRLPTPRADGDREALRILLGTRQELTTTGTAQTNRLRALLLGGDDTDRRLARGVLTEATLTGLARRRLPGDASREQAVRHAEIRRLAVALRDGGRALKANRAQLQAVVNEIAPGLTDRRGIGPVTAAQAIVSFSHPGRCRSDAAFATLAGTSPLPASSGQTVRHRLNRGGDRALNSAIHTIALTRMRSCPRTQTYIARRTAEGKTTREIRRCLKRYISRELYRTLTACMQPAVATAQSH

SEQ ID NO: 149763 - protein, 440 aa, unidentified
MKKVTIFETVHENAAGIDIGAKQIFVSVDGTEVVSFNTFTEDYNKCLEYLQEKNVTRVAMEATGVYWMSLYSMLESCGLKVSLVNPKETKQVKGRKTDVKDCRWIQKLFSAGILRESFVPEGKYMELRLLVRERLDMIEMGGVYINKMQKCLELMNIKLKEVISQIHGVSGIKMIKAIIEGFRHGAHLLSLCDNRIIKNKSEEVLKALSGNYNATYIFMLKNNLLMWEKHQENILQIDKEIEKLLQELSQTKKEIEVRGKTKRVRHHAPKVENLHGMLVQLYGADISSISGINDYTLLRLIGETGIEMERFPTVKHFVSWCGLSPKSHQSGKMNKRIRGTSCNKAGQIFKESAQSLLNSKHTAIGCFIRRLKAKKDTAIAIKAGARKLAIAYYNALTKGTEYVEEGTKKYQQQIEQREVAAIHRLAKKHNLQVIEKQLAA

SEQ ID NO: 149764 - protein, 344 aa, unidentified
MKKSNVIGIDLAKNVLQVCKVSKHGELVLNKAVNPSRLKELLANSTPSIVAMEGSGSCHYWGRLAESFGHEVRVINPKKVKAFLQGQKTDANDALAIAMAATQFGVRFSQVKSEEQQTLQTLETSRKFLDRELTALNNHIRAYLYEYGITMRRGRKSLRETIALVLDDVNARLPECLKNTLLLLWERYQLTLAQLKETSQAKASLVKQVEPCKRLLALESVGEVCAAMLYANIGDGKEFKNGRAASACIGLTPKQHSSGGKTHMMGINKKGGNKELRTALFQGALSVISRLPSEPRTVKQAWLIELVQRVGVKRACVALANKTVRTAWALLATGESYKPVLLSR

SEQ ID NO: 149765 - protein, 409 aa, unidentified
MLFAGDDWAEDHHDVELMDSSGRTLARARVPEGAAGMARLHAMIGEHLGQDGEAEEVRIGIETDRGLWVAALAAAGYTVYGINPLQAARYRERHGVSGAKSDTADAHMLADMVRTDSHQLRPVAGDSARAQAVKVVARTHKTLIWERTRHVQRLRHQLRDYFPAALEAFEDLDAADTLELLARAPDPASAARLSTAQISAALKRARRRHIAAKAAAIRAALRSPQLGQPPAVTAACAAAVRALAAVITTLNEQIKIIEGQVDAHFSQHPDAEIIVSQPGLGPILGARVLAEFGDDPHRYTSGKARKNYAATSPVTRQSGKRKTVMARYVHNDRLRDALDGQAFAALTASPGARAYYDRQRARGLGHRAALRQLANRLVGILHGCLKTRTLYDEQTAWPQHASQEIKTAA

SEQ ID NO: 149766 - protein, 424 aa, unidentified
MNLTQNDRLKQVTSDTLIVGVDVGSQTHFCRAFDWRGFELSRRVFKFSNTGMGFLTFLRWTEELMNKTEMKKVIVGCEPTGCYWLTFQKFLQDHAIQLVTVNPFTVNRSMELDDNSPEKSDLKDPKTIALLVKDGRYSTSYLPSGVYAEIREASVCRDQIMKQHVRLSNQIQGWLQKFFPEYFECYAEWDSTSGLMLLKEAPLPQDILKIGAGGINQIWRDAKVRAAGIKRAQTLVEAAQNSVGLEAGEAARLEIWVLVNDYILKAEQLKRLDEYLEEKVKEVPNVEKLLAIKGVGMSTVIGFIAEVGDIGRFTDPKQIQRLAGLEIVKKSSGKKKGQPRISKRGRRKLRRTMYESARVLMIWNPVFQDVFLYYRNRTKNPLEGMQAKIAVACKAIRIFYVVLQTGCDFDEEKFRKDIIRPEAA

SEQ ID NO: 149767 - protein, 344 aa, unidentified
MSKLDTGGIEVSAKELVVALRREEALEPLRSFANTAEGHQALIRYLQRAGRGVRVCLEATGLYGLDLALALSAQAGIEVMVANPRAVRHFATALMQRSKNDQLDAGVLEQFAARMPFQPWTRPSSAALALHALARRLGQLVEMQTAEKNRQHAAELSQAIPAAIRRDLARSLRAQERAIERLTREARKVIAPEPDLAERFALLDSVPGIAETSAIQILAELAVLAPDLEARQWVAYAGLDPREYSSGSSVQKKTRISKAGNKHLRRALYMPALVAVQHDPHLRAFYQHLLERGKFKMQALVAVMRKLLHAFHGMFKTHQPYDGAKLFQRQPTGPREVPFATTAA

SEQ ID NO: 149768 - protein, 313 aa, unidentified
MMIIGCDYHPGFQQIAWLDTETGELRERRLAHREEAEAFYRDLGAHGVSVRVGMEASGQARWFERLISELRFELWIGDAAEIRTKRVRKQKTDRQDAQLILRLLLEDRFPRIWVPSGENRDLRQLLWHRHRMVQARTRIMNQLQAVALNEGLRCKKKLWREAGREQLESFRLAPWASRRRRDLLELLDRLTPTIAELTQAVEREAENCPEAQRLRTHPGVGALTALAFVLIIGRAERFQCGKQIASYLGLVPLEDSSGQRRRLGHITKQGNSLLRFLLVEAAQVTVRSDPKWRSKYFHLAMRRGRKIAKVAMA

SEQ ID NO: 149769 - protein, 343 aa, unidentified
MTQYVGLDVSMKETKLHVLDEAGKRVWRGRCASEPAAIAAAIRRYAPAAVRVGLETGPLTTWLWTELTAEGLPMVCLDARHAKKALDMKVNKTDANDAEGLAHLVRAGWYREVRVKGRGAMLTKALLGARSHLLSISLSLENQIRGLLKTFGRIVPKGAGGLFEKNVRALITDDAEIAAVIMPLVQARQMTRSKCAALDSRLIAAVRGNATHRMLMTMPGIGPITAVAYVAALERPDTFKRSRAVGAWLGLTPRRFQSGEIDYDGHISRRGDGQLRALLYEAAAVLLTRVRMESGLRRWGLMLRKRLGFKRAATALARKMAVILHAMWKSDTPFNPTLGAATS

SEQ ID NO: 149770 - protein, 348 aa, unidentified
MRFYSCTHEFTCGVDLHGRTMYVCVLDRAGAVVLHRNLPCRREDFVAAIAPFRADLVVACECIFSWYWLADLCDDEHIPFVLGHALGMRIIHGTKSKTDKIDSLKIAQLLRSGHFPLAYVYPRALRATRDLLRRRLFFVRRRAELLAHLKMSESQYNLEPVKVRLDRTANRAGFPARFPKGSARISMACDCRLLAELDQLIASLERVLVRTAKLDDLQSFYRLRSIHGIGEILAMTILYEIPDFDRFSTVQEFCSYARLVAPRSESSGKLKGSRARKQGNVHLKWAFSEAAVLLLRQNPPAQKLHSRLVQRFGKAKALSVLAHKIGRAVFYMQKRQVPFDARRFYEAA

SEQ ID NO: 149771 - protein, 430 aa, unidentified
MEEVDEQELHVERVAALDLGKAALEACVRVPHQTKPGRRLQEVRGYATTTSALLQLADWLHSWGVTRVVMESTSSYWKGPFWLLEAEGFECWLVNAREVKNVPGRPKTDKADAVWLCKVAERGMCRPSLVHPRPIRQLRDLTRYRRSLIQDRTREMQRVEKLLEDAGIKLSSVASDIFGVSGRAMLEALIAGQRDPKTLAQLAQRRLRAKRAALEEALSGFFTDHHGAILRMMLDNIDRHNEQIAALDRKVEEAIAPFAVQVAQLDAITGVGATAAQELIAEVGVDMGRFPSAAHLVSWAKFCPQIHESAGKRKPKGRGKGNPWLAGTLGNIVATAARTDSFLGARYRRIAKRRGKQKAIVATGNSVLVIVYHLLTDPSASFIDLGGDHYQSRVHHDRRARSLASQLQAVTGQRIVIRDGKAVIVEPDAA

SEQ ID NO: 149772 - protein, 341 aa, unidentified
MPIVTIGIDLAKNVFAIHGVDDAGKPVLIKPRVSRDQLVTLIAQLPPCLIGMEACSGAHHWARVFQQYGHTVKLMAPKLVAPYRMSGKRGKNDAADAAAICEAVTRPSMRFVPLKDEHQQATLCLHRTRQGFVEERTAAYNRMRGLLSGFGVVLPQSPERLRREIAPHLDALPGWTRRCISDLLDHVSNIEDRLAEYDRAIGEIARTDERSKRLMKLRGIGPTTASALLASIGAGHDFKNGRQLAAWIGLTPSQYSSGGKERLGTITKTGDAYLRNLLVLGARSVMASLGDKQDRFSRWVRNLIERRGYWRTAVAIAAKNARLAWATLKYGETFKHEPATA

SEQ ID NO: 149773 - protein, 411 aa, unidentified
MVFVPCMFKAASIGSTDVCRIRGTTSGARSHADATAGPQPIVPRLATPVTKHGSSRRRVLTPEQPTEPSLRSKRSHSQERVHAVTDTPPTPDLPVTPKPFAGIDVSKDFLDSACSDSPNTWRVANDPAGIASLVRQFQSLGPACIVIESTGGLERPLLSALLEADLPVALVNPAKVRHLAKGLSIMAKTDAIDARVLALFAQKATPRLLEKRPQIQAELDALVTCRRQLVKTRTEQANRQLTTFSKSAKKALQAVLNILDKQIAKLDKQIRDHIDSNDQWKHLDALIQSAPGAGNVLASTLVANLPELGHTESRQLTALVGVAPFNHDSGRFKGQRTIQGGRVDVRSVLYMATLAAMRCNPVIKNFGDRLIQAGKKRKVAIVACMRKFLILLNTMVRENLTWPQLNVVKNT

SEQ ID NO: 149774 - protein, 422 aa, unidentified
MSYCPVAGIDVSKQFSDMCILSPDNKIFAQEKIYHDETSINRANALLQKAERLFFSKPIIVMESTSHYHLILFQFFSEHGYDVIVVNPLQSNSMKDFSIRKRKTDRVDAFKLAMMYRTKTLRPSQIPQTATRALRQLCRHRAELLNDVSSYKNRLTALLDQTFPGYDKVFSDVGGVTSCAVLVRFPTPTILLMEEESELVEVIAAASKSSYSFAKKKAGLLISAAQKAQTLGIHSCADETLIVCTIQMLRTLSESVLQIETAIDDLLAQIKEMRNNVSFLQSIPGIGSHSAALLLGEIGDISLFKKPKQLAAYFGLDPTERQSGSFRGTKNKLSKRGSPHARAALHMGVVNSICKRGKDSAANPVLLSYYEKKCKNKPAKVAQAASMHKLVFIVFAVLRDQKPFELKTPEQHAVEQGFVKAA

SEQ ID NO: 149775 - protein, 449 aa, unidentified
MSVVSVTSAVPEEIVDAGHERMLERVCAIDVGKQSAKVCTRLPGGSAGRRVSRVWDVVATTRAVTELADQLVRVRVEKVTIESTSDYWRIWFYLLEARGLDVRLVNARDVKNVPGRPKTDKLDAVWLAKLTERGMLRPSFVPPPAVRVLRDYTRLRVDLTHDRTRHWQRLEKLLEDSLIKVSSVVSTLDGVSVRAMLEALIAGERDPRVLAGLARARLRSKHTALVEALTGRFDDHHGALARILLDQIDSLDATIDQLTGRIDQHIATIPAAQKPGGGGDGGGSTAAVPAVTRLDEIPGVGLIGAQTILAEVGFDMSQFPTPQHLAAWAKLVPRTIQSGTRHRTGKTGKGNPYLKGALGNAAATAARTNTFLGERYRRLVKRRGKLKALVAIARSILIIVWHLLADPTTRFRDLGPDHHTNRIDKDKRTRTHIRQLEALGYTVTLNPAA

SEQ ID NO: 149776 - protein, 367 aa, unidentified
MKKVSTVVAKQSRNISRQRLTIGLDLGDRNSWYCMLDESGQVQLEQRVGTTAKALQEVFGPMPQSRIALEIGTHSPWISRLLSELGHEVIVANARKVRLIGESRKKDDRLDAQTLARLARIDPELLYPVRHRSAQAQADLMMIRARAGLVRARTSLVNTARGLAKSYGERLRGCNVRNMDPEKAEGLSPELQRALAPLLAGIEELSQRIVEYNDRIEELAQAHYPQVALLKQIKGVGTLIALTFLLTLEDPHRFGKSRDVGCYLGLQPGRRNSGESEPQLHISKEGDPYLRTLLVQGAQHILGPFGIDCDLRRWGLKLAERGGRNAKKRAIVATARKLAVLLHHLWVSGEVYEPLHNSNRAKLAAAA

SEQ ID NO: 149777 - protein, 345 aa, unidentified
MLNQPLFAALDVSLETTTICIMSFDGTITTEAVVATEPESIAICLGDDLTRIERIGLEAGPLSEWLVRELSVLGIVVTLLETRQVRAALSAMIIKTDRKDARGMAHLLRTGWFRPVHVKSLSAREQRAMLAARSMLVARLKDIENSVRGLLRGFGLRLPRALRGRWEAGVREAIEGHPTLVQIFEPLLMAREALREQLIILDKRVRDAARADRVCRRLMSAPGVGAIVAMTFRAAVDQPDRFRSSKQVGACFGLTPRKYQSGETDRSGAISRAGDASVRVALFEAAHVIMTRVAAWSKLKAWAMNVAKRRGAKRAKVALARKLGVVLHRMWVDESEFRFGNPAQA

SEQ ID NO: 149778 - protein, 449 aa, unidentified
MGNCAGVDWAAEKHDVLVADETGKELLAATFTHDERGLRALCRALVRLKVALVAIERPDGLLVERLLDAGLRVLALHPNQVAAARARFRVSGGKSDRFDAFVLCELARTDSHRFRVLEPDSDETKALRALTRAREDLVHARVALSNQLRAELERFWPGPIGLFTKLDSPISLAFLERYPSPADARGLGEGRLAAFLARQHYSGRQKPAALLAKLGRAPEGRVGDAELAARRALVRAMVAAIKPLVAEIGQLDRQIAATLREHPDGEIFLSLFKDPHSVICAAELLSEIGDCRARYPTRDALAGDAGQAAVAIESGKRKAASFRWGCNKRLRAAFCTLADSTRHWHPWAQDRYAAARARGHEHPRALRTLGRAWCRILWQCWQERTPYDPARHRALQQHIAVTIPTPSGPRPDLAATQRMAGDAVTKMAARRAEREALDGKPTSAIALGG

SEQ ID NO: 149779 - protein, 318 aa, unidentified
MTNDTIGVDISKDHLDTHRFSDGESHRFANDRAGHKAFMTWLGKRASPQSLAGLRVVYEPTGPYHRAFERRLADAGLDLVKVNPRQARRFAEATGRLAKTDRLDAAMLARMGALLGLEARAVRSPLLNDLKDLHIAREALVKMRTAVKNRARTQTLALLKRQNGEQLRQIERQMAAIDQEILALIKADPDLARRFAILVSIPGVAAITACALLIDMPELGAIENAQTASLAGLAPIARQSGRWTGRAFIRGGRANVRQALYMPALVATRFNPDLKRKYDQLIATGKPAKVAITAIMRKLIVLANALLRDNRMWQEIRA

SEQ ID NO: 149780 - protein, 343 aa, unidentified
MKLSRVGVDLAKNVYQLHGVDRHGKTILKRRLRRGQWLQALLDKTDPGCEIGMEACAGAHHWARELQSRGYTVRLIAPQFVKPYVKSNKNDANDAEAICEAMSRPHMRFVTVKSVEQQDIQATHRVRTELKDHRNAKANQIRGLVAEYGLVAPQTLLALRRAIPEWLEDAENGLTDYFRSVLHGLWDDLLTLEDRFKELDKEIEKLARSNEVTKRLQQLRGVGPIVATALVATVGNGEQFNNGRQMAASLGLTPRQSSSGDKRRLLGISKRGDVYMRTQLIHGARAVVSQAKHRDDPLSRWATDIAKRRHPNVAAVALANKTARMAWAMLRNETDYDPNLAVG

SEQ ID NO: 149781 - protein, 387 aa, unidentified
MAAVVIGVDPAKRSNTIEVIDAEENVLLTMRFENSREDYRRTLALVKRWPTRKWAVEGATGVGLNLAQRLVSDGERVVDVPSKLSTRVRAIDTGHGRKNDPTDAHAVAVVGLRTAGLREVTVDDEAVVMRLLSQRRRDLVRSRTQAVNRLHQSLMQLIPAGARKKLTVDKAKTLLATVRPRDAAGKARRQLAADLIDDVAVLDRKLDAVDKRIAEAVKASDTTLTDIVGVGPVTAAAILGEVGDVARFTTADQFASYTGTAPLEVSSGDVVRHRLSRAGNRRLNNALHVVALSNKRYDPHGKTYYERKLAAGKGKKGSLRCLKRRLSDVVFRTLVEDRARANPGGQMGATLTASAVDQIPKANTSDKPQPGFTAEATPTRRPAKAAS

SEQ ID NO: 149782 - protein, 402 aa, unidentified
MDGTHYATIGMDVSDRKTQVCVMAEDGKSPKIAMETVVPTTKEGLAKFLSTQDRPAPVAFETGMHCRWTNEAAEGPGFKVYAANPCRLRMTTESKTKNGVDDARMPARLALSDPGLLHPVKLRGPGRRRMPNLHEMRNLLVKRRTGVIVQMRAIARAMGFRIPKCPTGRFHRLDTSPWPREFRDIAWPTMKNLGQPAVTTKTYERQIRGLAQTPAFKAQVGRPMEIRYVGLHVATGFVAVTGGDVDRFGKPRDVGPWLGLTPRQDQSGDIDRQCHITKAGSPSMRRLPVESAQMILRDGPADTGLKARGRRMCARGAKMAKRRAATAVARAPAVLMVAMPKRPDAPYVPPSGRCEKEPPAMRATAWAADSGGNPGRRFREQEAEPRRRPQPNPETPERPVRG

SEQ ID NO: 149783 - protein, 361 aa, unidentified
MEQFIGCDAHKKYSVFVAVNERGEASQQVRVGHDREQYRRYLAQLPPGSQIALEASGHYYWIVDEMEAAGHHPRLTHPLEAKKRMGKTGKKTDKVDASGLGILLRNGTLPEVWIPPAGLRDQRESLRLRMFLVQQRTRLKNRIQAALARYNIQITGVTDVFGVEGRLRLGARLGELPPHTRHSVELELVTMDFMELQIEAVEKQLDELMLVTAEADLLKTLPYVGRILSMVMTLEIGRVERFASAAHLASYAGLVPRVHSSGGHTRLGQICGDVNQYLKWAFIEAGNLVVIHQKHLAGQHVVRLYQRVKRKRNFQKAVVAVARHLAEAAYWILKKQEVYREPKPKVPAKDQAVQTLSSTHG

SEQ ID NO: 149784 - protein, 408 aa, unidentified
MRLFVGDDWAEDHHDVEVMDAAGRVLAKARLPEGVAGMTRLHELTGQYLGEDAGEAEVLVGIETDRGPWVAALVAAGYTVCAVNPLQASRYRERHGVSGAKSDRGDSHMLADMVRTDSHQLRAVAGDSADAEGIKVLARTHKTLIWERTRHLQRLRHQLREYFPAALEAFEDLDAPDALELLGKAPEPARAARLTRAQVSAALKRARRHHIADKTDAILAALRGEHLGQPPALTAAYATTVRSLIAVITTLNEQVRTLQGQVEDHFGRHPDAEIYRSQPGMGAILGARVLAEFGDDPHRYADAKARKNYAATSPITRASGKKKIVLARFIHNDRLVDALMAQAFSALKASPGARAFYDGLRAQGIEHNDALRRLANRLVGILHGCLKTRTLYDEATAWSHREENKPAA

SEQ ID NO: 149785 - protein, 319 aa, unidentified
MLSYCGVDVSKDRLDVAVLPQGQSWSVTNDAAGWITLIERLREFSIEAIGLEASGGYERGVARALCAAGMSVRHVNPYKLRQFARASGVLAKNDPLDARMIASFVAVMPTRSAQRAPEADQLAEILAVRRQLSAEKIAAENASRLLEDAMLQRLSRRRIARLAADIALLDKRLIEIVTANPAFDQRYRLLTSVPGVGVVLACTLIALLPELGQLGRREIAALVGVAPYAFDSGKLKGARCIWGGRAPVRGVLYMAAMSASNWNPVFKAFHDRLRATGKKPKVVIVAVMRKMLTILNAMVRDDLVWADRCSGRHSVPAAQ

SEQ ID NO: 149786 - protein, 382 aa, unidentified
MQPINTVNPTIYLAIELSASTWLIAARLPGSEKPHLHRIEGGDTAALFALISSLRARVARRLDAAIGVVCCFEAGRDGFWLHRLLTAHGIANYVLEPTSILINRRARRAKTDRLDAIGMLRVLAAYLRGDRQSCSMVRVPTPEEEDAKRIHRERENLVQERLRIENRIEALLFTQGIRKRPSLRSWERDLANLRTGDGREMPRHLRAELNRLRRRLVTILELIREVEAERDELVVTTPQDRTSRKIVALCRIRGLGENFAAVLTREVFYRSFGNRRQIASYVGITPMPYQSGGMDRDRRISRAGNPRARTTMIQLAWLWLRYQPGSELAEWFRKRVGTLAGRTRRIAIVALARKLLIALWRYVETGVVPAGVEIRTETVVAA

SEQ ID NO: 149787 - protein, 349 aa, unidentified
MTEAYDGRQVVGMDLHRRRSVLVRMTEDGRKLETVRITNSPAALRAVIARAGEHPRVVVEATYGWYWAVDVLEEAGAEVHLAHPLGVKAYSYRRVKNDERDAADLADLLRMGRLPEAWIAPPEIRELREISRYRHQLVKARTSVKDQVHGVLAKLGVPVTCTDIFGVRGSTWLDGLDLPQPYAGKVASLRQLAGGLTAEIGLLEQVLGDLLDGHEGYAAIQQLPGIGPVLAAVIVAEIGDIRRFPGPGQLGSWAGLTPRHYESDTKVIRGHVTKQGSRMLRWAVTEAIQRQPAGSRPRQVKDAIIARRGKEAKNIAKIAAARELLTLVFYGMRDGRVRRLAAPRPRPAA

SEQ ID NO: 149788 - protein, 366 aa, unidentified
MSEITRALIARVGVDLAKRVIQVHAVDAAGRRMVVRSLKREQFLAWCAQLNPSCLVAMEACSSAHHWARKLRALGLDARLIPAHFVSPYRMEGRSGKNDATDAAAICEAASRPSMRFVPVKTCEQQGVMSLHRVREGLKEERTACINRIRGLLAEFGLVFAQSPKALRAELADVIEDAGNELSAMARLVLQRAFDHWRELDEHLHWCDTQVGQHVRSSSAAQRAARITGIGELSASALTAGVGDFRQFNSGHQFGAWLGLVPSQNSSGGKTSLGRITKRGDDYLRTLMIQGAKAAVMSAGKRTDPTSLWLAQLTARLGWQKACVAMANKNARILWAVMTREQGFDPEHVSQKPRAKKPAELLATAA

SEQ ID NO: 149789 - protein, 386 aa, unidentified
MTVVINPVITPLLFDALTNDDHVAGLLAAVMRRGLKSVCETHFDPAETDMNYCGIDLHSNNCVVIVSDESDRIVYQKRLPNELTQIAAALEPYRHELAGVVIESTYNWYWLVDGLMDSGYQVHLAHPAAIRKYDGLKHSGDFADAAYLAQLLRLGLLPEGYVYPREERGARDLARKRMQLVRYRTAQILSIEGIMMRQTGSRISGEAVKRLTADQVNEFAFMPDVTLAVEANRAVSQALAQQIEVLEKRLMERVSLRAEYRLLKTVPGIGDTLATTIMLETGSIGRFAHVGNFSSYCRCVDSLRESNGKKKGEGNTRNGNKYLAWAFVEAANFAMRYCPQARSFYDRKKSRTNRVLAIKALAHKLARACYHMLRDQKPFDVHLCFG

SEQ ID NO: 149790 - protein, 324 aa, unidentified
MAKRKLDVALLDEAGKVKSKVLANDPIGFAALQTWLKERGADTASTHVCMESTGVYSDGCATALADAGWKVSVVNPALPKDFGKSELKRNKTDAIDAGLLARYCSKMDPPAWQPPPLEYRKLRSLVERRQALQDMHQQEANRLESSLEAAARVSISEHLTWLEARIAEMERDIDDHIDGNKETLGKDAELLASIPGLGRTTAAKVLGLLGDLRRFESGKALAAFIGVTPRRHESGDSVRGRSSISRAGHTSVRHALFMPTLVATRYNPTIKAFRDRLVAAGKPKKAAVLASMHKLVHIMYAVVRKGINFDPRFGQLALDVQDGI

SEQ ID NO: 149791 - protein, 316 aa, unidentified
MNKKNHTEVNIGIDTSQTQLDIYVRPCGDYFSVENTPKGAREAACRLRSYQPTRVLIEATGRLEMLFVCAAHKARLPVVVCNAGQVRQFAKASGRLAKTDKLDAQDIAHFGEALEPALTELKPEKLRQISDLIAVRSQCLDMSTMQKHRLHRMPQSVHKPIQRILKAVQTEVERIDKQLDKLVEAIPQWRDQRDLLMSAKGVGKVVAYTLMSELPELGKLNRKEIAALAGVAPMNRDSGSYRGKRRIYGGRRKVRTVLYVSMLSAIQYDPKIKALYERLVAAGKPKKVAIVACMRKQLTILNTMMKNGTHWDEKLA

SEQ ID NO: 149792 - protein, 372 aa, unidentified
MSSIIFIGMDVHKETFNLCALNGTTGEILSETRCAANAKNVHKFALRIQDQSEEEVSFKCGYEAGCLGYALYHSLTALGLECDILAPSTMLRSSKNKVIKNDKLDARMIAQNLINGTYKSVHVPDTQDVETKEYIRMVQSAKKSLKKIKQGIKALVLRHGYFYDGKPNWSLAYVKWLKKLKMPDVLREALDEYLLQYENLIERITRFEARIVEFSHNERYAEPVARLRTFKGIETASAMTIQVEISDFNRFATAKAFCAYLGLTPSEQSSGGKVNLGSISKQGNSVVRSTLIECARALLKGQIGFKSQKLKARQSGQPSSVIDYADRAIERLQRRYSRLLYSGKIKNKAVTAIARELACFIWGMSTGNIQSV

SEQ ID NO: 149793 - protein, 319 aa, unidentified
MNKKETIEFDQHVERGCGIDVHKETVVATISGKGIKTETRTYSTYTNSLKEMKQWLKENTISDVAMESTGIYWKPVYNIIEDSFEVLLVNARHIKNVPGHKTDKRDSRWICKLLLSGLLKGSFIPPKEIRQLRDLVRLKRKYIQQTSADKNRLIKTLEDANIKLSSVVTDVFGVSATKIINDLLNKENISAEELLCHCHGKIKKSKEEIKEALTGNITAHHKFILKAIQRAISDKENLVAEIQQEINKKVEPYKEHIELLDTIPGIDVEGAVGMISEIGINMEVFPNEQHLASWAGLSPGNNESAGKKKAVESLMEING

SEQ ID NO: 149794 - protein, 356 aa, unidentified
MTVTIVEEARSVTEVARPITGGVDTHADTHVAAALDPVGGLLGVREFPATAAGYAGLLDWLGGFGTVCLVGIEGTGSYGAGLARYVTAAGVRVVEVDRSDRQDRRRQGKSDPLDAVSAARAAQSGRARGAPKGRDGAVEAIRTLMVARRSAAGERTRTINQARALVLTGPDDLRTRFARHTPAALITGLAALRPRTGDVTGHATRIALRELGRRAQFLDGQLERLDELIVPLVAARAPGLLAVYGVGPRTAALLLIAAGDHPGRLRSEAAWAHLCGAAPIPASSGKVTRHRLNPGGDRQANHALWRIVFTRLGSDPATRAYAERRTAEGKSKAEIIRCLKRYVAREVYPHLRPAGG

SEQ ID NO: 149795 - protein, 459 aa, unidentified
MYKNKEVMMRSYRSYQAKRSSVTDKTIIGIDPGKSRHQAVIIDANGIPIGKTFSFSVNYKGYHEKLWNEINKQIPDHSTSNLLFAVEVSCNLWQTISNYLRKEGYEVVLVSPMCTKQSRVMLNNDFSKTDPKDALLIALNTQRGYYNEMRIYPERSNNMHALSIAYNKLRKDHSSYRGRLRAAIELIFPEFLEVITLGTQTSFYLLGKYLFPAEYLNMNIDFESLQIGRISRSKYGMKHLHKLQDLAKYTIGISSNNELYDRTIVLTWLEGMKEIGFRMKVILDQLIKSASTMKEFSILTDLMGISSETASLFLAEIRDISAFDNYKEIEKFAGYNLRLTQSGKHIGSRRISHIGNCRLRWVLYRMTEETMKYIPEVRIKYLKRQLKKQIYRKNLVACIPQLLKLVFSLLKENRFYEYNEERVAEMEKLDIQYQVVKAERAAKHRKHNPIIKEELRKTA

SEQ ID NO: 149796 - protein, 333 aa, unidentified
MVEGTEGSHHKEGSTKMSKDTTLCAGIATGKHKLDVAIDGGAERVQVDNNSEGHRSLLAWLRQREVERIGIEASGGYEQAVVSSLRADGFVVIIFQPVQVRAYARFVLQHAKNDTIDAALIARCTAAATDIREPPDARLALLAQHLTMIEQLTEDVGQLKTRREACREERIREFWKREVDRLKVLQNSELKQLVAAIRAHRDLSHRLDLIASVDGVGLRTAVAILVRMPEIGRVTREQAAAIAGLAPYDDDSGLRRGSRHIKGGRQRLRQSLYAAALPAVFYWNPQLKAFYRRLLAAGKPHTLALVACARKLLIFVNTVVARGTSWRSSAVTT

SEQ ID NO: 149797 - protein, 462 aa, unidentified
MSHQRSTPRQTKDQPRKIKPLAELTIVQPHAAGLDIGSRETWACVPASSSPEPVRAFGPFTPDLHRLADWLSACGVDTVAMESTGVYWIPIFEVLEARGLKVFLVNSWHLKHVPGRKSDVLDCQWIQQLHSLGLLRGSFRPDAEMCAVRSVLRHRATLIEHRSPHILHMQKALVQMNLQLPAVISDVMGETGQAIIRAIVAGERDPLKLARLRFPGCKSSEDEIAMALTGTWQSEHLFALKQNLQLVDYYTQMLRECDTELECRFAAIKPRWDASSPLPKLPKAKSGSRSKNQPTYHARAELYRITGVDLVAVQGISASLAQTIISEVGTDMSRFPTEKHFCSWLGLAPHHEISGGKVLRNHTLKTDNRAGQAFRQAAACVIRSHSAFGAFYRRKRAQLGPMQAQVATAHKIARTVYHLLKYKTPYQDIGATAYQQKAQEREVAALRKKAAQLGYALTTTST

SEQ ID NO: 149798 - protein, 353 aa, unidentified
MAHLEPARVTVGVDTHKHLHVAAARDQLGRRLGVTIAPATTAGYGELLAWARGLGEVQAWGVEGTGSYGAGLVRFLAAAGQRVLEVNRPDRATRRRRGKSDPVDADAAARTVQAGEATGIPKAQNGTVEMTRALRVARQTAVKARTQAINAIKALLVNAPAELREQLDGLPTTRLVRQAATLDPGQVATPTAACMLAVRSLAQRYQHLGAEIQLLTRELDRLTLQHAPALRALLGIGPEVAAELLVCAGDNPARLGSEAAFAALCGTSPVEASSGKTRRHRLNRGGDRHANAALHRIVIVRLRWHQPTRDYLARRTAQGKTKKEILRCLKRYVAREVFAVLCQLAQQDQPTAA

SEQ ID NO: 149799 - protein, 342 aa, unidentified
MEKVTIIGVDLAKNAFQLHGAAADGSVVFRKKLSRLQFCKFMAGHPTCIVAMEACGSSHYWSREMARLGHRPKLIAPGYVKPFIKRQKNDAADAEAIVEAAQRPTMRFVETKSEEQQSRAIVFRTREQLVNQRTELVNALRAHLYEFGHVAPQGIGHLRRLAEVVEDENTELPDLVREICGDLLGQIDQLTGRLDALKKTIDVLSRKGETSQRLQTMPGVGPIAALAIETFAPPMETFKCGRDFAAWLGLVPLQKSTGGKQRLGKTSKMGQRDIRRLLIVGAMAVVQWASRKGASEGSWLARMMAKKPRMLVAIALANKMARGIWAMLTKQEDYRNPAMVPA

SEQ ID NO: 149800 - protein, 391 aa, unidentified
MIFVGIDVAKDKHDCFILNSEGTVLADVFTIANNRIGFETLLSRIQSCSQGESKIKVGLEATGHYSYNLLGFLLDSGLATYVINPLHTNLYRKSLSLRRTKTDRIDARTIAMMLMSDVDLKSYSNTAYHNEELKSLTRYRFDKVKERAKLKSSVARLVNILFPELEKLVSSLHIAVVYALLSNYPGASYIANANTEELAETLCTASKGRYTKSKTAKIQVAAGVSIGSKMPAKSMELKHTIALIRELDKEISEVESAIDKITSQMDSPIFTIPGIGRHMGAMILAEVGNFSNFASADKLLAYAGLSPSTYQSGQLQNCYAHMEKRGSRYLRYALFNAAKYVCLWCPTFSAYLEKKRSEGKHYNVAISHAAKKLVRLIFAMQRSGKAFLADY

SEQ ID NO: 149801 - protein, 323 aa, unidentified
MTKHITICAGIDTGKRKLDVAMEGSREQLQVENTSEGHVVLLAWLWQHCVKRVGIEASGGYEQPVVAELRRKRFIVVVFQPAQVRAYAKFHSQRAKNDKIDAALIADCTAAVRKIHAAPDARLLPFAEQLTMIDQIGEDIARLKNRIESCRNARIKELWKEDIARLEKREKVELKALTASIRKHPDLAKRLDLINSIDGIGPPTAVAILVRMPEIGQITREQAAALAGLAPYDDDSGEQVGARHIDGGRQRLRRALYTAALAASFRWNSQLISLYQRLIASGKEHKRALVACARKMLVFANTIVARGTPWQDRPPEKAVLTTG

SEQ ID NO: 149802 - protein, 406 aa, unidentified
MTSVFCGIDWATDHHDIALLDEAGTLLDKLRIDDTPVGLSQLLQLLAQHGDSPDHPIPVAIETSHGLLVACLRATGRPIYVINPLTAARYRDRYALSRKKSDHLDAKVLANILRTDPAEHRPLPADSHLAQAITVLARAQQDAVWDRVQTGNRLRSHLRQYFPGVLTVFKHFREGLASPVTRTLLATAPTPTQAAQLTRPQLRAILKRAGRQREITGEVERLHTLLREPQMQQPPLVEQAMGTKTLALLRQFDAACTSADELEAATTAAFTTHPDAEIITSFPGLGALTGARILAELGDDHTRFPTARALKAYAGSAPITRSSGRKTTVLARHIKNQRLASAGYIWAFAALTASPGARAHYDRRRAVEERHVAAQRNLFNRLLGCLHHCLTRRTPYDERIAFPDTA

SEQ ID NO: 149803 - protein, 316 aa, unidentified
MKNNAQVVVGIDVSKAVLDVAALPSGEVLQFTNDTVGIDELGKKLKSEPADLVVMEATGGYETAVATALVAMGLRVAVVNPRQIRDFAKATGRLAKSDRIDAQVIAAFGQAIEPEIVRLPDEDAREMEALLVRRRQLVAMRVQEINRLGLMQGAMRKNIKAHIDWLEKQIDRLDIDLTAGLRNSPAWRAKDDLLRSFKGVGPTTSSTLLVSLPELGQLDRRAIAALVGLAPFNRDSGVMRGRRSIYGGRSHVRTMLYMAATTAIRCNPVIRPFYEQLRSRGKPHKVAMVACMRKMLTILNAMLRQSTPWTPEITPP

SEQ ID NO: 149804 - protein, 343 aa, unidentified
MDQYIGLDVSLKDTAISIRQDGKRIWRGKCPSDPKLLAQMIRKHAPHARRVVFETGPLSTWFYHALTAEGVPAICIEARHAQKVLDETLNKTDANDADGLAQLAEAGFYKAVRVKAFDSMLTRTLVAARNQLLRISTQLSNQIRGLMKTFGLIVPKGTGRVFDGNVRELLDGNDGLARIILPLLEAWRDIRKRGADLDHQLLAAARQSQETKLLMTIPGIGAVTAVSYIAAIEDPENFKTSRSVGAWLGLTTRRYQSGEVDYDGHISRRGDNHLRGLLYEAATVILTRTGARNESTLKNWGLKLRQRLGFKRAAVAVARKLAVIMHSMLKTGEVFNGLAGATA

SEQ ID NO: 149805 - protein, 377 aa, unidentified
MKRIKFVGLDVHAETISVAVAEQGGEIRSLGVIPNREESIRKLVKKLGPVEELRFCYEAGPTGYALYWQLTRMGAKCEVVAPTLVPVKAGDRVKTDRRDALKLARNYRAGELTAVWVPDAAHEALRDLVRAREAAKKDELRARHRLSKFLLRHGQRPPMGVKPWTMKYLEWVKRDVHFEQLAQEVTLLDYLHEVEHGAARIGRLDGAITEAVKSAPPQMRAVIDALQALRGIAQVSAVTVVAELGELSRFARAKQLMAYGGIVASEDSSGERTRRGNITKTGNAHLRRVVVEAAWAYRHRPSVGATLRKRQEKVSEEVKEIAWKAQQRLHERYRKLLAKGKNKGVVVTAVGRELLGFIWAIGIQVETAQKESLQRAA

SEQ ID NO: 149806 - protein, 331 aa, unidentified
MNQAGIDVSNETLDAQRRCGAQLAQRRFANTAAGHRQAIAWILQGATSARVCLEATGIYHLQLALALHRAPGIELMVLNPRASRRFAEAQMRRAKTDRVDAAMLLQYLQRMPFTAWAAPAEYRLELQSLAHRLAQLKKEQVRERSRLHAAQRAGAHTALAQRDIRAHLRYLQRHAAGIQAQALALMQQPERLAEDLYLLDSAPGVADRSAMLVLAELGVLADGLRPEQWVAHAGLDPRPEESGTSLSAPRRLSKQGNARLRAALFYPAMSAVCCDPNVRAFYEALLARGKRKIQAIIAVMRKLLHAFWGMLHHRKPWDGNLFYRMPMTKVA

SEQ ID NO: 149807 - protein, 409 aa, unidentified
MDLIHPRCAGLDVHKKTVVACVRVAEGTTVRHDVRSFATTTRGLRELGEWLRAEGCTHAVLEATGIYWKPVWAVLATEELTLILAHASAVRNIPGRKSDVKDAEWLADLLAHGLVRASFVPPAPQQALRELTRTRKQPVREAAAHAQRIHKLLESANLKLASVLPRVVGASGRAIQAGLAAGETDPERLADRLHPRSQGKRAAVVEALGGRLAPHQRFLLGQHLQMIAHVEASIAAIEAEITAALGTFRGAVDRLVTIPGVSVTTAAIIVAEIGTDMSRVPTAGHLRSWAGLCPRLDESAGKHGSRRTRKGAPWLKPVLVQSAWVAVRAPNSYSRALFHRLCRRRGKKQAIVAVAAALLTAIYAMLQRDQHYRDLGPQHLTDADRRRTAQRLANQLRRLGYDVTLHEAA

SEQ ID NO: 149808 - protein, 451 aa, unidentified
MLIQGSSDPPRLVRVGIDAAIVAQHEVCIRATDAQGRVRTDRFRVQPTLAGLRSLSNRLAEVPGVVAVAEPTSMSWLALSVALRDAGCDLSLLGARHAARLRGAITGKSKSDVIDADVLARAGEVFDLRPMRPVEPAQLALRRACVRRGTAVIDGNRYLRRLISLARWAFPDVWNGFRGSLPTAVAVLQRWPHLVQLAAARRSILTGVVALHTRGVPDVPERVEMIRSSAAAWASFWHGHLDLDALAFDVTEHLTGMAEASARTQRATAQAQRYWMQLFGDDELLMSVPGMGPITACVVRGFLADGSAFASAKAAASYVGLNPSTWSSGTVSQPSRAITKEGPAVLRLAFFQAANAARRQDPQLAGFYHRLMTQQGHCHTQACVAVARKLVERTWTVLTRGEPYQLRDPDGQPISHIGAKKMIKEECTVPDHVRARARAHSAATFRAKLTR

SEQ ID NO: 149809 - protein, 423 aa, unidentified
MTVVHPTCCGVDVHKTFFVATLITTEGIQPKYQKRRFSTFNSQILGFKSWLLENNCRDVCMESTGKYWIPVFNLLEDSIRVTIANPKWVKTIKGNKDDAKDSKWIGDLFRIGLVPGSFIPSKDVRILREYMRYRFKLVSCKSSEKNRYQNVFTVCNVALDAVVSDMFGKSAASITDYIVNTDTFDPEYCVSLLQRSLKKKADEVVESIEGFQMTNPQKERAKLVREHYDYLVSQIAKLDAMIDELAKPFEPAISLLCTVPGIRRDSAITVLSEIGTDMSQFDSSKRLCRWAGLTPGNNESAGKKKSVRITRAGVYLKPALVEIAHAAVKSKITPYYRLKYEQIAKRRGKKRAVIAIARMILTAIFHMLTTGEVWSPVDLNQIDMPSELREKEVRKSLHRAVNLLVAHGIVSKDAIQIPLAIPA

SEQ ID NO: 149810 - protein, 384 aa, unidentified
MNKHSMIFIGLDTHKEFHEVAYCEEQRGASPVHYGRIPSSKVSVKKLLRQFESKYPGATLHVVYEAGPCGYWIYRLITSLGHCCYVVAPSLIPKKPGEHIKTDRRDAIKLVRSLKSEDLTPVYVPEPEDEAIRDLSRAREAAMKDLKEAKYQLKALLLRNNIRYEGTANWSKKHLRWLTELILPHPAQQIVLQEQLQTIDERMRRLERLDNELTHHVHQWRYYPVVKAIQAMRGVRLLVAVGVVAELGDLHRFDHPRKLMAYLGLVPGEQSSGGKRRLGAITKSGNGRARRLLIEGAHSYRYPANISTELQLRQEGLPKDIVDIAWKAQLRLCKRYQRMIKKGKHYNLIITAIAREMAAYIWAIAKEVVLTPVNPKLRLSRVPA

SEQ ID NO: 149811 - protein, 356 aa, unidentified
MMKVTASFENQTVYVGLDIHKRSWNAAVYLGDQYIRNIHQPPSPQALSHYLQNNYPKANYVCAYECGKFGYWIQRQFNELGMKCLVVNPADIPSTHKDEVYKNDPRDARGIGQALSSGQLKTIYVPDQEQEADRHLVRQRKKIWRDLVRCKNRLKGFLDYTGTAVPPQYDNATWSRNFINWLNKIEFAHSSNRITLNYLIAEMELLRKELLSISNAVRKLMRSKKYNKLYYLLRSVTGIGPLTAASLIVEIGDMKRFKNFYHLNSFIGLMPMEHSSAEREMKGRITLRKHRQLRSDLVECAWTAKRTDPALALYYSEQIKKGKNGKAAIVKVARKLLSRIRYVWLSGEAYQRAVVK

SEQ ID NO: 149812 - protein, 418 aa, unidentified
MKRIKAKGRQVVNEKTLIVTVDIGKTMNMGYCRCPDKTEVKPFEFQNGYQGFEKFLDIIATTKQAKRLEHVVVGFESTGAYAEPLIHFLRTREIQIVQVNPLHTRKLKELQGNSPNKTDTKDPKVIADIIELGHALTVVVPEGAAADLRRLTNARERILQRRTVLLNQLQNIVFICFPEFLEIMKGVQTQTAYYLLRRYPRPLDILEHGLDALVCEFRKISRGRLGTDRAKSLHEAAKTSVGIQEGSLGLMMDLQECLASIEQCTHFIKQIEKEMFRCLQEIPYSALLLSMRGIGKVTVAGLIGEVGDFRNFKNISDVLKYAGLNFYEISSGQRKGNRHITKRGRALMRKLLFLAAVRTVRKGGIMHDHYQRYLQNGMKKVKALVAVSRKLLGIMLALVRDSSLYEEDHSQAGYRKAA

SEQ ID NO: 149813 - protein, 347 aa, unidentified
MSEAYDGQQVVGMDLHRRRSVLVRMTADGRKLETVRITNSPAELRRVIARAGKRPRVVLEATYGWYWAADTLAAAGAQVHLAHPLGVKGFAYRRVKNDEKDAADLADLLRMGRLPEAWIAPVEIRELRELTRYRIKVVRLRTSCKDQVHAVLAKLGIEVTCSDIFGVSGSAWLDGLELGQPYAGKVASLRQLIGGLNTEITMLSEVIADLLAGHAGYQVIQRLPGIGPVLAAVIIAEIGDVTRFRTAAQLASWAGLTPKHRESDTSVTRGHVTKQGSRLLRWALIEAIQRARAGSWPGDVKDAIIARRGRRARNIAKVAAARRLLTLVYYGLRDGQIRCLPEPAVAA

SEQ ID NO: 149814 - protein, 415 aa, unidentified
MLKIVYPICCGLDVHRDFVYACIATTENGITTYKSHRFSTFTKGLRELLSWLLQNNCCDVCMESTGKYWIPIYNILESDCKIVLAHPKYVKAIRGKKTDKKDAKWIADIFKHDLVSGSFIPPADIRQLRDLVRYNVKLTNYTTGEKNRAQNCLTVSNLKLDSVFSDVFGKASSNIIGRILANPSEKISDVSVFRTKGMKATDEEVLAAVDGEMCAEQAEKLRIIRSHMDGLELCKANLMSLILSTAEKYIPEVDLVSTVPGLTAYSAIAVIGELGVDMSVFPTSKHLCSWAGLAPQNDQSAGKKKTTRISRAGVYIKPLLVQCALAAIKSKNKHPEIVNRYNALRKRRGHKKAVIAIARMLLTAIYNILKKREPYNPELYRNSDTTPEHRNVTIEEAVFILQRQGYIISSPTSVG

SEQ ID NO: 149815 - protein, 425 aa, unidentified
MRFFGIDVHLEFCEVAVAEGGKVSQAGRIASTPEAIREFARGLGGEDQVVLDASGSVMAIARILRESNVGRVVVSNAAQTRAISHARVKSDRFDAAMLARLLSAGMLSEVWVPDEATLALRRRVARRSALVRARTRIKNEVHAVVMRCLLGRPPVSDLFGRKGRVWLAEQQLPEEEAETVAGCLRQIDFLDSEIALLDQKIAEQALTWPGLCRLLTIPGVDIGTAAAVIAAVGDISRFQTPGQLVAYLGLDPKVRQSGSEPARYGHISKRGNAQARSMLVEAAWIAIRSPGPLRAFGERVRARRGAQVAAVAVARKLVVLCWHLLSKDEDYAFARPSLTRQKTRRLELTAGASRRPRRHDGATLSPTAAQRAAERELQTQAELAYRRLVDDWRSTASPKGGAGATPGRASQKPIKGKAARQATSP

SEQ ID NO: 149816 - protein, 347 aa, unidentified
MLAGIDTHKDTLAVAVIDDAGRPVVVTEVANTEAGFDTLEQLLTTHGVTRVGIEGSGNYGRGAAVHLVLTGPAEVVEVPPSLTSRERSGRPGQGKTDPVDAVAIARITAREPALPPVRLAVGQAADLRALADYRAQLVAERTALANRTHTELHGLLPGYQSQIPRLTAPTFIAAAKDLLADQTSVRALLTRRRLERLAELTAEIREVADLITAAVAEVDTGLTDLYGLGPVGAATILGEVADVRRYRSRHAFAAANGTAPLPASSGRTTRHRLNRSGNRTLNRVLYTMAITQIRADTEGRAYYLRKRAEGKTGREALRCLKRRLSDVVYKTLHDDLAAGRAPAAIGR

SEQ ID NO: 149817 - protein, 341 aa, unidentified
MDTMIGVDLAKSVYQIHGASMTGAVRFRKKLTRRQFEKFMLEHVPAVVVMEACGGAHYWSRVMEGLGHEVKLIAPQYVRPFVKRQKNDAADAEAIVIAAQRPEMRFVEPKTEEQQARAALFRSRERLVRQRTELINALRGVLYEHGHSFPTGARNIGRIQVLLCEPENGLHPLVLEECFDLLEQIAEKTERIDVRIKKASILSAQAETTRRLQTIPGVGPLTALAVETFAPAMESFKSGRDFAAWLGIVPRQHSSGGKQRLGKISKAGQGDIRRLLIMGAMTRLTPRGRCGIIPGSWLARMLERKPKMLVAIALANKMARMIWAMLTKHEDYRELAQMAAA

SEQ ID NO: 149818 - protein, 329 aa, unidentified
MDSSSPFPIVGIDVSKATLAVCYQVNDQVKHLEVSNSKAGFQQLVKTCGAHCQFVLEATGTYNLALAYYLHEQGGQVAVLNPLVIKRFIQMHLSKGKSDRKDAQWLLSYGQQQSLKAWQPDEKVLVECRQLEQVTEQLLKQKTMVSNALEALQQQPIVSKAALKRLQQTLKALTQQVEAVEAELLTLLEQRFAAEMALLCSIPGIGRKTAGMLLLFAGGFTRLDNYRQLIAMAGLSPREHTSGISIRGKVRITKMGGVLIRGKLFMCSFSAKKTNVACAALFDRLVAKGKNKKLALIAVCNKLLKQAFAIIKSGIPYQADFCSKLAPTA

SEQ ID NO: 149819 - protein, 425 aa, unidentified
MNFKQNQKINQVTENTLVVGIDIAKRTHYASFVDDRGRLLQKAFSVQQSQEGFQYLYQRILSSMNELGKTEVIVGIEPTGHYWLNLAYFLDDVGIPLVMTNPMHVKRSKELDDNLPTKNDRKDSVVIARLVKDGRFSYPRLLKGTEAELRAGATFRANLTEELGAIKNKMIRWLDRYFPEYPKVFPSFGKTALAALECTPLPCDLIEKQPEEVLDLYRKIEGLKSPQRPKVVQLIEEASQSIGITEGHQMARLEIAAYVQRFRELETDIEDLSRQLTERIQTSVEYEVLTSVPGLGDATIVDLLSEIGSFSHYQHPRQLIKLAGLTLRENSSGQHKGQKRISKRGRRRLRALLFRVMMPMVRHNPAFKLLHEYYTTRAQNPLRKKQSIVVLCGKLLKILHTISTKHVVFDAERMMKDIPCLEEAR

SEQ ID NO: 149820 - protein, 307 aa, unidentified
MTQDIIGVDIAKDWIDSHTLSDGRSRRIPCRPAALARFATEARGALVVLEASGGYERPLMEALAEAGTAFARVNPRQAREFARATGRLAKTDRVDAAMLAEMGRALRLKPSPLRAPERVRLADLVARRDDLSDMRRREANRIKQARDAWIRNDIKTMLRVIERRLARIEAEISAQIEAHETLARAAARLRSMPGIGPILAASLVARLPELGQLDRRAIASLAGLAPHACDSGVFRGKRRVWGGRAEVRHSLYLAGFIASRYDPRLRAFRTRLEAAGKPAKVAIVAVARKLLTILNAMFRDDNDYRSA

SEQ ID NO: 149821 - protein, 370 aa, unidentified
MQDIIFVGVDVHKATVSVAVAESGRGGEVRAIGTFANNSGEITKLAERLGKGGRHLHFCYEAGPCGYGLHRQLTGLGHDCIVVAPSLIPMKAGDRVKTDRRDAVMLAKLHRAGELTAVWVPDDAHEAMRDLVRARATARRVLSKARQHIQGFLLRHGRVYSGKKGWTRMYRRWLAQVRFDHPAQQIVLQDYINAVVDAEERVKRLTGQIEALVPQWSMAPVVQAFQAMRGVALITAVTVAAEVGDFSRFSNPRQLMAYLGLVPSEHSSGSKVRRGGITKAGSILARTALVEGAWTYRLQARVSNTLKGRIESLPKPVRDIAWKAQVRLCARYRRLSAAGKLRTVVTTAIAREMVGFLWAIAREVQVSAKA

SEQ ID NO: 149822 - protein, 375 aa, unidentified
MNNTIFVGLDVHKETIAIAYAKGNNRGVESLGIIMNEYMAITKLVKKMESKGATLLFCYEAGPCGYGLQRQISSLGHTCVVVAPGLVPSKPGDRIKTDRRDAEKLARHFRNGDLTPVWVPDIDHEAMQDLVRGRQSAKEDLHRNRQRLLKFLLRLGVRSPKGARNWGSKHKGWLQGLKLDNETQQIVLTEHLNAIRECEGRVERFEKEIQVQSSEGETHQAIIAALQGLRGIALVSAATIIAEVGDLTRFDKPQQLMSYAGLIPSEDSSGGTTKRGSITKCGNSHLRRVIVEAAWHYRHRPAVGVNLGKRQNHVSEEVKQISWKAQHRLNLKYRRMVGRGKTKQKAITAVGRELLGFIWAIGQEVKYGKQSDGVA

SEQ ID NO: 149823 - protein, 373 aa, unidentified
MKDYSEVFVGMDVSKSSIAVGLADGGGAAEARFLGEIEANEAAVTKLVRRLSGKHDKLTFCYEAGPTGYGLYRLIGELGHACRVVAPSLIPRKPGDRVKTNRRDALSLARLLRAGELTAVWTPDERHEAMRDLVRARSTAAFDLRIKRQQTGAFLLRLGRVYPGKKTWGGAHRKWLASQAFAHLEQRIAFEEQVAAMDEAKARIARLEKAIEEAVPDWSLAPMVTALMAMRGIDLVAATAILAEVGDLGRFRTPRELMAWLGLVPSESSTGDRVRRFGITKAGNGRARKTLIESAWRHRFPARIGQAKLARVEAAPPAARRIAWKAQMRLTARYRALMRKGKTKSVAVTAVARELAGFIWAIHRALEQEQAVA

SEQ ID NO: 149824 - protein, 408 aa, unidentified
MKVFVGDDWAEAHHDVHLMGETGEKLAAKRLPEGLDGIAGLHALIAEHTTDPTEVIVGIETERGLWVQALIAAEYQVYAINPLSVSRYRDRHNVAGAKSDPGDAKLLADLVRTDRHNHRPVAGDTDQADGLKVLARAHQNLIWDRTRHTNRLRNDLREFFPAALFAFESLADRDTIAVLTKAPHPDQARRLSIAQIRSALRKGGRQRNLDRRASEIQQALRTPQLDAPPAVTTAFAATTKALVEVIAGLNTSIAELETELAAHFDEHPDADIYLSLPGLGVVLGARVLAEFGDDPDRYDNAKSRRNYAGTSPLTIASGKKHAVLARHVRNRRLYDAIDQWAFCAITASPGCREFYDQHRAAGDLHHQALRALGNRLVGYLHGCLRTRTHYDEHTAWAHRQPAQTQTAA

SEQ ID NO: 149825 - protein, 401 aa, unidentified
MKRLSGGIDVGSESHHIIILDEEDNFLYNQKVAHKLNEFTENIKLFRKIEKKEGGKLSFALEGKNGYSNPLDRILLDQGFTLYNVDNFKLKRFREAFAGEWRDDERDSLMLSKMLKLKDYINSPREKVFIKIEKPSLVTESLKLLSRHQQTLIDEKVRLVNRLGKKLLEVCPQILELGKLKNKKIIAVLAKYPDFSKYKRITLCSLLKIKGIGKKGAFFLLKRLNNIEYMPGLTDIYKTIILSYAQRILELQKEISDINKKLDEIGEKSKEVNHLKTIPGVATKLASRFIGEIGNIDRFPSEKQLAIYCGIACVDNNSGKVTKARAVYKANKICKQTLITMAGCSIRSIHQCKAYYLKKRTEGKSHNHTLRCLARQLIKVIYRMLTEDREYIVKKELKKVA

SEQ ID NO: 149826 - protein, 412 aa, unidentified
MTHKSARAVCNFSRMVITIFIVGIDIAKRSHVVRVIDSEGQTVYKPFPIRNNCSGCNSLLERLRKLTNHKSDFIIAMESTAHYWLALYTRLRKEGYQVVVLNPIQTDAMRELLMQEAKTDEIDTLVIAETIRFGRYKASSVPQEKLLALRELCRNRFYLIDMGSDLKRKITALLDQVFPEFETQFDSIFCKSAVAVLKQYPTPEKLSRAQTGKLTEVLQTASNGRFGEWKARQLKELARDSFGIPDCEGAYSALLLLHLDQLQSLQDGAAALERRIGEIFSQFDSVLTSITGIGPVLGAVILSEIRDISCFASADKLAAYAGLNPKVKQSGETKSSAVHMSKRGSPYLRRAIWMAGAIAVQYDPMFKAYYEKKAAEGLRYMNIIGHVSKKMTAVIFAVMRDNKIYEPVLPII

SEQ ID NO: 149827 - protein, 337 aa, unidentified
MKKNYQIFVGIDVSKSKLDYCVVNDPFSTKHHFGIISNNEKGIKQLITGLKNKYISSEVIFCLENTGVYSMPICYWAQHFKIDYWVVPALEIKKAKGISRGKNDKADAKDIASYCITHLHLVKLTALPQNDFIELKLLLAEREKLVKAIGMFKMTKEGHNFLPKEVLKITLAHNKKTTEGLQKQLYALEKIIQALIDNNPTFKEQQQLLITVPGVGKQTSVNLISATYAFTAFKNWRKFACYCGVAPFEYTSGSSIKGKTKLSHLANKKLKALLNMAALSAKKTDTEMKAYFEKKVSEGKNKMLVLNSIRCKIISRAFAVIQRNTPFVNVNKFKTAA

SEQ ID NO: 149828 - protein, 422 aa, unidentified
MSYCPVAGIDVSKKFSDMCILSPDNKIFAQEKIYHDETSINRANALLQKAERLFFSKPVIVMESTSHYHLILFQFFSEHGYDVIVVNPLQSNSMKDFSIRKRKTDRVDAFKLAMMYRTKTLRPSQIPQTATRALRQLCRHRAELLNDVSSYKSRLTALLDQTFPGYDKVFSDVGGVTSCAVLVRFPTPTILLVEEESELVEVIAAASKSGYSFAKKKARLLISAAQKAQTLGIHSCADETLIVCTIQMLRTLSESVLQIETAIDNLLAQIKGMRNNVSLLQSIPGIGSHSAALLLGEIGDISLFKKPKQLAAYFGLDPTERQSGSFRGTKNKLSKRGSSYARAALHMGIVNSICKRGKDSAANPVLLSYYEKKCKNKPAKVAQAASMHKLVFIIFAVLRDQKPFELKTPEQHAVEQGFVKAA

SEQ ID NO: 149829 - protein, 341 aa, unidentified
MEKVTTIGLDIAKQVFQVHGVNGAGAIVCRRRLRRDDVVGFFKALPPCLIGIEACATGHHWARVLMALGHEARLMPASYVKPYVKRQKNDATDAEAICEAVTRPTMRFVPVKSEEQQSVLMLHRVRELLIRQRTMLVNALRGHLAEFGVVTRQGIAGVGKLIALVEDGDHDVIPPLARSALLLLVGQLREVHEKVSEMDRQIHAWHRSNELSRRLETIPGIGPITASAIAATVTDASLFKSGRQLAAWIGLVPRQNSSGGKDRLGRISKQGDPYLRRLLVVGAHAVLRFSRNGKTAPTRWAAELLAKKPYNIVAVALANKMARIVWALMVTGRRFEAAPAL

SEQ ID NO: 149830 - protein, 351 aa, unidentified
MKITRVGVDLAKNVFQVHGVNQAGRGVFKRRLRRANWLRVLTQRLEPGCEIGMEACGGSHHWARELRSRGFDVKLVAPQFVKPFVKSLKNDVNDAEAICEAISRAHMRFVPIKTVQQQDIQALHRVRDTVMRHRKAKANQIRGLVAEYGLVTPKTMAALRRTVPDWLEDADNGLSAIFRELLFGLWQELQQLDDRLETLDQQLTAISDTHPDARRLKQLRGIGPLTSTALVAQFGDGRHFKRGRQAAASVGITPRHHGTGGKNLIYGITKRGDRTLLIHGARAVVSQAKRRDDRLSRWVTALAAKTHTNVAAVALANKTVRVAWAMLPLRHRLRARVHARLTTEIVSTEIN

SEQ ID NO: 149831 - protein, 341 aa, unidentified
MTMYYVGLDVHKKTVSYCMKDAGGTVIGEGVLLANRPALGRWAEGLKSAWTGGMEATLFTGWIYDFLQPYASVLRVAHPLRLRAITASKKKNDRIDAATLADLLRCNLFPDCYMAPARIRELRRVLRYRNLLVREATRMKNKTSGLLMEVGASYDKKRLHGAKYFSTLLGNLSDVPGSVIDLLKMTRVNLQVFQAAQKRLLEALVVHPDLKERVQRLQSISGVGEVMALTWALEIGEPGRFASIDEAASYCGLCSALVVSAGKSKRGPLSKQRNAHLQSMLIEAAKLAPRWNAQLAAVHRRELDRGANPNWATLAVARKLVAYLLAVDKSGRAFQPREVAA

SEQ ID NO: 149832 - protein, 378 aa, unidentified
MKGATHSTKYSTNSRLYLAFELGEKQWKLAFTVSLGQKPWKRTIEARDMVGLDRAIHMAKKRLGLPEECAVLSCYEAGRDGFWLHRYLVSQGIENVVVDSASIEVNRRSKQIKTDRLDVGKLVRMLVRYASGEKQVWSVVHVPSVVVEDQRQLHRALATLKVDRTRYINRIKGLLASQGVHLAVQADFLSQLAGVRLWDGAGLPPGLRARLEQEYTGLQFVEQHIQALEAERRELLRTSQEPYVAQVRQLLRLRGIGPQSAWQFVTEFFSWREFRNRRQVGALAGLAPTPYRSGDEEHELGISKAGPSAIRGMAIEIAWGWLRFQPESELSRWYWQRFGQGSKRVRKMGIVALARKLLIAFWHYLEDGVIPAGAQLKA

SEQ ID NO: 149833 - protein, 365 aa, unidentified
MTSVSHSAPIHLGLDVHRDTISVGVLGPGEEVPAVDKIPHDEPSVRRLVGRLGDPRRLRACYEAGPTGFELARLLHSMDVRCEVIAPSLIPKAPGDRVKTDRRDCRRLARLHRAGELVAIRIPSPTEEAVRDLCRTRGDMVEDRMRARHRLSKFLLRHGQVWRAGKAWTLAHERWLLTQRFTEPALQTTYDHYRAVLAGRDAQLAAIEADLAVWFDRAPFAEQVARLAAYRGVTRLGALHLAAEVGDWRRFARASAFMGFCGLVPSEYSSGPVTRRGHITKAGNLHLRTQLVESAWAYQHRPSIGAQLARRQQGLDPQVVARAWTAQLRLCGRFRRLRAHKPSPNIVATAIARELAGFLWAEMTA

SEQ ID NO: 149834 - protein, 345 aa, unidentified
MEIHTIGIDLGKTVFHLVGLNVRGEVVVRKKCSRDQLLRFTANLRVTLIGMEACGGAHFLARALREQGHDARLMPAKYVKPYVKTNKNDYIDAEAIAEAVGRARMRFVPIKTDDQLDLQSLHRVRERWVSGRTAVINQMRGLLLERGITVRKGRRHIEETLPGILEDADNKLSGALRVLLTQLRLEMQYLQRQVEECDKLILRIADELEDCRRIQAVPGIGPMTATATIAAIGNGSAFKKGRGFAAWLGVVPGEHSTGGKQTLTDTSRRGNRYLRKLFVQGAHAVLQQRMKQSNGLNTWLAQLTSRKRIQVAAVALANKMARMVWAVLSKGEAYRPPLLMEAAAV

SEQ ID NO: 149835 - protein, 350 aa, unidentified
MKTILAIDLGKRNSVFCRLNTSSLKPEYFTARTDPQKFHDIFLELDIESSIVLFEVGTQAGWLSDMLRAMRIEFKVANVNHSAWKWTNNPNKSDKTDAHRLAMMYHHGFFPEVYIPEKLVRQKRSLIYYRQKIVSRMTQVKNSIRALMTTVAIDLPAGKNCWTKKYRKQLQQLALPFDSIDDPCDLWRGQLHTELQQLGILQTCLDKTTAKLDELNKQKQSIKLLETIPGVGPRTAEAVVAIIDDPNRFKSCRQLSNYAGFTPRRYQYGQMERSGRISKRGNPLLRALLVQASWVALRFDWAKYIYKRVCRGSAKRRKIAIIAVARHLLMRCWAMLRDNKPWCYKIDKAA

SEQ ID NO: 149836 - protein, 346 aa, unidentified
MKNYAGLDVSLKEISICIVDQDGKVVAHGTTPADPEGVAGWLKNRSLKPVSIVHESGQLSTWLQRGLVRLELPAVCIDARKAHKSLSARLNKSDASDAEGLAQLARTGWFTPVHVRSQESDRLRALVGARERLIRLRKDLEGHVRGVLKTFGIRMTAVSQGQQRQGFRDQLAAAGESDPVLSAIGDGFIAAHNTLCKATADLDRALKAMSRSHPVARRLMTIPGVGPIVSLSFVAFVDDPRRFGRTSDVGAFLGLTPRRHQSGEMDWSGRVSKCGDTAMRSLLFESATSIIRQVKRFSALKSWAVRLAARRGFRKAAVATARKIAVLMLTLWKSETDYKWTKETTA

SEQ ID NO: 149837 - protein, 423 aa, unidentified
MTSMTLDPPLTNPLPPGSELVAGVDTHKNTHHVAILDLVGRPVADREFRADGRGYAQIVAFLHAHGDVVRIGVEGTGSYGAGLARALTTAGLTVIEVARQDRQARRRRGKSDPLDAHQAAAAVLSGTDTAIPKSGDGAVESMRILLAERRSTAKARAQVMNQIHALLITAPELVRQAFRALSGPRLVNTLAKTRPGTITSPDPAVVARQTLRRFAVRHLTMQAEIDLIEQQLEMLVRQVNPTLLSLSGVGPVTAATLLVAAGDNPERLGTRASFAALAGVAPIPASSGQRTRHRLSRGGNRHANAALHRIVLLRMRHREPRTMAYFERRRSEQLTDRDIMRCLKRHVANEIYAALLNPATDNPVGRELRARRQAKGIPISVLAATLGVPYQRLRRLEIGTRADPELEARATATLEQISPPLAA

SEQ ID NO: 149838 - protein, 370 aa, unidentified
MDELIKFFVGLDVHKESIAVAVADAGRAPARLIGSIAHDVGKLIKLLARYGEPGAVQVVYEAGPTGYGLQRALARRGYRCQVIAPSLIPKRAGDRVKTDRRDSLRLAELARAGELRAVWIPDPADEAIRDLARSREDAVNARTQVRQQLKGFLLRHEVRYAGKTSWSKSYYRWLATLNFGLSGAQTAFTEYWQAVSAADERVARLTEALVRSIEGWRFEPVVSALLALRGIDQISAIGLVAEIGDIGRFAHPRQLMGYLGLVPSESSSGEQVARGSITKTGNAHARRLLTEAAWNYRFQARIGHRAQRRAEDLPQAIRDLAWKAQLRLTGRFARLRARGVQINKVCVAVARELAGFVWAIASAQAKLAQS

SEQ ID NO: 149839 - protein, 410 aa, unidentified
MRFIGIDVHRDFCEVCVLDRVSGEEQRRRLATRPAELEAFADELNQDDVIALETSSPATAVARLLEPYAGRVLVIDPRRLVRAGARAKTDRLDARTLARLLAAGVLTEIWTPDEQTRALRRLVSRRAAVVRARTRLKNEVHAVLARTLCPRPPVSDAFGKAGRRWLATLELPEEEQLTVRGCLRQIDALEADVAELEVALAKRLGGSRELRRLLSVPGVNLVVAATFLAYVGDIRRFPSPKHLVGYLGLDPRVSQSGNTAARGGRISKQGAAEVRHVLSEAAWRGARVPGPLRGFYERIRARRGAQIAITATARKLAVLFWHLLTREQDYAYAMPSQVQRKRRALELLAGAPPHHGRAGADGPCRPAASLREREREIAVAAERAYQRLIADWQAKAPSRAGAGAATGERL

SEQ ID NO: 149840 - protein, 375 aa, unidentified
MLWNQKVSNEQRAIEQLIARAHKGADEARWAIDLTSPMALMLITVLLGAEQSVVYVPGHVVNTMTGAFRGEGKTDAKDARVIAETARMRSDLSEVAMPDELVVELAQLSGYRTDVMADWVRGVNRLRSLLGSIFPGLEAAFDHSNRTPLILVAHLCTPAEIRAAGIKGVTAYLGDNGGWPTAIAKTAATAVAAAKQQPLALPGEAGTAALVKRLAGKLLDLDHEIKDIDKTITERFRDHPYAHIIESLPGFGPGLGAEFVVVTGGDLASFATAGRLASYAGLVPVPRDSGRISGNLHRPKRYNRRLRRVFYMAALSSIRGDGPSRQFYDRKRGERLIHSQALLALARRLVDVLWALLRDGRELTPDKPTPATAAA

SEQ ID NO: 149841 - protein, 344 aa, unidentified
MEIRSIGIDLGKTSFHLIALGNRSQIVIRKKFSRSQLLAYTANLPSALIGMEAGVGSHFLGRGLREQGHEVRLIPAQFVRPFVKSNKNDYRDAEAIAEAVERENMRFVAIKTEDQLDLQALHRVRDRLVGRRTSVINQIRAFLLERGMSFRKGPASLRRQLPEILENADEQLSPRMRCLLDFLWQEWKGLQSQIESLNQDLEQIASSDPACVRLQQIPGVGPLIATAVVSAIGNGAAFRKGREFSAWLGLVPRQWSTGGKTKLLGISKRGNPYLRKMFIHGARAAVLRLKREGSSLGKWMGQLETRTARNAVIVATANKLARISWAVLASGNNYHPLYKAAFSN

SEQ ID NO: 149842 - protein, 330 aa, unidentified
MQFIGNDVSKQTLDLAWLNADTSRWSKPFKVTNDPTGWSRLQPWAEQHTGAERDQICFVLEATGVYHLPVASFLSLAGFKVLVCNPGRSADYARSQNRLNKSDHLDARSLQRYGSGLEKVHWFQPDSPVINELKSLLGLLDQLDKDVLRWQNRLEKASFQYPDSSVQAAIKRQLRNLRREQDRTQQTIDQLIRSDAELRRNHQFMCSIKGVGCKTSQALLPLVQGGRFESARQLAAFLGLTPCHKSSGTSLKSPGRLSGRGDARLRAKLYMPAVSAATSGGELSVFYQSLLARGKTPKQAITAVMRKLVHLCYGVVKNQTPYRENYSCLT

SEQ ID NO: 149843 - protein, 398 aa, unidentified
MYQQFCGIDVSKDSFDITLLESSGEVKLQEKLTMDRDGFNALLEHLSSYSKEKLLVSMEATGIYHLPLLSFLLENSFKSVVINPILIKSFIGSTTLRKTKNDKKDATSIALFSLKSYQSLHLATTDAIENIKPLIRERETLSKEIARLKTEIKAILTQLFPELSKNTNIFTRSILNLLLKAPSRKAIRNLKKQKIQKILDNTSGNKVRISAQEILSLAKNSIAISDKYLEKVLTSKIRRLIAIQDELSFLDEELQNSLEDTDINDDIEILQSIPGIGSVTSKNFMVEVSSIKKFKSVKQLCAFIGIDPSVKQSGTSINYRGKISKRGNANLRRTIWQMAIGAIRSCDKFNAYFTKKREEGKKFKQAVIAVANKLLKTIFVLLKNKTKFDENLALGVSK

SEQ ID NO: 149844 - protein, 401 aa, unidentified
MECIFGIDISKHTANVAVLIDRQVIKEFKLSSNREGFERLEDELNSFREPKIIFESTGIYSRPWRAFFHRNGWLYTEINPLKAKKVMDSFRIVKTDSVDAVGLAEAMSRNNFAPSFQEKPEYTELRDLHRIYQEHNDDVVRNKNRLHHELQLTFPEIEHFLSRTEGALYWHIVQIFPHPYLVLQHSSTELTSIILKATSKNMGPKRAQHLAEHLLELAKSSGPAVDIDSYALKRVTELAYEVERIDRSKKSLIEEMAKIGTNLPEVAILTTIPGIALKSALCIIAELGDIRRFHSANAINAYIGIDLTTYQSGDYTAEQRIRKRGNPLARKVLYRTVINIISASSYRPTRFNDFYQMKKQSSQSKGTKKIAVAVMSRLNRMIFHLVLHNEVYEPTVSQPRQ

SEQ ID NO: 149845 - protein, 345 aa, unidentified
MNNVSILSIDLAKNVFQLLGIDEHGKPCFSKRVSRVKLHKIILNLPPCEVVMEACSSSHYWGRACLNSGHQVNLIPAQHVTPFVRGNKNDKNDCLAIYEASRRPSIRFVPVKSEQQQAVLCLHRIRERLLGTRTACINQTRSLLLEFGFHIPKAYSVFKKHIHELLSQDVQPVIRLMLLEVQQELESYDKKIKLMDTLFQQTNTHNTSAEIMQSIPGIGPIIASAFSASIDKGQAFKSAKDFSVWLGLTPRQYASGETNRLGTITKRGDKYLRKQLIHGARTVVNHAHKKDDDLNLWVTAIKQRRGVNKAAVAMAHRLARLMWILLQKNEYYRPIRSCNQVQGNA

SEQ ID NO: 149846 - protein, 337 aa, unidentified
MSAQVIGLDIAKNVIQVHGVNAAGAAVLTKRLKRSQVLEFFANLSPCLIAIEACAGSHDWARRLAGFGHRIKLIPAQYVKPFVRRSKTDARDAAAICEAARQPDMPTVAVNTKEQQAVQMLHRIRQRLMQERTALINQTRGLLGEYGIVFPIHVSAFKEGTRRLLADESDTLPALARDLLLDLCTELTALEERIDTVDRRVRRLAKEDERCARLQEIPGIGPVTATALIAAVGDARRYRSARHMAASFGLTPHEHSSGGKQKLLGISKRGDRYIRWLLVQGARSIMRFAGKRTDALSRWVCQLASRRGVNVAAAALANKLARIAWALLAKSERFATA

SEQ ID NO: 149847 - protein, 386 aa, unidentified
MRQPNDLSKSLVALKQDATVIAVIEMSQSSWLVAGIVPGVERQPLKKLAVNEQVLLQLLHRWRKEATQAGRTIKRITVAYEAGRDGFWLARWLRAHQIEAYVIHPSSVPVSREHRRAKTDRLDTELLKRAFLGWLRGEPNHCSMAAIPTLEDEDAKRPSRERECLVSECTRIVNRLRANLARLGIRGFKLTLARAMDQLTALRTPEGVSLPANTLAQMRRDLARLCFVREQIKEIERARAERLEQQPGHHSTASVRLLSRVVGVGIETADMLVHEVFSRKLRDRKAVARYAGLTGAPNESGQKRRERGLSRAGNARVRRGMIHIAWGFLVHQKDSPLANWYRTRTAGGRAGLRKTMIVALARKLLIALWRLVTTGEMPAGLALRPV

SEQ ID NO: 149848 - protein, 291 aa, unidentified
MEVIIGVDPHKATNVVAAIDEQGEVIGQQAFPANRKGLQALQRWAKRFPERRWAVEGASGIGRPLAQKLLAAGESVLDVPPKLSSRVRVLSTGNARKNDSLDATFTALAALRNDRLSAVRPEDGPEGHAEILRLLTERREDLVGERTRTLNRLHVLLPDLLSDPVRKQLSTEAAAKLLRRARPKHPAGRVRRRLAAELVRDLRTSDRRIAELDERIAGEVEASGTMLTKIFAVGPILAAKIVGIVGDVSRSPSKAHFASYAGVAPIEASSGEVVRHRLSLAGNRRRYSDDL

SEQ ID NO: 149849 - protein, 372 aa, unidentified
MNYNTVYVGMDVHKESFTLCSCRYEDEKASHYQRTPASYKNVLRYLAFLRTIYGEDTRFVCGYEAGCLGYSLYHQLENFNVECVILAPTTMLEQRSKRRIKTDKRDAEIIARSLAQHNYSPVHIPTETDNQTKEFIRMRDDHKAELKKIKQQILSFCLRQGYQYDGSGNWTAKHVKWLRSLKPAGLYKEILDEYLLTYTILTDKLNRLDQRIEELASKEEYTESVSKLTCFLGIKIHTALSVIVEVGDFQRFVSARKFAGYLGLVPGQHSSGDDRNGLGITKAGNTHVRRLLVESAQSYTRGKIGYKSRVLRSRQAGNSPQVINYADRANERLRRRYYKMVLKDGKKYNIAKTAIARELACFIWGMMTDNIY

SEQ ID NO: 149850 - protein, 393 aa, unidentified
MMDTSMWYVVPRQNDKSRGVYMHKNLIYVGLDVDDTQYHGAAFDKESGEIVSFKCRPTLKGLVSQLEKMQKYFSVESLRLCYEASYIGHCLQRDLMRAGYNCDVISPGSIPRKGSKSIKTDRIDALDLAQFYANDLLTIVQIPDAATEQDRDLLRSRQQLMKQQNDLRRHIQSLLRRNGLHYKAETNNKTHWTKHHYCWLERTVDGCSGSLGTNLQLLLRQLKSINEIVGAYSEEIELMAKQPSYQQAVSALTCYKGIKNLFALTMITEIGDVKRFAHPRQLSAWVGMDIREYSSGGKHHRFGITRQGNRYLRTAFIEANQRAYRTTKLSREIKARRVNTNPEYIVIADRCLKRLSKKGNRLLEAGKHPNKVKVACAREMIGFIWESLNKVAA

SEQ ID NO: 149851 - protein, 369 aa, unidentified
MTVYIGVDLHKTQFTVHVRVGDRIESLSEIKQYPTTAAGYTKFLERIAGYKTADFAVKIGVESTGNTRFFKNQVEKAGAEVTVINTLKFKVINESTKKTDKHDASTISWFLSKDMLPESHICSKETENLRRLLKSRERLVRSIVGQKNEVHALLVSMGLDDELRSLQSKKGRQKVLDTLLSHSDLVLEAQSVKLIFQIIEQMIESVKIIEKHLSELTEDDAMVNRLMTIRGCGKITAWIIRAYTEDIGRFANAKKYAAFCGLVPWVQDSNESVRHGKITKRGPQELRTAYVQLVLGIRRCKDTWGWRIMQRLDYMKKNKGSGKSIVAAARKMAEIVWALLTEGQDFDSKKMMGTYKPLTLTEQALAAMN

SEQ ID NO: 149852 - protein, 388 aa, unidentified
MIQVDDLSRSLIAFEQISTLVIVVELSQSSWLAAGVVPGIERRPLKKLDPDPTALLHLVEGWRDRATKAGRTVTRTVLAFESGRDGFWLARWLRVRGVETFVMHSTSVAVSREPRRAKTDRLDTEMLIRVFLGWLRGEPRHCKMVAIPTLEEEDARRPSRERENLVGERTRIINRMKAALVRLGIRGFKPGLLTAPQKLDALRTPEETPIPPNMLDEMRRDMARLAWVREQINAIEQARLERLERAPATGRHAMVRMLARVIGVGVETADMLVQEVLSRNLRDRRAVARYAGLTGSPDESGSKRREQGLSKAGNARVRRGLIQLAWRFLRFQKDSALAQWCRGRTEDVAGKRKRTMIVALARKLLIALWRLATIGEIPVGVALRTAVA

SEQ ID NO: 149853 - protein, 344 aa, unidentified
MEHYAGLDVSIKETSVCVIDGTGRVVREVKVPTEPEAILAVLSDEDFNIKRIGLEAGPLSQWLYGELAEAGLPMICVETRHMRAALSAQVNKSDRNDARGIAHMMRVGLYRLVHVKTPASQKRRMLLTSRQLLQAKARDIENDLRGTLRNFGLKVGIVGAIKFEARIRELVANHPDLATIVDSLLVARRVLREQLSVLHRHLLAVVRDDEVCRRLMTMPGVGPVVALTFRATVDVPARFTNSKTVGAIFGLTPRRHQSGEIDRMGGISKCGDAMMRTVLFEAAQAMLTRTIKWSWLKAWGMKIARHRGMKRAVVAVARRMAVVMHRMWMDGTDFQWKREEVAAA

SEQ ID NO: 149854 - protein, 400 aa, unidentified
MHLTANISVPQKNFIAIDLHSDNAVICVRRNALNKAGELVGKNIWCGRGSIRDGLDSFVKALLPYCQDFDHVAVVESTYNWYCLADVFEERGWLLRIADPSTVSQANLKSSDDRTDAQYLAERLRVGSLKHYLPLNYSSRALRDLCRYRMAMVQDCASLKIKLINLYRNQLSKNVRVADLLERCQPHMQPNYRFNADILEEFKDPNIRLRVAFEISRIAMLEEMIEECNAEIQKQCKDQELVKLCKTIPGCGPVLSAVICTEIGTMQRFKSAGDFVSYCRLCSTSKLSNGKSKGLGNAKNGNAYLSWAFTEVAQYASRNPVIREILQRLLRKYGGLRVKAIRTLAAKIARVTFYVLKNRQPFNAAQCFGDELTKGIKKKLALKPLSKDDSVVLPIVAGLA

SEQ ID NO: 149855 - protein, 336 aa, unidentified
MIAVGVDTHKHEHLARAVDGLGQILGGLTIRADLSGYIELTRWLRTLGEDVVVGIEGAGSYGAGLCEFLLAEGIAVVEVERPRRQDRRRGKSDEIDALMAAKKVLAKDGLSTPRAGGTRQALAALLIAQRSCVSERTRLLNQLQALHTTAPVALRERIGPGNGRKLAARLVKMRARSDASGSEQLIFTVLRDLARRGEELAAQANAYKHELAELISSLDPTLLQEYGVGPISAAKLLVCDPGRLKGEAAFARCNGTAPKPASSGQTIRYRLSRGGDRQANNALHTIARIRARHDEPTRTYLERRISEGKTPREAMRALKRHLSRSLYKRLITVPLT

SEQ ID NO: 149856 - protein, 340 aa, unidentified
MTVMIGVDPHKGSHTAVAIDGDELELAKVKVRACRRQVDQLRDWAAPFEKRTWAVESAGGLGYLLSQQLLAAGETVLDVPATLAARVRLLGTGHSNKNDPNDARSVAVAALRAPGLGPVERADHAGVLRLLAKRNNELGRTRNKTACRLHALLCELVPGGIPNEINASAVERLLGEVTPTNPVEAARLDLAQEHLDDLRRLDGQMKASKKRIRQAVAASGTALTALFGVGPVVACMVIGHTGDVRRFRSSDHFASYNGTAPIEVSSGGRTVHRLSRRGNRQLNHAIHIAAITQIRNPGSVGRLFFERKVAEGKTKKEAVRALKRRISDAVYRQLLLDAGK

SEQ ID NO: 149857 - protein, 399 aa, unidentified
MTLHGGLDWGSAGHAVCVVDQAGQIVARLEVRHDSAGLADLLLRLKRLGPPTELPIAIERPSGLIVDVLVEAGHPVIPIHPNVVKACRPRYRMAGGKSDPGDAFMLADILRTDGHRFRPLAAASDEIKALRALVRARDDLVAQRISLANQLRSLLETFWPGAAVIFAAIDSPIALAFIARYPTPDSAARLGERRLANFLASHGYCGRRTPALLLARLRAAPAGLAGEAEAKGEIARAFAGILERLLAEIARLSARIEHAVAELPDGRIVMSFPRAGRICAAQILAELGDCRERFLTEDQLAAEAGVCPVTHASGRSRGVVFRWACNQRLRQAITCFADNSRHASVWAASIYDRARARGCRHAHAIRILARAWIRVLWRAWQDNTPYNQANHRAAAKIPT

SEQ ID NO: 149858 - protein, 407 aa, unidentified
MDVHRDFLIACIAATNAQGVTEYQSRRFSTYTGSLRELRDWLLANDCKDVCMESTGKYWFPVHNILEESCHVVVSHPKFVKAIKGKKTDKKDAQWIADLFKHDLVRGSFIPPKDIRQLRDLCRYWVKLSSYMTGEKNRAQNCLTVSNFKLDDVFSNVFGKSASAITTQLLEHPGEQFDVAPFVDGRCKTPIAQIQEAVDGIFTYEQAEKLKIIRGHMDSLERHKAELESLILEIAQNYLPQIELLLTVPGIHDAFTAIRILAEIGADMTVFDTSKHLCSWAGLTPQNAESAGKKKTTRIGKSGAYLKLLLIQVALAASRGEKHPEIYGKKQALQKRRGKKKAIVAIARRLLTAIYHILSKNEPYNPAAYIQEDKNPMARQISQEKAFEMLARMGFIVSNPSPLSSSG

SEQ ID NO: 149859 - protein, 392 aa, unidentified
MRKPKQRKPLNDLSRSLTTLDVNHTLIAVIEMSQKSWLVAGIVPGVERQPLKKLDTDEDALLKLLDRWRMEAEMAGHKIKRITVAFEAGRDGFWLARWLRARGIEAHVIHASSVAVSREHRRAKTDRLDTELLKRAFLGWLRGERDHCKTVAIPTIKDEDAKRPNRERDSLVGEQSRIVNRMKAALARLGIRDFNPKLKKAAERLSGLRTPEDQPIPPNTLAELYRDMERRRLVTDQIRQIEDARLERLKQAPKDGPNIMVRLLARVIGVGIETADMLVQEVLSRNLRDRRAVARYAGLTGSPDESGSKRREKGLARSGNARVRRGMIQLAWRFLNFQKDSALAKWFQARTANARGSRKKMIVALARKLLIALWHFVRDGVMPEGVILRPAQ

SEQ ID NO: 149860 - protein, 484 aa, unidentified
MAKRKMSTFERLSTGQMNRAQRRELGRRVAASDPGLTIVHPNAGGIDVGNESHFVAVPADRDANPVREFGCWTAALNEMAEWLKSCRIDTVAMQATGVYWIALYDVLEQHGIRVVLVNARHTKNVPGRKTDVQECQWLMKLHTYGLMRDSFRLQQDMEYLRTIWRVRDRHVKEAGQEVQHMQKGLTKMNIQLANVISDISGVSGQAIVTAVLKGERDPYKLADLADYRVKASREEVARSLEGNWRADVLFELKQAVDSYHFARRQMEECDEKLSLYLVSLPTRMLAIPAESNDAPQTAAQKRKKAKKPRGNEPRTDMKEELKRICGVDLTSIDGINVMTAFTVISEIGTDMSRFQDEDHLTSWMGLAPSNDISSGKIVGRGKKKVKNRVAVVLRTAATTLLESDTHLGARYRHLRRQLPTFKAAVKAMARYLAVLIYHLLTKGEQWVDRGAAQFERRRTERELANLSSRARANGFKLIPIAEAS

SEQ ID NO: 149861 - protein, 344 aa, unidentified
MSEVSIIGLDIAKHVFHAHGVDDQGRALFSKRISRGKLLDFFAAQPSCTVALEACGGAHHWARQLTQLGHEVRLIPPAYVKPFVKRQKNDAIDAEAICEAAQRPNMRFVAMKSEQQQAAGLVFRTRDLLVRQRTQLINAVRGHLTEYGWIAPKGPSHVAELAHLIEEKRMAGSLPEAARAMFRLMLDQLASLNGRIAVLDKEIARRAREDEVSRRLMTIPGIGPISATAIAALAPPVETFAKGRDFAAWLGLTPVQRSTGGKQKLGATSKMGERTLRRLLIIGSSAVVQQASKRGAAKGSWLEQMLARKPRMLVTVALANKMARIVWALLVKREVYRAPVAANA

SEQ ID NO: 149862 - protein, 343 aa, unidentified
MKLSRVGIDLAKNVYQLHGVDRTGKTMLKRRLKRHQWFQVLLDKTEPDCVIGMEACAGAHHWGRQLQARGYMVKLIPPQFVKPYVKSNKSDAKDAEAICEAMSRPNMRFVTVKRVEQQDIQATHRVRAELIRQRTAKANQIRGLVAEYGLVAPKHLSSLRAAIPCWLEDAENGLTVNFRALLQGVWNDLLILDDRVCEMDKLIERLAENNEDCVRLQQLRGIGPMTSTAMIASVGDARQYNKSRQMAAAIGITPKQHSSGDRDRLLGISKRGDVYLRTLMIHGARSVVANAKHKDDRLSRWVTNIANKKHPNVAAVALANKTARMAWAMLRNETDYDPDFAIR

SEQ ID NO: 149863 - protein, 404 aa, unidentified
MWYVGLDWADTHHDVEVLDEAGKRVGARRFAHSHTGLHELKQFLLSIAAAPEHLACIVETNHGRLSTFLLEAGIPVYPVTPKTANQLRRAAGAKTDQIDAHLLAKIGRLDLAELRRLEPDSPTVAELKTLTRDQDALIQTQTRLVNQLTACLKEYYPAALHLFAKLQQRCALVFLQAYPTPQAAQAATLAEISATLRAGKHTNPRRAAPKIFEELHRPQLVAKEVIVRAKQHLMLSLVKQLLVVIADIATYEKEISTLFLTQKDHELWRSLPGAGKRLAPRRLPEWGEDRGRSADASSVQALAGTAPVPFQSGNYAKAHKRFACVKPLRNALYQFAWQSTRQEGWALDYYRRKRAEGKTHSMAVRALANVWVRIIYRMWVNKTSSQTATFEAAKRAHAPRPHAA

SEQ ID NO: 149864 - protein, 327 aa, unidentified
MYICVLDQAGEILVHCNLNTSPDEFLKTVAPCREDLVVACECIFCWYWLADLCAKEGIPFVLGHALYMKAIHGAKVKNDRVDAYKIATLLKFGLLAQGYVYPPRLRGSRGLTRRRTYLARKRADLLSHIQNTNSQYNLPEFGKKIAHKMHRQGLAEQFADPSVRRSIELDIELIDHYDRLIDKLQDDILRTARVDDPQALHILRTAHGIGQVLSLTILYEIHDIHRFPSVGDFTSYARLVKCARESAGKRQGSSGKKIGNVHLKWAFSEAAVLFLRANPEGLKYKQRLEKKHGKTKALSILAHKLGRAVYYMLLRGKAFDMKKFLAA

SEQ ID NO: 149865 - protein, 347 aa, unidentified
MLADELDYVIGVDPHRDTHALAVVDVRSGAVVFEATAVADGEGYESVLRLANRHAPGRRAFAVEGTGSFGAGLARFLVSHEERVLEVSRLRRERRSGKSAALDAIRAARSVLGLTRPARPRAGGEREALRALSAAREGAVTARRAGLCQLRGLLVSAPEPLRAELRSLTRAQLLRRLAAVRPERCQDPELRGTLLALRALARRVKALTVEERELAREIETLTRKLAPQLLAQPGVGPLAAAQVLISWSHRGRITSEAAFARLAGCAPIPASSGQTVRYRLDRGGDRRLNRALHMILVTRRRTHAPTIAYIERRIHEGKSRREAIRCLKRYLARNLYRLLENGSPMPT

SEQ ID NO: 149866 - protein, 442 aa, unidentified
MEILHAHVGGIDVHKKQVTVTARTLDPKGGARWETTRTFRTFYGDLLAMASWLVVDRGVTHVAMESTGPYWWPVYSALREVGGPTLVIDVVNAAHVKAVPGRKTDVKDSQWLAQLMEVGLLRGSFLPPEDVRRMRDFTRYQTKLTEERSREKQRLLKILESAGVKLDSVASDTFGVSGRLMLDALVAGERDPEVLTGLARGVLRNKTDDLRLALTGRFTTHHGLMIALHLARIDHLDEMLTQVKDTIGRVGREAPGGLVAPFAAQVELLMTIPGIGERVASVVISEIGVDMTRFPTGKHLAAWAGLAPGNNESAGRRRSGRRRKGNAQVCSILVEAALAASRTRSRLGARFHRLHRRFGGRANPGAAKKAAFAVAHTLIKIIWNVLATGEAYTDLGHDFYTRRINPETQTRALIAQLEALSGKKIVFLDRDDPPPAAQPRAA

SEQ ID NO: 149867 - protein, 429 aa, unidentified
MNYKQNERLNQLTEATLIIGIDIAKEFHVARAQDIRGIEFGKSIKFNNSLTGYLEFEDWLSEIKIAENKGKVIIGMEPTGHYWLNIARYLKANNYKVVTVNPMHVKKIKELDDNLQTKTDKKDAKIIAQLVKDARYSTPNLLEGEYEELRNAKNLRQVVVKDLNRTKNQIHNWLDRYFPEYKEAYASWESKSFIKIIKKYIFPSVIERIPPNQIYEMLPPKMRRGVGLGKIERLVTASKNSIGIKEGLSFAKVEINYLLEKYDGFLEQIEEIDKYVADICSNLAETEKITQIKGIGIVTASGIVAELGDIRNYKTPKQMIKMAGLSLTENSSGKVKGTTSISRRGRKDLRRLLYQVILGMIRTNTAFKEMYIYYTTRRKNQLTGKQAIIALCRKLLRVIHTIIIKDVDYDESKMMSQIKYPDEFLNAAA

SEQ ID NO: 149868 - protein, 311 aa, unidentified
MQDTIGIDVSKGTLDLHRRADRANVQLGNDTLGFKRLLKWTGPSAAALIVFEATGAYHRSLEKFLNLHRLPYVKVNPKQARRFAQAVGKLAKTDRVDAEMLARMGSALDLQAQEQPHESLHDLKELLTARRALIKDQTAAKSRLATATVPLLRRQIKRRLAQIARDIAQLDIGMREQADKDEAIAERMDILASIPGVGRLTAITMLVDMPELGTLEAKQVAALAGLAPITRQSGKWQGTARIQGGRPWIRRALYMPALVAVRFNPDLKAKYTQFIDAGKPPKLALTAIMRKLLVMANTLLRDHRMWSEVQP

SEQ ID NO: 149869 - protein, 370 aa, unidentified
MHQSSTLYIGLDVHKESIAVAYIAQEHGAEVTSLGTIGTRQCDIDHLIRQMQSKGKPLVFVYEAGPCGYWLYRYLTKKGHRCWVVAPSLIPKKAGDRVKTDRRDAVQLARLMRSGDLTPVYVPSVEDEAIRDLSRAREDAIADLKTAKFRLKAFLLRHDIRYTGRATWGPAHVRWLSEVVCATPAQQIVFQEYVRAVQEHTERLQRLIQELQEQVKSWRLQPVVEALEALRGVQFTVAVTVVAELGDLTRFENPRQVMKYLGLIPSEYSSGERRRQGAITKAGNTHARRALVEGAWAYRYPAKVSRHLQLRLEQLPKPIQDLSWKAQVRLCKRYRRLMARGKHANQVVVAIARELAGFIWAIAKQVPVKP

SEQ ID NO: 149870 - protein, 360 aa, unidentified
MEDERRRFVGIDLGKREYTMAIIGLKGKMTIHQGKTSIQGRQALYKKLERTDKIALEAGNLAFILAREIQERIGSEVRVLNSAKLPFIWDAPTKTDREDAMKLAHLVEERKDEKLPIVPLPSEKEIERRKLLANYSREVKGRTKHINLLHAMFVHQGHTTVVKKNLATAERRIEAVELLQGQEREEANWLLKHLELYDQRIKELKGKIQQEAKTDDDMKRLQTIAGVGPIVAYAYVAHVGDGSRFSSASQVSNYLGFVPRLDYSGTIQRQGHITKRGNGYLRGLLVQAAWTAVQSRHGGALKERYYYKTAIKGLGKKKTIVSIGRRLAELMYSVLRNKTTYEPRRWDGVRDISSIKMMCA

SEQ ID NO: 149871 - protein, 328 aa, unidentified
MLYLGMDVAKAKLDCCLLLDEASAKRKTKVVKNTRSGIVDLLAWVAKQNVSPEELHIVMEATGIYHEQAAMALADAGVMISIINPAQVKDFGRGLAVRTKTDGVDSVVLARYGALLKPKAWAPPPQEARVLQALLVRREAIAQDLQRERNREEKAGVTDTPALIHKSLEESIGFLVKQLAQLQKDIDAHIDKHSNLQKDRALLQSIPAIGPQVGSNILSVMHNHDFGSAEQLAAYLGLVPVERQSGSSVLGRARMSKAGPARIRAVLYMAAVVGTRYNPHVKAVYERLLARGKSKMSSLGAAMRKLVHLCFGVLKTQQPYQHDYLKNA

SEQ ID NO: 149872 - protein, 331 aa, unidentified
MTAICIVDEVGRRIWRGECRTVPEEIECAVRRYAEEDSRIGIETGAMTPWLVHELRDRRLDVVCLDARHARAALKMQINKTDQNDAEGLAQIMRTGWYRPVHVKSFEAHRARALLGARSQLVGTTTRLSNTIRGTLKTFGLLPGSARGQPFDHRVESLLEDRADLACIVRPMLTAWRQLRAQIKVLDKSVQAIVKQSATCRLLMGVPGIGMLSVLAYVSTVEDPTRFTRSRSVGAHLGLTPRRYQSGEIDRSGKISRCGDSLARTLMYEAAVVILTRVKRASRLKDWALAIARRSGSGKARIALARKLSVILHSIWRSGQPFRWADPVAAA

SEQ ID NO: 149873 - protein, 373 aa, unidentified
MKEKVRFLGLDVHADTIAVAVAEPNGEVRSLGTIPNRPESIRKLVKKLGAVEHLRACYEAGPTGYVVYWQLSELGVQCEVVAPTLVPVKAGDRVKTDRRDAEKLARSHRSGDLTAVWVPDAGSEALRDLVRAREAAKQDQLRARHRLSKFLLRTGQRPGPGVKAWTQGYLVWVRRLCYAQAAQTATLLDYLHEVEHMGERVGRLEQAITEAVKLASPQMQAVVRDLQALRGIAEISAVTIASELGRISRFQSARQLMGYSGTVPGEDSSGKRMRRGPITKTGNAHLRRIVVEAAWSYRLRPAVGPGLRKRQQEVPQEIKEIAWKAQVRLSKRYARLAAAGKDKRKIVTAVGRELLGFIWAIGIKAEASGPRAA

SEQ ID NO: 149874 - protein, 523 aa, unidentified
MVTRTKKRKSTGSKKRFIGKPTGQIQQRVQAVGPEHFGIVAVDCAKRRSKWMLCNFYGKVLVEPTTVEHTSGGLRTMTEYVADACQAEGLTDTIVAVEMTGIYHKPVQRAFRKAKFDTRIVHPFASHHYRRPLHPDEKTDDNDLEAIFQAAVKGYGLATLPVGEVYQSLQAVSRHRHNLVKQRARLMIQIRRLLHQTMPGFADLWEDDKLFHKSIALAVALKFSSADAIRQASVDGIASHLKKTKVRFQTRTIERIVAWAGTAAEPSELATMHTRQWQQLNEVRQLLGQQIVAAEQEMAGFLVKTPYVLLLSATGINVVSAARLAGEAGPIEHYASPRAINGRAGLFPSRYQSDEVDHADGSLVRQCNRKLRGAAMLVAENLIKCHPHYRGLSALWTQQKIDPRDRRCRIANRAMRMVYQLVGGRQVWRGKGVDREYLLAKLQEFHRVHKTPLEQSIRDLHEAFAWLPKSAYAAEAKPLAELARKKHRGPKPIGDLLVPLLIRLGVVSAEDIESNTSEARSSA

SEQ ID NO: 149875 - protein, 418 aa, unidentified
MDRTKYIYIGMNIHKETHTAVLLNYLEEKLGEIKIKNTLQGFHKLEDYILKQKGELIPIFGLEDITHYGRNLSIFLLDRDYPVKEVNPSLSYMERMSYASTRKNDTWDAQCISAVLMRRSHLLPDANPQDYYWTMRHLVNRRNALVKASTKLMQQFHEQIQTAYPNYKGFFRELDCQTSLTFFEHYPSSKHLENISEEELGAFLRIPSNNSCSTNRARKILDLVAEETTKERDYQFARDTVIQSITRQLRAYQREIKELERTERQMYQELGYQLETMPGIDIVTACALVGHIGDIQRFFNGDKLANYAGVAPLRFSSAGKGKDLQNKSQGNRKLYSTLYFLAIQQIYLTNKGEPRNPVFRAYFERKVSEGKTKIQALICIMRKLIKIIYSMMKHKTAYDLPKIEEKMASDEKCAKMLV

SEQ ID NO: 149876 - protein, 349 aa, unidentified
MGEVSTIGVDIAKSVFQIHGVDADGTVVIRRRVGRARVLEFFADLPPCLVGMEACATAHQWARELKKLGHDTRLMPPTYVKAYVKRGKNDAADAAAICEAVTRPTMRFVPIKTVEQQSALMLHRTRDLLIRQRTQLINALRAHLAELGLVAAKGREGLRQLVTVVTECGDERLPSNARFACQAIVTQLHAVQIEISGLDKRITQTHRANADSKRLDTIPGFGVILSTAVVATMTDPKAFKTGREFAAWIGLVPRQNSTGGKERLGSISKQGDRYLRRLLVVGATSVINSARARPYKYPWVIELLGRRPTKVVAVALANKMARIAWAVLAKGETYRAPTRSSNAAVAAAV

SEQ ID NO: 149877 - protein, 388 aa, unidentified
MPRQRKPNDLSRSLIPLEMDTTLIAVVELSLSSWLVAGIVPGVERQPLKKLKTDENALLTLFNRWRDEAVRSGHEISRIAVAFEAGRDGFWLARWLKAHGIEAHVIHASSVAVSREHRRAKTDRLDTELLKRAFVGWLRGERDHCKTAAIPSLREEDAKRPSRERESLVGEQSRLVNRMKATLIRLGIRGFNPKLRHAEQRLETLRTPEGEPIPANTLAELKRDMQRRRFICDQIRSIEQERLERLERTPDTEPHAMVRLLARVTGIGIETADLLVHEVLLRNMRDRRAVARYGGLTGSPDRSGGTNREKGMARSGNARVRRGMIQLAWRFLLFQKDSALAQWYRRRTEHSPKARKTMIVALARKLLIALWRLAREGVVPEGIAMRPA

SEQ ID NO: 149878 - protein, 335 aa, unidentified
MKSYKRVIGIDICTARLDIADSMSKTEKAIDYDVDSINTKLIKLIKDPAETLVVCEATGGLEYVLVDMLHDAGVDVVVANPARVRDFAKGHGFLEKSDAIDAHILQLFGKQVEVSLAKRRTDEERSFTALTHRRSQLLQIINQESNRLGQCKNARTTELIQDMLKALKMQLKTVNSAIEASLEEQAKTNPKIEVIRSVPGVGVVMTSTLIAELPELGSLSRTKIAKLVGVAPIIKQSGKIDGKRRARGGRANVRRILYMAALVATKNNPVINKFYIKLVSKGKPKKLALIACMRKLLTMLNDMVRNESKWGEKKKSVAGSIVSDRPAPARVLDKI

SEQ ID NO: 149879 - protein, 411 aa, unidentified
MDKVYDICCGIDVHKKLIVACLRNGNKSAIREFGATTRELLSLADWLKESDCKMIAMESTASYWKPLYNILESSGLNAMVVNAHHMKAVPGRKTDVKDAEWIADLLQHGLLQASYIPDKDQRELRELVRYRKSLTGERSRELNRLQKMLEGANIKLSGTVRDINGKSARNLLEYLITGERFDEAKFDEMYSKKVIAHNLKASKEQIIDDLNGVMSPLQRRMMKELLVHLDELNAHIKNLDDEIDNFMKPEEKKASEAIQSIPGIGNTSAQAVVSVIGTNMNRFPTDSHIASWAGLCPGDHESAKKRKSGKTRKGNALLRSTLVTCAHSAVRNKQSYFYAQFMRISAHRGKKRAYVAVAHSMLIAIYHILKDGMVFKDLGADYYNQFNKERKINAYLKKLKALGWEAPVVAA

SEQ ID NO: 149880 - protein, 344 aa, unidentified
MEHYAAIDVSLEWSSVCVVDAAGQIVREAKVRSEREALVALFAESGVSIARIGLEAGPLSQWLYAGLVEAGLPAILIETRHVKAALKAMTVKTDRNDARGMAQLMRMGWFRAVHVKAPMVQEIRALLTARQLLIAKLRDVESSLRGILRGFGLKVGVISKGRFEARIRELVAGQARLERVAEPLLRARAALRAAYASLHGELLKAVRADEVCRRLMTIPGVGAVVAMTFRSAIDQPERFARSKAVGAHFGLTPKKYQSGEIDRTGRISKVGDAMVRTALFEAANVMLTRAVRFSTLKAWALRVAGRQGMKKAKVALARKLAVVMHRMWVAGTSFRWGEASVSAA

SEQ ID NO: 149881 - protein, 259 aa, unidentified
MNTIGVDVDSNYLVCQIRRSGKDFFTAQFSNDPAGHRKFIKCATKHGKPARVCMEATGVYSLPFALALHTVPQIEVMVVNPKAIKHFATANLQRGKTDRLDAAVILEYLERMSFRCWQPPSDEILEIQHISRRIVQLNTELTRKRNRHKAACRLGNFGRVVANDTAVNMRHLERRIALLEQSTLKLIEFMPELSEKLTLLTSTTGIARKTGPRILAELATLPADMTGPQWVAHAGLDPRPYESGTSTNKPRRITNAGNR

SEQ ID NO: 149882 - protein, 437 aa, unidentified
MPRQCPQKSAARRVRPAATTATPGRPCPYAAFLGIDWADQQHEVAELDGETVHRQTLLQTPEGLDAWAGALHKRFGGRSVAICLEQAQGGLIYALQRHSHLVLFPINPAKADAYREAFAHSGAKNDQVDAELLARYVREHHPRLRAWKPDTEQTRQLARFVELRRNLVEERKQTMQRITALLKLYFPLALVIAQEYSEKLMLALLARWGTLREWQRANPRTLKQVATPFLKHAETRDQLVQQIRAALPLTTDQAILKPNALYLQTQVAKLPGLNQAIAVFDQEIAQLFHTHPDAAIFSSLDGAGEALAPRLLVAFGTDRERFQSAADVQAYSGIAPVTKQSGKSRSVHSRFACNKFLRQSFHEFADHARKHCDWAKAYYQYKRDHGMRHNAAVRSLAFKWIRILFRCWKNHSLYDDQTYTNHLRCKQVPYLPASHTA

SEQ ID NO: 149883 - protein, 348 aa, unidentified
MKVTRIGLDLAKNVFQVHGVDRNERAVLRRQLSRSQVAGFFEKLPPCLVGMEACGGAHHWARVLQQMGHTVRLMAPQFVKPYIKSQKNDANDAEGICEAVGRPNMRFVTVKAIEQQDMQAMHRIRNELVCQRTAKANQIRGLLAEYGIVVAVRVEQLRRALPQICEDMGNGLSATFRRLLEDLRQDLSWLDGRIEELDGEIKQLARDDERAARLQTIPGIGPITATALVADLGDARQFRRGREVSAFLGLVPRQMSSGGKERLLGISKRGDAYLRTLLIHGARSALRVAANKGDARSRWAVSVSGRRHRNIAAVALANKNARIAWALLTRGGHYDSQHGYRVQLAEAA

SEQ ID NO: 149884 - protein, 349 aa, unidentified
MKITTIGIDLAKNVFQVHGVDEHGKAVFNKPLKREQMAAFFVNLPPCLIGMEACGSAHHWARKLQGMGHTVRLMAPQFVKPYVKTNKNDAADAAAICEAVTRPSMRFVPIKNVEQQGVLALHRVRQGFVKARTAQANQIRGLLAEFGVIVPQGIGHITQRVPMLIEDAANELPGVFRLLIQRLLDHLKQLDRQVQELEAQIVAWHRQSDLSRKLGQIPGIGPITACALVASLGDAKNFKDGRQVAAWLGLVPRQHSSGGKQNLLGISKRGDTYLRTLLIHGARSVIYHAQKKDQHQGQGSAQCGWLNGVLQRRNKNVAAVALANKNARIVWALLAHDRSYEPGYVRESV

SEQ ID NO: 149885 - protein, 411 aa, unidentified
MDKVYDKCCGIDLHKKLIVACFKQGNRQEIRDFGATTRELLEMADWLKEGGCEMVAMESTASYWKPLYNILETCGLKAMVVNAQHMKAVPGRKTDVKDAEWIADLLQHGLLTASYIPDKDQRELRELVRYRKSLVGERARELNRLQKMLEGANIKISGTIRDINGKSARNILEHLLSGKQIDSAEYDILYEKKVIAHNLKATKEQIIDDLNGVMSALQKKMMRIILNHLDELNAHIRELDDDIDNFMKPEEKEAAKVIQDIPGIGNTSAQAIISVIGADMSRFPTDAHIASWAGLCPGNNKSANKRKSGKTRKGNGLLRDTLIVCAHSAVKNKSSYFHAQFARISAHRGSKRAYVAVAHSMLVAIYHILKEGVVFKDLGADYYNQFNRERKINAYLKKLKALGWEVPVVAA

SEQ ID NO: 149886 - protein, 318 aa, unidentified
MTRIICGVDIASSSLAVRIGQAGAAATFTNTEQGIAELAAFCQSHQVELVAMEATGGYEQRAFVQLSEHGLPVAIVNPRAVRQFAQSMGALEKTDAIDAGMIAWYAQTKNSEPLCLAPKTQLELRARVTRLRQLTEMRTAQLNQQRLVTNPAVQKGFREMLQFLAQQIEELELAIAALIDADPLWRALNQAFRTIKGVADRTVARIMAEMPEIGTLSNKTISKLAGLAPLANDSGKRQGKRAVRGGRAAIRDILFLVGSVVARYEPDFIAFQQRLRKAGKPPKVVRIAVAHKLLVRLNAKAREVRQNAALLAPRWSIV

SEQ ID NO: 149887 - protein, 400 aa, unidentified
MDPELRVAVDIGCTRHRVAVGLSEGKLLEEFDINHDAAGLSEFFERVGRHERQWGRPVAVAMEGYNGYARPLDERVLLHGYRLFNVNNMKLARFKEIFPGPAKSDPVDARKMLEMFSLKDKLPLAREALQEVAPVAEVNLQLKALTRRRKQLVNERMRVSSRLQADLQAVCPGLLDITGEADNLWFLNFLTCRADLTKLKTVRESSLLALQGVGKGYAGKIRHWQKQATFSETVAWVGPMIIEDAKRMIELRKAIGALQTQIDALAEHSEIARRIDTIPGFGRVCAPELAGEIGSLQRFRGESSLALYVGMAPLDDKSGARSGSKPPRHVNVRAKAAMMIAAAQNAASVPESKAFYDKKRSQGKTHNQALRALGRNLVRVMWSMLKHGRDYQLESPSKKA

SEQ ID NO: 149888 - protein, 392 aa, unidentified
MFYVGIDIAKQNHEASIIDSNGKLLDKSISFSNSQVGCNKLIALLERFEADTSNTVIGMEATGHYWVSLYSYLIDLGFTVNVINPIQSDAFRKMYIRQTKNDSKDSFIIAQIMRFGEFSTTSLADEDVMALRQLSRYRLALVDECSDWKRKCIALLDQVFPEYSKLFSDTFGVTSRELLSKYPTPEDMLSIDTGTLSKLLSEASRGRFGISKASEIQESATNTFGINFAKDAFAFQIKQIIAQINFIEEQLKELETEISTLLHQTNSVITTITGIGDVLGAIIIGEIGDISRFEAAPQLVAYAGLDVAVKQSGDFVGTQTKISKRGSPYLRRAIWLAATVAAFKDPALSVYYQSLRARGKHHLTAIGAVARKMCNIIFAVLRDNKPYVPDIK

SEQ ID NO: 149889 - protein, 388 aa, unidentified
MESDPMPTKSVVASSRSKSKTQREPSRRPEPGVRSTLGVAKPTRKRQKETPVEQEQQYVGIDLHRRRSVIVRRSDAGETLETVRIDNDPVALASELAKAGEHPEVILEATYGWYWAADVIQACGGNVHLAHPLGNNWGNRRVKNDERDATDLVDLLRMGRLAEGWVAPPPLRELRELIRYRGKLVHLRSNAKAQVHAVLAKEGVAVPMTDLFGVGGQRLLDEVELAKAYRIRVESLRDLIELYDREIAMLEKETAPYFAGDLGYHAVQAIPGVGPVLAAVFVAEIGDISRFTSARHLASWAGLTPNHHESDEKVRRGHITKQGSRLVRWAAVEAVARQRGDTVIRRHHRQVGERRGNQIGRVAAARKLLTLVYYGLRDGEIRCLAKAG

SEQ ID NO: 149890 - protein, 395 aa, unidentified
MTKRFFGFDVHQEFIVAVAVDAGQNAVYKPRKITSDEFEKWVAKTLTREDEAVIEAMSGSWITHDLLSQYAGRVLVVHPYHVKLIGSSFVKTDKRDALTLAKLLAANILPEVWVPPKHVRELRSLVYHRHKLAQRRATAKNRIRGILALHRVIGPKGLSAFSHEYWDSLQLPSSDKLRALHAIADIEMLTGQIKSVEAELSKVSVQEEWVDDAACLLQMPGIALLTAMTILSAIGDITRFPTSKQLVGYAGLGARVHSSGKSHSTGGITKQGRRELRYAMTEAAWNAIKYNPLWKARFERLAVRIGRQKAATAIARKLLVLVWKVLTERLSDHNVDDNTVAKCLFWWGSRYSLAQSLGMKPNIFTRQRLEVLGRGHELSQVVFVSRVWALPPPGS

SEQ ID NO: 149891 - protein, 342 aa, unidentified
MTLYIGVDIHARQQTLSYLDTSDGTTGVVELSHERDDIKGYYSQFQEEVIIGIEACGYTNWFEELVERLGHKLLVGDAGEIRRLARRRQKNDRRDANLILELLVHGEFPTLFRYSKESREVLRQLRYRHKLVKLRTMVVNSLHALAINAGLSLRAKLLTRDGRRQLRGLSLSPISQQQREELVSLADELTRRVGTVEQWLKEQAKQDVRVQRLQTHPGVGLLTSLCLVHTLGDVSRFSSLRKVTAYAGFDPMEDSSAERKAYGGISKAGSKLLRYLLVEAAQTAAKDDEQLKQFYRRLLPRRGKARAKVAVARKLLIRCFIMDRAAIDYAEFLRRGQQKETE

SEQ ID NO: 149892 - protein, 316 aa, unidentified
MPETFIGIDVARDSLEIAVRPTGAHWSASNEPTALGELVARLLELDPQLIVLEATGGLELALLAALGSAGLPVVAVNPRQVRDFAKARGTLAKTDRLDAQVLAHFAAAMRPSVRPLPEAATQALAALVTRRRQLLEMLVAEQNRTAMAPPAIRSQIEEHIAWLRQRLTGVDRELATTVRASPLWRAQEDLLRSVPGIGPVASVTLLAELPELGTLNRKQIAALVGVAPLNRDSGAWRGKRTVWGGRATVRSALYMAALVGARHNPVLRALYTRLVAAGKPKKVALTACMRKLLIICNAMLKQGARWAPPDPMAPNP

SEQ ID NO: 149893 - protein, 321 aa, unidentified
METATAYVGIDVAKEKLDIAVHSSDQQWTFANSDAGIGQAVSCLRELNPALIVLEATGGIEVPLVAALAVARLPVVVVNPRQVRDFAKATGRLAKTDTLDASTLAHFAAAIRPPLRPLPDAHTQEITAVLTRRRQLVEMLTAEGNRLGAARSKAVRRRISAHITWLEKELANVDDDLDSSIRNSPVWREKDNLLQSVPGVGPVLSTTLLAHLPELGSLNRRQIAALVGVAPFNRDSGNFRGKRAVWGGRSAIRAALYMATLVATRYNPIIRAFYHRLCAAGKPKKVSLTACMRKLLTILNAMLKHRTPWHYARIQTFGPCS

SEQ ID NO: 149894 - protein, 376 aa, unidentified
MRKVALDLGGKKTAYCEVSEGRVVRRGTVTEVEALRSWLGPEQPVAQVAIEACREAWHVHDLLRSWGHEVVLVDTTRSRRLGIGQHGRKTDRIDAEVLARALERGGIPVAHVLSGHRRELRRQLGIRRALVETRAQLVTTMRGLAREQGVQLVSCEARHFAERVLASASAELSTELMPLLETLKVIDRQLKSVDADLGKLCIQEPVIQQLCTVPGVGAIIAASFVSVIDDAKRFRRAHQVESYVGLVPSEDSSGGKRRVGAITKQGNRYLRAMLVQGAWAVMRSSRQDDPLKQWGQAVSERRGKRIAVTALARRLIGILWAIWRDGTVYDPQWLGQHAAKGLRAHAQDLEVRAEALKAAARKRSCQLLLQREVTSG

SEQ ID NO: 149895 - protein, 374 aa, unidentified
MSRSIIYLGLDVHKDSITIAVLPAGAPTPIRVERLPNDLAKLRRFCERLAAQGEVRACYEASGAGYVIHRAMREWGYPCDVIAPSLIPSKPGQQRKHDKHDAAQLARLYRAGELTTVRIPSEAEERVRDLVRCRETLQREVLKSRHYILKFLARRGFVYREGTNWSTAHYHWLRRLAAASAPLVAEDQIVYGEYLGLLEYKLSRRDELDRRIAELALTPALAPAVNRLQCFRGVQRHVAMVLTTEIGDWRRFASPRQLMAYLGLVPREHSSGDRERRGSLTKAGNSHCRHVLVQAAWAYRFQPKVGMALKARQRGQSPVVIAHAWKAQHRLHTLYRRLAFRTRPQIAVVAVARELVGFLWAVMQEQDAMPSVAA

SEQ ID NO: 149896 - protein, 450 aa, unidentified
MSHGSGVSRGDRNRNARLGRLRDLVPLSNAVVGIDLADRKQMVVVADHDSKVLARRVFRCRAWDLGAALDWAAAAAAARGFAQVTVACEPTGHRWRVLGQLAADRGMPFVCVQPLVTSWARRTEDLTWDKTDEKDAVLIARLTAQLRCYVPEPVDETWGRLRHLGERRERLVADIASQVQQIRDLLECVWPAALDAARQPFRSRTWCAALMVILDRDGGDLARTARLGLPRLESAVRREITRWGGQKPCLRIVRSVFTALSDRAGVTGHRRGALERACLLMTDWHQARQRLADTETRMVTVLDDLGLTGLVTSITSLSAVGAAAILAQTGDPRRFATARAVVKHAGLAPREKISGSYAGRTKLTGQGRPGLRLAAWRAVWGAQRGNPVYSARYQHLTTREHNKLTPTQAQTLIAAAILRHLHAVITTGQAWDPAIAAHGTRHRPDMPTAA

SEQ ID NO: 149897 - protein, 370 aa, unidentified
MLDTTTFVGLDVHARSIKAVSLDVMTGEVRAATFGYDAGAVAEWVRSVDPRARCVYESGVTGFDLQKRLSGLGVDCVVGAVSKMIKPSADRRRKNDRNDAEFLARMLSVGNVVEVWVPDDECEAARDLTRALEDARDDLSRSKQRLSKFLLRHGLAFDERTPTGRRKGNWTRAHWSWIESIRFAEGADNDVLAYYVDAVRRAAEEKARLEGLVEAEARKPRWRRRVDSLRCLKGVDTATAADLVFEAGEFSRFGNARSFAAWVGLTPSEHSSGESDRRGAITKAGNKHLRKALVEAAWHYLTCSARPKGLARGQDPDRGARRHAAKGVRRLVERRGALLARGVHGNKANVATARELACWVWAVGLMAEEA

SEQ ID NO: 149898 - protein, 438 aa, unidentified
MIDRSSGSPEPEWAAFLAIDWADKKHSWSLYVKDASKREHGEIAHSPEAIHIWISQLTARFAGRPIAVCVEQSRGALLFTLSKYGNLVLYPIHPATANDFRKAVYPSGNKSDPVDADVLLDFLLTHRDRLRLWRPDTEQTRELQFLVEDRRCMVNEKTRCLNRLTQRLKMYFPQVLSWFGSVDSVLVWRFLEQWPDLVSLRKARRSTVKSFLERDGRCSPPEIEELWPIIRDAIPATLDAAVITTSILFVKTIVRQLQLLHEAIREYDKRIEQVTETHPDFPLVRSFPGVGKALAPRLIAALGTQRDRFCSANELQSYTGIAPVQESSGKQRWIHVRRACPKFVRQTFQEWAQHSLPRCEWARAYYDRHRARGKQHHAIIRSLAFKWIRILYRCWQNHTPYQEATYLTKLHPRSSLPTPVEIVWKTTAGFSKIAAINT

SEQ ID NO: 149899 - protein, 389 aa, unidentified
MKIYVGIDIAKLNHFAAAISSDGEIILEPFKFTNDADGFQLLVSKLESFDKNSIIIGLESTAHYGDNLVRYLVAEFYQVCVLNPIKTCQMRKNNVRKTKTDKVDTFVIAKTLMMQDDLRFITFFDLDMMDLKALGRFRQKTIKQRTRLKIQLTTYVDQVFPEIQYFFKSGLHQNAVYALLKEAPSPKEIASMHMTHLANLLKVNSHGHFTKEQAKELRVLAQKSVGANDSAISIQITQTIQQIELLDSQLEKIEAEMTDIMKFNDSVIMTIPGIGYINGGMILGEIGDIHRFSNPNKLLAFAGLDPSVYQSGNFQAKTTRMSKRGSRILRYALVNAAWNVVRNNATFKAYYDAKRAEGRSHYNALGHCAGKLVRVIWKMLTDEVEFNLE

SEQ ID NO: 149900 - protein, 337 aa, unidentified
MERPYVGIDLHRRRSVIYAMDADGEKLDCVRIANDPLTLLEAVSKAGSDAEVVIEATYGWYWAVDLLQEAGFRVHLAHPSGNDWGNRRVKNDERDARDLADLLRLGRLAEAWIAPPAVREVRELVRYRAKLVQLRSGLKAQVHAVMGKEGVLPRLDDMFGPGGQRQLDEMQLGDVYVVRIESLRDLIEVYDREVAMLERKIHQMLRDDRGYQTIQALHGVGRTMAAIFVAEIGDITRFKSAEALCSWAGLAPRHRESDTKVVRGGITKMGSRLVRWAALEAVACYHGGAWLQKDFHRIAERRGKNKARVAVARKLLTLVYYGLRDGEIRCLRERVAA

SEQ ID NO: 149901 - protein, 352 aa, unidentified
MSHKSAPPTVSTIGIDLGKNSFHLVGLDQRGAIVWQLKCSRAQLERRLANIPCCLIGMEACSGAHYIARQLATLGHDVRLLPAQYVRPFLKGHKNDYRDAEAIAEAVQQPTMHFVAIKTPEQMDLLALHRVRSRLVSQRTGVTNQIRGFLMERGITVRQGVVPLGRALPHILSSNTGALSPRIVNLIGELVQDWRRLDERIAAVSADIESLVEQDEACQRVMTVPGVGPIISSAVVAAIGTGDAFSKGRDFGAWLGLVPKQISTGDRTILGSISKRGNRYLRALFVQAAWVVLVKVGPKHWERYGLKSWIEAAKKRLHHNVLAIALANKLARIAWSVLAHGRTFEASKIQAA

SEQ ID NO: 149902 - protein, 391 aa, unidentified
MYIVGIDIAKRKHEAAVIDGEGTVIIKPFSFTNNCSGYNRLLAMLTKAKLPLDEVSFAMEATGHYWLALFTRLQKEGFRVQVINPVQTNSIRSFYIRQAKTDPRDALLIAEVIRFGHFSESTLHPENIYELRELCRGRHAIVSMQADVKRKVVALLDQVFPEYETAFTNMFGDTSMAILQTCPTPKELSEMPLEELCHLIEVSSHKRFRMAKAQELQELARNSFGFAMAGDVFSTMIRLYAKHLDFLKQQVREMDRKIAEIMETLDTPITTITGIGPTLGAYILSEIGDISRFSSAAKLAAYAGIDPTMRQSGEYNGVRNRMSKRGSPYLRHAIWLAASSAVLHDPALKLYFQKKRDEGKPYMASVGHACRKMVSIIYAVMRDNKAYCLCA

SEQ ID NO: 149903 - protein, 310 aa, unidentified
MENIFVGIDVSKDRLDVAVRPSGEKFVVERNPAGLESLAVRLQALSPRVIALEATGGFETVVAAALSAAGLPIVVVNPAQVRAFAKALGQRAKTDPIDAAVIAHFAEATKPEPRPLPDEATRLLADLVARRRQILEMMGAERQREKRMTIPRLRKSIARLIKALEKELTSVDTDINDAVRGSPAWREKEDLLASVPGVGPVIARTLIAELPELGQLGRKQIAALAGLAPFTRQSGQWRGRSFIGGGRTAVRTALFMGAMVAKQHNPRLKAFFDRLVAAGKPKMVALIAVARKLLTILNAILRDNQPWQTA

SEQ ID NO: 149904 - protein, 376 aa, unidentified
MMSDTPGPAAAGPGVGGWGRTTLSHEGLRESKVHPSVGLRPEQMKGSKSRMQGKEVPERKTKTDCNVGIDVCKSWLDVHVLPTGESLRVANTREGIRKLKRWLRRFEVALVAVEATGKWHRALHRSLHAAGLRVAVVDPFRVRMFARAQGILAKTDRLDARVLAAFAAVMDPAAQPPAPWEVEVLQELVRGRTSAVAERTSLRNQRAAAQTSFLRHQLGQRIRRLMKDVAGLEAEIKRLIAAAPGLVRRYRILLSIPGIGPVNAAMLVACLPELGAASAGQIALLVGLAPIPDDSGDRRGYRRIKGGRQMVRNGLYLAALTAARCNAPLRVFYKRKIDEKKPVKLALVAVARKLVVLANSLIADDRTWTPLPPNHA

SEQ ID NO: 149905 - protein, 341 aa, unidentified
MSIVGAFDVHRRQLTFDYLDTVTGEVKRGRVVPADREHLRAWLARFAGQDDVHFALEGCTGWRYVTEELAAKGIIPHLAEPADTAALRGRKRHAKTDKTDSRHLRVHLAAGDLPECWLPPGHVLETRATVRLYKDLLDERGAWHQRIAATLFHQGVPVTASMSTAQGRAAVAEMELSPAGRQAVGTALRQIGRLTGELDPLHRQLDMISRRQPGCRALRATQFGIGPVTSVAIWAELGDVRRFGNSGDVIRHTGLDITVYSSDGKRSAGHLSRQGPQLLRWALYEAAKCAARPAAPDYGYYTAARDRRTGGLATLSVARKLARRCYHTLRELGEEALAPAA

SEQ ID NO: 149906 - protein, 315 aa, unidentified
MEHAAKEASFVGIDVSKDRLDIHVRPSGRAFAVARDGTGLDQLVDDLRHLAPALIVLEATGGFELTVAAALAGAALPLAVVNPRQIRDFARATGRLAKTDALDAQVIALFAERIRPEPRPIASADRQILAELIARRRQVVEMIGMETNRLHQARNLRVQRMLKATLKTLKAQLAELDRDIDDTIKRSSVWRAADDLLTSVPGVGDVTAHTLIADLPELGQLDRRRIAALVGVAPVNRDSGQMRGKRTIAGGRIDVRNALYMATLSATRWNPVISQHYRNLVERGRPKKVALVACMRRLLGILNAIIRTKTSWQCA

SEQ ID NO: 149907 - protein, 435 aa, unidentified
MTSHCQFYHYNIRRYYLSFKIFKFNCCGLDVHKTWIYACIGITDSNNRTEYKQARFSSFTKGLHELCDWLAKYNCNDVCMESTGKYWIPVFNILEQHKIWITLSHPKYTKPMKGNKTDRKDAKWICDLYMCGMVKPSFIPPADIRELRDLVRYRYKLTCMITGEKNRAQNCLTVSNLKLDDVFSDVFGKSSRSITEQILQHPGETFDVTPFVDARCKTPIKEIQAAIDGALSREQAVKLRQCLDHIDELNKHISEVEQEILRLSDKYEAALNLIRTVPGFNKNPMTAIQVLSEIGCDMSVFPTDKHLVSWAGCCPRNDKSDRKIKSTRISRSGTYFKPVLVQVANALIKSKKHPEFITRYKRIKARRGHKKAIIAICRMILTAIWHILTDLKPYTPEGFLESRPVKEEKILTISQALNLLKLRGYVIKDDLLPTS

SEQ ID NO: 149908 - protein, 351 aa, unidentified
MKKVFVGIDVSKKTLDASVIAPSLTEDKPVIISYGKFDNRPCGYRKIVSMARKAAKAVDDAEILFCCETTGGYDHALCDYMSDKHLDIWREHAARIAKTRPDHGKDDRKDSMLIAEYAWRNRDRAQMYVPSSRSVRDLRQLLLYRRQLVEMRKQLNVRMTDLKATVQSDPTMSFIYSESEKQVKRLTDCIEKCEKMIRETIDSDNEMLKNFGHIMTVKGIGLVSAVAIIAYTGNFKTIDVYKSFACYCGTVPFYEDSGTSIHKREYIGHKSNRMVRSYLIQAAHIATIYNEEMVAYKQRMQSKGKPAGIIVNNVANKLLRLVFSLVANDCDYERGHEFKREERLKKKTMSA

SEQ ID NO: 149909 - protein, 415 aa, unidentified
MSENIITAVGIDVSKGKSMVAVRQPGGKILLGPFQVEHNALGLKQLTETLKCIDGEIRIVMEHTGMYWRPVALTLKEAGLFVSVVNAILIRKFSDNSLRKVKTDKADSLKIANYALAFWNELKEYSLEEENRQMLKVQSRLYERTIKGSVSLRNGLISLVDQVFPGANDFFSGSPKESNGHFKWVDFIRHFWHKDCVTRLSLNGFAEKYRKWCNREGYRFISSDVARIYKAALESTATFPKSDSTKILIRQAADSLNAVYDTLHILRAEMLRLARLLPEFDVVMYMYGVGNITGSQLMAEIGDVRRFHSKSALVAFAGIDAPPFQSGNFEGSNCHISKRGSPHLRRTLFQISSTILKKSNPDSSIYQFMDKKRSEGKHFYVYMVAGAAKFLRIYYARVTGYLDAIEATENNNLTG

SEQ ID NO: 149910 - protein, 351 aa, unidentified
MLIIGCDFHPSFQQIAYLDSESGEYGERRLTHPAEAKVFYGSLAGRQVRLGLEATGNFRWFRRFLGERGHEMLLGNPSAIHASNPRRQKTDKRDARHLLTLLVEDRFPAVWQPPVENEELRQLLLHRCRMVRLRTKVKNQLDAVAKNEGLLSARGWQEKRCQIEALPLPGWYAERRKDMFALLDELDRRIQPLDEAVKKAAGENAGARLLMTHPGVGPVVSLAYVLTIGDWQRFPRGKHVASYLGLIPAEESSSDKRRLGHISKQGNELLRWLLVEAATTAQSHDLSWHREYLRLSMNKHHGVAKVAIAHKLAIRLYWMLRSGQDYQQVVERGSHAGQSVCPSGCGLTPRT

SEQ ID NO: 149911 - protein, 398 aa, unidentified
MKRILRIGMDVHSTNYTLCAMEPVIGEDDRIFANIQVTPDYKNILMFIENLKMKLGLDAEYDIQCGYEAGCLGYSLYNQLTAAGVKGVILAPTTMLTPQGQRVKTDARDALMIAQCLSYGGYHAVYIPTEEDDSVKEYLRMRDDHKTALKKIKQQINALCLRHGYHYEGTKWTIKHVAWLRKLELLPLYRETLDEYMASYDEQTAKLERFDKRIGELASQSSYEEKAKRLGCFLGIKTHTALSLLVETGDLSRFAKGSTYAAFLGLAPGENSSGETINRRGITKAGNRHLGQLLIEAARGICKGAIGHKSRELRARQSGNTPEVIAYADRANTRLRSRYYKLIRHGKKKNVAVAAVARELACFVWGMMTDNTGMKMAERNSKDSCQSRALCTAGAAGP

SEQ ID NO: 149912 - protein, 345 aa, unidentified
MQLHTIGIDLGKTVFHLVGLNLRGEVVVRKKFSRKQLLHFTANLQVELIGMEACGGSHFLGRTLREQGHEVRLMPAQYVKPYVKTNKSDYIDAEAIAEAVGRPKMRFVPIKSDEQLDLQSLHRVRERWVMRRTAVINQIRGLLLERGITVRQGRGHIDAALPGILEDASAQLSGALRVLLVQLKLELDHLQMRIDEADAMINKAAGENEACRRLVAIPGIGPVTATAIIAAIGNGAAFKKGRGFSAWLGIVPGEYTTGGKQKLLGISKRGNSYLRRLFVQGARAVLQQKAKQSSGLSAWLAQLTTRTHSNVAAVALANKLARMAWAVLAKNEPYRPPMLVGAATA

SEQ ID NO: 149913 - protein, 412 aa, unidentified
MQTLIERGCGLDVHQATVVACLLIVRKDGKVQKQMRTFATTTRELVGLRTWLLSEGCTHVAMESTGVYWKPIYAILEGALEIVVANAQHIKKVPGRKTDVKDAEWIADLLCHGLLRSSFVPPKPIRELRDLMRYHRKLVESQAAERNRLLKVLETANIKLANVATDVFGMSGRLMLRALIEGKATPQEMAQLAKGLLRKKIPELELALEGKLEEHHRFLLALQLQRLEAAEKDLAALEQHIQQKLEPYAAQLALLDEIPCVDWILAAVIIAELGVDMRVFGSVSQLASWAGVCPGNNESAGKRKSSRIPTGNVYLKSALVEAANAAARAKGTYLRDKFFRLKARRGYKRAAVAIAHKILVAIYHMLSQQVSYNDLGDLYLDKLNKNHLTQNLVHRLERLGYTVTLTLQQEAA

SEQ ID NO: 149914 - protein, 480 aa, unidentified
MKPKAQEKNEKITKPRTNHWKKMNRKQRRELTRKIQSQDLSLEVVHPDAAGIDIGNESHYVAVPSTRDSQAVRRFGCTTGELKAMAEWLKQCRIRTVAMQSTGVYWIAVYDILEAAGLEVYLVNARETKNLPGRKSDVQESQWLMKLHTYGLLRNSFRPPQEIRTLRTYWRQRNDLVRAAGRHIHRIQKALTQMNVQLANILTDISGLTGQAIIKAILAGERDSRELAAYRDPRVKATKEEIAAHLEGNWQEDLLFVLKQEQDSYEFCQKQMAECDHHLQDHLQHRPDRSQGASLPDEKRKERLKKKKGNKPQFDLRAELFRMVGTDLTCIDSIDVVTAMTILSEAGGDMTKWKTENHFVSWLRLCPDNRTSGDKIIAKGRLPTNNRVTLALKMAASSLPTSQTYLGAQFRRLRTKLGAPKAIKAMAAKLARLVYRMLRFGMPYIDKGTEIYAAQHRTLQINHLKWRATQLGLKIVEAPA

SEQ ID NO: 149915 - protein, 346 aa, unidentified
MLYAGLDLSRKRLDVHVLRDDGTTALVTAVAPDASALRTLVRRVAAEGGPVRATIESMNGARFVHDSLEFAGWDVLIADAQRVRGLAPLAAKTDKIDARVLAELTRRALVPEIWLPTPEVRAERERARFRLHLVRHRTALKNRISATLMTFGHPCPMADLFGVAGRKLLDSLALPEPWQASLSESLALVDDLTARVDALEVELRDLGADDPSMQLLMTVPGVGWVLAYTIASEIGDITRFATPKKLAGYTGLCPLVRQSGPKDRRGPLAKNGPKYLRWALVEAATHAARDVRYLERYERTKQRLGRQRGAKVARVDLARQLAEAIWHVLTKNEPFHPAGPAIRLVA

SEQ ID NO: 149916 - protein, 343 aa, unidentified
MTNNTMIGVDLAKSVFQLHAASTTGQLLFRKKLSRATFAKFMKGHPPATVVMEACGSAHYWARELVRHGHEVKLIPAQYVRPFVKRQKNDAADAEAIVIAAQRPEMRFVEPKTTEQQSRAMLFRARARLVRQRIELVNMLRAFLYELGHVVPQGIHHLPRIAAIVSDLDNDLPAIARMECHDLVEQIEAMTGRIATSDRRIKALAGQADIARRLQTMPGVGPLTALAVEAFAPPMENFQCGRDFAAWLGLVPKQHSSGGKERLGRVSKAGQSDIRQLLIMGAMSRLNWMGRKSIAETSWLTRMLARKPRMLVAIALANKMARMIWAMLTKQEDYRTPATAIAA

SEQ ID NO: 149917 - protein, 373 aa, unidentified
MGDHSAVFVGIDVSKSRHSVAIAEEGRDGEVRFYGEIEADEAAVRKLVRRLAGRASRLTFCYEAGPTGYGLYRLITALGHECHVVAPSLIPRKPGERVKTNRRDATSLARLLRAGELTSVWTPDERHEAMRDLVRARSSAAIDRRMKRQQTSAFLLRLGRSYPGKKTWGRTHMKWLAGQTFAHLEQRTAFEELSLAMRQAEERIARLEKAIEEAVPNWSLAERVSALMAMRGFDLVAATTILAEIGDLGRFDSPRELMGWLGLAPAESSTGDKVRRFGITKAGNARARRTMIESAWSYRYPARVGLSKQPRVAAAPPSVREIAWKAQTRLTRRYRALSGKGKVKNVVTVAIARELAGFVWAIDRAIEKARAGA

SEQ ID NO: 149918 - protein, 307 aa, unidentified
MHACVGIDVSKATLDVAVHGSSEVRAFANSPAGFRRLAAWLLPERPLQVVLEATGGYEQAALDALFAAGLPVVRANPRQVRDFAKALGQLAKTDRLDARVLAQLAATISLTRYQPAFAWQRRLAQWHQRRGHLLQMLGSERQRLERMVDPALLRWARQHIAMLQRELRRLDTEIKHQIAAQPGLDALRSLKGVGPVLQATLASQLPELGQLDSKAIAKLVGVAPLARDSGLLRGQRHVWGGRRQIRAALYMASLTAIRYEPRLRAFYQALRARGKLAKVAIVATMRKLLVILNARMRDARIQQPQFR

SEQ ID NO: 149919 - protein, 342 aa, unidentified
MVTFAPAITSPTSLTSPPSLASPASPTFLGIDVSKASLDVHFSDGRAALGKLDNRGVSIRRFVAGLSKNPPVLAALEATGGYENAVLHALLDAGVSVVRVNPLRVRRFAQSRGQQAKNDALDARVLADFARVNVDRLRPMARLSDTARMLKELVARRRQLVEQCTANKSQLEHAGFPQVRKSIRATLRHLQGQIAAVEALIQEQIDQDADLRHRQEILLTVKGVGLAVSRVLVSELPELGNLDRRQIAALVGVAPFEEQSGTVNKERHIRGGRATVRAALYMATLVATRRDPVIKAYYEHLKGRGKPKKVALVACMRKRLNYLTSLLSKKSEMPPDGGGGAK

SEQ ID NO: 149920 - protein, 398 aa, unidentified
MDQDRFDVFVGLDVGKEHHHATALNSAGRRLHDKALPQDEAALREVFDKLTVHGSVLVIVDQPATIGALPVTVARAMGIEVAYLPGLAMRRIADLHPGNAKTDARDAFIIAEAGRTMPHALRRVGGDDDLIADLAVIVGFDDDLASEVNRVSNRIRGMLTQIHPALERAIGANIGHPAVLALLAKFAGPTGLAAAGRRRLTTTTKPLAPRMHTRLVDAIIKALTEQTVVVPGTRAAELVLPQLAAQLQGLLAQRAAAAKQVEEALDAHPLSQLLMSMPGVGIRTAARLLLDVGDATAFPTAGHLAAYAGLAPVTRRSGSSIRGEHPSRAGNKHLKRALFLSAFAALHDPDSRAYYDRKRAAGKKHNAAIICLARRRVDVLHAMLRNGSFYQPRTPAAA

SEQ ID NO: 149921 - protein, 391 aa, unidentified
MKSSHHIDTPAAGDKDGTLYVAFELSKSKWLIGTVLSGESKLSRHLVAGGDTAAVWQLISKKRAQAEKKLGRPVRVVSCYEAGFDGFWLDRWLAEQGVENRVLDPSSIEMPRRARQAKTDRLDLERLMRVLIRHDGGEPRVCSVVHPPSPEQEDDRRLSRERERLIGERTAHGNRIKGLLHGQGVRDVEPRRKDFREQLARARTGDGRALPPKLVTEIVREHVRLKLIVEQLAEVEGLMKAEREAAAPDSRAAQVNRLIELKSIGAVGGETLVNEVFWRDFQNRRQVGAYFGLVGTPFDSGQSAREQGISKSGNGRARTLAIELAWLWLRYQPDSALSRWFKQRVGDQKGRVKRIAIVALARKLMVALWRFLTQGLVPENAIVRAAAPAGR

SEQ ID NO: 149922 - protein, 339 aa, unidentified
MTVKTVGLDLAKDVFQVHGISAAGRKIFNKKIKRPKLLAFFETLPRCVVGMEACGSAHYWGRELSRLGHDVRLMPAAYVKPYVKRGKTDAADAEAICEAVRRPTMRFVEVKSEDQQAILALHRTRDLAVRQRTQLANMIRSLLREFGHVLRSGIEAVIAFAKRHLEGERPDMPDLASGILGTVCHQFLGVHERVEGYSKMIERHALLDAGARRLMRMPGVGPITASAIVATIGDAKQFRTGRDLAAWLGLTPLNKSSGGKEKLGKITKKGDRYIRKLLITGMTSRALMGRKHPERIDIWSARILAEKPFRLATVAMANKSARIIWAILTKQQEYRQPVA

SEQ ID NO: 149923 - protein, 336 aa, unidentified
MSVYVGIDVHRKRSQVAVVAEDGKVQLNKNTVNGTEPLLRLIGDLPAGTPVASEAAFGWSWLAGLLEAYGFEAHLVHPLRCKAIASARLKNDKVDAATLAQLLRADLLPEAWLAPAEVRQLRALLRHRTGLVRLGTQQRNRIHAVVADFGYDRSGSYLSGPGRGWLAGLELPAVSREIVTDALAVIDGLALLTDRIDGELRQHAKADPRVKILNTLPGVGQFTALVMLAEIGDITRFGSARKLASRAGLTPTVRGSDLHVRHGHISKQGSAWLRWVLNQAAQTAKRSPEFAATYQTIAKKRGKKIATIAIARKLLTRAWHLLADMEATDPATPLRP

SEQ ID NO: 149924 - protein, 395 aa, unidentified
MYFLGIDIGKRTHVASIMNEEGKVLLKGFSFPNTTEGAESLIERMVDYSGAPSDFVIGMEATGHYWLSIFSYLHESDYLIHVVNPLQTDGWRKGTEIRKRKNDIIDSVLIADLMRYGSFVETVLSDENVFSLKQLSRYRTYLVGTASDFKRKIIAVLDQVFPEYATIFTKQGVFGKASKELLLAFSAPIDLENISSETLAQYLAELSRNRIKAEKADQLKQAASNSFGVKFAQEAFTFQLRSMIEQLKFIESQIKETEREIKHIMDTLNSVILTIPGIGPINGATILGEIGDIQKFSNPKKLVAYAGIDASVTQSGQYEATHNVMSKRGSPYLRKALFSAALVASQCDPVFSAFYQKKVSEGKHHLTALGVVSRKLCYVIHAILTKNEPYIIVSD

SEQ ID NO: 149925 - protein, 402 aa, unidentified
MNCVGIDVSKGKSMIAVMRPFGEVVVSPFEVRHTASELSKLAGLLKSLDGETRVVMESTGNYHAPVAWLLHDAGLYVSVVNAMLVHDYGNNSLRRGKTDKKDAVKLANYGLDHWLTLPRYVPEEDTRLMLKTCYRQYQQYSKVQTMLKNNLISLLDTTFPDANRLFTSPPRTDGSEKWVDFVAAFWHCECVCGLSEKAFAAKYQKWCRKHGYHFSEDKALDIYASACGHFGVMPKTKTAKLLVEQAIFQLRATSAALAALKQEMQSLAASLPEYPVVMEMFGVGPTLGPQLMAEIGDVRRFHSKKALVAFAGIDAPPYQSGQMDVRSRSISKRGSAALRRTLFLVMGVYLQSAPMGEPVYQFMDKKRSEGKPYRVYMMASANKFLRIYYASVTVYLNTQTQA

SEQ ID NO: 149926 - protein, 373 aa, unidentified
MYRIIKIGMDVHSKNYTLCAMEPLIGEEDRIFANIQVTADYKNILMFIEQLKMKLGMSDEYDIQCGYEAGCLGYSLYNQLTAAGVKCVILAPTTMLTQQGKRVKTDARDALMIAQCLSYGGYHAVYIPTQEDDSVKEYLRMRDDHKEALKKIKQQINALCLRHGHHYEGTTWTIKHVTWLRKLELPSLYRETLDEYMASFDEQTAKIERFDQRIEELSSQEQYWEKVKKLCCFLGIKTHTALSLIVETGDFSRFAKGNTYAAFLGLAPGEHSSGEKTNRTGISKAGNRHLRQLLIEASRGICKGAVGHKSKELRARQNGNTAEVIAYADRGNTRLRSRYYKFIRHGKKKNVAVAAIARELACFVWGMMTDNIY

SEQ ID NO: 149927 - protein, 310 aa, unidentified
MQNLCGVDVSKDWLDAFVEPGHHRRFANTPEGIAQLARFCRGHAAELVVMEASGGVERLAYTLLWQEGLAAALVNPRGVRDFARAMGHLEKTDRIDARVIAGFARAKAIRPTAPPSLEQQELTALSARLRQVTSDLIVQKQRLHTARDEIARQGLGELIAVLRRQSKDLAARIAALIAADPLWRALDAAFRQVKGVADRTVATLLADLPEIGLLPDKQIGKLAGLAPLADDSGKRQGRRFTRGGRTSVRSLIFLVADIARKYDPTLAEFRTRLLEAGKPKMVVRIALARKLLIRLNAKARETRAALARAA

SEQ ID NO: 149928 - protein, 392 aa, unidentified
MLFVGIDISKSNHSCYIIDSEGTIYENNLQILNNLQGFKTLSQKIHSICQIHNYKNVKIGLESTGHYSTNITNYLYSEGFEVIIFNPIITNNKRKGNTLRKTKTDKTDAKVIATMLFTDRSKSYSPISYQIIELKSLTRYRHRMVKQRSKFKLSYTRLITIIFPELADHVSTVHQKSIQKLFFEFPTAKAIASCHLTKLTNLLKKNSKGKYLKDKAIELKELASKSIGSSNRATAFELQQTIKFIQFLNSEINIIDQKIKDLVDEIKTPLITIPGIGYTLAATIIAEIGDINRFSKPSKLLAFSGLDPSVYQSGKYDASHTMMVKRGSKYLRWAILQAARTVTMRDKTFKDYLNKKLSEGKHYFVALSHVGKKLIRVIFYLLKKNIDFVPQN

SEQ ID NO: 149929 - protein, 385 aa, unidentified
MTHPAHDTTFVARDYDVFGGLDVDKKSMAVTFRDHGTMRKSLKLPYSASQLLNYTRKHFPGQRVAFVYEAGPTGFGLYDELTAANHPCLVVSPSMVPTVQRKRVKTNRLDSNKLSEGLRGGQLRGIHVPAPGYRELRHLVQLRDTQVGQLRATKCRIKSLLLYEGIPFPAANGKWSGRVLRQLEALPCNATVRFKLDQLIDALQFHFLAAAKVQKQIRYFCQNDPELRGCISFLVSLPGVGTITATHALARLGDWRQIKDVRQIAGFLGLVSSEHSTGDKENRGEITRIGDSRLRNKLIQCAWTAIRKDPELRAFYRRIYERQPKKVAARKAIVAVARKLTTRMYAVLKEQRPFVIRADSSIAPLTAEETVGLRERLDSAQNEQP

SEQ ID NO: 149930 - protein, 338 aa, unidentified
MKEYKLISIDLAKNVFQVCAFSDFNKIVFNQRIHPGKVLAKLRTMAPTTVVMEACYSSNYWGREIQKLGHTVKLIPPFKVKPFLIGNKNDANDAIAIAEASLRPKSRFVSVKTIAQQDTQTLLRVRDQLQKIRIMTSNQIHGFLSEYGVFCAKGHKSLMIALAESLAPKSNQLSPIAIEAIRMQSDYYLELKAKEDEITMRLILLCEGNPLYQYLKTIPGIGPLVAATLISSVGDPRHFNNAREFSAWVGLTPLQHASGETSRMGKISKRGDRHLRKMLIHGARSIVNWVKHKEDKLSLWIKSLSERMCSSKVTIAVANKLARIAWAVMTYQVEYCAK

SEQ ID NO: 149931 - protein, 354 aa, unidentified
MKRRTKYVALDVHQTTTVASVREEGGRVIARSIVPTEESALVEFFGGMRGAIHVAFEEGTQAQWLHDLFEPLVDRVVVCDRRGKSRRGNKGDQVDADELSELLRRGGLRAVYHGSPDRATLRELTRTYQNVVEDATRVMLRLKALMRARGIKAPGKSIYQPKNRAEWLAKLPERGVRYRAETLYAQLDVLRELRPKVKAAMVAEARRDGAWGVLRSIPFLGPVRVALLLATMRTPWRFRTKRNLWAYCGLAVVSFSSSDYTLVDGRPVRRRRRPMTRGLNRNHNRVLKDVFKSAATAATGRPGPLQDFYHGMIERGMRDELARVTLTRKLAALTLRLWKTGERYDPAKLTMQAR

SEQ ID NO: 149932 - protein, 337 aa, unidentified
MKYSGIDLHSNNSVVTITDEEDRVMAEKRLPNDLSKILDFLKPWKDEIVGVVVESTFNWYWLVDGLQEAGFKVHLANTVAIKKYDGLKHSGDETDARYLAHLLRLGILPTGTILPKEQRAVRDLSRKRMQLVRSRTAHILAVENITARQLGARISSNQVKQLTGESVDQMPLPGDVALAIKTNVAVITTLSAQIDLLEKRLQERVRARAEYEILTSAPGIGKVLATTILLETGPIERFAAAGNFASYARCVDSVHTSNHKKKGEGNTKNGNKYLAWAFVEAANFALRYNPEAKRFYDRKKSKTNNVVAIKALAHKLARACFHMMKEKKPFDAERCFA

SEQ ID NO: 149933 - protein, 449 aa, unidentified
MSKPILAVGIDPAKRVHRAVGVLFPDEVVFDCELPNALDAIQSLDLRLVQLATTHAAELVYGLEDHRRYGRLLCQVLTERGRDVRVVNPLWTNRQRAFYGQDKDDAIDGRSIAAVVLRRRDQLPLANDFGQLAQAIREAERAVQDLGKKRTELVNRLHLQLSDVYTSVYERYFGELKSPIALRFFRRFPLPQDLSGQDAMQLSSIILGLANGKVGPHKGSDRETFLQAKAETILKTSASLVQTPRTLALELKAELIGQLCDELLVNHDRVVRLERMLRKQMLPATGQTITTMPGIGTILAATIIGETTSVTRFRSRAAYAVYNGTAPARHSTGGRERHKARRDCNHRLKRAFWLAARVAALHDPLAKVYFNQCKSRGLSYNECIKRVARRMSDIVYALLKSGGDYDRTIVEQAIQKRQEQVANADDNRAKEALPIPDQKTLSRRAHDGN

SEQ ID NO: 149934 - protein, 344 aa, unidentified
MLQYVGLDVSLAEVAICVVDEDGTIEFEGTAPSEPNAIADWLLEHDVHPEKVGLEIGGLARWLYSELAERGLPMICIDPRRLRALTKTMPVKTDRNDARAIAQVIRVGWYRPVHIKSPVGQELRMLLANRKTLLVKYGDIENEVRGTLRAFGLKLSSRIASGQFEQRAMELVEDRPRLAAMVRPMLIARSGLREQCAVLHKMLLDAVARDDTCRRLMSVPGVGAVTAVTFLAVIDDPSCFQHSRDVGAHLGMTPRKYASGETDRNGSISKTGDALMRTTLYQASLALLTRSKRWSTLKAWGMAVAKRRGLRRAIVAVARKLVIVMHRIWADGTEFRWTREEAVA

SEQ ID NO: 149935 - protein, 388 aa, unidentified
MNIGADKSEPLTAIHTDLGAIFVSLELSRSSWLITSLSPGGGEKMSKHSVRGGDFAGLMERFTQLQEKARLRTGQSFRIIVVHEAGLDGFWIHRALQNEGIESHVVDAASIATSRRRRRAKTDKIDGETLVRVLLAYKRGEPRVCAMVKVPTPGEEDRRQLCRERKALTAERVRHVNRIKGFLCSQGVSGYQPLRRDRRQRLEELQTGDGRALPQHLKAVINRELDRLELLLKQIKTVEAARDALLAVEQTAKPAPAAMLLAIRGIGPEFAAILWSEGLFRHFENRRQIAAYAGLAPTPWQSGAVDREQGVSKAGNPRLRTTLIQLAWLWLRNQPRSALSVWFHERVNRNGGRLRKTTIVALARKLLVALWKYVTAGVVIEGVTMKVA

SEQ ID NO: 149936 - protein, 339 aa, unidentified
MNEVTLIGIDLGKHSFHLHAQDAAGRMVFRKKLSRQQLLRTLANVPSCRVVMEACAGSHWLARQLAGMGHEPRLISPQFVRPFVVGNKNDFGDAQAICEAACRPSMRFVSPRNEAQQTVSAMHRLRERLVRERTATVNQIHGFLLEFGISLPRGAALMSRLPTVLDHETLPPRLVGLVVRLRAQVHYLEEQLRQVVQDLKASLREDDKSRRLLEIPGIGPITASALAVELGDARQFATARQFAASIGLVPRQYSTGGKPTLLGISKRGDRNLRRLLVQCARAVMQHTASRTDALSLWVKTLSTRRHSNVVACALANKLARIAWAVLARGTHYQARALTT

SEQ ID NO: 149937 - protein, 359 aa, unidentified
MQTQSKTLDFDGQNIYVGFDVHLKSWKVTIMTDELILKTFSQPPEPEVLHQYLLKNFPGGVYHSAYEAGFSGYWIHNSLVNLGIHSIVVNPADIPTTNKEKVQKDDKRDSRKIAKALRSGDLVPIYVPSSKTLEDRYLIRARGLLVKDLTRNKNRIKSFLYFHGIKYPPSFENSKTHWSKRFVDWLEGIEMKEDTSKLTLSILVSEGKKLRSTILNVTRSIKELSQTVAYQEQERLLRSVPGIGALTAMIILTEIETITRFSNTDHFHSFVGIVPSTRSSGEDDKVGEITPRGHGTLRSAIIESSWIAARIDPALTKAFHEYCKRMEPNKAIVRIAKKLLNRISFVLKTKQSYRLSVLK

SEQ ID NO: 149938 - protein, 311 aa, unidentified
MEIKKFYIGIDVSKDKLDVACQGEKAVKQYRNNQEGIQKMLTGFQGIEIERIVVEATAGFERDAVKKMLHLGLPVALINPTRVRRYAQAQGQHAKTDSLDAHVLADFGKAMRPEISQLKSDLEEQIGLRVTRRRQLVGIQTEEKNRLTTAHPDHLPGIKKHLAWLKTEIETLEQELEALANSDPDFQEKIACLQSVPGVGAVTALTLIAEMPELGVVNRKQIAALAGVAPYNRDSGHRTGRRHTFGGRSSVRSTLYMAALSATRHNPRIKEFYERLLANGKEKKVALTACMRKLLVILNAMARDQKPWQFA

SEQ ID NO: 149939 - protein, 413 aa, unidentified
MDVLHERCAALDIGKKDLKACVRTPAPRGRRSRAQTVRTFATTTGALLELREWLVSENVTLVVMEATGDYWRGAFYLLEEGLNVMLVNAAHAKGLPGRKTDVSDAAWLCQLGECGLLKASFVPPEPIRQLRDLTRYRTTLTAERTREAQRLEKELEDAGIKLSAVASDILGVSGRAMLAALIDGDRDAHRLAQKAKGRMRPKIPLLEQALTGNFGEHHAFLCRLHLERIDQLSAAIDALSERIEEQMRPFRRRLDRLVTIPGVGQATAEVIIAETGADMTRFRTAAHLASWAGVCPGHHESAGKRRSGKTRHGNRWLTGALGAAAMAVSRTRNTYLGARYHRLVPRLGKQKTIVAIEHSILTAVWHMLSTDTDYHDLGADYFARRDPEQAIRRITRQANALGLTVRFDPIEAA

SEQ ID NO: 149940 - protein, 354 aa, unidentified
MSKIKQLNFEGKTIYCGLDVHKTNWKVNARMNNIEIGAFSQNPDTDLLKKHFENNYPGAELKVVYEAGFCGFGIQRSLTGIGVSCIVVNAADVPASDKDRKRKDDKRDARKLSVELAKGDLKAIYVPDKQMEHARSLVRQRHRLVQDQTRCANRIKHLLMNHGIRTGEKSERWSLTFIKKLQQLEYGSEALKMSLQFAIEQYLQIRRIQKEVTLAIRNLSKQEPFASVQKILQSIDGIGLINGMVIQTEIIDIQRFRKLDSLCDYAGFVPDIYSSNDKMVIKGISPRANEFLRETIIESSWVLIRKDSAMLMKYNEYRSRMNSNKAIIRIGKHLLSRIRYLWKNGEMYKRGIVG

SEQ ID NO: 149941 - protein, 388 aa, unidentified
MIYVGIDIAKLNHFASAISSDGEILMEPFQFSNDADGFHMLVSRLDSLESDNIIIALESTAHYGDNLVRYLVASSFNVCVLNPIKTSSMRKNNIRKTKTDKVDTYIIAKTLMMQDSYRFVTFYDLDLMDLKQLGRFRQKAIKQRTRLKIQLTSYVDQAFPELQYFFKSGLHHKAVYALLKEAPSPQDIASMHMTHLSHLLTTASHGHFKKEQANELRVLARKSVGANDSALSIQITQTIAQIELLDSQLKKVETEMTEIMTFHDSVIMTIPGIGYINGGIILGEIGDIHRFSTPSKLLAFAGLDPSVYQSGNFQARRTRMSKRGSRVLRYALINAAHNVVKNNATFKAYYDKKMAEGRTHYNALGHCAGKLVRVIWKMLTDEVEFNLE

SEQ ID NO: 149942 - protein, 315 aa, unidentified
MTTTSEEVFIGIDISKAQMDVAIWGQEETWEFCNDIAGRQELVEKAQELKPSLIVIEASGGIEQRIVAELYLERLPIAIVNPTRVRNFARSTGQLAKTDKLDARLIAQFGQAVRPQVRPLRTAEQEHLNALVTRRRQVVQILTAEKNRRSTTYSTLSKRLQRHIDWLASELKALDLEIEQYIQESPSWRKNAALLRSVPGIGPVTASTLLAELPELGTRNRQQIAALVGVAPLNKDSGKMRGKRRVFGGRAPVRRALYMATLVATQFNPVIRTFYEHLLAQGKEKKVALTACMRKLLVILNSMIRYQQSWRPYRT

SEQ ID NO: 149943 - protein, 356 aa, unidentified
MVTFGIDPHKRTHTVAAVDGLGRALGQMTVKQTTSAANLALLRWAERFGPDRQWAVEDCRRWSRRLEGDLLRAGERVRRVPPKLMAHARDADRSYGKSDPIDAVAVARAALRHPDLPAAHLDGPTRRLRLLVDHREDLVNERTRGINRLREHLHELDAEWDPPTQALRRLCQLDAIITRLAAIEAASVDSIEGVVARIAGEIAGRVRQLTVAETALEREISSLVAPLAENLLGVVGVGALTAAKILGEVADITRFRDANAFARHTGTAPVPASSGGTQRHRLARTGNRQLNSALHRVALTQARCHPPARAYRARRHANGDSPTEATRALKRRLSDVIYRALHADAHLLDTPLPQAA

SEQ ID NO: 149944 - protein, 347 aa, unidentified
MKFYTTFHKYYCGIDLHARILYVCILDERGNKVVHQKIKADKHELLKLILPYLEDIVIGVECMHCWYWVSDLCAEHDIDFVLGHALYMTAIHGGKAKNDKIDSYKIASLLRGGNFPLAYNYPANMRSTRDLLRRRTRLVQHGAQLKAHIVNTNSQYNYPPLELHMKNKCVRQEFQTRFDDQAVQLNVNFDLAILDAYAEELKKLEYYLESKAKKHQPNYYAQLRTIPGIGLILAMTILYEIGDINRFESVQTFASYCRLVKCKAESAGKTYGTSGNKIGNGHLKWAFSEAAVLYLRGNDKARNYLNKLQKRMSKAKALSVLAHKLGRCVYFMLKNKTVFDDERFLKS

SEQ ID NO: 149945 - protein, 320 aa, unidentified
MMAQNNLVVVGIDVAKDKVDARIRSLPTGRTFPATSAGRRQLTSWLRSHQVTKAVMEASGGYERGWARTLRETGIEVRIVDPKRVRSFARSAGRLAKNDTIDAEMIAWFAETFDQAPHQAYDAAREKLAQMVNARQGLLDLQTTLQNRDEHSDVQEVHQMHARLLKKIIGEVVRLEAAIAALIKATKDLAELAEIIESVPGLGEITSAGLLAAMPELGQVSNKIAAALLGVAPYDDDSGKRRGERQIKGGRRRVRNLFYMACLGAATRHNPVLKAFYRRLIAKGKQPKVALVACMRKLIVILNTMIARRQKWNPALCAAS

SEQ ID NO: 149946 - protein, 382 aa, unidentified
MKKATTGVRRFVGLDVHAQTIAAAMAEKQEAVRGLGTIANREECVRKLVKKLNEGGAWTACYEAGPTGYTLYWQLTKLGIPCVVIAPTLVPTKAGDRVKTDRRDAERLASSFRAGELTPVWVPDAAHEALRDLVRAREAAKQDQLRARHRLGKYLLRHGKRPPQQLRAWTQNYLGWIKGKVTFDQRSQQVTLEDYLGEVEHAEVRITRLEKAIGEAVEQAPESMRELIQALQALRGVAKVGAVTIVAEVGRLTRFEHPRQLMGYSGAVSSEHSSGGKIRRGGITKTGNAHLRRVIVEAAWSQRYKPVLSSVMRKRQEGLSAEVQEIASKARHRLHSRYMRLLGKGKTKQEVVTAVAREMLGFIWAIGVSVERAQAQRAKGVA

SEQ ID NO: 149947 - protein, 372 aa, unidentified
MPQRSRVFVGLDTCKLKISVALAEEGRQGEVRFLGEIDNTPEAVRRLVGKLASRYSEVLFCYEAGPTGYGLQRQIAALGHECDVIAPSLIPKRPGERVKTNRRDALTLARLHRAGELTAIWVPDPGHEAVRELVRAREAAMADLRAKRQHLQSFLLRHGRLFPGRKPWTRAHARWLSELAFEHPAQYLVLREYRQGLEDAQARLERLTQQIAEVLTTWSMAPVVEAYQALRGVALLTAVTFVAEIGDVRRFESPRQLMAYLGLVPCESSTGERVRRGSITKAGNTRVRRVLIEGAWTYRFPARMSRLLQERQANLPQIVRTIAWKAQVRLCARYRRLMAAGKRQTVVTTAIAREMAAFLWAIGHAIEPRSAA

SEQ ID NO: 149948 - protein, 311 aa, unidentified
MAFLHHPPHRCLGFDIAKDTIAVCDGLTVQVIDNRRPAIRRFLRDYQPDFAVCEPTGGHEAILIEECLHAHLPVHRADTRKLKAFIRSRGQLGKSDAIDARELAAYGRERWASLPLWRAADPCTERLKALVRRRDDLVVMRVAEQNRAKAPGASELADTFKAVLAVIERQIERVEQAIKALTQGDHLKRRFDVLTAMHGIGQITAAALIAAMPELGTMDRKQAAALAGLAPHPNESGKKIGYRRMRGGRPEVRTILFMPAMQAAGGRGEFAQFYKRLIAAGKKPILAIAAVMRKMIVTLNARLRDEQTQQS

SEQ ID NO: 149949 - protein, 355 aa, unidentified
MAANEKATKAKSTQLELTSIGVDIGKDVFHIVGFDRDGKIALRRKFKRLALTKEFEKLPRCVVGMEACLSAHFVSRQLRALGFKPRIIPAIYVKPFLKGQKNDYNDAEAIAEAAQRPNLKLVKEKTQDQLDLQALHRVRSRLVSRRTATINQIRAFLIEQGIAVRTGANSLRNSLLAILRNRKDEISSRMNDLIIGLYEDWLGLDQRIETVTQEVEEISRREKNCQRLMSVPGIGPMISTATVAAIGTGEAFERGRDFGAWIGLVPRQYSTGGRSILGRISKRGSKYLRTLFIQAAQVILMRPQNWEKFSFGPWLTEAAKRMHRNKLATALANKLARIAWSILRHGKRFDETLAV

SEQ ID NO: 149950 - protein, 310 aa, unidentified
MHPCVGVDVSKHHLDWTFGEDGPVERVLNTPAGIRRLVERARRDEPSLFVVESTGGYERKLIVALHEAGLPVVLVNPWRVRRFGEGLGRLAKTDPIDARLLALYGERAQPPRRPLPGARARGMADLIARRRQLVMFVVAEKSRLENASAWVQRDIASLVAVVERRIAKLDTRIDAAIAEDPEQHETREILESTPCVGAGVARALIVDLPELGSLSRREIASLVGLAPYSRDSGRKSGIRRIRGGRPGPRTALYLAAMNGARFNPVLKALYLRLRASGKPAKLAFVALARKLLTLLNAMVRDRSPWREITA

SEQ ID NO: 149951 - protein, 312 aa, unidentified
MDAVIIGIDVSKDRLDVAVRPDGETFSVSRTGGGIDELIERLKLCAIKLVAIEATGGFETVVAAGLAGAGLPVVVVNPAQVRAFAQALGKRAKTDPIDAAVIAHFAEATNPQVRPLPDATTQLLAELVARRRQIVEMIAAESQRARHISAARLKKSIARLRKALEKELAELDDDISDHVRGSPAWAEKEDLLASVPGIGPTIARTLIAELPELGSLDRRQIAALAGLAPWTRQSGKWRGKSFIGGGRSSVRRVLFMGALVAARFNPVFKQFRDRLVAAGKPKLVAIIAVARKLLTILNAILRDRRPWQPKVA

SEQ ID NO: 149952 - protein, 320 aa, unidentified
MMYFVGLDVSVKETSVCVVDEAGQVVSEHRTVTEPDAIAVLLTSLGCEYGRVGLEAGPLSQWLVNGLAEAGLPVICVETRPMKSLLKAQQVNKSDRHDARGIAQMMRVGLFKPVHVKTLASQEKRMLLTSRKLLQRKLLDIECDLRGTLRNFGLKVGAIARGGFEARIRELVDGFPRLSAIVEPLLAVRRILRQEFARLHKMLLELVRHDPVCRRLMTAPGIGAVVALPYQATVDQPQRFLHSKSVGAHVGLVPKRHQSGEADYDGGISKCGDTMLRTMLYEAAQTVLTQTRSWLKAWGLRVAKRRGMRRAIVAVPGGWR

SEQ ID NO: 149953 - protein, 368 aa, unidentified
MGKSSKLYVGMDVHKGSIDVATGDDAAGEVRHLGAIGGEMGSVGKLARKLESTGKVLVFVYEAGPCGFGIYRMLRDRGHECWVVSPGMTPRSNADRVKTDRRDCLKLARLARAGELTPIHVPDEADEAMRDLVRAREDAVVMQRQVRQRLGALLLRNDVRYNGKTAWSPAHRRWIAELKLPHAAQHIAFEEYAQGVDEAGKRIERLEAAIGDELTRWRWRPVVAALEAFRGIRSIHAVRLVAELGDLTRFASPRPLMGFLGLVPSENSTGNRRRQGAITKTGNSSARRALVEAAWAYRYGARVSVGIAKRQSGLPKPVTDLAWKAQLRLCSRYRRLSARGLNRNKIIVAVARELSGFVWALGQQVKPL

SEQ ID NO: 149954 - protein, 324 aa, unidentified
MTTTTTTTTTAIGVDPHPASYTAAALDASTGKVLDAVTVENDREGHERLLSWAGAFPGRRWAVEGAANPFVSAFAGRLLAEGEPVTDVPPSLTSQYRSKRGRKKNDEVDAINAARASLANPELPGYDPGPHQEELKLLSRTRDRLAVELKAKRMALKAQPEGSPVRCALERVAACLAEEVKALDALLAELVEEVEPEVLEVQGVGPVLGATILAEVGDVSRFPSADRFASYCGGSPVDRSSGKKTKGRVGVNPGGNRRMNRVLHLIGRVRLRLDPRSKALFSRKRAEGKTLREAWRVLKTYIARELYRTLKALKEGRDLAPIAA

SEQ ID NO: 149955 - protein, 403 aa, unidentified
MGVDWAKDNHTICVLDAEQKVIERRTIEHSGTGVGQLGDLLAKLSEGDHGCLAVAIETPRGAVVESLVERGFAVYSLNPKQMDRFRDRHTVAGAKDDRRDAFVMADALRTDLHLFHRVKLDDPLIIRIRELSRAEEDIQHEQVRAGHQLRELLNRYYPQMLGLCPAVDEPWFWDLIELAPLPVPEARLSRSKIEKLLRSHRIRRLDADGIRQALSVPALKLASGAAEAASEHVLLILPILRLFLRQRKELERRIEAVLEQMSTEGQFAEHRDVTILRSLPGVGRVITATMLAEASQPLAERDYHALRSYGGAAPITRQSGKRKSVLMRQSCNPRLRNAIYHWSRVSTQCDQRSKEHYAELRAKGHSHGRALRGVADRLLAVLIAMLDSGTTYDPSRRAAVAPQ

SEQ ID NO: 149956 - protein, 401 aa, unidentified
MVSIGIDVSKGKSTVCFLKPYGEVLHKPFEVQHTEKELKALVEMINTLSEEARVVMESTGAYHYPVLACLKEQGIFVSVINPLVMSKYANMAIRKGKTDKLDTIKIANFGLDHCFRLVDYTPSTDVYDELKVLNRQYLSYISMRIRAKQTLTNLLDRTMPGIKTQLLNRSDVPDRDKLCDFVKEYWHFDNITCMSEAEFITNYNNWAKKQGYQASTEKAKKIYALALEGIPTLPSSTPSTKMLVLEAVKALHMIDTTLALILAQMRDLAKSLKEYDTVMAMPGVGEILGPRLIAEIGDIGRFYSSSALVAYAGLDAPPFQSGNYIAANRNISKRGSASLRRTGYEVMRFLKIAKPIKDNAVYLYMIKKENEGKPRKVAKIAALNKFLRIYYARVKEVYSLV

SEQ ID NO: 149957 - protein, 284 aa, unidentified
MHPYQIAISTRPGKITGTRRLNRDQMLQFFATQPKSWVFMEACGTAHYWGRKIQEFGHDGVLLPPHQVRPYVRGNKTDRTDARGIIDAGGNEDIYPVPIKTMNQQQMTALHRMRSRWMTERTKRLNSLRGLLREFGVFIAAGARNVVPVVWQAIEDADSGVPDGLRPVLEEACQELRDIEARIAVATKQIEAIAKQTPSVELLMTIPGVGLLTALVAFLGDIRRFKSGRHLASYLGLTPREYSSGLKRYLGRISKRGDGYLRTLLIHGARSTLTHAHKRVPDHF

SEQ ID NO: 149958 - protein, 363 aa, unidentified
MEKRYIGIDLHRNRFTCCIRLENERTYVTGWELADLRKFVKKLRPTDEIAVEITGNTRLFFDAVAARVARVVVVNTNQFKVICQSVKKTDPHDARALALYLSKDMLPEVRMKDKQHGQLASLTQTRDTLVKLRTALKNKINNILSARGLNLAKEALGSEKKLNEVLELPFDDIVRIELRVIVEQIRSLNRSIAELEKTIGEEGSKLDGHKGLSSIKGIGKITGAILLSVIGDVNDFADEGHLASYFGIVPRVSNSNETQHSGRIHKRGTKLGRTALVQSALIAANYSPYLKHFYEQVKARRGAGKAIIALARKFLGIIYRTLKNKWVFEDSRISCWRRRHEKAREPTTGNPGIWFQLRRPSSP

SEQ ID NO: 149959 - protein, 322 aa, unidentified
MQNVALIGIDLGKHSFHIHCQDQSGKALLRKKFTRTKLMQFLATCPSSVVVMEACAGAHFMARRISDIGHEAKLISLQFVRPFVKSNKNDFVDAEAICEAASRPSMRFVQPRTEVQQAMRALHRVRESLIRDKVKTINQIHGFLLEFGISLPIGDAVIKRLSLVLAEHEIPEYLSHLLMKSHAYYLYLVEQITELASELNQSIKADAAAQRIMTIPGVGPITASLLSSQLGDGKQFSCSRDFAASAGLVPRQYSTGGKSTLLGISKRGGKNLRRLLVQCARSFMMQLEHQQGRLAEWVRKQLDNKHSNIVACALANKLARIA

SEQ ID NO: 149960 - protein, 351 aa, unidentified
MQIHSVGIALGKTMFHLVALGAAGKVVVRKKFTQKQLLTYTANLQTSLIGLEACSGAHFLGRALRKQGHDVRLIAAQFVKPFLKSNKNDFVDAEAIAEAVERKNMRFVPIKTDDQLDLQAIHRVRDRLISRRTAVINQLRAFLLERGMVFAQKPAKLKAAMADILENAEADLTPPMRNLIDTLWGEWKLVEQQIEELNDELERISASDAGCTRIRQIPGIGPVVATAIVAAIGNGAAFRKGREFAAWLGIVPRQYSTGGKAKLLGISKRGNVYLRKILIHGARAAVLRIKRDRAPIGAWLDALDSRAPKNVVVVAMANKLARIAWAVLSAATTTDPSPRNSAEKTPAAWKR

SEQ ID NO: 149961 - protein, 320 aa, unidentified
MMAQNDLVVVGIDVAKDKVDACIRALGLRQTFPSTIQGHRKLVAWLRKHQVNKAVMEASGGYERAWAKVLREAGLEVRIVDPKRVRSFALSAGRLAKNDTIDAEMIAWFAETFSDAPGQKHDAAHEELQALVKARLSLIDLRMRLVSQSEHAAPGLVQKAHAHILKSLASEIAKLEAAICAKIKSLPDFAERAEIIESVPGFAETSSANLVAGMPELGQVSDEIAAALIGVAPYDDDSGKRRGERHIKGGRRWVRNAIYMPCVGAATLNNPVLKAYYPRLIAKGKEPQVAIIACMRKLIVILNTMIARRQKWDPSRYALS

SEQ ID NO: 149962 - protein, 331 aa, unidentified
MNRQNFCYFIGIDISKKVFDVAIIKDERTTSYVFENTKKGTNAFIRLLKNQKILLENTLICMEHTGVYGKLIITKLVEKQANFCVEMPIQITKSIGLLRGKNDKVDAQRIAQYASKNFRKLELYKPIPEILEKVRILLKIRKQLVNARADFNKYPNELELFSPEMGKLAKKNLKKINKTLCDEIKRVEAEIKKLILSDDKLNKTVGLVTSVTGIGQITALHFTVFTSFFTRYDNPKQLACYCGVVPFEYTSGSSINRKSRIHPMANRTLKKHLHMSALAAINHDPDIREYYLRKVEEGKNKMLIVNNVRNKLVHRICAVIKRQQPYVKNVA

SEQ ID NO: 149963 - protein, 332 aa, unidentified
MSNYSNAIGIDISRDTFDFHDYKLETHKEYPNSEPGFKQLLSQAKKDHGKNLNGIIICMEHTGLYSLPISVFLTQKNVSFSMIPGLEIKKSLGMAREKNDKIDAYQIARYAYLRREEIKEFELPSEDILKLKSLLSLRERMVKHRTSYLGHLKELKAFYKKNKNPLLFKIQKKLIKELSIQIKCIETEMIEIIKNDPNLKNLYYLVTSVKGVGLIVGITFLVYTNAFTAFENWRQFATYSGIAPFSDESGKSRKKPKKVSHMANKRIKALLSNSATTSILHNPEMRLYYEKRISEGKSKMSTLNIIRNKIVSRVFAVVKRGTPYVDTLKYAG

SEQ ID NO: 149964 - protein, 355 aa, unidentified
MDSVKYIGMDVHKEAISVAVLNFSGKLVMECTIETKAITILDFFKGLRGSLHVTFEEGTWAAWLYDLIKPHVAELVVCNPRRNALLKEGSKSDRIDARKLAELLRSNMVRSVYHGEHGVRTLRELARSYLTISTDLIRVMTRVKAIYRSWGIPCRGKQVYAERYRAEWLGKIQEVGVRRRAEFYYQQFDALRALRQQVRRALLSEAQKHEAWKLLREIPFIGPIRAALLIALMQTPHRFRTKRQLWSYSGFGIETHSSAEQRFVQGELRRAKKPASIRGLNRNHNHELKNVFKGAATVASAKAGPFKEFYDALVAKGIRPEMARLTLARKMAAITLIVWKKGVRFDAQHLKPQTA

SEQ ID NO: 149965 - protein, 291 aa, unidentified
MAKARTLVGLDVPATKIVAAVLDAETGELRWFRVGGDVGEAAGLCAGLPRPVRAAYEAGPTGYGLARELARRGVECVVAAPSKIPRASGERVKTDRRDAEHLVRLLLAGKLHAVRVPGPEEEALRDLVRAREAVRVDLMRCRHRLSKLLLRHGIRFEDGRAWTDRHHAWLAGIELGWPAAQATFADACGAADALVHRRDALEREILALLPGSPWQTQLARLRCLRGIDTLTAAGLCAEIGDFERFARAEQLMSYVGLVPSESTTGASRRLGAITKTGSGHARRLLVEAAWH

SEQ ID NO: 149966 - protein, 372 aa, unidentified
MVMTISRRGLETPFVFGINPPRSMVPRPIVVHPEQMTGTIITGRSRVLQDKEISMTAAEPTAPPITIGIDISKATLDVHFAPANKNLRLPNTPRGHAQLIRAVNGRAVAACVFEATGRYGRDLHRALHDAGLPAIQVNPRQAAFFLKSHNPSHKTDRSDAQALAAMATALPLRVTPPPTAEQEVLRELTSVRMSLVRDRAALREQLKAAVTDIAKNALESVVKTVDAEIAALERKIRESVESNPRFKAMAALIQTVPGIGEHCAHALLAFLPELGSLTGKQIAALVGVAPRARDSGSFKGKRSIHGGRAELRTALYMAALTAMRCNPAIRDWIEKNGKAAKPHKVIRIAVVRKLAVIINAMVKNNTPWHYRP

SEQ ID NO: 149967 - protein, 341 aa, unidentified
MKLIRVGVDLAKNVFQLHGVDRSEKTVWRRKLVRGDWIKALLDRIEPGCEIGMEACSGAHHWARVLQAQGFTVKLIAPQFVKPYVKSNKNDANDAEAICEAMSRPSMRFVAVKTVEQQDIQAVHRVRSGLMDQRKAKANQLRGLASEYGLVAPKELLHLRLAIPRWLEDQENGLSERFRRLLRGLWQDLLAFDERIEELDREIAQIARQDPVAVRLQQVRGIGPLTATALLATVGDARQFSNGREMAASFGLTPKQNSSGGKERLLGISKRGNAYLRSLLVHGARAVIRTAQTKTDRLSIWVMRIATTRHPNIAAVALANKTARIVWAMLTKGTDYRHQTA

SEQ ID NO: 149968 - protein, 310 aa, unidentified
MKNSIGIDISKAHLDVHHLGTGRTAHFSNAPAGFRALTRFIGTQQPDLVVYEATGPYHARFERAFSGRLPLVKVNPLQARRFAQACGTRTKTDAVDARVLAQMGHALELAADAPASEKHHALKELQVARTALAKEKTRLKNRLKTQNLAFTQRQTKARIDQVSRQLKALQVEIEAQLRSCPHLARNHDILRSIPGIGEIAAAAILIECPEIGTLGKKQAASLAGLAPMTRPSGKWQGKAFIQGGRKFLRDALYMPALVAARFNPDLARKYKVLTDAGKPPKVALAAIMRKLIELANTLIMQDRKWTPKRA

SEQ ID NO: 149969 - protein, 502 aa, unidentified
MRGHTRKIPFGRMLSLPSPCSRMLRASMEERLMKHNRRRSLGKPRVSPTVLDRINPNVAGIDCGSAEHFVAVPPDRDATPVRSFQTFTGDLVRLAEWLTVCRVQSVAMEATGVYWIPIYEILEARGFEVLLVNARHLKNVPGRKSDVSDCEWIRELHSVGLLRGSFRPPDALVALRAYLRHRQTLIESAGTYVQRMQKALIQMNVQLAVVISDITGVTGLRILRDIVEGQRNPEHLAQHRDPRCRASEAEIVAALTGHYRPEHLFVLRQNLELFDTCQAQLAACDLAIEGHVRTLLADVATPGTPLPAPRVTRKPRDNEPRFEIRTPLHHLTGGVDLTQIDGITPYTALKLISEIGIDMARWPTEKHFTSWLTLAPKNKISGGRLLSSRTQPSANRAAAILRMTVMSLGRTDTVLGAFYRRLASRIGKPQAITAAARKLAILVYRTLRGDLVYQRLGADAYEAQQRTRTLRRLRHRAASLGFALVNRATGEILSPSVSYSAP

SEQ ID NO: 149970 - protein, 417 aa, unidentified
MSEYAAFVGFDWADKKHDLCLVDAATGKKEFAVIKHTPQALQEWATAVRSRFGGQKVAVALEQSRGPLIFALLKYDFLVLYPINPSTLARYREAFSPSRAKDDPRDAEYAVELLLHHRERLKAWLPDDEQTRTLQYLVEHRRRVVGDRTRLSNRMTALLKLYFPQVLEWFEDIRTDLVCDFLLKWPTLEEVQKVKRATLEKFFREHHSVRQEALSARLKAIKESVPLTTDRAVISSSALMIKTLAAQMKTAISAIKEFDRKIAELCANHEDYHLFASLPGSGSVYSSRLLAAFGTERKRYESADEVARYAGIAPVIERSGQSCWIRWRYFCPKFLRQSFHEYAGESIKHSFWARAYYAEQKAKGKSHQAAVRALAFKWIRVIYRCWQARTEYNEVKYLESLRKKGSPLLNYAANNPQ

SEQ ID NO: 149971 - protein, 347 aa, unidentified
MKIIGCDFHPSFQQIAMVDTETGEHTEKRLTPGEAVEFYSQLSGKVVVGIEASGNTLWFERLLAKLGQQMRMGDASKIRTLELRKQKTDRRDAELLLKLLLEDRFPEIWVPNLEIRDARQLLVHRQKLVGMRRQVKNQLQHLALNQGVQRKRKLWSQKGRQELKELPLTGWTARRRDDSLRLLDDLDQDIAELDVAVEREASNSPVARLLQTHPGVGPVTSLAYVLTLGKIERFQHSRQVVSYLGLNPAENSSGGRQRLGAISKQGNPMLRSLLVEAGQSASRVDTELKRAYQRLKQRKHSAVAKVMVARKLTVRLYWMWRTQQPYTVTRMQGSPSHPVAAVLKPTA

SEQ ID NO: 149972 - protein, 443 aa, unidentified
MSFDRLKRTQRRKRLPGHKLKPSRATLFVQNSKPHLSMKPTYFLGIDAAKHKMRATLSNRSEHVLFEKDLSVQATGLRQLLAAIKRQVNDPEQLLVLIEATGLLHLNWSAALTKAGYAVAVINPLIARRLYTLQNSIRDNKSDPIDARGLCTIGLLHGEKLLVHYRFSLRPEQFTLQRAQSVRKALRSALTNLKKTYQSLMDLSFPELGGLLQLDGVGIRQLLIQAPTPAAIAGKRLSTLENNWMVRPKAAALKALAADSMADPDLAAASGPALVALLQSVAAMEARLHALDQQIAKLACTSVDPQTKALIETIPGFGPVNAAKTLAWLPTEILHSGSNRKVAARLQAFMGNDPRLRQSGQWKGHTKMSKRGVEMLRTAFFQSAFSAAHNDPELRAYYQCKRAQGKTHQVALSHLMRILTRRLVAVLRSGKPYQSHYNLKNAA

SEQ ID NO: 149973 - protein, 365 aa, unidentified
MSEIITYVGIDAHKRDLHVAMLGEAARTPVTWVVENEPKAVERLHRKLERDAPGRVQVCYEAGPCGYALQRQLTKGPVTCVVIAPALMPRKPGDRVKTDRRDARRLAELLRAGLLTEVRPPTPAEEAVRDLCRARDDARDDVQRARHRLGKLLLRRGLHWAGKNWTKAHRQWITTIQWEHAAERAVVDDYLLAIAQVERRLEDLDAQLAATAQTEPYREPVAWLRCFRGIDTLTAMLILAELHDFRRFPSPRALMAYLGLVPSEDSSGDRHRRGRITKTGNTLVRRVLIEASWHYQHRPGVGVGLAARRKGQPAGVIAIADKAQHRLCRRFRRLAAKDKPAGKVVVAVARELTGFIWAALQPVAA

SEQ ID NO: 149974 - protein, 468 aa, unidentified
MNKRKSPKAKAKLNVKLVENLEPVDRDAAGLDIGASEIYVAVPPDRSNESVRVFPTFTADLYALAEWLTQCGIRSVAMESSGIYWIPIYEILEAKGFDVRLVNARHVHQTGSPKTDILDCQRIQQLHSYGLLRGSFQPSEEIRAIRALVRHRENLLQSRAVHIQHMQKSLHLMNLQLTNVLNDITGVTGMTIIRAILAGCRDPQELAQYRDPRCAKSKAEIAKSLEGNYKSEHLFSLRQAVELYDVYNSKMAACDQEIEQRYAAMQTPVAPEQQPPLQPKISRSKNNPDFDLRTALYHMTGVDLTAIDGIEALTVQTIISEIGVDMSKWPTLKQCFAWLCLAPNNEISGGKRLNTATKKVSSRANLAFRQAAQSLANSKSALGSFYRKMRARFGPAVANVATAHKLARIFYTMLKTRQPYRAQDLDVYEAQNNQRTVRRLRQQAHSLGLELVPATIATPVAEPQLIAT

SEQ ID NO: 149975 - protein, 411 aa, unidentified
METITNLFMEVTMISVGIDVSKEKSTVCMLKPYGEVVSRPFEINHVDKELGELSNMLLRFDDEVKVIMEATGIYHLPVLTYLQGQGIFVAVINPFEMKEYRCQGLRKVKTDKQDSIMISNYGIDHWFHLKNYEIVTGVYEELKLLGRQYRHYMGMRIESTQELTHLLDYTMPGIKSLLKGWNERSGKDKLSDFAEKYWHYDNITRTSEKQFINSYIKWSEKKGYQQSQDKAAKIYALAKEGIPTLSADIQSVKMLLLEAVRVLREVDNTLIKILSQMKMLAKMLPEYSVVRAMGGVGDVLTVKLIAEIGDVRRFHNGKALVAHAGIDAPPYQSGQFIGSQRKISKRGSATLRKIGYETMRCLKTHKAPADDAVYNFIIKKEQEGKAKRSAKIAGLNKFLRIYYARVMEVYK

SEQ ID NO: 149976 - protein, 366 aa, unidentified
MARYVGLDAHSKNCVYVIQDENGRHVGEGSVPTTVEGLQRLRARYELADGTRIALESGTMAFFVARRLKQLGLDPVVVDAHEVRSKALRPNQKSDRRDALELCEGLRRGTYRSVVHVPPEPIERLRETLGRRRHFVRVKTMQVNAVKRLLRTAGLQTFSRSLQAESGWDRLLNAVAVDPALHAFCAVHRAMWRCAHEQIAALEDSLKEQQRPFQPDVDRLQTVPGVGPIVALTALAVFSDVRRFPTAKHAASYAGLVASTFDSGERVQHGHITRRGSSELRSMLCEAAHHAWRRTNPFHPYFSSLCVRRGYKMAVVAVAHRLCRILYSMLRHGTDFDLTRLGIEPGRFERTTVHHYRRKSTTAVPV

SEQ ID NO: 149977 - protein, 388 aa, unidentified
MIYAGIDISKYKHDCFILSDFGEVVNDGFSFTNTAKGFALLQKELAVCEPANVRIGFEATGNYAVNLKLFLDKIGFDYMEINPFLVKEYIRSTSLRRTVTDKICAKHIAGYLCERVYNPNATDFYDRFALKQLTRFRHSLVKTRSKYLVALTNILDCVFPEFKPLFDNKFSVTALYILTHYPSPEAIANMNTRSYDILRRKSRGHFSMNKFVLLKSLAKNTVGVFNEYYRIQLEALLALHSQIDSRIDEVEAEIIKFIKTINPPTLSIKGVGEPSAAVIVAEYGDFSRFDNPNKMLSFAGLEPGYFQSGTLESNGKMVKRGSPHLRFALMSCANTVRLHNEVFAAYYRKKINEGKEHTVAMNHVAKKLVRVIHALETKGVMFDPDILR

SEQ ID NO: 149978 - protein, 430 aa, unidentified
MKSNTQNAKIEAITEKTLVLGIDVGSKTHYARAFDYRGIEYSKKPFKFSNTEVGFATFKEWILDLKERHEKDKVVPGMEPTGHYWFNLGKFLQDNEMKPVLVNPHHVKKSKELDDNNPTKNDRKDPKVIAGLVREGRYMIPYLPDGVYADLRTASNIRFQLQAELTRIQNRISRWFNIYFPEYKTVYGKPDAKSGMLILKAAPLPEDILTLGIDGVNQIWRDAKLRAVGKARAKTLIKAAEHSIGSKEGTMSARMEIRMLLEDYESQNMRLQEVMVLIEELVKEIPMAEKLLEIKGVGIRTVSGFLAEVGDISRFNNPKELQKLAGLALVENSSGKHKGKTTISRRGRKRLRYLLFEVAMSLVAKNPEFRELHNYYTTRRLNPLKKMQSLMAIAAKLIRVFYAMLTKGVDYDPKKMVSDIKRPAVYLQAA

SEQ ID NO: 149979 - protein, 321 aa, unidentified
METVEFAQVVSRGCGLDVHKKTVVATIDGEGLQRSTREFGTFTSSLTELKDWLLENGITHVAMESTGVYWKPVYHVLEPSGIKVWIVNARHVKYVPGHKTDKKDSAWLCKLLLAGLLKPSYIPPKEQRELRDLTRYRKKLVQDIASNKNRIIRILEDCNVKLSSVLSDTSGVTATKLIDKLCEGKVVTMEDIDAVYHKKIEASKEELWEVCNGIVEEHHIYLLQTIRENNRHIEHLIDELNQQIKKSLSPYDNALERLREIPGLSRKTVEDLIAEIGLDMSVFPTENHLSSWVGVSPGNNESAGKKKVDEPHTVTNKSNLY

SEQ ID NO: 149980 - protein, 536 aa, unidentified
MADKKRNTQRKHIRSEGAYSLDEIRSLTMDDGTRVITSADGDIKRPVCAGIDVHKEILMAAVCKTDPKTLNAVFYVRQFKSTNSDIRTMGAWFQSHGVQDVCMESTGKYWIPVFNILEQCGQRPVLTHPKYVKQAKGQKTDFRDAVHIASMFRMDLVVASFIPPADIRDLRELCRYRLKLTYMRTSEKNRFQNSMTVSKVRLDCVFSDPFGKSASSIMEYLIMTEPEDVSDKQILSMVDRRVKASGEDILDSIHGYEFIGIQRDKLKVINLHLGQINECIRLIDEKLDYFRQKYSRIIRHLATMVGVTEESALYILGEIGTDMSVWRDDASLASWAGLSPANNASAGKKKSTRTGDGGHYLKPLLVQCALAAAKSTKKDPYFHYKYETLKKRRGHKKAIIAIARKMLVAIYHMIRDDADFLPVDHEEVLHSTKKQKGLNLDNVIAFLKEQGADDDTLRLVERQCGAQEMDAAEEMESVSSAEKKQSVSGSAATSQPIQESVNGSPVLISGSQKGRALNHHPKDSAVATATAQNELL

SEQ ID NO: 149981 - protein, 374 aa, unidentified
MKVKTIGIDLAKEVFGVHGVDARGKSLVHKRVSRKHLLGLLAKLEPCLVGMEACGSAHHWAREIEKLGHTVKLMSPQFVAPYRKGDKNDPNDAEAICEAVTRPSMRFVPIKSEAQQDLQALHRVREQLLKSRTALVNQVRGLLAEHGIVAPRGIAHLRRLMVEILAEPASRGLSGLFGETLFEIAERLRFLDERIRTYDLRIGRVFAHDERCQRLAKVEGVGPLVATALVAAVGNANEFKSGRELSAWLGLVPRQHSSGNRNVLLGISKRGDRYLRTLLIHGARSALCRAERRSDRRSIWASKLKLARGFNVAAVALANKNARILWALLTRGENYRPAAIPDQASKAERTAAFRHRPPTSGRRVVAESSLIKRI

SEQ ID NO: 149982 - protein, 349 aa, unidentified
MNIAFDSHKRYTFCSVADDQGRLITEGRIEHERGALRAYLAQFPVGVGVAVEAMGSWYWIVDEIEAAGMVPRLVPARKAKLMLGCVNKTDRLDARGLNLLAQTGTLPTVWIPPGELRDQRDLARTRMTLRATQTRFKNRIHAALGRYALGMTEVSDIFAKGYRPHLQGQIQRLPEQTRYTTLAQLTYVDQLEGDIVQLDKRLQAVFARTEALSLVQTLPGIGPVLGIVITLEVGDIGRFPSAAQYASYAGTTPRVHASGGRVRYGSLRSDVNHYLKWAYCEAANVICRFREHWPQRHVCQLYERLRQKKGHAKAVGAVARHLAEATWWILTKEEAYREPAVRLKTSTGV

SEQ ID NO: 149983 - protein, 365 aa, unidentified
MSAVPVVPATPLPISKRKGQLMSMVRNVVGGVDTHADFHVAAAVDHNGGLLGIESFGADVAGYEDLCGWLCSFGPLARVGVEGTGSWGVGLARFLDAAGVETVEVDRPNRQVRRKVGKSDATDAVAAARAVLSGAAAVTPKSRNGPVEQMRVLLVARRSARAQRIQSLNQLRHLVFTAPEPIRVRFKDRYKTGLVTEAADMRPRMGSDPVVFTTNVVIRDLARRIEGLNAEMKQIDRSLVALLSDTAPSLLALYGLGPDTAATLLVAAGDNPDRLHNERSWAHLCGVTPIPASSGKVTRWRLNRGGDRQANAALYRIVLTRMSSHQQTRTYVTRRRAEGMGTAEIMRCLKRYVARQTFKHLPRAA

SEQ ID NO: 149984 - protein, 406 aa, unidentified
MLFVGDDWAEDHHDVEVQDETGRRLAKARLPEGISGIARLHALVGRFLPEDSDPAEVKIGIETDRGPWVAALVASGYQVYAVNPLQSARARQGGGVSGAKSDAGDAHVLADLVRTQSHQLRTVAGDSEQAGAVKVLTRMHQTLIWDRTRQVQRMRSSLREFFPAALEAYEDLDSPDVLELLTKAPEPASAARLTRAQIAAALKRAHRRDRDTKTTAIMAALRTEHLTQAPLIAAAYGATVRALAAMITTSNEQITALEGPVEACFGQHPDAEIYLSQPGLGPILGARVLAEFGDDPTRYVGARARKNYAGTSPITRASGKKTVVLARYVRNKRLADAVHRQAFSALSGSPGARAYYDALRDRDIGYNAALRQLGNRLVGILHGCLKTRTRYDEATAWNQHTQQAAA

SEQ ID NO: 149985 - protein, 371 aa, unidentified
MNSIVYVGMDVHKESYTVCCYSFDRDEVLYKQKISADYKLILKYLEQLRKRFTDEIEFVCGYEAGCLGYSLYHQLTDHGVKCIILAPTTMAITNTNRVKTDKRDAGNIARCLAFHTYSEVHVPTDEDNSIKEFIRMRDDQKINLKKTKQQILALVLRLGKKFEGGKTYWTIAHMKWLKSLKLGGVYQETLDEYLITYEYFTEKIERLDQRIEELASGEKYEEKVKKLGCLMGVKTHTALSMIVEVGDFERFAKPEKFTAFLGLVPSEETSDEKQKRYGITKAGNSHLRRLLVEAAQAYTRGNIGHKSVALKKRQQGNTAQVIAYADRANERLRRRFYKMTLNKRLNRNVATTAIARELACFMWGLMTDNVA

SEQ ID NO: 149986 - protein, 370 aa, unidentified
MKGTRFVGLDVHAASITVAIAEPNGEIRSLGTIPHELEAVRKLVRKLAPLDTLRVCYEAGPCGYALYWQLTQLGVNCVVVAPTLVPMKAGDRIKTDRRDAEKLARSFRSGDLTPVWVPDAAHEALRDLVRAREAAKRDQLRARHRLQKFLLRHGQRPPAGVRPWTQRFRHWLGTLTCNHPAQEATRLDYLTEVDHAVDRIARLERAIDAAVASAPAPMRHLIDSLQALRGIARVSAATVVAEVGPPSRFDHPRQLMGYSGIVPSEHSSGPRIRRGHITKTGNAHLRRVLIEAAWAYQHRPGRGPTLRHRQRHLSEPVKAIAWKAQHRLHDRYCRLTARGKPRQHVVTAVGRELLGFIWAIAIQVERESAA

SEQ ID NO: 149987 - protein, 401 aa, unidentified
MVSDFKKGRYNLMKIFVGIDIAKLNHFAAAISSDGEILLEPFKFTNDADGFQLLVSKLESFDKNSIIIGLESTAHYGDNLVRYLVAEFYQVCVLNPIKTCQMRKNNVRKTKTDKVDTFVIAKTLMMQDDLRFITFFDLDMMDLKALGRFRQKTIKQRTRLKIQLTTYVDQVFPEIQYFFKSGLHQHAVYALLKEAPSPKEIASMHMTHLANLLKVNSHGHFTKELAKELRVLAQKSVGANDSAISIQITQTIQQIELLDSQLEKIEAEMTDIMKFNDSVIMTIPGIGYINGGMILGEIGDIHRFSNPNKLLAFAGLDPSVYQSGNFQAKTTRMSKRGSRVLRYALVNAAWNVVRSNATFKAYYDAKRAEGRSHYNALGHCAGKLVRVIWKMLTDEVEFNLE

SEQ ID NO: 149988 - protein, 346 aa, unidentified
MTIVEDRRAITGGVDTHADTHVAAALDPIGGLLGVQEFPVTPAGYARLLGWLGGFGTVALVGIEGTGSYGAGLARHITAAGVRVAGVDRSDRQDRRRQGKSDPLDAVSAARAAQSGRARGAPKGRDGAVEAIRALMADGRSARSERTQTINQARSLIVTGPDDLRARFAGHTAAGLVSGLASLRPRPGSTVGYATRIALRELGRRAEFPGGQLARLDELIIPLVTARAPALLALHGVGPDTAALLLIAAGDHPERLRSEAAWAHLCAAAPIPASSGKVTRHRHCPGGNREANHALWRIVITRMSNHPATRAYAERRTAEGLSKTEIIRCLKRYVAREVYRHLRPAA

SEQ ID NO: 149989 - protein, 391 aa, unidentified
MIYVGIDVAKDKHDCFITNSNGEVLFKAFTISNNQDGFNDLYQRIESVMEDITKVKVGLEATGHYNYNLLGYLIDKGLTTYVINPLHTNLYRKSLSLRLTKTDKVDARTIAYMLMSDVNLKSYSDTSYHNEELKSLTRYRFDKVKERAKLKTSVSRLVCILFPELEKLVPTLHMTSIYALLSEFPGAKYVAGAHLTRLTNLLSDASKGRYGKDTAITFREAARASIGSNMPAKSLELKHTIKLILELASEIDEIENEIKIIMDEINSPILSIPGINYRMGAMIIAEIGDFSRFDSPDKILAYSGFSPSTYQSGQLDSAYSHMEKRGSKYLRYALYNAAKYVCHWDSTFARYLTKKRAEGKHYNVAISHAVKKLVRVIYHLVKSNQQYIKVA

SEQ ID NO: 149990 - protein, 361 aa, unidentified
MHATTVAVDLAKSVFQLAVADDHWRVIETQRLTRTQFERWFANREVGLVIMEACGSAHHWGRWLNGLGIEVRLLPAQYIRAYVKRNKTDATDAAALIEAARCADIRSVRVKSVEQQALQGMHRIRSLWMGTRTSRINALRGFCREFGIAIPVGARTGVEAISRVLADPHTAVPDLIRGTARLLVEEIRLLEARIAQLERELAVCAKHSPACTTLLSIPGIGLLTATALVAATSGDVSHFQDARHFSSWFGLTPREYSSGNSRHLGSISKKGDRYLRMLFTHGARSVLRASKVADDAGREVCGVRRWALDVQARSNHNKAACALANKLARICYATLRDKEPFGEPTVRLNKKISRESFAMPA

SEQ ID NO: 149991 - protein, 351 aa, unidentified
MYIIGIDIGKNHHEASIVSPEGKQIGHSLRFATTHKGADSLMSFIFNNIGNSSCIFGMEATGHYWYPIYSFLKARGYTIYVINPIQSDSLRKMYIRQTKNDSIDSFLIAEVIRFGQFTTTSMADENILAMRQLCRYRDSVISSRTEIKLRISTIMEQIFPEYEKQFSSLWLSTSMGILEKYLTPENIENAPIDELFEIIKDKSHNKLTMKKAISIREAAADTFGIKIAQDAFSFQLKQLIDRMNFLDKQIEALDCQILEYYEKFDLLSSYHSGIGMIAAATILAEIGDINRFKSSSALVAFAGIDPTVRQSGEFSSTHNHMSKRGSPLPETCNLPCCNHLFFSQQSFKCIL

SEQ ID NO: 149992 - protein, 322 aa, unidentified
MAKLSFGGIDVSKDRLDVMILPEERCSSVPNDAAGWADLVERLSGSLIAAIGIEASGGYERGVVRALLAAGMPVRQVNPFKLRQFARASGVLAKNDPLDARMIASFVTIMPTRPAQRQTPAAERLAEMLAIRRQLSAEKVAAENASRLLEDAMLQRLSRRRIVRLAADIDLLDKRMVEIVATDDALVHRYRLLTSMPGVGAVLACTLIALLPELGRMSRKQVAALVGVAPYAFESGTLKGRRCIWGGRAHIRQVLYMAAMSASNWNPVLKAFHDRLTAAGKLPKVVIVAVMRKMITMLNAMVRDDVVWADRPSGRNSVTTAR

SEQ ID NO: 149993 - protein, 355 aa, unidentified
MKYYTSTTEFNCGIDLHARQMYVCVMDRQGKKLVHTNVRDNDFPFFLKLIDSYKHDLTVCCECMFGWYWLADECQAAGLTFVLAHALYVKAIHGGKNKNDRIDSEKLTHLLRSNLIPPAYVYPAAKRPLRALLRQRIFYVWRRSELLARIHSHQLAHNRVPPKRTCSTRDPWEEALLAAESDPVRQLAIKNDMAMIRHFDHQLVQMEEELKRLTKKTASRDYDLLQTVPGIGENLGLTILHEIGDIDRFPTVKDFLSYCRLVKGTVASAGKIKGLRGAKLGNPYLRWAFGEAAVIAKRDHYVVGPLSQRLEQQMGGNKFKANTVVAIKLARAVYFMLKNKTVFDPERLVAALAKN

SEQ ID NO: 149994 - protein, 340 aa, unidentified
MKRQYVAIDLHRRRSVIVRDDHRGKELAVTKIENDPLTLASVIAEAGEAPEVAVEATNGWYWVVDVLEELGANVHLVHPSGMNWDDRRVKNDYLDCREILDRMHLGKLPEAWIAPKEIRELRELVRYRIKLVHMRTSAKAQVKAILIKHGLQPPVEDLWGVAGPKYLDEIGPTLADPYLVRQESLRDLVELLQREITMVEGHIARALKDHAGYRAIQVISGVGPVLAAVFVAEIGDVTRFSNPKQLCCWAGLTPWHRESDVHVHRGKMTKHGSVLVRWAAIEAISKMRGGPKLQADYHRLVDRRGKNIGRSAVARKLLTLVYYGLRDGQIRCLEQLDEAG

SEQ ID NO: 149995 - protein, 307 aa, unidentified
MFIGIDVAKDRLDVHLRPGGEAFTIARDGEGVEALSAQLLELKPVLVVLEATGGFETVVAAGLAAAGVPLAVVNPRQIRDFARATGRLAKTDPIDAGVIAHFAEAVRPPVRPVASAEAQMLGELVARRRQLLEMMTAERNRRRQLTTKRLIKGIDHILAAHQAKLSELEKDIGDALRGTPAWREKEDLLISVPGIGHKIARTLIAELPELGSLGRREVAALVGVAPFNRDSGKWRGRRIIAGGRAVVRSALYMSVLVSIRRKLPLVATYNRLRAAGKPAKVAIVACMRKLATILNAILRDKNPWQIA

SEQ ID NO: 149996 - protein, 525 aa, unidentified
MVTGSKKRKSTGSKKRFIGKPTGQIQERVQAVGPEHFGIVSVDCAKRRSKWMLCNFYGKVIIEPTTVEHTAGGLKVMTELVAEACKSEGLTDTIAAVEMTGIYHKPVYRAFRKAGFDTRIVHPFASKHYRQPLHPDEKTDDNDLEAIFHAAVKGYGLATLPVGEVYQSLQAVSRHRHNLVKQRARLMVQMRRLLHQTMPGFADLFEDDKLFHKSIAMPIALKFSSAEAIRLAGVDGITRYLNKAKIRFQTRTIERIVAWAGAAGEPSEIAGMHTRQWQQLNEVRRMFDEQVDAVERESAGFLVKTPYILLLSVTGINVVSAARLAGEAGPIEHYASARAITGRAGLYPSRFQSDEVSHDGSLVRQCNRKLRGAAMLVAENLIKCHPYYRGLSALWTQKNVEPRDRRCRIANRAMRMVYQLVGGRQLWRGKGVDREYLLVKLQEFHRVHNTPIDQTIRDLHEAFVWLPKSAYAEEAKPLAELARTKHRGPQRIGDLMVPLLIRLGVSIGEKHEEVKSNTSEARSSN

SEQ ID NO: 149997 - protein, 435 aa, unidentified
MSSLQKINPNCAGIDIGNEFIFIGIEEQEVASFGTFTDDYLKAIAYLKEHNITSVAMEATGVYWITLFDMIEAAGITVTLVNGKQVKYLPGRKSDVADCQWLQQLHSFGLLRHCFIPDDLTRRLRTYTRLRADHLSMASSHIQHMHKALTLMNIKVQNVISQIHGVSGLRIINAIVSGERSPERLADLCEKSILKTKRDRVIASLKGNFKAEHIFALKQALRAYDFYQNQIAECDKQIEALLNEHTDKMPPPDHLSKPKSIRHNAPKIDNLHTKLMKMTGGNDPSQITGLTDKTLLELLAETGTDLQKHWISEKHFSSWAALSPNMHQSGKTNKKRKIKKNSRAGQIFREAALSIANSKHSALSAFYKRMKAKKGFRHALKATARKIAVFYYRIITKGIAFVEQGIQLYQQKLKDQQLRLLQKKAKSLGLQLISG

SEQ ID NO: 149998 - protein, 377 aa, unidentified
MQPTQRVDRNPVIEGSLELADKSWKIAATDGRREHPAVFKVDTPDLRGRLDELLRRVGELKRRWGLPAGCQVVLIYEAGQDGFWIARALEAEGVRVLVIDAASVQMPRHTRRAKTDRLDALKLLDELRAWLRGERRTLRVLSIPTEDAEARRLLARERGLLQKEIGQHRDRMRKLLRTQGCQDDIDSSLPERLMACKVRRPDGRSIPEELWHWLLRECERLDLARRQFAEVEHTLLHQLPEPVQRCIALLSGLRGVGWVGATRLVLELYWRDFANRRQVGACVGLVPQPYDSGESHVDQGVSKQGNRRVRALLIEMAWAWIKYQSGSALAQWFARRTTGQNKRGKRIAIVGVARRLAIDLWRYMREGIVPAGAQLKF

SEQ ID NO: 149999 - protein, 332 aa, unidentified
MYYIGMDAHSSSCTLCVTDSLGREIDNIVVETNGKLLKNYLRSIEGTKKLVFEECELSRWLYSIISPEVEELIICNPVANREYKKAKSDKLDARKLAKLLRGGFLSPVFHNGSEREKFRNLMSGYHDIVDEGVRLKNRYKSLFRRNGHRMKGEMLYNDESLLDGLPRNADKFIGIHLYNLIVSLEKSRQEYVKEICRYSSKFKELKLLKSVPGIGNIQAAKIVSQVVDPARFANKYKYYSYCGLVRHTRTSADRNYGTRKIWGNRVLKCVYKMAGHSVLKGNSQLRAYYDDLRTRGISHDNAYNAVCRKIAAITLSIWKHNKRYDNNMIRAL

SEQ ID NO: 150000 - protein, 453 aa, unidentified
MARKRKKDTKANNAMLPVMRPDAAGIDIGATEIFVAVPVDRAAENVRSFPSFTQDLYALADWLKQCGVKTVAMESTSVYWIPLFQVLEERGFEVCLVNARHVKNVPGRRTDVSDCQWLQFLHSVGLLRASYRPEQEVCAVRSLLRHRESLVQMAATHVNHMQKALDQMNLQLHHVISDITGQTGLAIVDAIMAGERDPFVLAKLRNDRIKASEEVIAKSLVGDYRAEHLFTLRQSLAAYRSYQKLIDDCDGEIRKSLEQFQPPRQPDASHGDSQKPQPKPPSTDGVLRSELKRIFGVDLTKIPGIRVGIGQTLFGEIGPDFTKFRSASAFASWMGLCPDNDISGGKVLWVGTRKVNCRAATALRMAAQSLHHSKSALGDFYRRMRAKLGAPKAITAAAHKLARIIFHLVTTRQEFDDSRFAADQLRYQKRQETKLRARAKAMGYELIPLERAG

SEQ ID NO: 150001 - protein, 352 aa, unidentified
MKSNTSSVFKGKNLFIGIDVHKKRWVVSVRSYDLELKTFSMASDAEKLDSFLASTYPGALLHIVYECCFSGFWIYDYFHEKGYDIIVTPTNRIYRDGSIVKTDKIDSRKLAFQLSRGLLKNVKVPTVKIREYRSLFRIYDKEKMREGQILRQIRCILECKNHQLKWHRWNKKFIEKLKAIKFQEEIFNLKFESLIKEYEFVKEQIKDTETRIKEIGEDEELKDRIKRIEQINGIGIISAVRLVVYLFDRKDKFENGEKLVHYVGLTPGEHSSDETIIRSRTGLIGNKQLRSIIIQLAWVAVRKDGALLNKFDRVYKNTGCKQKAIVAVARKLMMKIYSIEEKEVNYEINRAA

SEQ ID NO: 150002 - protein, 317 aa, unidentified
MAMQVGKLIVGADVAKAELVIHHDDRDEIIRLKNSKLEIRRWLKQQPLNTAIAVEATNVYHLDLVELAHSLGFEVYVIDGFQLSNYRKGVGGRVKTDPSDARLLSRFLRNEGEDLRPWTPPPAVYGKLQSLLRRRAALVTARTAMTQSWANETLLKAAFETFVKSIDRLDQLIQKKIKEVLREAGLQEQVARCQAVEGIGFLTAAALVMAFMRGEFKSSDSYIAFLGMDLRVSDSGQKKGRRRLTKRGCSEIRRLLHNAAMAASRSAAWKELYEQHRNAGKATTQALVILARKLARVAFALMKNQDEYVTKGGKLAC

SEQ ID NO: 150003 - protein, 317 aa, unidentified
MSTPLFVGLDVAKAHLDLAVHPTGEQWQAANTPDAFPALVTRLQALAPALIVLAATGGYEAALLSALAVAGLPVVAVNPRQVRDFAKALGILAKTDQIDAAVLAHFADRVRPPVRPLPDEATVELAALLTRRRQLLDMLTAERHRLAQARPTVRRNVQQHIRWLEQRVRDLDDDLTTRIHQSPVWRAKEDLLRSVPGVGPVLARTVLADLPELGRLSRRALAALVGVAPFNRDSGRLRGRRAIWGGRAKVRAALYMAALVATRRNPIIRAFYHRLLTAGKPKKLALTACMHKLLTILNAMIRTGQSWRISLAESTLD

SEQ ID NO: 150004 - protein, 344 aa, unidentified
MKITTIGIDLAKNVFQVHGVDERGRAVLKKQLKRDQMAAFFAKLPACLIGMEACGSSHHWARRLQGFGHTVRLMAPQFIKPYVKTNKNDVADAEAVCEAVARPNMRFVPVKSVEQQAVLSLHRVRQSFVKARTAQANQIRSLLGEFGLVMPKGITNVRKRVPEVLENATDKLPAAFRHLVERLLEHLKELDRQVGQLEAQIKAWHRSSELSQKLEKIPGIGPLSASALVASIADARSFDNGRQVSAWLGLVPRQHSSGGKPTLLGISKRGDVYLRTLLIHGARSAIVAAQRNARVNPWLAGLLRRRNPNIAAVALANKNARTVWALLAHDREFRPDYVPTLTAA

SEQ ID NO: 150005 - protein, 388 aa, unidentified
MHIVTDRPHAPTAIRTDLGAIFISLELSRSTWLITSLSPGGGEKMSKHTVRSGDVAGLWARFSQLKDKVQVRTGQTVPIIVIQEAGLDGFWIHRLLQDKRVESYVVDPASIATSRRRRRAKTDKIDGEALVRALLAYKRGEPRVCAMVRAPTPQEEDRRRICRERKTLTAERVEHVNRIKGLLFAQGITDYEPLSRKRRERLEELRTGDGRPLPEHLKAQIGRELDRLELTLQQIKSVETERDAMLSPSDEGTPAPGAMLKSLKGIGPEFAAVLWAEGLFRSFSNRRQVAAYAGLAPTPWRSGSVAHEQGVSKAGNPRLRTTMIQLAWLWVRHQPRSILTLWFHQRTQINGGRVRKVLIVALARKLLIAFWKYVTAGVVLEGAETTSA

SEQ ID NO: 150006 - protein, 426 aa, unidentified
MKEHIDYLSTLFVGIDIASRIHVISALDFNQDFFIKMKPFENTKEGAGIVEKMIADVLADNHQFKYVVIGMESTGFYGVHLANYLSTSELLAPFSVRVYCLNPKEVKNYKKSFNDIGKNDGIDSFVIADFARVGRIAIKPWRGSQYLALQRLTRHRMHITECITREKTYMLNNIYLKFSQYALLRNGEHPFSNKYGATAEAILTEFTTNEDIVNSSIEELVEFINSKSKGRIADPEETAKIVQAAARNSYRLDKCLYEPLTISIASSFNCISSFEKELKAIDKAILQTVQGLNPEEYTVLNSIPGIGKVYSAGILAEIGSIKAFQNANQLAKYCGIVWNDNDSGDFESEDSRMSKAGNRYLRYYIIEATGSVISHCPEYKAFYQKKYAETRNHQHKRALALTSRKFIRLLFGLLDKGQLYSPEKGR

SEQ ID NO: 150007 - protein, 395 aa, unidentified
MVDDAGGVLGEKRFDHSGDGIRQCIEWLMQLVGGDVDEIAVTIEIPHGAMVESLIENNLTVFAINPKQMDRFRDRHTVAGAKDDDLDAFVMADSLRTDRSCFRRVDVDEPAILRLRELSRMEQDLQTDRNRLANQLWEQLRRYYPQMLNLSPAANEAWLWDLWEAAPLPGDASALKLAKVKAILRAHRIRRFTAEQVLEQLRQPALRLAPGAAEAASEHVQMLLPRLRLLQQQGQATVKRIRGILDEFCAAPRECEGREHRDEEILLSLPGIGPVIAATMLAEASQPLRDRDYQALRIYAGAAPVTRRSGKRKVILMRYACNQRLRNALYHWSRTSMQKDARAKQHYAELRRRGHSHGRALRGLADRNLAMLMSMLKSGTVYSPEKRGTAGAQVG

SEQ ID NO: 150008 - protein, 325 aa, unidentified
MKEKQILAIDVSKRSLDICVRPTGATFKINNDLSGFKELTAAMNPDLEPLVVMEHTGHYSFKLEKYLEEQGVTYCKVPALEIKRSNGMVRGKNDKIDSVRIAEYAWLRRTQLVATPKATERVTRLNQLLSLRAKLVKDCGGYKTRIKEMLDTELVSKSDLLYKSQRAVLVTLNSQIQKVEKAIEELIETDPELKNNFDLIRTIKGVGKIVAARMLAVTSNFKKFRNARKFNCYAGLAPFKHESGTSIRGRSRVSHLANKEIKTVLNLAAFCAIRFNQELKLYYEKRVSEGMKKMSCINIIRAKIVGRIFAVIKRQTPYDAKALAA

SEQ ID NO: 150009 - protein, 329 aa, unidentified
MRAIKTQQKLYCGIDVSGDTLDVCYQGPEGSLEWYKCTNNAEGFKEIWQLTGKLYHFVMESTGVYQLPFCFFLELKKARYSVVNALQIKRYIQMKLERNKTDKKDAFHICMYGVDHHPACYKMPSHLYFECRAINNAIETLTTEITSFKNKLHSLSKLDIDSKVIVTGYKKILRDLEAELKKFETELYKKLEAWQPVLVKQVRSVVGIGKRATAILIVTTQGFKHTQTYQQLISYAGLSPKEYSSGSSIRGKVRICKQGGSLLRHTLYMCALNAKETNGACKELFDRLVAKGKNKKLAVIAVANKLLKQVFGVVKNGCMFDRNYYKKTA

SEQ ID NO: 150010 - protein, 420 aa, unidentified
MLTIKHYVCCGMDVHKKFVVATIANTDLKGVTTYIKKRFPTFNSDLKLLKEWLLKHNCTEVCMESTGKYWIPIYNILEDSCHVVVANPKYVRTIKGQKTDDKDSAWIADLFKFDIVPSSYIPCKEIRMLRELFRYRQKLIGHRSSEKNRMQNALTVSNIALASVLTDSFGKSASAIIDYILECDVFDPEHCKSLLQRKAKEKADDVVKSIIGYELSGDQSVKMKVCRKHYDYINDCISTLDKTISDLSKPYHKFIEFATSIPGIKETSATYIIAEIGTDMTVFKSSKRLCSWAGLTPQNNESAGKKKSVHVSRAGVYLKPLLVQCANAAIKDKKNPYFKFKYDRIKKRRGHKRAIIAIARMILTCIYHMFLKQECFNPSDTDYSDIPEELYKKHREQYIKNAIKLLEKEGCTIIPPSNIA

SEQ ID NO: 150011 - protein, 338 aa, unidentified
MKLYAGIDLHSSNSFIGVIDENDKRHYSKRHYNQMDTVLKVLNPFKKNLQGVVVESTYNWYWLVDGLQEQGYKVHLANPSAIKQYEGLKHTDDQWDSFWLAHLLRLNILPEGYIYPKEKRAVRDLFRRRLRFVRHRTSTILSLQSMFARHKGSTPPGNLIKTFSQWEMDGRFDCSNLTFAAKADIAEIENLNKIIKSIEKKIKLQVKLAKEFRLLLTIPGIGEILGMTIMLEVGDINRFKKVGNYSSYCRCVKSQRISNKKKKGEGNRKNGNKYLAWAYVEAAHFSIRYCAGARKFYQRKKAKTNGAVATKALANKLARASYYIMRDQVPFDEEKLFR

SEQ ID NO: 150012 - protein, 419 aa, unidentified
MTSKSAQFAALIGIDWASQRHALCLYDCATAKRESSILEHTPEAIAQWARGLQERFKGKKIALCLEQSKGPLIYALLEYPFFVLYPINPATAARYRMAFKTSRAKDDPSDAQVCLELVLHHREKLNPWLPHDAPTRELSCLLQHRRAAVDLRTLLTNMLRDALKSYYPQALELAAQDLFAPLGCQFLLKWPSLQELHKARKESVRKFYYAHNCRRMDVIEKRLDAIAQMTPLCRDLALLEPAMVQVRMLARQLLQLGGALKEYDSKIEQLFAQHSDALIWESFPGAGPTLAPRLACAFGTQRSRYQSAVAIQQYSGTAPVTEKSGKNQHWVHRRWARPHFTHQSFFEYASQSVLHCSWAKLYLKEQMARGKAYPTAIRALAFKWQRIMFVCWRDRVPYDETIYRQSLQRRGSHLARKLN

SEQ ID NO: 150013 - protein, 371 aa, unidentified
MDTVRFLAIDLAKNVFQVHGVDAAGRLVLRRRVGQVQLTELVLRLAPCTIGMEACSSAHHWARQFQQQGHTVKLISPRFVKPFVKGNKTDGNDAEAICEALQRPSMRFVPIKSVEQQDVQSLHRARSRLVSNRTGLVSQMRGILAERGIVFAQSITRARRETPAVVADTSNALTPLAREMLADLMDQLRELDKRIAGFDRRIDAVFKASETCQRLAQIEGVGPKTATAIVAAVSDPKDFRNGRHFAAWLGLVPRQSSSGDRTHLLGISKRGDRHLRTLLIHGARAVLRTAPTKHDKKHAWALALQARRGANRAIVAIANKMARTTRIALRTRLHGWQQWFDQYPQFVVNDRRFHPWASVVLVPEVNSSPRK

SEQ ID NO: 150014 - protein, 341 aa, unidentified
MTITTMGLDLAKSVFQAHGIDDSGATVLVKKLHRKQMLPFFSKLPPCLIGVEACGTAHYWARTLAAMGHEVRLIPPSYVKAYVKRGKSDALDAEAICEAVQRPTMRFVPTKTVEQQGILMTHRARSLLVRQRTMLANAMRAHLAELGFVANPGIAHLAKLAEQTLTDKDALPPYARATLEILIHQIMAISGEITALDQQLSAWHAASEASRRLATIPGLGIITATAIAATVTDPTQFRSGRQFAAWLGLTPQQHSTGGKTRLGGISKQGDRYLRRLLVVGATAVMRHVKDKPMPMANWIRKLVEKKPFRVVSVALANKLARIAWVVLTRKEAYRPYEPTTV

SEQ ID NO: 150015 - protein, 347 aa, unidentified
MIIIGIDPHKHSHTAVAVDQREQPVGQRTVLAGPQATAGLLAWAGRWPERRWAVESARGLGYHLAQQLVGAGEQVSDVHAKLATRVRLLDRGHGRKTDQADARSVALVALRTPTLTLVGAEDDLPAVLRLLADRRDELNQERRRVTNRLHRLLRDLVAGGAPTPLTVEAASRLLRRTRPTTAADQQRKALARDLLADFRRLDRQLAANRTRCQELLAVRPSRLLEVFGISAVLAVKLIGHSGDITRFHSPDHYASYTGTAPVDTSSGANLRQRVNRGGNRALNTAIHLVARTQISRPGPGRAYYDRKLAQGKTPNQAFRAPKRQIVKVIYRALLADHHTRHPQPATG

SEQ ID NO: 150016 - protein, 373 aa, unidentified
MNNTTVYVGMDVHKNSFSLCCYTVRDDACSHYVKIEPDYRLVFEYIESMREIYGDDSKFICGYEAGCLGYTLYHQLNDHGVECIILAPSTMAKSPIQKKKKTDKRDSEMIARCLAHHSYHKVHVPTSEEEQIKEFIRMRDDHKLALKKIKQQILAFCLRHGFTYNAGASHWTAAHLSWLRSLKPEGLYKEILSEYLLTYDKLTDTLERLDRRIEELADQDAYRESVRKLCCFLGIKTQTALAVIVEVGDLKRFQKAQQFASYIGLVPGEDSSGDGINRLPITKAGNTHVRRLLVEAAQSYGRGRIGFKSEALKARQEGNPSEVIAYADKANERLRRKYYRMTLKCGKKVNVVKTSIARELACFMWGMMTEETA

SEQ ID NO: 150017 - protein, 410 aa, unidentified
MEVVHAHCAGLDVHKDTVVACVRHMTDGKITTTVRTFNTATAELLALSDWLSAEVVTHIAMEATGVYWKPVWNILSDGEFELVLGNAAHIKNVPGRKTDVKDAAWLADLMAHGLVSSSFVPDQTTQEMRDLLRTRKQLVRERTSHTQRIQKTLECANVKLDSVISNVVGVSGRRMLEALIAGQTDPKELAAMAHGRLQATPAELEAALRGRVTAHHRFMLRLHLDQIDSFDEAIARIDKQVSDNDQHFRAAVELLKSVPGVGSLAAEVIVSEIGIEMDRFATAGNLVSWAGLCPKNDESAGKRKSNRLKAGAPWLKTTLVQCAWGASRSKGTYLHAQYLRIRARRGNKKAICAVAASILTTAYHMLKDGTFYEDPGPDYFDKRNKNQQANKLVNRLQNLGFNVILQPVSA

SEQ ID NO: 150018 - protein, 412 aa, unidentified
METLVERGCGLDVHQATVVACLLIVRKDGKVQKQVRTFGTTTRELLSMREWLLSQGCTHVAMESTGVYWKPVYAILEGAFQIVVANAQHVKKVPGRKTDVKDAEWIADLVCHGLLRQSFVPPKPIRELRDLTRYRRKLVESQSAERKRLLKVLETANIKLASVATDVFGTSGRLMLRALIEGKTTPEEMAELAKRKLRSKIPQLELALEGKIEDHHRFLLKLQLDRLERAEGDLAVLEEHIQEKLEPYAAQLALLDEIPGVDWTLAAVIIAELGVDMSVFQSVSQLASWAGVCPGNNESAGKRKSSRIPKGNVYLKTALVEAAHAAARTKGTYLRDKFHRLKARRGYKRAAVAIGHKILVSIYHMVSQNVSYNDLGDLYLDKLNKNHLTRNLVQRLERLGYSVTLAPQQKAA

SEQ ID NO: 150019 - protein, 336 aa, unidentified
MKKINVGVDISKSTFWATISHNNGNNEIKHLSNKEFNNTDKGFEMFIKWINALIPKEVVISFTMEATGVYYECLANYLYNNNYTVYVVLPHKSKFYLKSLDNKSKTDKIDSKGLGQMGLERKLRVWQPIYPIYKEIKSLTRERSGLVKHRTQQKNCLHALLHSYDPNQERVARTKDMIEFLDLQIEKIEMELKVLFKKEPELNKNIRIIKTIPGVDNITVAIIISETNGFALFENIKQLCSFAGLDVKLAESGKWKGKSKISKQGNNHIRAALYFPALTSIKYNSDHKAFYNRIKSNKKFSKVGITAVQRKLLILIYSIWKSQKEYQPKNQISEAA

SEQ ID NO: 150020 - protein, 376 aa, unidentified
MSKDTLYVGLDTDKKSIEVALAEGLPGGEVRAWGKLANDARSVLRLVKRLQAGGRPLEMCYEAGPCGYGLDRLLNGQPGVRCTVVAPSLTPRRPGDRVKTNRRDALMLARLLRAGELTAVWVPDPAHEAMRDLVRARGAATGDLVRCRQRIGGFLLRQGIGYVGKPWTRKHRAWLGQLVATLPLAAHRLMLGEALQALDEATARRDRLTDHIAELVPGWSLAWLVDALQALRGFALINAATLAVEIGDPRRFATPRQLMAYLGLVPSESSTGDKVRRGGLTKAGNGRTRKALIEAAWTYSRPARAPSDNRRHAPAVVAIATKARHRLSQRYRRLTARGKRPVIAVAAIARELSGFAWAIAQVAGPTATAPQPPAKR

SEQ ID NO: 150021 - protein, 373 aa, unidentified
MPKYSTAFVMDVHLRSTTVCALDADTGEAVTRRFPGNPWGEIAGWMDGFPGPSLAAYESGYLGFAPQRELAGLGVECVVAAVSKIPRSAADSASKNDRNDAARMAKAILAHDISPVWIPSPEVEGIRDLAGAYDGATARLATAKQRLLAFLAKRGFVYGGTTPAGNPRKYWTYDFLRWLDKVRPEDDGGVRTLAALRNEVEAAAEARADLLSEYRAAVDASPIAAEVAALQSIKGCAFALAAAFSAEVGDFTRFRSGRQVTAYFGLAPSQRSSGDSVRLGGISGAGNALVRKLAVEGSWCYAAARHQPKLMPRDTGVPLEIRMHGRKGSERLLRRREEMLARGMPQAKANAATAAELVRWLWALGMMCREGAE

SEQ ID NO: 150022 - protein, 423 aa, unidentified
MNHNQKLELIQPGVLIMGMDMAKRTHWVQPMLHNGMSVGKAFSFKNNKEGFESLLAKIEVLKEANRCHTVIFGLEPTGHYWRPLARYLIAHNYQVVLVNPYHVKKSKELDDNTQTKNDRKDSRIIGRLVIQGHFFETYFPTGVWAELRELSRTRSQIKARNNASLNQIRAILDEYFPEYETVFRTLTGKASMHVLSHSPMPAELRQLGEDGIIAEIRNGVKKGVGPKKAKLLYYAAVNTIGLPATQAVRRKLTMLLDSLRQLQDQLESMEEEMEKQLHATGIGPYILSIPGVGVVTATGFLGEIGDPGRFTSWKQIRKLSGYNLVEQSSGERQGRRTISKRGRSALRNHLYQMALMVACKNEPFKQLYRHLLHRNQNPLKKKQALVVVAMKLLRVIWILITKKECYDPSKVLGDYRNQQLKAA

SEQ ID NO: 150023 - protein, 341 aa, unidentified
MSLFAGLDISVKTTAICVLDRNGGILLETMVDSTPDAIAECLRELGQPFERIGLEAGPLSQWIYGGLVDMGLAAICVETRHMHAALSARINKTDRNDARGIAQMMRVGLFKAVHVKTPASQHRRLLLTSRKLLQRKIYDIENDLRGSLRNFGLKVGVVGAVKFEDRIRDLVADHSLVAAIVAPLLEARAALRTQFAKLHRMLLDLVRVDPVCRRLMSAPGVGPIVALTFRTCVDNPARFSRSKCVGAHYGLTPRLYQSGEIARTGRISRCGDVMLRSSLYEAALVVLTGPGRWNPLKAWGIAVARRRGMQKAMVAVARKLAIILHRMWRDDTDFRWTQAAA

SEQ ID NO: 150024 - protein, 351 aa, unidentified
MRAKHWVGLDVGESCTRVCVLRKRGPAVLECSTGSSAEDIARGLSMFDIADIDSVVMESGAPGEIERQLKKMGYPVVILDVRKTHRYLSIRHNKTDQNDARGLAEIARLGELSRLSVYSKSYDSEVMRNQLCVRKRLVDTRAEVQTSLRSLLRNHGSQIRRVPHGKAMRPAIEAEFARLQSTGASQIVSQLLPLVEVWETLSGHIKLIDDELARIARLNPMVQRFIQIPGVGPMCAIAFYATIDDPHRFARTADVGAYLGMVPRVQQSGASLHRTRVTRAGDAMARGYLVLAAGVALTRAKQSSALREWGLDLRKKVGFSKARMAVARKLAVTMLSMWKAEKDFVPYPQKV

SEQ ID NO: 150025 - protein, 359 aa, unidentified
MKYVGIDLHKKCMSVCVMDKERKVLHRQRLLCGEPERIVEYFRSLGAFCFAVEAMGSFEWLALLLEPIASSWVLVNPSKFRVIAESTQKTDRQDAQNLAEFLALGMLPRAYFPSERTREHRLLVRYRLRCRQKLSQIKVEIRQLATRYNADRKDLFEAEPLAALQSLQQMRGADRFILKQHLVALEQAQKRTLAATKQLRKFAAQGSDAEQRERKIVLSVPGVGEVVTEVVLAELGNVKRFASIKDATAYAGLVPGKRESAGKEKERGLTKKGSRILRWAMVEAAWQSIRSSARWRGVYEQLKKRRGSKKAIMAIARRLLGVLTSMLKQGTEYRWSLTELKERQERSQQRARKRQGSAA

SEQ ID NO: 150026 - protein, 387 aa, unidentified
MIYYIGIDISKYKHDFCIISNTDEIIVENSSFENNKKGFQFLLDQLKPYNKSDVQIAFEATGNYSLNLELLLIDQGYSFMKMNPLVIHQFLKARSLRRTKTDKADSLTIANYLMSVPYKPNSNLLYNIFSLKSLCRSREQLIKERCKYQVLLTNELDLTFPELKPFFNNNFSATLLFILEKYINTEHISLMRDYDSIRATSRGKFSYAKFAKLRKLAKSSVGRHDENTDLLISTYISIIRTFNDKIDPIEKQISTIIKVLNPRMLTIPGLGEISAATILSEYGDINNFSSPNKMLAFAGLEPSIIQSGTIENNGKMVKHGSGHLRYSIMNTAMNILRYSPTFYDYYLKKRSEGKCHRVALSHVCKKLLRVIYTLEKNNINFNPSLLK

SEQ ID NO: 150027 - protein, 407 aa, unidentified
MRVIGLDVSRTFGEIAYLEDGKVSAGGRVVLEHDPLARFALGLKATDEVVLEATGNTAAIVEALRPHVAKVVIANPLQVRLIAEARVKTDKIDAAILAQLYASGFLPQVWMPDDRTLALRRQVARRAQLVRHRTRLKNQVQAVLAAHLIPRCPATDLFGRTGRAWLATQPLPLDERMAVEQRLRELDRLGEDLREIDKVLCGSVLHDEQMKRLLTITGVNSVVAVALLAAIGDIARFASPQKLVSYFGLNPRIRQSGLAPAQHGHISKIGRAHARGMLVEAAWSAANSTGPLRAFFLRVRGKRGHQIAAVATARKLAVIVWHVLSGQEDFAWSRPALVAKKHRELELRSGLPVKKGHRGPAAEYSLKEVRHREQAAAELAERAYARFVSNWKPKKPAATTRPQQGRQ

SEQ ID NO: 150028 - protein, 407 aa, unidentified
MEVLHARCAGLDLGKDSLVACIRLHGQPVRHEIRAFGTTTRELVALSEWLTAHGVTHVAMEATGTYWRAVWHVLESDFALVLANAGHIRQVPGRKSDVKDAEWIADLLAHGLIRSSFVPPAPIQEIRDLTRTRKQLVREIAQHTQRIQKTLDRANLKVTGVVSRILGVSGRAMLKALIAGETDPTRLADLARGTLRQKRAALIEALTGHLTPHHRRLLALHLDVIEHLEATVVTLDADLGDALAPFHEAVRRLDALPGIDTIAAQAIIGEIGVDMTRFPTHQHLISWACLCPRLEESAGRRKSTRTRKQNNWLKSLLIQTAWTTIRGKDSYYRAQFYRLKARRGPQKAIVAVAASMLTAIYYMLRDSTEYRDLGAQHFERLDKTHVTRRLVHRLEALGYHVQLAETA

SEQ ID NO: 150029 - protein, 423 aa, unidentified
MKKRMYRSTAVKSVNLESVLETIGDAPVVIGVDIAKVDMFATIEVNAKPVITVRWEHPNETAVFVEMLLVFLARGPVEVVMEPSGTYGDALRAMLERVGIPVFRVNPKRCHDAAEVYDGVPSLHDAKSATILCKLHRDGASELWPMRSEHERRLGAILRILEVHTKELHRNCNRLEGLLARHWPELTHHLDLRTATLLELLMAYGGPQAVASDEAGARELMRQVGGRYLAAKKIDAVIRASKSLGVPQLDEERELVMRVAEEARRAQKLAKKVKGRVERMSESEGATKELAPVVGKTTAAVMVAALGDPRTYESATAYLKSVGLNLKEKSSGKKKGALHITKRGPGIVRLYLYLAALRLLQRDRVIRAWYHKKVRRQGGRAKSKAVVAIMRKLVLALWSVAHGEVFDSSKMFDARRLKLSAVT

SEQ ID NO: 150030 - protein, 355 aa, unidentified
MDSVKYIGMDVHKEAIVIAVLNSSGKLVMECVIETKAITIVDFLKGLRGSLHVTFEEGTWAAWLYDLIKPHVTELIVCNPRRNALLQEGSKSDRIDARKLAELLHSNLLRSVYHGEHGVRKLKELARSYLAISKDLGRVMSRVKAIYRSWGIPCGGKQVYAPRYRSQWLGKIQEAGVRRRAEFYYQQFDALRVLRQEVRRELLAEARKHDAWKLLRGIPFIGPIRAAVLIALMQTPHRFRTKRQLWTYSGFGIETHSSAEQRFINGELRRAKKPVSIRGLNRNHNHDLKNLFKGAATVAAAKAGPFKEFYDALVAKGIRPEMARLTLARKIAAITLIVWKKGVRFDAQHLKPQTA

SEQ ID NO: 150031 - protein, 316 aa, unidentified
MYLGIDVSKLTIDCCLIADGQNHQKKFQNNKGGFEQLIKWLQSHKVTDKLHCVCEATGTYYEALAEYLYSRYTITVENPRKIKGYAIAELQRSKTDTQDAKLIAQYCQDRKHKLKAWQPPAKEQKQLQEIARYLDHLKQQRATEKAKQHEAPDYIKSHIQTTISNLTAQIKTVKKQLLQFYKDNPSYNNLRKRLKTITGIGEQATAVLLSTYKRHEFKNAKQFTAYLGLDPRKYQSGTSVNGKSRISKIGSSEIRKSLYMPAVVAYRCNAFPEFVGRLKNKGKHIKLILIAIMRKLAVIAFTLLQNGQDFQVERYK

SEQ ID NO: 150032 - protein, 364 aa, unidentified
MKTLHYVGMDVHKETIDVVVLQEDEREPFLERTIRNQEGVIGKLFKKLMEGGSVVACYEAGCMGFGLQRMLEEMGVASIIASPGKVPRRPTDRIKTDRRDARRLAEQLRARTLEAIHIPSKDDEAVRDYLRAREDVRLELVKTKQRLQKFLLRHGYVYESTRYWTGRHDRWLRGLEFDKDMLKETFEEYYFMIGTFTEKLRLMGRRIEEIALSEPYAVRVGRLRCFKGIDYLTALSIICEVGDFRRFSHAETFMAFLGLVPREASSGEKRRQGGITKSGNTHLRKLLIESSWHYRYKSAPSKRITERRKGQSAEIIAYADRAMRRLQWKFFRLIMKGKTKQAAVTAVARELAGFVWGMMVGQTA

SEQ ID NO: 150033 - protein, 394 aa, unidentified
MKLVGIDVGKNSHHFCVMDKETGEFNVTPTSFSNNKEGFDFLINSLKPYSKKSILIGMEDTGHYHVALLKFLLSNGYTVALINPKTTDLTRKMEGGITKNDKLDTITICDVLDTPERKKQYRITKVDRFDLYEQRQLTRHHHNLKEELNVYCNRLQKSIDLVFPEFNTLFSSKYGIVYMNLLKTFGSAEAIASTDIRTIRKFFEIKGKGNRISLTPEKLKECAKNSIGISSEVETIQIKHLVSQITLIKEQIAEIDKKIEEFSITNNSPILSIPGISHFSGTSILAELGDIGNYSKPSQIIKFAGVAPYHYESSQYNAQHTGITKKGSKYLRKTLYQIILPVINNNPVFKKYYLLKISQGKGHRCAQGHCIRKLLRIIYHLLETGQSFDPALLR

SEQ ID NO: 150034 - protein, 324 aa, unidentified
MPVIGIDVSKNKLHCALLSEAGKLKSKVFSNSPEGHILLLQWAGRHGQCEVAQLHAVVEATGVYHEAVALSLHRAGVKVSILNPAQVKHFAQGLAVKSKTDASDPVVLARYGALVKPPAWEPPPPEITELKALITRLEAIEGTMRRELNRIEKTTLTGVPTVVRESLEKSVSFLKEEKAHLEKTIREHIDQHPTLKQDRHLLESIPAVGPKTAWRMLTLLRARTFTRAPQAAAYVGLVPIEHQSGTSVLKRPRLSKAGDARLRAALYMAAVVATQYNPDIRRLYQRLLAKGKTKMSALGAAMRKLVHICFGVLKHQRPYQPQSV

SEQ ID NO: 150035 - protein, 317 aa, unidentified
MDNGTMVDRFVGIDVAKNSLEIHVRPDKLAFGCGTDADSLAALAQRLKALQPRLTVLEATGGYESVVAAALVDAGLAIAIVNPRQTRKFAGAVGRLAKTDKIDAAIIAHFAEAIRPRAHVLADAQTQRLAALMARRAQLMASNAAEQQRHNRASDTDTRRSCETMVRSLKAEIARIEKLIDKLITASPLFQAKQDLLRSIPGIGDVVARTFIAELPELGTVDRHQIAALVGLAPINRDSGRSRGERHIHGGRPQVRAPLFTATMAAIQYNPALKAFYERLVATGKNRRVALIAAMRKLVVIANAVLRDNRPWDPAKA

SEQ ID NO: 150036 - protein, 398 aa, unidentified
MTESSDYESVQVFIGVDVGKDTHHAVAINRSGKRLFDKALPNDENKLRSLISDLKQHGQILLVVDQPATIGALPVAVARSEGVLVGYLPGLAMRRIADLHAGEAKTDARDAAIIAEAARTLPHALRTLKLADEQIAELSMLCGFDDDLAAQTTQASNRIRGLLTQIHPALERVLGPRLDHPAVLDLLQRYPSPEKLASLGEKKLAAQLCKLAPRLGKRLAADIAQALAEQTVVVPGTNAAAVVLPRLALQLITLRKQRDEVALAVEQRVLAHPLYPVLTSMPGVGVRTAARLLTEVACRAFASVAHLAAYAGLAPVTRRSGSSIRGEHPSRRGNKALKRALFLSAFAARRDPRSRAYYTRKMRQGKRHNQALIALARRRCDVLFAMMRDGTFYTPQAS

SEQ ID NO: 150037 - protein, 507 aa, unidentified
MQQTIRTPLYSAGIDLALRAGHLAGLLDDQGCAAGNQMRFGRTYDEMEAMFSTITSRVPEGCDLVWGCEATGAAWRSVTAFLLAKGQVVSLENPAAIAALRDVDSRFLKDDHVDARTIGEMVLRRRYRRKPLCPVPSPHSQGVRSLGRDVEKLSNELSSVKTRFSSLLCDQLLPSLKPSDHEWASPTLMPVLHKFADPRQIARLKLEAFINKAKKIGGPRTSEAALTKLYQAAVDAVRCYGDNRHYYEAHAFRLQDAILAITQLEDRIKSMRQFLSDQLAEVRTEEDVRHGLSVPGVGESTLDILMAFYGPPREWPSFKAMKRLAGTVPVVERSGNTDCPQRMSKLGDPVLRKIIFQIGNVARRYDAECAAIYYDQMVNKGKGHVAACIAAGLWILNCLRAVLRDGKEYESRHPETGKPIDREKSRELAQTLYTVPEEIRAARSKHKPNPHEERKQPTQPNKPSDGTQRPTEAKATPSGGSDVRSRKPGKQQPHSKKRRQPEQVAPK

SEQ ID NO: 150038 - protein, 344 aa, unidentified
MNATKTVSRLGIDLGKNSFHLWGVDHLERVVLRKKLTRKTLLKQLSNMPRCRIGMEACGSAHHWARELKRLGHEVKLMAPQFVKAYVKGNKNDYNDAQAICEAVGRPSMRFVGIKSVAQQELLALHRIRQSVVKARTAQANQIRGLLAEFGMVVGKGINQVRRRLPEILEDGENALSPGCRDWLQELYEHLLHLDQRVQTYDRRIESQFNAQEACQRLAAVEGVGKISATAVVATFGKATEFGNGRQFSAALGLVPRQHSTGGREVLLGISKRGDRYLRTLLIHGARSVVSRVLNHSKDDARSRWIRRIALERGTNKAAVALANKNARIIWALLRRDSVYRPVV

SEQ ID NO: 150039 - protein, 410 aa, unidentified
MERLLERCAGLDVHKRTVAACVRVPGPGGKRVHHVHTFGTTAADLLALGDWLATHEVTHVAMESTGVYWKPVYAVLEERFTCVLVNAAHVKQVPGRKTDVADCAWIAQLVEHGLVRGSFVPPRPIRDLRDLTRYRTTLTHERVRHANRLHKVLEDAGIKLATVASDILGVSGRAMLGALVAGTTDPAVLAELARGRLRTKLPALRAALAGRFRGHHAFLVSQMLAHLDYLEEAIATVTTQIEEVLRPFAAVVERLDTIPGISRRVAEVVVAEIGTDMTAFPSDRHLASWAALCPGHHESAGRQKSGRTRKGNRWLRAALVQAALGAIGTRDCALAARYRRLVRHTGHNKAVVAVAHALLVTIYHVVARETAYTERGAAYFDARHAERVTQRAVRALLERQGFRVVLERAA

SEQ ID NO: 150040 - protein, 359 aa, unidentified
MCRVGEPVDSLLSLTLQINIMTIQSKQIVQESKPLFAGIDVGAEELILVIRKNSIPCKAQKFTNTPADRARLVKKLANLPGIIVCLEATGVYHFDLSIALHDAGVALMVVNPKASHNFAKALMKNSKTDAVDAETLAQYAERMDFVAWTRPSDEKIAIRSFARRIDALTRQKAAAKNQLHALTASKETPKGVLRDVNLSISQLEKRIDLLGREARGLIGKHPELERVFLLLTGIKGVAETSAIALMGELLLLPPGLSHREWVKFAGLDPRAFDSGKSVHKQARLAKAGNRHIRSALYMPALSAKQHDPHVKAYFQHLVDNGKKPLQAVCAVMRKLLHAIHGMLKYDKPFDNTRFYAIPA

SEQ ID NO: 150041 - protein, 372 aa, unidentified
MNHNTIYVGMDVHKENFSLCAYTLEAEKASYHQRTEADYKEVLKYLEFLRSIYGNDANFICGYEAGCLGYTLYHQLSANNVNCVILAPTTMLEQRSKRRIKTDKRDAEIIAKCLAQHNYSSVHIPTAKDEETKEFLRMRDDHKLALKKIKQQILAFCLRHSYRYDGKSHWTAAHLKWLRSLTPEALYKEILDEYLLTYQNLSDKLERMDKRIEEIASLEEYREAVKKLCCFIGVRTHTALSVLVEVGDFKRFASAKNFASYLGLVPGENSSGENQTRLGITKAGNRHIRLLLTEASQCYARGKIGFKSKELKSRQSGNTPEIIAYADKANERLRRRYYKMVLGSCKKHNVTKTAIARELACFMWGMMTDCIA

SEQ ID NO: 150042 - protein, 451 aa, unidentified
MSYRIAGIDVHKKILAVVVSDVEVENEYQFERRMFGSSPDQLRSLAAWLVEQEVEEAVMESTAQYWKPVWEALEQYWKPLRQRREGASRRSGTLHLAQAQSNRGRRGRKRDFPDAERLLKRLVAQELTLSFVPNAEQRLWRTVTRRKYQLTRDRVRLQNQVESLLEEAHIKLSSLVSDLLGASARRMLKALAEGETNPAALAALADQKLRATPEQLCDALGACTDLKPVYRRLLKMALEQLQFLEQQIGQLDQELASLLHPHQDAVQRLAEVPGLGVDSAQQIIAEVGSTAATFPSEKQLSSWVGACPGDDESAGVNYSHRSPKGNRHMRRILNQSANAAVKAKGTIFEIVYRRTVPRLGHQQTIGAIAHRQCRLIWLILHQGARYEERGPAVTKQSKQRRTAKMIRQLRSLGYRIEPPNPQHPSPAQGQCFSTLSFRAYGPRKLMKITWR

SEQ ID NO: 150043 - protein, 390 aa, unidentified
MGVIIGMDPHKRSATIEVIDERGALLAGGRFGTDTSGYRDMLAEGRRFAERVWAIEGCNGIGKHLAHRLVHDGEVVLDVPPKLSAQVRVFATGNGRKTDPVDAHSVAIAALYSAGLIRVEVDDDLVVLGMLADRRDELGRARTQTVNRLHRLLLELFPGGAKRFLSARQARALIATIKPRDLPGKTRRRLAVELIGELETIDRKLNAVEKEITPLVLERGSTLLDLNGIGPASAARLLADVGDIHRFANRDRFASWNGTAPLDASSGNQERHRLSRAGNRRINRALHIMAIVQLRHATEGRAYYDRHKAGGMPSLMAMRALKRRLSNVVYARMLADQLRRETESATGPGGQSGSDSVSSAADSHPGIDSSDKPHPGPANRKPRTALPAAS

SEQ ID NO: 150044 - protein, 326 aa, unidentified
MQGKEASEQETKVQSNVGIDISKCWLDAHVLPGNDRLHVANNCTGIRQLKRWLSHYRIALVAIEATGKWHRHLHRSLVASAIPVAIVDPYRVRMFAKAQGILAKTDQLDARVLALFAAMMAPPVRPVAPQTMAELAELVVARASAVEAQTALKNQFAAAESTFLKRQLDRRISRADKDIAALDREILKRIKADTSLARRYAVLTSIPSFGFAVAATLIACLAEIGSATAKQIGMLAGLAPIADQSGYREGIRVIWGGRPAVRRVLYLAALSASRFNADMKAFYKRLIDNGKPSKVALIAVARKLVVLANTLVSEDRTWQPCAPIQA

SEQ ID NO: 150045 - protein, 343 aa, unidentified
MESYAGRQFVGIDLHRRRTVIVRTTEAGEVLETVRIVNDVQRLASVMARAGQYPEVVLEATYGWYWAVDALQAGGANVHLAHPLGVKAFEYRRVKNDFRDAQDLADLLRMGRLPEAWIAPPPTRELREMVRHRAKLVGLRSHCKAEVHAVLAKCGVQVLMSDLFGLWGTELLDGLDLPAPYAARIASLRRLMDDLDFEINVFAGIIRGRMAHEPGYTAVQQIPGIGPTLGAVLVAEIGDVSRFASASKLTCWAGLTPKHHESDTHVHRGRITKQGSRLVRWAAIESVKTVPKASPVGVLRERVADRRGRNIGSVAAARRQLELVFYALRDGHVRALEHLPRVA

SEQ ID NO: 150046 - protein, 348 aa, unidentified
MLADQLDYIVGVDPHRDSHALAVVHVVSGAVVFEANIAACSEGYADALRLVEEHGAGRRAFAIEGTGSYGAGLTRFLAGRGERVLEVGRLRRERRSGGKTDALDAVRAARSVLAQERPATPRAGGERQALQALVAAREGAVNAKRAGLCQLRDLLITTPEPLRSELRPLTRARLLQRLAATRPDGRRDPELRGSMLALRSIARRILQLTAEERELAREIETITRKLAPQLLDQPGVGPHAAAQLILSWSHRGRIGSEAAFARLAGAAPIPASSGQTIRYRLDRSGDRKLNRALHMILVTRKRSHPATIAYIERRLQEGKTRREANRCLKRYLARNLYRLLEHGAPPTT

SEQ ID NO: 150047 - protein, 366 aa, unidentified
MCPTLPLESSLAVRQEVVLGVDTHRDQNTAAVVAIDGRLCGSGEFPTTTQGYADLLAWASALGEVERAGVECTGSYGASVSRLLQSQGIEVLEVNQPDKRARRSRGKTDAVDAEAAARAVLSGRASAIAKTGDGPVEALRVLKMMRDSAVHARTKAVNQLKATMVTADPALREALSGLGAKALVRRCSTLAEPTQDGISQRATVYVLRGLSQRILALTAEANQAEAHMNELLQQHAPDLIARTGIGPDSAAALLIVAGDNHDRIRTEASFAALCGVSPVEASSGNTQRRRLNRGGDRRANAALYRIVLSRLRWDTRTQAYMTRRLAEGRTRREIVRCLKRYVAREVFALIAGSTLPVVSTTQPRAA

SEQ ID NO: 150048 - protein, 313 aa, unidentified
MYYIGIDVSKKALSVYDGQSSLEFENQEGLRPFYRYLKKHFKSFENLGLIFEATGIYSNHLREFSAKHHIKAYIINPKQSHNFAKSLGVRSKTDTIDAHTLWQYRSLISEEKLKVPVVDQEVKKLASYLTSYQFTQVQRTALANHLESVTDKTLQQLLHQELTRKRKLEEKILADILTYIGKHPGLAEDFQRLKRISGIGEKLAFSLLFLFRHYQGTNRAQITALAGLDPIYKESGTSVKGKIKISKNGNRYIRKMLYLPTLCAIQNNRKIAVFYKRLIDHHKPKKVAIIACMRKFLLVAHAVYRQKTEYVPG

SEQ ID NO: 150049 - protein, 370 aa, unidentified
MLDTTTFVGLDVHARSIKAVSLDVMTGEVRCATFGYDAGAVAEWVRSVDPRARCVYESGVTGFDLQKRLSGLGVDCVVGAVSKMIKPSADRRRKNDRNDAEFLARMLSVGNVVEVWVPDDECEAARDLTRALEDARDDLSRSKQRLSKFLLRHGLVFDERTPTGRRKGNWTRAHWSWIESIRFAEGADNDVLAYYVDAVRRAAEEKARLEGLVEAEARKPRWRRRVGSLRCLKGVDTATAADLVFEAGEFSRFGNARSFASWVGLTPSEHSSGESDRRGAITKAGNKHLRKALVEAAWHYLTCSGRPKDLARGQAPERVARRHAAKGVRRLVERREALLARGVHNNKANVATARELACWVWAVGLMAEEA

SEQ ID NO: 150050 - protein, 342 aa, unidentified
MTYYAGIDVSLEYSSVCVVDGAGKIIREQRIASEPEALIAWFRGLDFELERIGLEAGPLSQWLYAAMRTAGLGVELLETRHVRDAFRAMPVKNDRNDARGIAQLMRLGWFRPVHCKSMAAQEVRALLTARKLVQSKLLDVEMSLRGLLRGFGLKVGPTTPSRFATRIRELVGGNATLEAVAAALLAVHETLRREYTGLDKRVRSMGRSDGRVRLLMSTPGVGAIVALTYVAAIDDPARFKSSKGVGAHFGLTPKKYQSGETDITGRISKIGDEGVRTALYEAGHIILTQPLKGCTALKSWAMRLAKRAGMKKAKVALARKLAVIMHRMLVDGTLFASAAVAA

SEQ ID NO: 150051 - protein, 338 aa, unidentified
MALYGGIDLHSRISWLVILDGALKLVRQVKLANSLAEFVRILEPYRGALAGLVVESTPNWYWLVDGLQDAGYRVHLANTYAAQQYSGLKYTDDRHDARWLAHLLALGILPEGYIYPAHERPLRDLLRRRGFLVQKRTSMVLSLQGAFGCHTGHRVNSDTVKKWTAAEIEEQLDDPMVVRGFTCLLEPIKAMSSQIQMLEKEILAQVKLRDEFALLKTVWGIGPILALTVMLEVGDIKRFEKVGNFTSYCRLVKTDRLSAGKRKGAGNAKNGNPYLSWAFSEAAHFAIRYHDAARRFYQRKRAKTNGIVAVRALAHKLARASYHVMRDQVEFNPARLFA

SEQ ID NO: 150052 - protein, 414 aa, unidentified
MNSPGNTRDIQRYVALDIHKEYVMLGAMNAAQEWVIRPRRVEMNHFRTWAANNLCAGDAVVIETTTNVWDIYDIVAPLVTQAVVAHARAVRQIAEARVKTDTEDIKRLLRLLIADIVPEVWVPPAHVRELRGMIAYRNRLVKTGAMIRNRLHSLLHRHNLPLSEGGLTDQGWWEAQALNTLERLQVRQELALLEKVEQNKAELDLELQKMSVGETWGRQATRILQLPGLGIVVTMTILGAIGDIRRFEDAKHLVGYAGMGAGVHDSGKEHKDKGITKSGRKELRWALVEAAWRAIRISELWKQRYEELKERKGPCKAIVAIARKLLVAIWHVLSKEETDRNVSEEDLAWKMLLWSWSLGDEARLGLTPKQFAKYSLLRLGVQNDVTEFMRGKVLRRIAPTDEVLARAAELGLPT

SEQ ID NO: 150053 - protein, 352 aa, unidentified
MEYYIGCDAHKKYSVFAGISDGGEIIPAQRVEHNRESYRSFLKSLPPASQIAIESVGNWYWMVDEMENAGHVPTLTHPAKAKLMMGQVNKTDKLDARGLAVLARNGTLPAVWIPPGELRDRRELPRMRMALSQVRTKFKNRIHSAFAKYGITFDEVSDLFSGKGRKLLEKSLDELLPETRLSVQEQLWLLDQVEQSVKKAEKRIGQVIKMDDTMQLLQTLPGVGPILAIVIALEIGSIDRFATAEKLASYTGKVPRVNSSGGKTYYGKVRPDVNRYLKWAFTEAANVIVLQQKRWPDRHVVRLYQRVRKHKGHAKAVTAVGRHLAEATYWMLRNNETYREPGGKRLVSSTQG

SEQ ID NO: 150054 - protein, 337 aa, unidentified
MEYFAGLDVSMAETHVCVMNRDGAVVYEVKVPSTPADIAAGLAKAPACGRIVFETGRMAPMLYHGLRQLGLPIFCIESRQAHQALKSLATHKTDRNDARGLAHLARTGFFKPVYVKSLPAHALRSLIIARKKLVGQRVTLENQIRGLAVVFGVRLPRALRPAFVRQALQASEGIPGLSAAMRGLVAARAAVLAAVSAIDADIRQLVRASAACRRLMTIPGVGQLTALAFTAAIDDPSRFRRSRDIGAYLGLVPRRYQSGEVDYTGSISKCGDRRVRTLLYEAANVMLTRYKSALKLKDWALAIAKRSTLRKARIALARRLAIIMHAMLRDGTEFNPA

SEQ ID NO: 150055 - protein, 308 aa, unidentified
MYMDRDGNITREHTFPSSKKAVERFLSGIPSPEITLAIEACGMWRGVHKVLTELGYDVKLANPKKTHDIACKKKTDSIDAKILADLLRTNYLPQVWIPDEQTLRFRDLTRHKSNLTRLRTQVQGKIKGYLLRKGMKYGKLWNEKALSTLAEEDQDIKNLINVYNSLKEEEKEVMRRIKQLARSNRETTLLMSMPGIAEFSSLMILAEIGDIKRFPAPKELVSYAGLCRGIYQTGSTERSVHNTAVNKWLKWIIYECSGRTIMLDSRFQEYFYRIQKRKGYNTARRAAARKMLTILWYMLTNKEPYRDS

SEQ ID NO: 150056 - protein, 413 aa, unidentified
MKEVYRRCCGMDVHQQTVVVCVLSPDGVEGKAIRKVYGTFRNDLIRMRVWLKQLKVTEIAMESTGVYWRPIWNVLEEQGFGRLLLVNPLQVKALQGRKSDQRDCQRIAEFLQDKRLDGSFVPPPEIRQLRLMLRHRVALLEQRNEVHNQIRDLFETTGIKLSSVMTDLLGVSGRRIIGALIAGQDSPELLSWKVRGRLRKKEKLVRESLKGYFNEFHRTMLQSYYEHYQFLTQQIAWLEVQVEEHMQPHAELIALLLTIPGVDRIVAWTLIAELGTDPSVFPDGAHCASWAGVVPGEDESAGKPRSRRCRKGNKTLRRILTQAAWAASHCKHGYLRALFYRIKARRGWGKAILAVSHKILLVAYGIIKDRVPYRDLGDDYFDKLNPARTVKRLVHRLERMGLQVQVSEVRSDV

SEQ ID NO: 150057 - protein, 404 aa, unidentified
MIQKVCGIDVHKDLLVATILNPKTQQKQTITYKNSLQDIDQLTNWLKQNKCKTVAMESTNIYWKPLYLSLEAAKFQVILANAHQVKAIPGRKTDQRDSEWLAHLQSANLIKPSYVPPKHLRELRDLTRLRTKYVQARTQNKNRAHKILNSVNIRLHIVLSNIFGKAGTEIIEGLLAKKPIKTILENTKIKQLKIKSEEIESVVQGTLSVNEHFMLKQILKTIKDIDEQLAQIEQRIFELVDKKGMAIVLSVPGVGRLAGATILAELGEVSRFGNEKAVASFGGLAPCVYQSAGVTTLGHITKKGSKMLRWVMVETAHGAVRMDCRFKDMFLRIAAKKGTKVAYVAVARKLLAVIWHLLVMGEAYVEEGFSKTVVKMRSVVVAGSVSVVDMFETLSDVGSVVSKG

SEQ ID NO: 150058 - protein, 408 aa, unidentified
MRVVGLDIHRVFAEAVMLEHGKTRRLGRVGMTRDHLAAFARTLTHDDHVVVEATGNASAVAEVIRPHVGRVVIANPRQVRLIAEARIKTDVIDATVLARLYASGFLPEVWIPDEATLSLRRQVTRRTQIVRQRARLKTIVQSVLHAHLVPPCPHADLFGSRGRAWLLAQPLPPDEGEAIARHLREHDRLTEDLRVVERELARDALADANVKRLMTIPGIDMVVAVGLIAAIGPVERFAGPDRLVAYLGLNPSVHQSGEGRPRHGRITKQGRNHARTMLVEAAWQAVRGPGPLRAFFQRVSTRRGPHVAAVAVARKLAVIIWHLLTRAEDYAWVRPALHAKKLRDLELRSGEPARRGKRGAAYAYNLTRTRQEERRRVEQGETAYRRMTEGWSRRGRRVPTGAAKEERP

SEQ ID NO: 150059 - protein, 454 aa, unidentified
MVQRNAKVIPKPVKARAAALTITHPNAAGIDIGSASHFVAVPPDRDDQPVREFPSFTADLNALADWLKVCCVDTVAMESTGVYWIPLFELLESRGFTVLLVNARHVKNVSGRKSDVLDCQWLQQLMTYGLLSGAFRPVEEVCVLRCLYRQRGMLLRSQGRHVQHMQKALTQMNLQLTNVLADIVGESGQKILRAIVAGERDGHVLGALKNVRVRASVDEIAKSLQGTWRTEHLFALKQALGAFDFVGTQLAECDHEIELQLQVLKLHDGNPAKGKKRGRARNAPKFDLRTQLFQMCGVDLTRIDGVDVTTALAVVSEIGVDMTRFPTIKHFTSWLGLCPGTKITGGKVMSGKTKRCVNRAAQALRLAAAALRSSKSALGAYFRRLCSRMDKPKAVTAAAHKLARMIYTMLTKGEEYTDQGQDYYEERYRERVLRALSQRAAKLGMQMVPIAPPA

SEQ ID NO: 150060 - protein, 422 aa, unidentified
MVLKGVPMALKIVYQICCGIDVHKTFVVACIASTNKQGVTIYKRHRFSTFTQGLKELLQWLLDNHCKDVCMESTGKYWIPIYNVLEKDCNIVLAHPKYVKAIRGKKTDKKDAKWIADLFKHDLVAGSFMPPADIRQLRDLMRYRFKLTCFMSSEKNRLQNCLTVSNIQLASVVSDTFGKSSQRILDKILENPDDTSFDIEPLIHGSMKKKLPELELAIDGFITPEQAGKLKVIKKHFEDLESRKAELEKLILALASPYQQELDLILTAPSFKNKFTAIGIISEIGVNMEAFPSAKHLCSWAGLTPTNNESAGKKKSVRVSKAGCYIKPLLVQCANSVVKSEKHPEIRNRYLRLRKRRGHKKAIIAIARMLLTALYNMLKNKEPYNSELYRKSDALPVNREITIEQAILIAQFQGYKIKSAAE

SEQ ID NO: 150061 - protein, 412 aa, unidentified
MLFVGDDWAEDHHDVEVVGEDGRRLAARRLPEGPGGIAALHALIARFVPEEWAELDPLAAAARVKVGIETDRGPWVAALSAAGYEVFAINPMSVSRYRDRHSTSGAKSDAGDAHVLAEIVRLDRAHHRPVAVDSTLSQAMKLVARSHQSLIWERTRHVLRLRSTLREYFPAALVAFEDLDSSEALELLAAAPDPDRAARLSKARIAAALRRAHRRKVAERAEIIYSTLRDAALRQPDAIQAAFAVITASEVRLISVLTGEIDSLGEVVAEHFGRHRDADIYASQPGLGVTLGARILGEFGDAPGRYVDARARRNYAGTSPITKASGTKRVVLARYARNRRLSDAVRQWALGSLRGSPGARTYYDTMRDRKIGHEAALRQLGNRLVGILHGWLKTHTLYDETIAWAHWNTLAA

SEQ ID NO: 150062 - protein, 430 aa, unidentified
MKSNTQNAKIEAITETTLVLGIDVGSETHYARAFDFRGMEYSKKPFKFSNNEAGFMTFKAWILNIKEKHGKDKVVPGMEPTGHYWFNLGKFLQDNEMKPVLVNPHHVKKSKELDDNNPTKNDRKDPKVIAGLVREGRYMIPYLPDGVYADLRTASNMRFQLQAELTRIQNRISRWFNIYFPEYNTVYGQPDAKSGMMILKIAPLPEDILTLGIDGVNQIWRNAKLRAVGKARAKTLIEAAEHSVGSKEGALSARMEIRMLLEDYESRNARLQEVMALIEELVKQIPMAEKLLEIKGVGIKTVSGFLAEVGDISRFDNPKELQKLAGLALVENSSGKHKGKTTISRRGRKRLRYLLFEVAMSLVAKNPEFRELHVYYTTRKRNPLKKMQSLMAVATKLIRVFYAMLTKGVDYDPKKMISDIKRPAVYLQAA

SEQ ID NO: 150063 - protein, 361 aa, unidentified
MKTPLQHLIAEVPRRRSRVEMTIGIDLGDVWSHYCTLNEDGEVVDRGRFRTSPKAIEKWFTDLPPARVAMEAGTHSIWISEQLQELGHEVIVANVRELRAISHSDRKSDQVDAEKLARYARLDPEILRPIAHRTVEQQEALTLIRARDLMVRLRTAAVNAVRGLTKSCGHRMPASSTRCFAKRSLAVMPPGLAQALGPVLEQIAAMTTKIKQYDRQIQELGQAKYPETQALLKVHGVGHITALTFVLTLGSKERFKQSRDVGCYLGLRPRRSQSGDRDPQLGITKAGNVYLRSLLIECSNHILRPHGRDSSLRQWGLHLASRGGKQARNKAVVAVARKLAVLLHHIWTTQEPYIPSYKQAA

SEQ ID NO: 150064 - protein, 369 aa, unidentified
MEKDTIYVALDDSKRKLVIAMLRPGATEPEEQEIPKDSQHIQRLFRRLRREGAVQACYEAGVSGYDLYRQITACGVTCQVIAPALTPRRPGQRIKTDRRDARKLVRLFRAGELTPIHVPDEAEEAARDLVRCREAVRRDVVRWRHRLLKLLDRHGRLWVTEKNWTQRHWAWIRGQHFELAALQRAFEATVFALEQALARQAELDQEIAALAETAAYRDPVGWLRCFRGIGTLSAMVLVAEIVDFQRFRRPRELMAYLGLVPSEYSSGETHRRGALTKAGNTHARRVLIEAAWHYRHRPTVGRALASRSQAQPDEVIGQAWRAQQRLHRRYRHLVGHGKRPPVAVAAIARELVGFLWAAMTRRETRMHVA

SEQ ID NO: 150065 - protein, 359 aa, unidentified
MTTTTAPVYVGVDVAKATLQVHLQGSQIQFLNTPKGRTQLCHKIQALAGAHVVCEATGGYERPMVEALHKAKTPVSVVNPAQVRAAALAKGQRAKNDPIDAQGLTDYGQRYQPQPTPPVSKVQRQLSALIQWLQQLTQAKAIAKTQAEHHQESFVLQQHQALIEHYQSQIEMVEAKIQMLMDQDQALQQRVQCLDAIQGVGLRTAMLVLAHMPELGQLNRQQVTALAGLAPWTRDSGTIKGLRCIGGGRPEVRTALYMASLSAIKSNPTLKAFFQRLKGKGKPGKVALTAVMRKLLIHMNHQIKSLAAKPAPAAQVNNEKNSKNSCKNQHRCWVECLQSFQDCPGLPDRTGTRCQFNRV

SEQ ID NO: 150066 - protein, 331 aa, unidentified
MRLYAATDLHASNNYLAIIDENGERRFKQKLPNKPALILEALMPYKEEIVGIVVESTYNWYWLVDTLMAEGYKVHLANPVAIQKYSGLKHADDKHDAFWLAEMLRLEILPEGYIYPKEERPIRDLLRKRGHLVRLRTSLIISLQNIISRNCGKELDCNSMKRLKTNHVAPLLEDNEDLALAGSVRKEGIDFLTRRIKEIEKAVENKVKMQEPYSNLQTIPGIGKIIALTIMLETGHIERFADTGNYVSYCRKVHSNLSPNVLIGEWTSNGKQKGKGNRKNGNKYLAWAFSEAAELARRFDSKARVYYQRKKQQTNFMTSHCNNKDAMGAQP

SEQ ID NO: 150067 - protein, 407 aa, unidentified
MDKLFVGIDVGSRDNAVYIMMPDGSKHSSFPVQNNLGGAQTISKRVVAALTECGVIGVVIGMEATSVYGDNLMCFLREDGALARFDRKLHVLNPKQVKKFKDVHPDLPKNDPVDAFVIADNLRFGRIASPVYLDDYRYKALQKLTRARFYAVENLSREKQRFTNYLFMKCSGLAQEKVFSNNYGTTALAVFEVFESPDDIVNMDIDALTAFIAEQGKNRFPNPDVVAKAVQAAARGSYRLPKTVNDTVHQVMSISISSMRAMQAQIKALEKEIDRQFENIPNTLISIPGFGPVLSAGIIAEVGDINRFDGQASLAKFAGLAWNQYQSGTFEGQNSRLIRSGNRYLKYYLYEAAFSIVRCDTEYKQFYDLKYNEVNKYQHKRALALTARKLVRLVFRLLKDNRLYIPA

SEQ ID NO: 150068 - protein, 310 aa, unidentified
MQDILECCCGLDIHKDSIVACLLKGPLNKQPSSEIRVFSTLLSDLESLKEWLVKENCMHVAMESTGIYWIPVYETLETAFDGHMSLIVANARHMKNVPGKKTDMKDAEWIATLLRAGLLNGSFIPEKDIRELRELTRYRKSVISDITSQKNRIEKFLQSCGFRLSSFISDIFGASGSAIIKHLYTYGSITIKELDTCLKTQTRNKINEIMQAINGKLDKHQRQFLKMMFEHLESLKAHLSEVESQINLSIQKYDHYIELIDGIPGIDKTAASTILAEIGTDMSKFKTSEHICSWAGLSPSNNESAGKKKE

SEQ ID NO: 150069 - protein, 319 aa, unidentified
MSNPRVPIHVGIDVSKARLDVCLLPADQTLSVANSDDGIAQLIAALKPHPVALVLLEATGRHERRCAAALLEAGLAVAVVNPRQARDFARSLGRLAKTDTIDAKILAEFARLGHVRTCEKQPENRALLDDYITRRRQVTQMIAAEKVRLAAPQDKRTRVMINKVLRVLDQQREDLDRLIAKLIESDDDWRNRRDLMSSVPGVGVTTASKLVAELPELGKLNRQQIAALVGVAPMNRDSGQFRGRRTIFGGRASVRCALYMAAFNARHFNPVIRAFSQRLRGAGKPFKVIVIACMRKLLTILNAMLKENRPWDPTRPQTA

SEQ ID NO: 150070 - protein, 375 aa, unidentified
MNKCHLNTELSSHEGTRCQFNGGRCTIKSAEGRIRPVCGLGIDVHQDFYVVVEQVEGSNPKPPQRFAKGAFLHWAAKLKSQAREVHAVYEACGFGFGLQRNLTALGIKCHVVCPQKLDEHNKRVKTDGLDAKALCLKLDRFVQGNRDALAIVRVPTEEEERARAIHRQREQLVGARKRLEAQGRSLMVNHGLDPVQKWWKPRTFAALPVPRWMRELLGNSQPIVLVLQEKIAALTLQLQSAAAPNQPRGLGKMTSVVIDREIGDWHRFNNRRQIASYTGLCPGEYSSGNTRLQSCVTKHGNPRLRAALVELAWRLVRFQPNYKPVVKWRQILTRGALATGAARKKAIVAVARQLAVDLWRVRTGRCKPEALGLEI

SEQ ID NO: 150071 - protein, 375 aa, unidentified
MKKNNTVKGTSKNKKKTTKVVEESITIGIDLGDKTSRFCMLNGSGETIKESSVVTSKKGMMQVFGCLRRCRIAMEVGPHSPWVSRLLSSLGHEVIVANARQVKLISTSSRKNDRLDARVLARLARMDPELLRPIQHRSERAQAHLTEIRARAALIELRTSVVNTARGLVKALGERLPKVDPDQLGVEHLKALPVPLQETLRPLLEEVVSLTEKIHLYNARIEQIARNEYPETELLKQISGVGTLIALTFVLTLGDGARFECSRDVGCYIGLRPKQRDSGESQPQLHITKEGDNYLRKVLVQGSHHILSARGPDTDLKRWGLKLAERGGKNAKKRAIVAVSRKLAILLHHLWVSGEVYEPLRNSNARSEGKKSAAA

SEQ ID NO: 150072 - protein, 341 aa, unidentified
MTITTMGLDLAKSVFQAHGIDDSGATVLVKKLHRKQMLPFFSKLPPCLIGVEACGTAHYWARTLAAMGHEVRLIPPSYVKAYVKRGKSDALDAEAICEAVQRPTMRFVPTKTVEQQGILMTHRARSLLVRQRTMLANAMRAHLAELGFVANPGIAHLAKLAEQTLTDKDALPPYARATLEILIHQIMAISGEIAALDQQLSAWHAASEASRRLATIPGLGIITATAIAATVTDPTQFRSGRQFAAWLGLTPQQHSTGGKTRLGGISKQGDRYLRRLLVVGATAVMRHVKDKPMPMANWIRKLVEKKPFRVVSVALANKLARIAWVVLTRKEAYRPYEPTTV

SEQ ID NO: 150073 - protein, 323 aa, unidentified
MVVSDEGDRIVFNRRLPNDLGQIRAALEPHQEELAGVVIESTYNWYWLVDGLMDTSYRVHLAHPAAIKKYEGLKHSGDFADAAYLAQLLRLGLLAEGYIYPREERGARDLARKRMQLVRYRTAQILAIENILIRQTGARMKGEVVKRLTAEQVEGLGFAPDVALAMEANRAVSQALGQQIEALERRLKQRVSLRPEYRLLKTVPGIGDTLATTIMLETGSIGRFAQVGNFSSYCRCVDSLRESNGKKKGEGNTRNGNQYLAWAFVEAANFALRYCPQAKSFYDRKKSKTNRVLALKALAHKLARACYHLLREQKPFNVHLCFG

SEQ ID NO: 150074 - protein, 460 aa, unidentified
MNKFYLGGDVSKGYCDFIILDENKTTVLKSFQLDDTSKGHYLLNSVLIEFASKHPDCKIFAGVESTGGYENNWFESLWELQDRLDISVARINPKGTHHSGKATMRRVITDKNSARNIAEYIINYKDKIVFKNGDKFSSLRRQWKYVRMLTKQRTQLFNQLESNLYNANPELLRYTKYGYPNWLLRVIMNYPTAKHLAKARLAALSSIPYLKETRAISLIDSAKSSVASATDNITGQLVSSLVKQIIHLSKLIDKQSKIIADNCNLPEIEILKSFKGIGDYSAVGLLLQIVSIDKFSSTKKIASFFGLHPVWKESGDGKSGWHLSKQGSKEARNILYNVALTALRDNPLIKDVYARHLQKGMKKKKAIVACMHKILRIVYGMLNNNEHFNAEKDRANSKKMLKNNKPEKKVINKLRRYQPVDSDAPISSRQYRKRKEQEKSQNEITSLNTGSDSHSFVQKT

SEQ ID NO: 150075 - protein, 404 aa, unidentified
MVDTTAIDLFLGLDLGKEFHHAHGRTADGRTVHDKRLPNTEPKLLELFSKLVAKFGTVLVVVDQVANIGALPLTVARAAGCRVAYLPGLSMRRAADLHPGEAKTDARDAFVISETARTMPHTLRAVDRDDEVLAELTMLTGYDNDLAGEVNRATNRLRGLLSQIHPSLERVLGPRLAYPYVQALLQRHGSPARLRKLGRARCEALLKAHGSRKAHHLTTEIFDALAEQTLVVPGTEASALIVPGLAAQLAAAHAQRQATEQEIAALLEALPLFHLLTSLPGMGVRTTAAVIVAIGDGSGFPTAGHLASYAGLAPATKSSGTSIRGEHAPHRGNRLLKRALFQAAFAAIGCKSDPSSRVYYDRQRARGKTHTQAILRLARQRVNVIHAMIRTGTLYEPRTLDLAA

SEQ ID NO: 150076 - protein, 388 aa, unidentified
MEKFSKYVGLDTHKDTIAVSVVDAGGGSARFFGEVANRPAAIKKLIKRFSPDGEVVSFCYEAGPCGYGLYRQITQSGHDCIVVAPSLIPTRPGDRIKTDRRDSEALARLHRAGELTPVWVPDEEQEAMRDLTRAREDMKHLERQSRQRLNAFLLRHGRSYESGKSKWTQAHWRWLEGIKFTQPVQQIVMQEYIDSVQQQQCQVAELEGVMTRAVQEWKLAPVVEALMALRGCRLITAMTVVAELGDISRFDSPRQLMAFLGLVPSESSSGPNKRRGGITKTGNGHVRRLLIEAAWCYRFPARKSAPLQRRAERTSAQVQTIAWKAQKRLCARFRHLNDRGLMRVKISTAIARELSGFMWAIACEVMGQQRSLVGDGVATTSAPVTNRS

SEQ ID NO: 150077 - protein, 390 aa, unidentified
MKKHTSKVNKQNGNSKRVNAASKTTTATSTAASGTTTASSQKKEFAFYIGIDLGDKNCEVCVFNQAGEQEDAFRLAMKSASLQDYFAKLGRSRVAIEAGGQSRWVAEVIEQCGHEVYVSNSRKVAYIHESDDKDDPGDAYKLAELVHFKPKLLHPIQHRSREAQADLSWIRAREVLVESRTHLVNAVRGISKSFGERLAKCSTEGFTAKLADQIPEAIRGPVAPLLETIDHLNEQIHYYDQMEEQIARERYKKYWVLQQVDGVGVHTTLTFMLTIGDAERFQKSRQVGPFLGMRPRKKDSGESKPQLGITKAGDEFLRKTLVNCAHYILGPFGKDSDLRRFGQRICERGGKNAKKRAVIAVARKLAVLLHRLWVTGEVYEPLRNSKKPAA

SEQ ID NO: 150078 - protein, 457 aa, unidentified
MKWYLGIDVSKGYADFVLLSEHLEKMEETFQLDDTRSGHERLKNWLGSTFKRHPGLQIDSAVESTGGFENNWYSLIVGLSSKLAIRVARLNPSVVKNASKALLNANKTDSESARDIASYLKRYEDQVDYTCPESQYSAFRSLDNHLQLVTKQKTQVINELKQLLYSSFPELQRFCKQSIPSWVLDILQRYPSPSKLAKIKPEKLSKLKGVTMEKAEKLIEKAKATVSSRDTLTDEFLITTMAADIAQKQQTVKKLKAYLSENCKGRETELLQSIIGIGAYSAAAIMIQIEDVKRFASPKELASYFGLHPLIKVSGDKKMESRMSKQGRPAIRAILFMCANSAVLADTHMRSIYARHRAKGKSHKHTIGIIMHKMIRIIWGVLHHQQPYDSKVDAINQERNLEQPLHAEIKETKSKRRIQDFDTEAPISRIATKKRKVHATSQAGDAGLVRDLVHEPG

SEQ ID NO: 150079 - protein, 351 aa, unidentified
MSHKTAATVAHTIGIDTGKNTLHLIGLDDQGAIVLREKIARGRIAARLANVPRCLIGIEAGMATHYVARELGALGHDVKQVPPAYSKPFRQGHKNDFRDAHAIAEAVQRPSTRCVPVKTDDQLDLQALHRVRSRLVGQRTAVINQIRGFLLEHGIAVRQGLRFLRQQLPDILAKRSDVLSPRMIRIMEDLSGNWRRLDERIEHITKEIEVLAGTDVNCGQLMTVPGIGPIVASATVAAIGNGAAFARGRDFAAWLGLVPKQMSTGDRTILGRITKRGNRYLRMLFVQGARAILLRPKSWVKHSFGPWLTTAARRLHRNILTIALANKLARIALSVLIQGRSYETRIVPAAA

SEQ ID NO: 150080 - protein, 419 aa, unidentified
MSFKILKNNCCGLDVHKTWIYACIGITDSLKRTEYKEARFSSFTKGLNELCDWLSKYNCTDVCMESTGKYWIPVFNVLEKNNIWVTLSHPKYTKPQKGSKTDRKDAKWICDLYMCGMVKPSFIPPADIRELRDLVRYRFKLTCMITGEKNRAHNCLTVSNLKLDDVFSDIFGKSSRSITEQILQHPGETFDVAPFVDGRCKTPVEEIQAAVDGAISKEQAVKLRQCLNHIDELEMHKAEIEREIFRLSDKYESVLSLIRTVPGFDKTPMTAIQVLSEIGGDMSVFPTAKNLVSWAGCCPRNDQSNHKIKSTRISRAGSYFKPVLVQVANALIKSKKHPEFTTRYRRIKARRGHKKAIIAICRMILTAIWHILTDLKPYTPEGFLESRPVNESKILTTSQALNLMKQRGYIIKNDVVPVT

SEQ ID NO: 150081 - protein, 424 aa, unidentified
MKKNISKTTKAQKQGNGTRKRLRETKRNVAGLETAKKRKSKQRGVEQEMKEEHGNASQAVHEGEAVVEFKAGEGEGYTIGIDLGDKRSRYCILDKEGKILRESSVATLPASLKTVFSKLAGCRIAMEVGTHSPWVSRLLTALGHEVIVANAREVPLIYKSRRKNDKLDAEKLARLARMDAKLLKGIRHRGAEGQGDLLLIRSRAQLVETRTGLMNMVRGLVKSRGERLPGCTSEGFVVELLEGVDEAAVRALKPVMVLIEQMTETIQGYDQQVEEMGKKHAEIARLDQVSGVGPLIAATYVLTIEDPERFGRSRDVGGYLGLVPGQSDSGESQPQKRITKAGDGYLRYLLVQGAHYILGPHGPDTDLRRWGLKLGSSGGDRGKKRAVVAVARKLAILLLVLWKTGAKYEPLRNSDKQEKQKVAA

SEQ ID NO: 150082 - protein, 343 aa, unidentified
MQTITTIGLDIAKSVFQVHGVDAAGEVVIRRQLKRRSVLAFFQKLPPCLVGIEACASSHHWSRELQALGHTVRLMPPAYVKPYVKRQKNDAADAEAICEAVTRANMRFVPTKTLEQQSCLMLHRTRHLFIRQQTAVINSIRAHLAEFGIVAPVGRKGVTELLHVVADPSDKRVPEVGRACLAALGNQLLGLKRQILGFDRMIMAWHRSNQTSKRLHYIPGVGPMLATALVASVADPRTFRSGRNFSAWIGLVPKQHSSGGKDRLGSISKQGNRYLRSLFVAGALAVIRYAKIHGTKHRPWLTALLGRRPTKVVAIALANKIARMAWAMMAKGEHYKQPVALAA

SEQ ID NO: 150083 - protein, 350 aa, unidentified
MVTVGIDPHKQTHTAVIIDDAGRRLGKVLTVADDPSAIVKLLTWAGKHAGGRSVRWAIEDGRGLARRLATALTAAGESVVWVPVRLMVAERHHTGPRGKSDPLDAFAVAKAGANPDNARYLAEHRLDEPGAELAPLVDERNDLLTERTRLINKMRWRLHELAPGLEPASLTTLKAPRELAAQLRTLGVTPLRRVLQANCARLERLTRDINALTHELADHARRTFPALLAVPGVGAIVATTILAELGNPARVRNAAALARLAGTAPIPVWTSDTERHRLDRGGNRRLNRAIHTVARTQARTHPPAQALIAKHQDKKGKRGAMRVLKRHLTDVIHRALRQDLTPLTCQQSAP

SEQ ID NO: 150084 - protein, 346 aa, unidentified
MSNHNAKNDVAVLGIDLAKTSFQLHGVDSLGVTVLKKKLTRKNLCEYIAQLPVCTIGIEACGGAHHWRRVFSKFGHAVHMIAPQFVKPFVKSNKNDAADAEAICEAVQRPSMRFVPAKSIEQQDIQSLHRVRSQAVARRTAQANQIRGLLMEYGLIIPQGISHIRKSIPGMLEDAENELTTMFREILSELYDELVHLDKRIKTLEIKLETLCAQNEDCQRLLTIPGVGLLSATALVAAIGDISAFKNGRELSAWLGLVPRQHSTGGKPTLMGISKRGDTYLRTLLIHGGRTVVRVADKHQDKRNAWITKLDERRGKNVCAVAVANKNARVAWAMLSNKSTYQASAA

SEQ ID NO: 150085 - protein, 345 aa, unidentified
MDHFAGLDVSVKDTSVCIVDDAGKIVREVKVASEPEALLAVLKNPAYRFKRIGLEAGPLSQWLYSALAEAELPVVCVETRHMQAVLKAQINKTDRNDARGIAQMMRAGLYRPVHVKTIRSQKLRMLLTHRKLLQSKAIAVDNDLRGTLRNFGLKVGMVGKVRFEARVKALVENLPDLATLVEPLLLVRRVLREQIVILHRRVLAIARDDEVCRRLMTTPGVGPVVALTYRATVDVPARFRKSKAVGAVFGLTCSKYQSGEIDRNGRISRCGDEMMRVMLYEAAQSMLVHSKKWSWLKAWAMQIARRRGIKKAIVALARRLAVIMHRIWVDGTEFRWTRKQATAAA

SEQ ID NO: 150086 - protein, 358 aa, unidentified
MTGSSDYESVQVFIGVDVGKDTHHAVAVNRSGKRLFDKALPNDENKLRSLISDLKQHGQILLVVDQPATIGALPVAVARSEGVLVGCLPGLSMRRIADLHAGEAKTDARDAAIIAEVGCELSMICGFDDDLAAQATQASNRIRGLLTQIHPALERVLGPWLDHSAVLDLLQRYPSPEKLASQGEKRLASQLCKLAPRLGKRLAADITQALAEQTVVVPGTNAAVVVLPRLALQLITLRKQRDEVAMEVEQRVLTHPLYPVLTSMPGVGVRTAARLLTEVACRAFASTAHLAAYAGLAPVTRRSGSSIRGERPSRRGNKTLKRALFLSTRPDIQGLLHTQNEPGKATQPGAYRPGKAAL

SEQ ID NO: 150087 - protein, 340 aa, unidentified
MEFRFFIGIDVSKDTLDIGLLDAKSSETVDHQQVGNNDSGITAMLNWLQQHNEFSIESSLFCLEHTGMYNYPLLQFFSKQGASVWVENPIQIKRSLGLQRGKNDKVDAVRIAQYAYRSKQQIKLWQPAREVIERLKHLSALRERLVETRKRLLTPVEELSKVGNEAMAKILEKAMSKTMKALDKDLEAIEAQMKEVIDKDDNLRNMYELITSVVGIGFVTAVNLIVYTNEFKLFSCHRQFACYSGIAPFEYRSGSSIRGKTKVSHMANKKIKRYLHMASLTGIRLDEDLKSYYKRKVEEGKSKMSVLNAIRNKLLARIFAVVNRRSVYQKINYQPSLVLS

SEQ ID NO: 150088 - protein, 339 aa, unidentified
MERRHIGIDLHRNNFPCCVRLENGRNYLSTWKLEALPQFVKKLRPSDEVAVEVTGNTRLFYEAVAPRVVAVDPHQFRVISHSVKKTDPNDARNLALYLSKGLLPEVRMKEKTQAQIASLTQTRDTLVKLRTALKNKGNPILSAHGINLEKEALSSEKKLGEVLAMRFDPMVRIELRVIVDQIRSWNESIAELEKTITAEGQKLPGHKNLTSIKGIGPRTGSILLSVIGNIHDFPAEGKLAAYFGIVPRVSNSNETERSGRITKRGSKLGRTALVQCALIAQRYSPYRKKFYEKTKARQGTGKAIIALARKLLGIVYRTLKNNGVFEDFPNFVLAEGATA

SEQ ID NO: 150089 - protein, 416 aa, unidentified
MKIVRPICCGMDVHKNIIVATIGITNKKTRITEYIQETFSTLNHDLLNLKQWLINHKCFDACMESTGKYWIPIFNILEDEINIYLTHPKYVKAIKGKKTDKKDSKWICDLFKHDLIKFSFIPPKEIRALREISRYRYKLVGMRSSERNRYQNCMTVSNIGIGSVFSDPFGKSAQAIMKEVLESDIIEDEKILKCIHRSCKNKDKILDSIKHCNIETDQRFKMNESMTHMEELQVHINNCEIEIMKRAAPMFDQFMHITQLPGISTLSAILIISEIGVDMKQFESDKQLTCWAGLAPANNESANKKKSVRISKAGQYLKPLLVQCALGAIKDKEGYFGIKYSRIKKRRGHKKAIIAIARMMLVSIYHMILTGETFNPSDYESFRNPKPPIKQQDLTEESAIEFLKKSGFDVSKLTKL

SEQ ID NO: 150090 - protein, 419 aa, unidentified
MTDNDITACAPVLAAIDISKERHEVLIEAPDKSRRRRISVLNNLDEFNRLINLLHSYQRPVRVAFEATGNYHRALAYHLGSAGFEVKLISSMALARTREALHNSWDKNDPKDAQVILHMMTIGAEQFYHDPLMRGTNDIQELSKTHDMVSRSKTELWHRILTHYLPLYFPEADRFHRSSRGDWFFAFLELFSSPHFIAAMSKDAFMEAAWDVVGRKVGKERLLADIYATSTRSIGLPVAPGYDAICMFRMVLAEGRSLIAHRNQIEARAVTLLKDNPDYQLLCTIPGIGPINALTILAEAGDLRRFQHHRQFLKFCGMDLSTIQSGMFRGQTKLSKYGNARLRRTLWMAAQVAILQRANSFRDKFERYITKDRHNTHLRRKALTAIAAKMARTVHAVIKSGEPYRPFFEGTIHSGRTLL

SEQ ID NO: 150091 - protein, 324 aa, unidentified
MAKRITICAGIDTGKRKLDVAIDGSSLLLQVENSAEGHRVLLEWLRRHKVKRIGIEASGGYELPVVTELRRKRFVVVVFQPAQVRAYAKFHLQLAKNDKIDAALIAACTAAVKKIHAAPDPRLQPFAEHLTLIEQIGEDIKLYKNRIETCRDPRIQKLWKEEISRLAKRERAELKALVAAIRQHRDLAERLDLIYSVSGAGMPTAVAILVRMPEIGKLSREQVAALAGLAPYDDDSGERSGARHIDGGRKRLRRALYTAALPASFFWNPHLIALYRRLRTAGKVHKSALIACARKLLIFVNTVVARGTPWQNEQPVRATNPAAA

SEQ ID NO: 150092 - protein, 457 aa, unidentified
MPKTRKNRKIRTSSPVSLPVLRPHAAGMDIGSREIYVAVPPDRDPYPVRVFLTFTSDLLELADWLKQCGIETVAMESTAVYGIPLFQILEARGFEVFLVNAHHVKHVPGRKTDVSDCQWIQYLHSVGLLRASFRPPQTVCHVRAIMRHRDNLVQMAAAHVQPMQKALDPMNLQLHHVISDLTGTTGLAILDAILDGQRDPKLLAQLRHRRIKASPEMIAKSLVGDYRPEHLFVLRQSLASYRAYQKQILECDQEIQTTLTQFESQADPVLLLPRPKKTHKPQRNQFHFDLRTELHRVFGVDLTAIPGVKDLSLHVLLSEVGPDLSAFPSQGDFASWLGLCPNPHITGGRVLSSRTRKVRSRLAQALRMAAQSLDHSQSYLGHFFRRLRAKHGPVGAITIAAHKLARIIYHLLKTHQPYDESIFAREEQLHRRRTQARLERQAKAFGFQLVPVGTPTA

SEQ ID NO: 150093 - protein, 336 aa, unidentified
MGTLPVIVGLDYSDRSVQVCVLNEQGQVLGNRGCANDWQAIKEFAESRGRVVRAAIESCSGAADLADELVTRAGWHVDLAHPGYVARMKQSPDKTDYQDARMVADLERVGYLPRVWLAPEPIRELRHLVRYRQQLVEQRKAVKLRIRALLREQRCRPPASVNPWTRAWLSWVSKDALLKDHSRWIMERHLEELRRVADALKHVEKRLHEATSKDPVVVTLQEQPGIGPVTSWTLRAEIGRFERFRTGKQLARFCGTSPRNASSGERVADAGLIRAASPTLRATIIETAHRLIRTQAAWAQMAARLRARGKPKCVAVAAVANRWVRKLYHAMAQQAA

SEQ ID NO: 150094 - protein, 344 aa, unidentified
MQIAVLGIDLGKNSCSVVGLDSTGAVIKRRRMRPENLVAFTETLPACIVAMEACCGAHHLGRTMSSQGHQVRLMSPEYVRPYVKAQKNDDRDAEAIAEAATRPTMRFVELKSESQLDVQTLHRARDRLVGERTALINQLRAVLLERGVTIPQGRRKLEQHLNAMMASDDDHSLSPRVRRLIDDMRAEWLELDRRIAAFDNEFAAYARSDADARRLATIPGIGVLNATALLAAIGDGQTFARGRDLAAWLGLVPRQVTTGGKPRLVGITKRGNKYLRKLLIHGARAALPSLATSATPLGGWLRALMQRVHKNAAVVALANKLARIVWVVLRRGEEFNAAAVTATA

SEQ ID NO: 150095 - protein, 359 aa, unidentified
MLSQSNKIDFNGQHFYVGLDVHLKSWKVSIMAEKLTLKTFSQDPKPELLHHYLVKNFPNGTYHSAYEAGFCGYWIHNKLMALGIDSIVVNPADIPTTDKEKVNKTDKRDSKKIAKSLRNGDLKGIHVSSLKTLEDRCLVRTRGTIMKDLTRNKNRIKSFLYFHGIEIPETFTHSSNHWPNRFINWLRSIELVEYSAKKSLNLIIDESDHLRLLILDANKGIRELSQSETYSNQVHLLQSIPGIGILTAMIILTEIESINRFSNFDQLCSFIGLIPSTNSSGEKEIIGKLTHRGNNFLRSAIVESAWVAARKDMALNKSYHDYCRRMEPNKAIIRIARKLLNRISYVLKNNEPYVYSVVK

SEQ ID NO: 150096 - protein, 317 aa, unidentified
MTATPRFVGIDVSKFRLDVATRPESDRFTIGNDEVGVRALIRQMNDLQPVAIVLEATGGLEMLVVSQLAAAGLPVVVANPRQIRDFARATGQLAKTDALDAEVIARFAEAVRPGTRPVKDKALRDLESLVTRRTQLSGMLTAERNRRTMASDVVACSLDANVQWLKRNLRDIDQAIAKLIRSTPLWRAQDALLQGVPGVGPVLSVTLLAGLPELRRLNRKQIAALVGVAPLNRDSGLFRGVRCVWGGRAHVRSVLYMATLAGVRFNPVLRTFYQRLRASGKKPKVALTACMRKFLTILNAMVCSGTPWHGQIGVGAS

SEQ ID NO: 150097 - protein, 453 aa, unidentified
METNQSQTFVKMPVVNPNAAGIDIGSKFHVVALDGKNSEVKEFGVYTENLYEIAQYLKDNHIQTVAMEATGGYESPLVAILQAYDLKVVVTAGVNTKNFKGKKSDVQDSVRIQQLHSLGLLPSCFVPDNFSMELRSLVRLRRNLIENSSDYIRRTQKILRNANIRLDVALAHSTSQSSLRIIESIINGEMDGVKLAQLADKRCKKSKTEIAKALTGNIKATDIFQLKQCYRIYQNLLEELKLLDCEIEKLLKSEAQNNNIDLVCAKTNKRVDRNVPKYPVENYAYQIFDGINLDTIPGMGRDAILVFLSEIGNRIDSFQSAKSFSNYLRLTPNHRVTGGKIKSNHSQKNKSSMSVTLKRIALNVGKMKDNNPLTTFFNKIKSKVGTMKAITATANKMARIIWTLFKKNEEFNFSKLQQKPINKTKVLEQMKKKISNLNLEKSELSIFLQSITT

SEQ ID NO: 150098 - protein, 337 aa, unidentified
MKRYVGVDLHRTQFVVCTRWENGEQEIRQWRIGELPRFVKQLCEEDQIAVEAMGTTAHFYDAVVGRVARVVVVNPHQFKVISESVKKTDRHDAQALALYLEKDLLPGVRMKPKQNRELMHLAETRDLLVKQRSALKGKINNLLAMQGIELKREALSSKIALERILVLPVSGMVKVELRILVEQIRSLSESIAELDERLEEEGQQLPGYENLTSIKGIGSLSATVLLTVIGKISDFADENKLAAYLGLVPKIANSNESERSGRITKQGNKLARTALVQCGLVAKRYSPYLQRFYERIKQRRGGGKAKIALARKLVKIVYDTLKNQWVFEDFPSFTLAA

SEQ ID NO: 150099 - protein, 522 aa, unidentified
MATATKNRKSKSAKSRYIGKPGGLIQQRVQQAGPQQFAVISVDCAKRRSKWMLTDFYGKVVIEPTIVEHTVGAFKTMIAQIKEAMQDNKLTDSIAAVEMTGVYHRPVQAALRKAGFDTRTVHPFASEHYRQTLHTHIKTDDHDLEAIFHAAINGYGLAILPVDNAYQTLQALVRHRRNLVRQRARLQIQIRVLMHQTMPGFADLFEDDKLFRKSVALHVAKQYGSAAAIKRAGATGLAACLKKQKIRFHIRTLERIVAWSATAVEPADLAVLLTQQWKQLAQCWDLITQQIDQTEQETAKYLVKTPYVLLLSVTGINVVSAAALAGEAGPIEHYASARAITGRAGLFPSRYQSDEVDRNGKIAHSSNRRLRAAAMMVAENLIKCHPYYRGLSALWQGQKIDPRDRRVRIANRAMRMVYQIVAGRQVWRGKGVEREYLLTKLREFHRTHQTPIDQTAEGLNEAFRWLPKSTYASEGKSLQELIQKKRRGAKSIGDLLLPLLIRLGVSGAEPLESTSSEAQGPA

SEQ ID NO: 150100 - protein, 341 aa, unidentified
MSIVGGLDIHRSQITFDYLDTQSGEARCGQVRPADREHLREWLARFAGRDGDLVMEGCTGWRYVAEEVAAAGLVPHVADPAELAALRGRKRHAKTDRADARFMREQLQAGRVPESWVPPPHVLEYRALLQAYHDLRADHTAWVQRIQAVLFHHGAPRAGALSTAEGAARLGELAAGLSPSGQLQVATALAVTAVLEQQLDQLRRQLIAAARHLAGARELQDRIYGVGPATALALTCWLGGKGRFSSSRKAVRFAGLDVTVYSSAGKRAPGHLSRQGPAVLRWCAYEAGKAHARAGAPDHAYYAQVKERLDGKRAALSEARKIIRQAVHILAELGDAALDPC

SEQ ID NO: 150101 - protein, 348 aa, unidentified
MAGSTLPHRWSVGIDLHKDTLTACVYCSCCGEIRFQKIACRCRKQIAEFFGSLPRPHVVAIEAVGFYRWLWEMLEPLVERLVLADATQARALAGRRMKTDREDAQNVAELLACNRLPLAYAPPFEVQVLRDCSRQRNALSRQHAHVLHRVKSVMNANNRPGPARMASSGLIRYLEAFESKLPERHGRYLWLCVDQLALIERQRAQLERELERLLAQPLFAETSAILNSFPGVGLVTCATVLAEIGDFGRFSYRKSISRYGGFDPRTFDSAGKQRTGHISKRGPSNLRWVLVQAAWAALRLDPQVKRIWLRISRKAGKKAATVAVARRLLVWMWKAVRTGQPYRAPVAV

SEQ ID NO: 150102 - protein, 412 aa, unidentified
MKRIRDRVAGLDVHRDTVVACCRIVEPDGSVEVTKQSFATTRKGLTELAKFLSDHAVQTVVMEATGVYWKSPYYVLEALFPELWLCNAQHVKNVPGRKSDLADAEWLADVAAHGMVRPSFVPPPEIRELRELTRYRATQVDARAKEIQRLEKVLQDAGVKLTSVASAVWSMSSREMIEALIAGERDPAVLAQMAKGRMRAKIAQLQEALPGHFGAHHAIVCRQVIDHIDFLDQAIATLTLAITERLVPFEAAVAVVVSLPGISRRTAEVIVAETGADMSRFRTPGQLCAWAGVAPASYESAGKRRPAGTRHGSRWLRHALIEAARAAVHTKNSYYGAQYARIARRRGPNKAVVAVANSMLSTIWHLLSNGTFFEDPGGDYFERRHDPAVEAKRLARRIEALGFDVSLTQKAA

SEQ ID NO: 150103 - protein, 347 aa, unidentified
MVTVGSDSHKQSHTLVAVDGNGRQLACRTVAATSLGHLEAMQWAQGWPQRRWALEDCRHLSRRLEADLLRAGEVVVRVAPRLMAGARAQARERGKSDPIDAMAVARVALREPHLPQAQLEGREREVKLLLDHREDLVGERTRMQNRLRWHLHELEPGLRVAAGALDRKRVLARLAEQLAKHESLVAELATELVARIGELTIRIQQLERRIAELMAELSPRLLELAGCAALTAAKIVGETADVRRFRSRAAFAMNNGTAPIPVWSGNHQRFRLNRGGNRQLNAAMHRIAITQLRLNGAGRIYLDAKVAAGATKKEALRALRRRVSDEVYRRLREDRLERSVGTPRLAA

SEQ ID NO: 150104 - protein, 346 aa, unidentified
MKITTIGIDLAKAVFQIHGVDERGKVAVRKQLKRAEMSSYFANLEPCLIGMEACGSGHHWARKLEGYGHTVKLMAPQFVKPYVKTNKNDMADAEAICEAVSRPNMRFVAMKTVEQQAILSVHRARQGFVKARTAQGNQIRGLLSEFGIVIPQGIRSIMKQVPEILEDGENGLPGTMRNLLERLTENLKEMDRQAKELEAQIQLWHRENETSRKLAEIPGLGPITASAIVATVGDAREFKNGRQLAAWMGLVPRQNSSGGKQNLLGISKRGDTYLRTLMIHGARAVIRFAENKAEPESWLRKLMARRNKNVAAVALANKNARIVWALLAHDRIFRPDYTPVAVVAGM

SEQ ID NO: 150105 - protein, 466 aa, unidentified
MPQAKRSRKSRDLTPVHLDAAAIDIGATIHVAAVGPDRDKEPVRTFRTFTDDLHRLADWFVGCGIKTVVMESTGVYWIPIFEILEQRGFEVMVVNARDAKHVPGRKTDVSDAQWLQRLHEYGLLRASFRPQAEIAGLRAYLRQRERLLDYAAAHIQHMQKALTQMNLQLHHVVSDITGVTGMTIIRAIVAGERDPSVLASHRERGCHASVETMCQALVGNYREEHIFALTQALELYDVYQTKVAACDKQIQAILTRLKHNAAPSANKLLPTRRRTRQPNAPAFDARAALHAILGVDLTQIDGLGPYLALKLVGECGTNLTAWPSAKHFTSWLALAPHNKISGGKVLSSKTRRTSNRAASLLRLAAGTVGRTDTALGAFYRRLSARVGKAKAITATARKIAVLFYNTLRHGMSYADPGASYYEDRYKQRVLTNLRRRAKSLGFIAIPLTQPPATRSMGQWKRITRER

SEQ ID NO: 150106 - protein, 341 aa, unidentified
MKDNKKFRYNHYIAIDWSMEVAEIARMTYQGSKIERKTIEAETRAIKGYLDSLSGSKILTIEETTGSHWLYVELYDHVDKIIICDPYRNRLLSEGPKNDRIDAGKLCLLLRSGLLKEVYHSLQQSYNIRKLVRAYEQLVKAGVRVKNQRSALYRSVGLDHKKDGLNRDDELMGFIESQQKRSIAQYSQEKLNYEKMFEQIRKEQKIIKRLTDISGIGTILAMKIYAIVLDATRFENKYKYWSYCGLVSHRKESGGRDYGRRKPRYCRILKGVYRGAALAAISGNNDIREYYDELIREGLSLEEAANQIARYIAKVTYAVMKNKIPYRAYQWREGKQHKQML

SEQ ID NO: 150107 - protein, 366 aa, unidentified
MSKCIMLGIDLHDEALVVKLAEDRGRAETLGFDNTRAGRRRLWAEARRRSGPRRRTRVVMAYEASCQGFGFHDEAVAEGFECYVLAPTKIARSASQRRRKTDEQDAARLLEIVRGHVLAGNELPAVWVPDAQTRDDREITRTRLELAEKLTAVKAQAQMLLKRHRQCRPKVVGRGWTNGFASWLRGLTGPRSPLGQGARVALGTLLRQKDFLEQEIATLGEAVERLAEKPAYAEAAAALSGEKGVGLLTAMVVLTELGNLRRFANRKQIGAYLGLAPSSAESGKVDDRKGHITRQGPWRVRRVLCQCVWARIRGDDGEAAVYKRIAAKNPRHKKIAVVALMRRLGVRLWHLGRTVQERQASVAAAA

SEQ ID NO: 150108 - protein, 343 aa, unidentified
MKQDISVLGIDLAKNVFQIHGANVHGKRVLSKRVGRKELIELMSNFTPCVVGIEACTGAHYWARLFNSMGHTVKMMAPQFVKPYVMSNKNDKNDAKGIAEAVTRPEMKFVPIKTVEQQDVLLLHRARELCVKNRTAQSNQIRGLLAEFGVIINKGLSEVRKLPELLDLNKDKLSVKAIHIFERLYEQFKRYEEQVLLYEKDIEAHVKSEPLCKEILKIEGIGPMTASALVATIGDAKVFKNGREVSAWLGLVPKQHSSGNKIRLGGISKRGDRYVRCLLVHGARSALRCVDNKTDKKSRWAANKKATQPMNKAAVALANKNARIVWAMMATGECYRQENVHAA

SEQ ID NO: 150109 - protein, 344 aa, unidentified
MSYFAGLDVSLRSVSICVIDGDGKIALERTVPFEIEDVIACLRSVEGTIEQVGFEAGVMSQHLYHGLVAADFETICMEARQVAAALSAMRNKTDKNDARGIAQVLRSGWFSEVHIKSRDSHYHRALLTSRKTVLRKCIDLEQEVRGLIRVFGVRLPTPLSHRKFEQTVLPIIEADDQIAYALMPMIEAWRSLYAAFLELDRRVKSTARKDPVCLLLMTAPGVGPMAALAFKAAVDDPSRFKSSRIVGAHFGLTPRRFQSGEKDQTGHISRAGDADVRAALYSAANSLLMRTKAPSHLKTWGMRLVRTRGRRRATVALARKLAVILHRMWADGTEFRLTGMEVQT

SEQ ID NO: 150110 - protein, 403 aa, unidentified
MFCGWDWGSTVHGVCLIDDHGAVVKRWMVQHTEDQLMNLFSELAQLVEGADVGQVPIAIERGEGLIVGLIAGAGHPVWMVEPAAFKAARPRWGSAGAKSDLGDAFMLADYARTDGHRLRRVEPVAQATRELAALVRARTALVEARTAASNQLWAILAEHWPGAAVVFQKLTSQIALAFLTDCPTPRAAALLGEGRMGQFCRRHSYRGGKLPAELVRRLRAAPASVNPIAPAILEAIVRGSTAQIRLLNTEITRLERNITDALATHPKTPLLQTLPCVATVSLAALIAEIGPLLERCENPEQVAAMCGAAPVTRASGKSRTVGFRYTANKPARVAITGFADNSRHSSAWASDAYRRARARGARHPHAVRILARSWVRVIWACWTADTTYDPARHRGEQIFAAAT

SEQ ID NO: 150111 - protein, 400 aa, unidentified
MDRNRIVAGLDVHKDSVFLCIMRYDEAVIFEKTYGTLTTQLRQMRDDMLCHGVTECAMESTAVYWVPVWNELCDYMTLRLANPHFIKQLPGRKSDTRDAQWIAECQLKKLIKESFVPNPVVQDMRKLNRRIFNLNEDLTYNKNKLDAAMQRCGFRLSNYVSNTGGKSYQSVVRAISQGETDAEKLVLLVHGRTVNKHGRDTIAGSVTGNFSPTDIAVIRQYLAMMDLINNQIDECQKALAAMCEEHFPEQYRRLQTIPGVKERAATAIIAETGADMSMFAKATNLVGWCGLKPRNDESNRRIKSNRITHGNRYLRQILIEIAWVASRTRNCFFSNFSYVQVTVKKKRKMKIQVAIARKILVAVWHMLSNEEDFIDIYLKRLEEQRLIQLQIEQLESSMAL

SEQ ID NO: 150112 - protein, 346 aa, unidentified
MVYTGLDLSRRRLDVRVLDADGVTLEETAAPPDRDGLEHLVERLGPLGPIRAAIESMNGARFVHDELERAGWQVELADAQKVKGLAPLACKTDRIDAWVLAELCRRDLVPAIWLPDPAARAERERARFRLHLVRHRTALKNRIHQTLVAFGTPCPVADLFGVKGRQLLERLALPEPWRDNVTVTLAFIDDLDRQISACERELRRLGASHRYLPLLMSVPGIAWVLGYTIASEIGDIARFSSPRKLAGYSGLCPRVYQSGNQDRRGPLAKNGPKYLRWALIEAAQHAARSPHYRELYQRTTRRLGKNRGAKVAAIEVARRLCEAIWWMLTKDQPFAPAGATRCPLAA

SEQ ID NO: 150113 - protein, 369 aa, unidentified
MQVRHIFVGIDLGDKNSVARIAVDRDKSERFGFVNTRQGRARLFREVKRRSEQADGATIVMAYEASSCGFVLSDEAEALGIKCRVLAPTKMEKSVEQRQHKNDDRDANDVLEKLRGHVLAGNRLPTVWVPDLETRDDRELIRTRLDLTEKQTQIKAQIRMLIKRHGLEKPSGLGAGWTIGYRRWLQALTESEQLLGWSTRQALDSMLRQLQCLEAEIDRVQKPLEELANQPRHKPIIEELRQEAGVGLLTAMVYRTEIGQAGRFGRGRQVGKFVGLTPTSHESGQQSDRKGHISRQGPPRLRKVLCQASWVHIVHDARAGRIYQRLVSRNPKKKKIALVAVMRRLAVRMWHRMRKIERQQLQAGLECRV

SEQ ID NO: 150114 - protein, 359 aa, unidentified
MREQRNEISFRGQKIYVGIDVHLKSWSVTVLSATSVLKKFSQNPDPEALYGFLRRSYPGAEYHSVYEAGFCGFWIHECLTALGIDNIVVNPADVPTKSSEKLRKTDTVDSGKLARSLRANELKGIYTPDSVSLEMRSLIRLKNSITKDTTRQKNRIKSQLRYLGIEIPQEFLEPFSNWSKRFFAWLKEVETLTPSGRQALDIQIRHLEELRRQKLEMMRALRKLAKTDRFREPLRLIMSVPGFGQATGMAFLSEICDIARFRNAEQLAAYIGMIPMCHASGEKDGTGDITVRKHAIMRCNLIEAAWVAVRQDPAMNLFYTGQCKRMHKSKAIVKVARKLVNRLYFVLKHQTEYANSVVS

SEQ ID NO: 150115 - protein, 387 aa, unidentified
MYFVGIDISKFKHDCAIIDELCDTVMPSWSFSNDREGFSHFKALLDSLEGEKKIGLESTGHYGQNLKQFLESNGFTFMEFNPLLVSRFVRSKSLRNTKTDSIDALSIAQYVMTVEYKPYPSSFYHLDKLKSLTRFRNSLVRQRSRQLVELTNVLDKLFPEFKPFFKDKFSVTALYILAHYQTPERIANMNARSYEALRKLSRGRFTLSNFTQLKALAKNTVGTQSDYLLDQMNILLELYSQLDSKVDELDAQIKECVRGIDPPCLSIPGVGELSAAMILSEFGDFSKFQNPSKMLAVAGLEPGYFQSGQSEYTGHMVKHGSSRLRYALMNCCLPLISNEPVFAAYYAKKRSEGKPHRVALTHVAKKLLRVIYTLQTKNIRYDPTMIH

SEQ ID NO: 150116 - protein, 457 aa, unidentified
MRIVYQRCCGMDVHKDSVTACVLLIDEYGEWRSEKRKFRTMTRDLREMATWLASLRVEAIAMEATGVYWKPVWNILEAENKFHLLLVNAHHVKQVPGRKTDQKDSEWIADLLQHGLLKASFVPPQTIRRLRDLTRMRVKIRQMLATFANRIQKVLEDANIKLGSVASDVLGVSGRHMLHALVEGQQDPEQLAALAQGRLREKRAELQLALEGHITDHHRFQLKFLLEFVQFGEKQLSQLEAEIRCLLAQVEPASVPPKDTVIAELAAPGAGAEASATAQKSPLQTVVELWDTIPGVDELTATTLVAEMGANMDQFPSSGHAAKWAGICPGNKESAGKRLSGKTPKGSVWLRRALCQAAWAASRTKNTYLAAQYHHLIVRKGKKRTIVAVAHTMLVMAYYMAKRQCPYQELGGDYFDRRNADTMQHRLIKKLKNLGYEVTLKPITAPPTAQEPTAQCC

SEQ ID NO: 150117 - protein, 343 aa, unidentified
MEHYVGLDVSLKETVVCIVDQSGAIVREAALPSDPETIAEFISANSTNVGRVGLESGATSTWMWTELDRLGLPAICIDARHAKAALSMQINKSDRNDAAGIARIMQTGWYREVRVKGLDSHAIKAVLVSRALLVKMKRDLENQIRGLLKNLGLVIGRAKMNTYAERAVELIEDKPELAAVVEPLLKVREAVERKIADLDRKVMRLARSDAQVRRFMTTPGIGPITALCYLATIDDPTRFNKSRNVGAYLGLTTRRYASGEIDWTGRISKYGDAMLRSYLYEAANVLLTRVAKWSALKAWGMRLAKRSGMAKAKVAVARKLAVILHRMWIDGSEFNWSSKRAIA

SEQ ID NO: 150118 - protein, 462 aa, unidentified
MAGKHERERAEGNRRQLQGLPVIRQNVAGIDLGSERHWVCAATTDGSGREIASFGATTAELIRMAEWLKARRIESVAMESTGVYWIAPHEVLEAQGLAVLLVDTRQLARVPGRDKKTDPTDCEWIQRLHSCGLLQGSFRPAEAVCMLRTLVRDKANLVAERGDWLRRMQKSLDQMNVRVHRAVSDLDGVTGMAILRAIAGGERDAQQLAKLRDPRCSKSEAEIAEQLQGHWREDHLFSLQQALQMYDAVEERIAAYEKEILRKLGDMEREEQRGQTAPPLNNTNKARAIKQRGQEPMRQALYRMSGVDATHIDAIGVETLEVVFSEYGPDLSRFPTEKQFVSHLTLAPHRPTSGGKPLKNRKRNSASTRLAAALRMAALSLRHSQTALGAYYRKMAQRLGGDIALFATARKLATLIYRLLRWGQPYVDEGAAAYETRYRQQRIGRLAATAKQLGYELTPINA

SEQ ID NO: 150119 - protein, 390 aa, unidentified
MLRKNIVQTLDAATSWKVFGLDLAKHDLAVVAIPADGSEVQYVKRYSYADFLEFTAQIPSATMVFEPGNGANHFALRLQAQGHTPKTVSGASVKSWITLHMSGQKTDLNDAYALARLSEDPDLKTVRIKSVDQNRLQSLQAMRKQLVEQRTKTIVSIKGIFQCWGILFKKDSRSLKKFKEAADNNKELLGEEVVEAMILQIDRIADLDKDIKHVEELLKKVTMQDPRAQPMLDIPCVGLQTVSRLCAIMGDIKDFETPRSFVAFIGLVPKNMISGNKTTTPSGYEQVGQGKVNRRGDKMARSLIIQCASSMYMNFHKDNFPECALKDWIQKQKDAHKPYGKIMVSLAAKLLRIIYAVLKHGEAFSYEKTGISRSALAALKAAQPAEVGNA

SEQ ID NO: 150120 - protein, 343 aa, unidentified
MKISTISIDLAKSVFQLMMFDEQHKVQQERRLSRAAFHQFIKNHPPCKVVMEACYSAHYWGRELQQLGYHVQLIPAQHVTPFVRGNKNDRNDSLAIFEASQRPFIRPVPVKTEYQQETLMLHSIRERLTKQRIELSNQTRGLLTDFGLVFNKGHKAFFEGLTLLLDTELSATKRFVIQQSLDDYKHLREQQAQIETQLKHFISESSAAQILLSLPGVGPIIASAVAASVDKAQAFKSAKDFAVWLGLTPKQSASGNRSMMGGISKRGDSYLRKQIIHGARTLLRRAEHKPDALNQWITNLRCRKHVNCVVVAIAHRLARLMWVLLSRNSLYQAQPAQAVCTKC

SEQ ID NO: 150121 - protein, 402 aa, unidentified
MNAVGIDVSKGKSMVAVMRPFGEVVLSPFEVPHSSSELSKLARLLKSLDGESRVVLESTGNYHAPVAKMLHNAGLYVSVVNAMLVHDYGNNSLRRAKTDKKDAVKLANYGLDHWLSLPGYVPEEDTRLLLKNCYRQYQQYAKVQTMMKNNLLSLLDMIFPAVNRLFSSPVRTDGSEKWVDFIDAFWHVQCVSGLSANAFSAKYLKWCRKHGYNFSEEKALEIHRTARDHVAVMPKTDTTKLLVKQAVAQLRTVSSAKAALQNEMDALAASLPEYPVVMDMFGVGPKLGPQLMAEIGDVRRFHSKKALVAYAGIDAPPYQSGQLNVHSRSISKRGSPALRRTLFLVMSVYLKNSPTDEPVFQYMAMKRAEGKPYLVYMMASANKFLRRYYAAVKAYLNALEQG

SEQ ID NO: 150122 - protein, 348 aa, unidentified
MAHFGGLDVSVKETSVCVVDDAGRVVLEQKVPTEPADIIALLTSLGVIYGRIGIEAGPLSQWLVSALIAAELPVICVETRHMKALLTAQQINKTDRNDARGIAQMMRVGLFKPVHVKTLVAQEQRMLLTSRKLLQRKLLDLECDLRGTLRNFGLKVGVVSSSRYEARIRELVGGFPRLGAIAEPLLNVRRVMRQQFAVLHKMLLDTVRSDRVCRRLMTAPGVGAVVALTYRATIDQPQRFVHSRAVGAHVGLTPKRYQSGETDYDRRVSKCGDVLLRTMLYEAAQVLLIHSGKWSWLKAWGMRVAQRRGLRRAIVAVARRLAVVLHRMWVDGSEFRWSKDSAAGLTVA

SEQ ID NO: 150123 - protein, 438 aa, unidentified
MRSDAAGIDIGSQEIAAAVPPQSDPDPVRTFPTFTADLHALADWLEKCGVRTVAMESTSVYWIPLFQILEQRGFEVFLVNAHHIKNVSGRPTDVGDCQWIQQLHSVGLLRTSFRPPQEICAVRSIVRQRQTLTELASQSIEHMQKALDQMNLHLHHVISDITGETGLRILNAILAGERDARKLAKLRSRRIRSSEETVRKALEGDYREEHLFTLRQSLERYRFVTQQIADCELEIARRTQELEGLAPEGATAPPPPDKKLAGRKGTSAAVQENQRQEYFRLFGVDLTQIDGIGMGALQTLATEVGPDLSRFRSAAAFTSWAGLSPKQEISGGKLLRSKTPKNKNRVAYALRMSAQSLQFSRSALGDEFRRLRARLGMPKAVTAMARRLGCIIYCLITRRTAFDPGMLLKQQQKHEQRRRKRLAREAAEMGFDLVPRAA

SEQ ID NO: 150124 - protein, 344 aa, unidentified
MQHYVGLDVSVKETSVCIVDKAGKVMREVKVATKPVAILAVLTEEGLAIERIGLEAGPLSQWLYSALAEAGLPVICVETRHMKAALSAQINKSDRNDARGIAQMMRVGLYRPVHVKTLASQKRRMLLTSRQLLQAKALDIENDLRGTLRNFGLKVGMVGTVKFEARIRELVADHPDLAAIVEPLLIARRVLREQLGVLHRQLLEIVRHDEVCRRLMTTPGVGPVVVLTFRATVDVPSRFTSSKAVGAAFGLTPRRQQSGEIDRMGGISKCGDVMMRKMLFEAALVLMTHSRKWSWLKAWGMKIARHRGMKRAIVAVARRLAVIMHRMWVDGTEFRWTREEAAAA

SEQ ID NO: 150125 - protein, 450 aa, unidentified
MNQQINPQLTLPELKELLVAFDIGQKTNSVAFVHKSGKVLHRYKTIPNNLPGLERVWNKTQTLLAHYGLSTVSFGMEASGPYWLGPYWELEKKCSTFDPELFSVETLNPQIVREFKGKFTYKKQKTNEKDALSVAGRMRFGDYEPSYIPHGKLLTLRLYTRHRLHLILTMTAEKLRFLSILFLKFSEYKKRCKQGKIFSDVFGRCSTAIISKYQTCEEIAAAPLEELHQVVIENDPTHSVVDVKTKLNFLQQAARESFHLPEETVEPVNFILEQTLENIKFLQQQIKVTDDKIKPIVETIDDPIKSFFGIGPVFAAGIVAETPDLSRYKGHPQLASYLGIIPTMNDTGDFHSGFNKMTKTGNSYGRYYYIEGTNSLRRFNTVFNEYFERKLKEDFRRRFKRALGLTTRKFIRIYFHLKVTNDTFKLPDVSHQLIKIDAAENGKVINYYPR

SEQ ID NO: 150126 - protein, 463 aa, unidentified
MTFSPCRVDGSGSGVTGSGGIDRPLIRGMTTGFFAGREALRNVDVAIGAVGRPGEDDRRTSVIDVSGIGAFLGLDVGKGEHHATAVTPAGKKSFDKRLPNSEPKLREVFGKLQAKHGTVLVVVDQPASIGALPLTVARGMGCPVAHLPGLTMRRIADLYPGEAKTDARDAFVIADAARVMPHSLRSVDLEEETIAELEMIVGFDDDLTGDATRISNSLRGLLTQIHPSLERVFGPRVQHPAVLKLRDQFGSPAAQIRKAGRRRLVTPTRPKAPRMAERLVDDIFTALDEQTVVVPGTDAAALIAPSLASSLQAVLDRRKLLAARIEELLEKNHPLCKVLTSMPGIGVRTGARILIDVGDGRWFPSAAHLAAYAGLAPATRSSGSSIRGEQPSRKGNKQLERAFFLSAFAALADPVSRAYYDKKISQGKHHTQALLCLARRRADVLFAVLRDGTFYEPQPAPSA

SEQ ID NO: 150127 - protein, 386 aa, unidentified
MRDRTFIPQEYDVFAGLDVSKKSIAATFTSHHGFIRSLQMPHSVEYLLNHVRKHFADQKIAFVYEAGPTGYGLYDGLAAHGYSCMIAAPSMIPRAPGNRVKTNRLDSRGLSESLRGGQLKSIHVPSAVYRELRHLTQLRDTMVGQAAAHKQRIKALLLLEGIDFPLAAAGSQWTLRVKAQLRKLSCSGSVRFKLDQLLDSLEFTEKQVLSSTKEIRRFCREDAELSQSIAYLMSVPGIGWIVASQLLARIGDWREIDNVRQLGSFLGLVPTENSTGDRVDRGSITRLGDGRLRSKLIEAAWSAIRQDTELREFYRSVCRRNPRGRGARIAIVAVARKLSTRIYAVLKKQRPYIIREQVHSAPLTQEETSPQGTTRRCAEPGETDDS

SEQ ID NO: 150128 - protein, 408 aa, unidentified
MELFVGVDWSEEHHDVCVMDSDGRVRSKGRVGNDLAGVAKIHDLIGGVVPDDDEDDTEVVVGIETDRGLLVRALVAAGYRVLAVNPLAVDRYRDRHRVSGAKSDPGDARVLADLVRTDAHQHRPVAADSDLAEAIKLVARSHQSAIWSRRRLANQVRSALREYYPAALAAFEDLTSGDAVEVLAIAATPEQGRSLSRSKIASALRRGGRQLNIDTKAAKIQIALRTEQLTQPATVTGAYAAIVASLTQVIAAHNRQIAELESVLDDHFAQHPDAAILRSLPGLGVVTGARVLGEFGDDPGRYADAKARRNYAGTSPLTVASGTRRIVRARHIRNRRLADALHWWAFNAISRSPGARALYDRRRAAGDTHSGALRVVANRLVAILHGCLRTRTLYDETTAWAHRNDLAA

SEQ ID NO: 150129 - protein, 411 aa, unidentified
MRVHHNVCCGIDVHKKSVTACLIWGPANQEPEFEIRRFGTMTRDLQKLTEWLKQAGCEAATMESTGSYWKPVWNVLEGQIPKLILANAQHVRALPGEKTDRKDGKRLAELTRHGQVRPSYVPPRAILELRDLTRYRNKLLSAGSSERNRVQKVLEDANIKLGSVLSDVFGVSGQKMLLALVKEDRVDTAKVAQLAHWSLKPKVEAIEQSLEGKLTAHHRFLINASLEHMRFIEEQLIRLDQEIQRRLQPYQEEYALLQTIPGIKETGAARILSEIGADMSPFADGDHLSSWGGACPGNNESAGKKFQSKVRKGNVHLLAALTECAWAATKKKDCHFRNKYYRLKSRRGSQRAIVAIDHAMLKCIYVVLSQRKPYEEPKPTSLTEAQKERKASSLCRQLRALGYDVKIQKAA

SEQ ID NO: 150130 - protein, 438 aa, unidentified
MGRPLRCAIRLRTQRSNLVAVNYADSDGAHTLMSQSTFRDSDVRFTPESDRLLRCREMTRMGWTGRAPAPDDPQGLFGAFNEHEEHTMPHKTDLTVVRTIGIDTGKSTLHMVGLDERGAIVLREKVSRHRIAARLVNVQPCLVGIEAGMATHYVARALSALGHDVKQVPPAYAKPFRQGHKNDFRDAYAVAEAVQRPSTRCVPIKTDDQLDLQALHRVRSRLIGDRTAVINQLRGFLLEHGITVRQGHRFLRQQLPQILTTRTDVLSPRMVRIAADLVGDWGYLDERIERVTDEIEGLAQTDVGCGQLMTAPGIGPIVASATVAAIGNGAAFAKGRDFAAWLGLVPKQMSTGDRTILGRITKRGNRYLRMLFIQGARAILLHPTSWAKHSFGPWLTAAAKRLHHNVLTVALANKLARIALTVLVEGRNYETRITPAAA

SEQ ID NO: 150131 - protein, 342 aa, unidentified
MNNHNIIGIDLAKNYFQVCALNQAQKVQFNKKLTRNKFAEFIQQQEPTLVAMEACSSSNFWARKFVEMGHNVKLVPAQHVKPFVKGNKNDRNDAVAICEAALRPNMHFAMIKTHVQQDMQMIHRIRQLHVKQVTAISNQIRGYLAEYGIVVQKQVTHLLRALPAIIDNEENDLTPLSRQLLLSQYHVLNSTREKVSELNQQIEISNKQNLYCQRLQALPGVGPTLYAAVGNGSQFSKGRQMSAWIGLTPAHFGTGGINTNVDTTKKGDHYLRTLLIHGARTVVTWSARKKDPLSCWIQRLVARRGKRKAYVALANKLTRAAWKILQGDEYDIKKISAQAISH

SEQ ID NO: 150132 - protein, 336 aa, unidentified
MAEVTFPQLIQRACGIDVHLKVVVATIDGAGIQRETRSFKTFTSSLNELKEWLLSNGVTHVGMESTGVYWKPVYKVLEDSIPNVWIVNARPIKNVPGHKTDKMDSEWICKLLLAGLLKPSYIPPKEQRQLRDLTRYRNKLIQQIASEKNRMMRILEDCNIKLSSVVSNTSGTTATSLIDMLCEGKVLTLDDINSVYHGKLSASPEELLEACTGFVEEHHIYLLQMIRKDIDQTQTLVDDLSERIKKLLSKYENVLELLREIPGFSTKVVEDLVSEIGLDMSHFPSEKHLSSWAGLSPGNNESAGKKKRTNHSRKQTGKGGNHRSRMGCDPYKEYVF

SEQ ID NO: 150133 - protein, 344 aa, unidentified
MDISVLGVDIGKKFCSVVGLDASGAVVMRRKVRRETLIGLAEKLRPCVVGMEACCGAHHLGRLFADHGRDVRLVSPEYVRPYVKAQKNDDRDAEGIAEAATRPTMRFVELKSQEQLDMQTLHRSRDRLVGERTALINQLRAILLERGIVAPQGKRKLEQFLFNLVDKQGGAGLSPRMITLVTDARAQWAELDRRIAAFDAEFVRWTKENEDARRLATIPGVGATIASALIAAIGKGETFERGRDLAAWLGLVPRQFTTGGKPKLLGISKRGNSYLRKLLIHGARAALPYVAERDVPLGRWAKSLLSRAHPNVVVVAFANKLARIAWAVLRRGEPFAAKGLPVAA

SEQ ID NO: 150134 - protein, 433 aa, unidentified
MSKFFNSPVVGIDVSADFSYAAILAPNGDVYKKSFKIKHDVSGFNYLVNEIKKVEEEFNMKTGIFMESTGVYHLSLFHYLNNNFDNTFVINPLVTKCNKNVDIRKVKNDKKDALSIANIGKFQNIKLSTPNDLDIFLLKNIVREYYKLTDTCSIYKKKLSADLRVIFPNYNTVFSDSTSNTSLEILSNYPTPKSIIDASKEDILKILVKKSKKGLTWSENIYSKLIAVAKEAATIGVPLSGLSVKISSSLALIKAFEEQIDNLLNEINTLIESSEFPESIRNNIELINSIPGIGRLTAITLIAEIGDINGFIKPKHLVAFFGIDSSINQSGKFQGDQCKISKRGTRIGRRALYAVALASIRRNRNGIPINKVLLEYYQVNLKGKKAKVALVAIMHKILNYIFAVLRDQTPFEQRDPKLHKQMFLENKHLHKVA

SEQ ID NO: 150135 - protein, 312 aa, unidentified
MTHVICGVDVSATTLDARIGRDGEHCRFDVSTEGLDDLVVFCHAHQVSLVVMEATGGYERRPAGHLWAANLPTAIVNPRAVRDFAKAMGWLEKTDRIDCGLIAWYAETKRIQPTPPASATQARLTALVRRLRQLTDLRTQQTNQRRLITKPAVLDSFGPILAAIVTQQRQLETLIAQAIGDDPLWTRLDAAFRTIKGVADRTVARLMAEMPEIGTLSNKAVAKLAGLAPIARDSGQHSGKRRVRGGREPVRSILFVIAEVVRRYDPDFVAFHQRLSRAGKPNKLIRIAIARKILVRLNAKAREVRNNTALPA

SEQ ID NO: 150136 - protein, 342 aa, unidentified
MTITTIGIDLAKNVFQIHGVDHSGKAVLKKQLRRNQVLTYFIKLSTCTIGMEACGGAHYWARKLTAMGHTVKLMAPQFVKPYVKANKTDAADAEAICEAVTRPNMRFVAIKNAEQQAMLSLHRARQGFVKARTAQANQIRGLLGEYGITIPQGIKYVMKDMLTLLDAPEHELPAAFTDLLKRLHAHLMVLEEQVSDLETQINIWHSNNEYSQRLCKIPGIGPLTATALVASIADANCFRNGRELAAWLGLVPRQHSSGGRPMLLGISKRGDTYLRTLLIHGARSVVRVAKNKSSPTDKWTNEMLNRRHQNVASVARANKNARIVWALLAHGRDYNAEYKIAA

SEQ ID NO: 150137 - protein, 351 aa, unidentified
MIVIGIDAHKRTHTAVVADQNGSQLSTKTTGTASKDHLALLRWGAEQCDDRMWAIEDCRHLSRRLERDLLAAGERVVRVPPKLMANARDGARTYGKSDPIDALAVARAALREPNLPEARLEGMEREIRLLVDHRDDLVAERTRIIGRLRWHLHELDPGWTPPKRLERASAYDKIEVFLSELSGLVSDLATRLVDHLRRLTLEIEELTTEIEELTTEITVRTTVLAPSLLAIPGCGPLTAAKLLGETAGVDRFRSKDAFARHNGTAPLPVWSSNHARHRLSRTGNRRINAAIHIIALTQAHCHPDARALLARRKAGGDGGMEALRILKRRLSDVVYRAMLADRPLMGTATAA

SEQ ID NO: 150138 - protein, 526 aa, unidentified
MVTRTKIRKTTGTRKRFIGKPNGQVQERVQAVGPERFGIVAVDCAKRRSKWMLCNFYGKVLVEPTTVEHTSGGMLAMTQLVAETCRSEGLADTVVAVEMTGIYHKPVYRAFRKAGFDTRIVHPFASNHFRRALHPDTKTDDHDLEAIFHAAIKGYGLATLPLGEAYALLQAASRHRHNLVKQRSRLMVQVRSLLHQTMPGFADLFEEDSLFRKSIAIPIALQFSSAEAIRRAGVSEMSSYLRANKIRFQVRTIERIAAWASTASEPSELAAIYTQQWQQLNELRRLYDEQVDTVEREMAGFLAKTPYVLLLSVTGINVVSAARLAGEAGPIEHYASARAINGRAGLYPSRYQSDEVDRADGALVRQCNRKLRGAAMLVAENLIKCHPYYRGLSALWMQQKVDPRDRHCRIANRAMRMVYQLVGGRQLWRGKGVDRERVLAKLQEFQHVHNTPLDQAIHNLNEAIAWLPKSAYAEEAKPLAEMTRTRHRGPQHISELMIPLLIRLGVSIDGHHGELESNTSEARSSD

SEQ ID NO: 150139 - protein, 398 aa, unidentified
MKIIYPRVCGIDVHKKFIVAVICISESVEPVYLKKRFSTFHNDLIRFRDWLIQNDCQNVCMESTGKYYIPVYNILESHISNIVVANPKWVRAVKGEKDDDKDAKWIADLFKLGIVKSSFIPQKDFRILRELTRYKYKLVNMRSSEKNRYQNALTSGNCKLDMVFTDVFGKSASNIIDLILSDNPYTDEDILSKVHKNCKASPDMILNSINGTDLTPVQKSRIELVNNHIKQLSSNIQRLDKLIDLMIEPYEDYISFLCQIPGVSRNSAITILSEIGVDMNQFTSTRRLTSWAGLTPSSNQSAGKKKSVRISRAGVYLKPCLVEVAHAAVKDTNHPYYANKFNKISKRRGKKRAYIAIARKILVAAYHMLLTGEIWNPADLAEVETPVEQRIKYVKNKD

SEQ ID NO: 150140 - protein, 419 aa, unidentified
MDLKPMYRCVAALDVHQAKLTVCILYEDGAGEPQVELREFGGFKRDRRAMAEWVAGFQPEEVVMESTGIYWKSPYAALERVGIRALVVNARHVKQVPGRKTDIADAQWLAILARSGLLRGGFVPPGNIRELRLTSRQMQKLTGMLAAEKNRLHKVLTDGGIRLGVVVSDIHGQSARAMVKGLIAGESPEQVLRQASKRLKASEEELLDALDGELSEEHRFVLGELMEHIEDLERRIARFSRHLLDGLAPQQALLNALQTIPGLDERGAAMLLVEIGEEMHAFGSAEKLASWAGVCPGNHESAGKRKAGKKRKGNPYVRRILCEAANAASRTRSALADLFKSLLIRRGRKRAIFALAHKILKIVFVLISRGDYYRDATVDYEAISVERNAPRWLRMLKKYGYLDAASGAAPASGAQPAVL

SEQ ID NO: 150141 - protein, 400 aa, unidentified
MRVVFGIDVSKASSEVAILVNGEKVHGYTIPNDAIGFNRLLGDLKTVHEPEIVFEATGVYSRRLQAFFEDNSYAYTRLNPLESKKQLDSLRVRKTDKIDAEKLASSQFILNRKPSYVQEVIYQELRDLSRFYQNLTKDIVCAKNRLHKVLQVTFPELENILSAPTGEQYWNLVITFPCNSFVLELDDATLTAIIRQSTAKRISEKRVTYLVDKLTKLANQSYCAVKKTSPVIEEVKYYARELLRLSEHRQGVLEEMVTLAQSLPEYEILLSIPGIAETTATSIIGELGDIRRFHSANQINAFIGIDLRHYESGNFLAKEHITKRGNPYARKILFKCIHNIASASHTNPCHIADFYEKRKRQSQVTSTKPHTIASIHRLIRTMYYLITHNKLYDYTSTQNR

SEQ ID NO: 150142 - protein, 416 aa, unidentified
MDILHPRCAGLDVHRDSVVACARLIHRGRVEQHVETFGTTTSELERLSAWLSGHGVTHVAMEATGVYWKPVWIVLVEAFELVLANAMHVKNVPGRKTDVNDAMWLADLLAHGLIRSSFVPPATVQALRDLTRTRKQLSREKAAHVQRIDKTLQAANIKLGSVLSDIMGESGRAILDALAAGETDPEALAGRVRTRIRACRGQVVEALRGRVSAHQRLLLRIHLAQTDAIDAAIAQIDDEVGERLEPFRQAIARLTTIPGVSELSAAVIVAEIGFDMARFPTSAHLVSWAGLCPKNDESAGKRRSTKLRKGAPWLKTLLVQSAWSAIRAKATYLQALFLRLKARRGPRKAIMAVAAAILTAVYWMLRRGVAYTDLGADHFNRIERTRLAARLARKLDELGFDVTLTQRPAPCRTVSS

SEQ ID NO: 150143 - protein, 456 aa, unidentified
MIMKRKKKVLQVPKLESLKQINPNAAGVDVGASELYVCVPEDRDPRPVRVFQTFTSDLHEIAAWLKKCRVTSVAMESTGIYWIPLYELLEEAGFEVKLVNAREAKNMPGRKSDILDCQWIQQLHSYGLLTASFRPPRDIVALRSLVRHRDRLIVARAVHIQHMQKALHLMNLQLDNVLSDITGVTGMRILRALVAGERNLDTLVSYRDPSCKSSTQVIRESLKGNYQEEHLFPLRQSLELYDYHTTMIQQCDREIEQKYRALPSRVDLQRKPLPPSKKQQKKPRKNAPTFDLRSRLYETAGVDLTAIDGCNAATIQVVLSETGVDMRPWRTCGHFTSWMCLAPHNDISGGKVLRSRAKKTKNRANTALRLAAQALTHSDSWLGAYYRRQRARLGAPKAIIATAHKIARIIYYMLKYQREFVDLGANHYEAQHRKRQINSLTKKAASLGLLLVPAKA

SEQ ID NO: 150144 - protein, 314 aa, unidentified
MNQSINVGVDTGKYQLDIFLRPLDIYFTVSNDEKGIKEAIQTIKKYSIERIVIEATGRLEMPFIMACAKAKLPFVIANPIHIKRFAGAIGQRAKTDKLDAQLIAHYGEVIKPNLSQLKPDAMQTMSDLVARRNQLLVMQTMEKNRLQILPKELAMTIKPILTAFKHQITKIEKKLIALIESCPDYQAKNTILQSMTGIGKIASASIISNLPELGYMTSKQASSLVGVAPMNRESGRYKGQRKIQGGRHQVRTVLYMAMMSAIQSNPVFKSMYQRLVAAGKPKKVAIIACIRKMVVTLNSMLRDGVMWEAPKAKN

SEQ ID NO: 150145 - protein, 342 aa, unidentified
MIYIGVDLHLRFCYMTALDASGALLRRGPVANDGDSLRGYFTAVKESFKKEEVTVAVEACGFWSAFVDCVEPLVDRVVLVHPARVKAIAHAKLKNDRVDSATLAQLLRGNLLPEAWKADQVTRDLREILRMRVALGKERTRYKNQIHAVLHQYGRRASVSDLFGRQGREWLAQVELRPAGRQTVDTYLRQLDGLEQEIGTLDQGLRTQAQTEGDARHLMTITGNGPVSALVLKAEIGDIRRFRDKRSLFQYAGLVPVIRQSAGHRYSGGITRAGSGLLRWVMCEAALTATRYSAAARAYFDRLAKRKHPHVARTALARKLLGAVWALWTRGDCFDERVFAAM

SEQ ID NO: 150146 - protein, 350 aa, unidentified
MIIIGVDYHPSDQYIALLDTETGEYEERKLDHSAGEAEKFYRELATRGVSVRVGIETTGYTRWFERLLAELGMELWIGDAAVIKTKRVRKQKTDWEDARLLLRLLREDNFPQIWVPSAENRDLRQLLWHRHRMVQMRTRIMNQLQALAMNEGQRRKKKLWSEAGRAQLDKLPLAPWAARRRKDLLELLERMNPSIAELSAEIEREARKWPEALRLMTHPGVGPITALAFVLIIGTVERFQCGKQIGSYVGLIPCEDSSAGHQRLGHITKQGSSLLRFLLGEAAQAAARCDADWRRRYLHLALRRQRNIAKVAMARRLGVRLYWMWRKGWEYAEWVKFGSQAGQLGTGNGV

SEQ ID NO: 150147 - protein, 314 aa, unidentified
MNSSALYVGIDVAQDQLDIATTADHVWSVKHHPRAMAALARRLQKLSPARIIVESSGKLEQELVVVLAEAKLPVVVVNPRQVRDFAKATGVLAKTDRIDARILARFGEAVKPEVRELPDAQARDLMALVARRRQLHQMLRAERHRLLRVARPLKKSLEQHIAYLEKQLAKLDEDLHDAIRQTPIWQESFDLLQSVPGIGPATAATMIAELPELGRLSRHEIAALVGVAPFNRDSGKWKGKRSTWGGRSSVRSALYMATLVATQYNAYIRAYYQRLLARGKAKKTALVACMRKLIVILNTMLKNHQPWNPKIQTA

SEQ ID NO: 150148 - protein, 350 aa, unidentified
MFAGIDSHKDTLAVAVIDDGGRAVVVRQLPNDPAGFTALAALATEHRIQRVGIEGSTNFGWSAAMHLTKAGMTVVEVPPLLTSRERLSRPGQGKTDPVDAVSIAQITAREENLPAVRPMDGLPVDLRVLMDYREQLIEERTATANRVHTDLGWLRPGYQHRLPRLTGPMHLRAALALLENDSSVRATVTSARLQRLLAIHAELAALREQIAALVQQSGTSLTEIYGVGVFVAARILAEVVDVGRYPSRHTFAAANGSAPIPASSGRTVRHRLNRGGNRQLNRALYTIAITEIRANTEGRAYYERKRAEGKTSREALRCLSAGSPTSSTAPCAPTRPPTSPCPSRLLPEGR

SEQ ID NO: 150149 - protein, 403 aa, unidentified
MNAVGIDVSKGKSTVAVVRPLGELVASPFEVTHTDSELSKLAEMLKSLKGETKVVMECTGSYHLPVAFTLREAGLFVSTVNAQLTHDFGNNTIRKAKTDKADAIKIANYGITNWLDLPEYIPELDVRKMLKAFSRQYSKYIKLKTMLKNNLISLLDQTFPGVNELFTSPPRKSDGHEKWLDFASTFWHCECVCSLTPKAFYERYRKWCKRSGYNFSQSKAEDLYANACGHVFVMPKSDTTKLLITHAVAQVNAVGESIAVMAREMHHLAKKLPEYDVVMDFRSVGEILGSQLMAEIGDIYRFPKKSSLVSFAGLEPVNNQSGNYDGKRPISKQGSPHLRKTLFQVMDCLLKHAPADDSIFQFLDRKRSEGKPYRSYMSAGSAKLLRIYYARVKQFLDIYYDEA

SEQ ID NO: 150150 - protein, 428 aa, unidentified
MNTIPVVGIDVSKEFSDFCILSPENDVFSRGKIYHHPASMEKALKLFASAEEAFGMKPVCIMESTAYYHKILLRFLNAHGFKVILINPMQSKAIKDFNIRNVKTDKVDAYKLALLYRMKIIRPSIVPDALIQQLRDLCRNHYELSDQLVVAEARIRSGVEQIFPGYDKIFSRISGQASIAVLSAYPTPLDVLRADPEDITTTIMHATRRGQTWSENKASMIVAAAENASKITDTSKAYGAIIRSIAAVVGTLKQSIRETDLMIEQLVEENESLRENRMLLTTIPGIGDLTAAVLIAETGDFDLFKNAKALAAFYGVDPVVKQSGTTCCRSTRLSKRGSPLVRKMLRMIAHNNIHRCAGGKMINPVLAEYYQQKCTCKSAKTAECAVMRKMVGIIFAVMRDRKPFELRTPEEHRNIMKQNCISAVAISA

SEQ ID NO: 150151 - protein, 342 aa, unidentified
MQIRSVGIDLGKTTFHLVALGDNGKVLLKKFTQRQLITFTANLQTTLIGLEACAGAHFLGRALREQGHDVKLIPAQFVRPFVKSNKNDFLDAEAIAEAVDRQNMRFVPIKTDDQLDLQALHRVRDRLITRRTSVINQLRAFLLERGLVFAKSPAKLRERMPEILENAEEDLTPRMRNLLALLWNEWKDLEQQVVDLNHEVELIASSDAACLRLRQIPGIGPLLATAIVASIGNGAAFHKGREFAAWMGLVPRQYSTGGKAKLYGISKRGNRYLRKILIHGARAMVLRCKRDRVPMGAWMTALEARAPRNVLIVAAANKLARIAWAVLSSGQNYRAVQEPVAA

SEQ ID NO: 150152 - protein, 366 aa, unidentified
MKKSSTLAIEGMQIFKDNQLTIGFDLGDRTSRYCILNEAGEVILEQEMPTTPKGIEQVFRKIPRSRIALETGTHSPWVSRQLTHLGHEVIVAHARNVRLISESSRKDDRLDARTLARLARIDPGLLSPVRHRSAKAQIHLTVIRARAVLVSARTALVNAARGLTKSYGARLPKCGSEQMNREITKDLNCELREALNPLLEEIESLNARIAEYDTRIEQMAKEVYPEVARLKQVKGVGPLIALTYVLTLDNPHRFRRSRDVGCFVGLRPGRRNSGMSEPQLHISKEGDRYLRTLLVQGAHYILGPFGQDSDLRRWGLKLSERGGRNAKKRAVIAVARKLAVLLHKLWVSKEVYEPLRNSRNQIAQVA

SEQ ID NO: 150153 - protein, 355 aa, unidentified
MKKVDPTIWQDKPLYVGIDMHRKRWHISIRSADGQVLFSQRIEGRWPVLKHRLEKYPGAQFMAVYEAGYFGFWLYDELTAYGVTTCVTPPSLIPSASGNKVKTDRLDSDRLAQLLQAGLLTSVHVPTEQERAHRQVVRRRRQFIQDRIRVKNRIKAELRLYGLELSGETKGPWTQRLMTQLRAIRFADAFHQTSFIALLAHHDFLSSQIDLLAGQLKTLAESEIYQERVEILTSIPGIGWLSAMEILLELQDVARFQRAEQLAAYVGLTPGQHSSGEHVRLGRITRQGKSIVRTLLVLASWRLIDKDGAMREKYERIKARAGGKRAIVAIARTLLVRLRRLLLNREPYVLGLVSG

SEQ ID NO: 150154 - protein, 513 aa, unidentified
MRYKVNGSAEMTDTSLVRARGVSRRRVASPSLSMVRESSVTLVSGVSRIPFERSSRIRRFPWHCHSSTMVEQAMAMRKREDEVFPNAAGIDVGASSHWVAVPGHCTDASVREFGAMTDDLHAMAEWLLACGVDVVALESTGVYWIPVYELLESRGLKVWLVDARQVKYVPGRKSDVADCQWLQKLMSHGLLRAAFRPAAEVCVLRAVARSREVLLTEQASWVQRMQKALVQMNIQLTEVISDVMGQTGQAIIRDIVAGQRDPEVLARHRHRRIKASEQDIVRALTGHWREEHLFVLGQALGMYDDIARHLHECDTKLQRLLAERSAARVDVGKTPRAGSKARSQFDLRQQLANWAGCDLTRINGLGLDGVMKILSELGTDLSRFANVKHFCSWLGLCPATKISGGKVISARTKRSANRVRQALKMAAMSLSHSDSALGAFYRKLCTRMDKPRANTATAHKLARLVFFMLTRGEAFVDEGQQRYEEQQRERSIAALKRRAATLGFQINPIGAVA

SEQ ID NO: 150155 - protein, 317 aa, unidentified
MAQKGTIVGIDVAKGKIDAAIRFGAEASFANSAEGRRELLAWLKEHGVCKAVMEASGGYEKSWATLLRGAAVEVVITDPNRVRHFAKSAGQLAKNDPIDARMIAWFGEVFGHASRQPHDDERQELDQIVTARLGIGRLKEQIENWGEHEQPKAVQKAQQALLKVVATQLAKLETIIAAKIDKTERFAQRAEIIQSVPGLAGTAAAGLIAFLPELGLVDRQAAAALLGVAPFDADSGRRRGERHIQGGRHKLRKLLFMPILSAATQHNPVLKACYQRLIAKGKKAKVALIACMRKLIGILNTMLARGEKWDPARHAIA

SEQ ID NO: 150156 - protein, 445 aa, unidentified
MSESLPSVNPEPAWAAFAAIDWADQKNFWRLVPAGSQQYEQGELENTPEAVEAWAVALQQRFGGRPIALCLEQSRGALVYMLTKYPHVVLFPVHPTTAARYRETFCPSGAKSDPSDTASLLDLLLRHRERLSPLQPDTVETRLLHFLVEERRRTVDEKTRQNNRLIACLKLYFPQIPRWFGDVTTPLVGDLLERWPTLEQLQRAHPGTLRRFFDAHNCRSAELLEERIAAISQAIPATHDQAVLEAGTLMARGLVAQLAALRSSIAAFDRRIAELVVAHPDGALFASLPGAGPVLVPRLIAAFGTRRDRYQSADEMERYSGIAPVKSASGKSQRVSFRWACPKFLRQTFHEFASHSIGQSEWARAYYEHLRRDEKKSHHAAVRALGFKWIRIIYRCWKDGKPYDEQVYQKSLRRRGSLLGAALASATSVGWKAVAGFQKLSENNA

SEQ ID NO: 150157 - protein, 471 aa, unidentified
MKQQPAQQWRRRQKTSDSAKSRAQDTVLSRFNANAAGIDVGASSHWVAVPADRDEQAVRCFGTFTADLYAIAQWLEQCAIQTVVMESTGIYWIPLFEVLETRGFDVKLIDAHHVKQVPGRKTDVQDCRWLQELHSYGLLRGAFRPEDEVCILRSYLRQREGLIGDASRAIQHMQKALEQMNVKLTEVVSDITGKTGMTIIRLILAGERDAETLAKHRDPRCKQDQATLRKALQGTWRQEHVFALEQAVARYDFFHEQICACDQQIEACLKTFETKAEIEEASQRPRRRQGNTPDFDVWTLLYQMTGVDLTQIDGIDVLGALKVISEIGLDMTRWPTVKHFTSWLGLCPGNKISGGKRYRSRTKPTANRAAAAFRLAAQTLSHSHSALGAYYRRMRARLGAPGAITATAHKLARIVYSMLRHGVPYVDVGQHAYEQQYRDRAVKNLKRNARAFGFALVPMEGINPEQATATP

SEQ ID NO: 150158 - protein, 456 aa, unidentified
MSQTKLSRKSRELSPVHPAAAAIDIGATMHVAAVGSDRDNEPVRTFRTFTADLHRLADWFSECGIKTVVMESTGVYWIPVFEILEQRGFEVMVVNARDAKHVPGRKSDVSDAEWLQRLHEYGLLRASFRPQAEMATLRAYLRQRERLLDYAAMHIQHMQKALMQMNLQLHHVVSDITGATGMSIIRAIIAGERDLNVLVLHRDRRCHASLETMCQALIGNYREEHIFALSQAVELYDVYQAKRLICDARIEAVLERLKKNAAPPKGKLPPARRRARQSNEPEFEVREALHAILGVDLTQINGLGPSLALKLVGECGTSLAAWPNAKHFTSWLGLAPHNKISGGKVLSSKTRRTGNRAASLLRLVASTVGRTDTALGAFYRRLSARLGKAKAITATARKIAVLFYNTLRYGMSYADPGATYYEDRYQQRVLSNLQRRARSLGFILHKVEPDTQAGVS

SEQ ID NO: 150159 - protein, 354 aa, unidentified
MAEGIPVFPRVLKPVHELGSASAGFVIPNGRMGREASPNLQGRETTPMFVGIDVSKDRLDVHLRPGGEAFAVARDGEGLAALTARLAGLTPSLIVLEATGGFETVVASALAAAHLPLAVVNPRQIRDFARATGKLAKTDALDAASIARFAEAIRPEPRPVADEEALLLGELVARRRQLIDMMTAERNRRRQLTSKALIKKLDRHLDLLQEQLAELEADIGTTIKGSPAWREKDELLQSVPGIGPKIALTLIAELPELGTISRREIAALAGVAPFNRDSGTMRGRRMIAGGRTPVRAALYMSVLVSIRRNLPLANHYERLPAAGKPAKVAIVACMRKLLTTLNAILRDQKSWQNA

SEQ ID NO: 150160 - protein, 348 aa, unidentified
MAHFVGLDVSVKETSVCIVDDAGKVILEQKVLTEPDTIIALLTSLGATYGRIGIEAGPLSQWLVNALTAAELPVICVETRHMKALLTAQQINKTDRNDARGIAQMMRVGLFKPVHVKTLIAQEQRMLLTSRKLLQRKLLDIESDLRGTLRNFGLKVGVVGSSRYEARVRELVAGFPRLTAIAEPLLSVRRVMRQQLAVLHKMLLDTVRDDPVCRRLMTAPGVGAVVALTYRATVDQPQRFVHSRAVGAHVGLTPKRYQSGEIDYDGGVSKCGDALLRTMLYEAAHSLLIQSRKWSWLRAWGIRVAQRRGVRRAIVAVARRLAVVLHRMWVDGSEFRWSKDSTAVPAVA

SEQ ID NO: 150161 - protein, 351 aa, unidentified
MWIIGVDYHPSVQQIALVNTDTGERGERRLNHSDGEAEKFYRELKAEGCKVRVGMEATGHARWFERLLAELGFELWVGDPSKIKAKRVRKQKTDRLDAALLLQLLLEDRFPRVWVPSAKNRDLRQLLWHRHRLVQMRTRITNQLQAVAMNEGVRRKQALWSKSGRAQLESLPLAPWAAWRRHDLLELLDRLNPTIEELSTTVEQEAKQRPEVLRLITHPGVGPITALAFVLIIDSAERFACGKQIASCVGLIPCEDSSSDRRRLGHITKQGNSLLRFLLVEAAQAAVRRDPDWRRRYTNLAMRRDKRIAKVAMARKLAVRLYWMMRKEWNYEHSKKFGSYAGESDYVHGVQ

SEQ ID NO: 150162 - protein, 457 aa, unidentified
MRQRGKRTKGIEEAHPFAGMSQVNENAAGVDIGAEEIVVCVAGDDNTQIVKAFGNYTVDLQSIGQWLKEHNVKTVAMESTGVYWIPLFEVLENMGFDCLLISSRSLRRVPGRKSDIQDAQWIQTLHSYGLLESSFRPQADLVALRTLLRHRAQLLEHRAPHILHMQKSMLQMNVQLSQALSDITGDTGIAIIRAIVAGERDADNLAAFRDRNCKKSAEEIGRALTGTWRAEHLFVLKQSLEMYDFYTQQVAACDAEIDRMYALTRPDWEEGELKPPSKKKRNSHSKNALKNQEEIRKHLKRISGVDISAVDGVGVMVAQTVIVESGTDMRKFPSDKHFSSWLGLAPKHEISGAKVLKNRTLKTKNRAGQAFRMAAQSVKRSDCVFGMMFRRFRSRMDNRQATVATAHAIARVVYRMLKYKVEYEEIDVTEYEKQYEEQQIKYMKKKAAKLGFQLVPA

SEQ ID NO: 150163 - protein, 312 aa, unidentified
MKTKFVGIDVSKSVLDFDCLPVSATRQFSNDAEGIAALVNLLKDSGVDRIVIEATGGYETAVGSALAVAGLPVVVVNPKQVRDFAKAMGHFAKTDRLDAKVLALFGERIKPPLRKLPDEAQRALADVLGRRSQLVVMRAQEKARLAMVTTVARKSVEQHIAWLDKCIAKLDVDLGDRLRKSPVWCSKATLPDSVPGVGNVTTFSLLAQLPELGTLNRQKIAALVGLAPFSDDSGKRKGVRYIRGGRADVRCALYMATLTAIKHNPPIKAMYDRLIKVGKPFKLAMTACMRKLLTILNAMLKTNQTWKIQPSS

SEQ ID NO: 150164 - protein, 367 aa, unidentified
MKNLTTWVGMDVHKSKVFVSMLVAGAESPLEHSLPNEPRAIRKLIRRLKRGPGDVVACYEAGPCGYVLQREFEEAGLTCFVIAPTLIPEKKGDRIKTDRRDARKLADYLRSGILTAIEPPSPEQESARDLVRCRADHRISLKAARNRLNHFLLRRGVRYTTGKKAWTKAYVRWLHQLSFDDAVAQVVFDQYMLAIEQTAERLAIVDTQIEELAQTDRYREVVGALRCFRGIDTLTAMTLVTELYEFARFGSARDLMGFLGLVPSERTSIRRQLGGITKMGNREVRRVLVEASLHSRHRPAVGAGLRKRRAGQPAHAIARADHAQQRLHARYKRLTARGKHSNIVTVAIARELAGFVWAAMRETSMSK

SEQ ID NO: 150165 - protein, 450 aa, unidentified
MSPLALDVVTKTDKTPVLGRMLSKYVGRKTSSIENDITKARNHLRQRGKIMRVVFGIDVSKASSEVAILVNGEKIHGYTIPNDAIGFNRLLEDLGTVYQPEIVFEATGVYSRRLQAFFEDNSYAYIRLNPLESKKQLDSLRVRKTDKIDAEKLATSQFILNRKPSYVQEALYQELRDLSRFYQNLTEDIVCSKNRLHKVLQVTFPELENILSSPTGKQYWNLVMAFPCNSFVLELDDAALRAIIRQSTSKRISENRVTYLVDKLTKLANHSYCAVKKTSPMMEEVKYYAGELLRLSEYRQSVLEKMITLAQPLPEYEILLSIPGIAETTATSIIGELGDIRRFHSANQINAFIGIDLRHYESGDFLAKEHITKRGNPYARKILFKCIHNIASASHTNPCHIADFYEKRKRQSQVTSTKPHTIASIHRLIRTMYYLITHNKLYDYTSTQNR

SEQ ID NO: 150166 - protein, 333 aa, unidentified
MLPPNCGTATPYILRNTVGLDISKLTFDASAMVGKTEHSAKFDNDSKGLDQFSDRLKSLGCQNLHICMEATGNYYEEVADYFAQYYSVYVVNPLKISKYAESRFKRTKTGKQDAKLIAQYCRSAQESELVKRQKPTDEQYRLLRMTAAYAQIKSECAAMKNRHHAAKDEEAAKAYAQIIKAMNEQLEVLKEKIKEQTEKPNCKEGVKRLETIPAIGRMTAAVLFHHLTSSKFETSNKFAAFAGLSPQQKESGTSVRGKGKLTKFGNRKLRAVLFMPAMVAYRIRAFPDFIKRLEEKKKPKKVIIAALMRKLAVIAYHVHKKGGDYDPSRYKSA

SEQ ID NO: 150167 - protein, 380 aa, unidentified
MSNLRFIGLDVHAETIAIAVAEPGRNGEVRRLGTIPNRPESVKKLFKRLKTSEKLRVCYEAGPTGYALYWQLVELGVQCEVVAPTLVPVKTGDRVKTDRRDAEKLARCYRAGDLTPVWVPDEAHEALRDLVRARLAAKRDQLRARHRLSKFLLRHGKRPEKKIGAWTKAYLTWVKTKVQFDQPAQEATLADYLHEVEHAQDRIERLEKNIDDAIETMPEKMQAVVEGLQALRGIAKISAVTIVAELGEVSRFSKPRQLMGYSGAVSSEYSSGERTRRGSITKAGNSHLRRIVVEAAWSYRHRPCIGYKLAARQKNVSQEVKDIAWKAQHRLHRRYYRLMSKGKMKQKVATAIARELLGFIWDIGVTVEQAHISDKRNRAA

SEQ ID NO: 150168 - protein, 341 aa, unidentified
MEYVAIDLHTKRSEVRIIDATGTVLFEQRMDTRPEAFRAALGGRAAGRVLVEAGTESEWVAALIEALGHEVIVADPNYLPMYGTRSRRIKTDRRDVAALAEANRLGHFRPTHRVSAPQREMRRALQARRTLVAIRTQLINTVRTQIRSVGERIPSGEPEHFVARVGRVPVPAWLAAVIQPLLEMLEALGPRIAVADASMTSAAKADPIARRLMTAPGVGAITALQVRATLDDVHRFAGAQQVASYLGLVPREASSGERQRKGPITKAGSTETRAMLVQATWALWRTRGPAGRALREWMQRLAARRGKRVAVVAGARRLARILFAMWRDGQDFRSPTVSVAA

SEQ ID NO: 150169 - protein, 401 aa, unidentified
MKRLSGGIDVGSESHHITILDDEDHILYNQKVSHQLNEFTESIKLFKQIEKKEGGRLSFALEGKNGYSAPLDRILLDQGFTLYNVDNFKLKRFREAFAGEWRDDQRDALMLSKMLKLKEHINSPREKVFIKIEKPSLVTESLKLLSRHQQTLIDEKVRLTNRLRKKLLEVCPEILKLAKLKNKKLIVILVRYPDFSKYKRITLCSLLKTKGIGKKQAPFLLKRLNNIEYMPGLTDIYQMIILSYAKRILELQEEIKDIDKKLDEIGEKNKEVKHLKTIPGVATKLASRLIGEIGVIDRFPSEKQLAVYCGVACVDNNSGKVTKAKAVYKANKICKHTLITMAGGSIRLSSQCKAYYLKKRTEGKSHNHTLRCLARQLIKVIYKMLTEDRDYIIKKELKKVA

SEQ ID NO: 150170 - protein, 356 aa, unidentified
MLERILALDLGTCNTAAHLHCSDGRRDFRTRVKTTKQALHDLIVSTDPTLVIIETCSLTWWVYDLVVALDKEVIITANNGPGWRWKNVRNKSDRTDAAKLIKMYLSDQLEPVWAPPAAIREMRALLRYRKTLKEDRNGLGSRIRSFFTLNGIELPKGTWTQTWLKAVRGHAKPLCECAPDELWRGCLAHLLVQWKVIQEQLDETEDVLARIARNQKGVELLRREKGVGPCLSQAVVAAIGDPLRFKSGKQVGCYAGLTPRQWSSGTMERSGHISKQGNGLLRTVLVEVSWIGIRTQPWMREVFERVQRGVKQRSKIAIVAVARRLLIHLWAKWRDMERARLAATPPAPELALNGMT

SEQ ID NO: 150171 - protein, 319 aa, unidentified
MTNSPAQAVVGLDISKKQLDIAVRPQGLSFTAPNTEAGIARLLRRLQKLNPQLIVLEATGGYEFLLVAALAKEDLPVAVVNPHQVREFARAAGRQAKTDKLDAQVLAHFGEAMRPEPRPLPTPEQQQLTALMRRRGQILGMILREKNRLEQTHIDAVRRDIRENLSWLEQRLKQMEQDIQALIHQSPLWREKDCLLQSVPGIGPVIARSLITYVPELGLLSGREVASLIGVAPFNRDSGRFKGKRMIRGGRGHVRRVLYMGALVASRFNEIIRDFYQRLLAAGKPKKLALTACIRKLLLMLNAMLKKQQPWQPFATQKA

SEQ ID NO: 150172 - protein, 297 aa, unidentified
MLDIAIHETGETWSCSNDASGGAALVPKLRQLKATSIVLEATGGFETLVTATLSAADLPVIVVNPRQVRDFAKATGQLAKTDRIDAKVLAHFAAAINPPLRPTKSDEAQHLEALLARRRQIVEMLVAEKNRLANNRDRAVVKDLKTHIAWLERRLKASDDELQRVLKTSPAWRERDDLLRSTPGVGPVLSLTLLAQLPELGQLNRREIAKLVGVAPFNWDSGQWRGSRHIWGGRAAVRSPLFMATLCAIRINPTIKSFYLRLIKAGKAPKVAITACMRKLLTILNVMVKTHTSWRTA

SEQ ID NO: 150173 - protein, 427 aa, unidentified
MARAIGLDVHLEFGEVAIAEDRAVRSAGRVETKPDALELFAQSLGPDDRVALEVTGNAWEIARIVEPHVARVVVVSPADTGIRQARAKTDRLDARTLARLLWSGELDAVWMPDRVTWVMRRRLSRRGQLVWTRSRAKNEIHAVLMRCLVGRPPFADLFGVKGRRWLAELELPVEERETVDADMRQVEFLDTEIAQVERLIARDALASEEIKRLMTVPGVNVIVAASFVAAIGDIGRFHNPRKLVGYLGLDPRVRQSGSGPASHGHISKQGSVRARHALVESCWSAVRQPGPLHAFYQRVRARRGHSVAIVACARKLACLFWVLLTREEDYAYAQPSLTRKKLRLLELAAGAQRYAPEGAGVWHANEAVRAAERELAHQAEIAYQRTVRDYHATQATTKGAGATPGRASSSRQSGKQRGRATVPDPAL

SEQ ID NO: 150174 - protein, 333 aa, unidentified
MQYPTIGIDTAKDVFHIVLADSAGRPVKKVKLKRNKLAAFMANQPASKVFLESCAGAHHWARKFAGQGHRVEQIAPQFVKRYRDGDKNDFNDGQACIEAGLRPTVRSVGTKSLEQQELQSLQRARTLALGQRNALGNQLRAMLTEFGIVVARSIGALRRRIPEILEDGDNELTEGMRRLVAEEFERWKGLAERVEELKGRIELGSRSDAKMKRLQKELDGVGPLSAAALWTAVADPKAFARGRQFAAFAGLVPRQHTTGDRPRLLGIRKGGQNELRALLIHGARAAIRHLGDKTDPKSMWLRALVERRGKNRAAVALANKNARQAWAILCQAA

SEQ ID NO: 150175 - protein, 353 aa, unidentified
MNQDIILTTDYHDENCVIRWLDEATGTEQVHKVATQRKPLSDLVARAEAVVKPRGGQVVWIQESTTGWARVQALLGKRVVFHLANVVQMPLPPKARRRKTDKIDTARLQREYRNGELPLAHRPPAWWRQVRRLVAWRENLVSRRTALRNWLSRYLAHETWEDRRGLWSKKGRRRWQQLAATAPRWDRPVIEGKLAELDQLARQVAEAEALMHAVFKQWPAAQRLECVSGLGVIAATSIVARIGPIGRFLSPEQLIAYAGLAPGVHQSDDTRRHGRIGGGGTDGHLRHYLIEATVWARHIPRYRAAYERARQRRGNKIGRLVVARMLLRSIWRMLRKGEAFVPTAPHQVVENNK

SEQ ID NO: 150176 - protein, 392 aa, unidentified
MYIIGIDIGKNHHEASIVSPKGRQIGHSLRFATTHKGADSLISFIFKNIGDSPCVFGMEATGHYWYPIYSFLKSKGYTIYVINPIQSDSLRKMYIRQTKNDSIDSFLIAEVIRFGQFEATSMADENILAMRQLCRYRDSVVSSRTEIKLRISTIMEQIFPEYEKQFSSLWLGTSMGILEKYLTPENIQNAPIDELFEIIKDKSHNKLTIKKSVSIKDAAADTFGIKIAQDAFAFQLKQLIDRLNFLNEQLEALDHEILSYYEKFDCYLHTIPGIGMIAAATILAEIGDIHRFKNSSALVAFAGIDPTVRQSGEFNSIHNHMSKRGSPYLRHAIFLAATTCSFHNSPLNAYYKKKREQGKHHLTATGAVARKLTTVIYAVLRDGKPYEPKSFC

SEQ ID NO: 150177 - protein, 341 aa, unidentified
MFNLPVFVGIDYHTKTLQVCVMDSQRKIHANQSIENSPEAVFQIVAPFGNNVHVAIEACTGAADFAEELATKSPSWHVQLAHPGYVARMKQTPDKSDWTDAKLLADLTRAGYIPRVWLAPKPIRELRDLVRHRHGLVQQRKQVKLRLRALLRNHRLPCPYVPWTIKGKAWLLDKENIPSTKLMFLIRDHYDTIEFYDKKISVVTEQMQLDVADDAVVKQLLRQPGVGVITAITMRALIGQFDRFRTGKQLAHFCAVCPRNNSTGGKTTTGGLIKAGDDLLRQVLVEAAHRLIRYNPEWRAMAQRLQSNGKKKCIIVAAVANRWVRWLFRQMVDSSRLEVSA

SEQ ID NO: 150178 - protein, 466 aa, unidentified
MENNYILYVGMDSSKGKADAAILKVSDRRSVKPKFLRKKLSFKFVKSEVTSFLETVRSYSDDNCTSICFALEVTGIYSTNVYNFIKDNLNDNESIKFLNTDFVNQWRNAHNIAKSDPLDAQTISTIIGTDSDVQYVNDNVFKNKNGYQDLKALVHRHYQIKKIYSQEINRLIAQCDCLFPELQYVFEPKSAAFIAVLSSYPTTHDIINASRLEVFNVVYEATKHRCSMDKIDKLFDLCHDTLVPDNISSYGRSIILDLVENIKNIKGQLKMIERYIRDVASLNPAYKLLLTITGCGPLTAATVIAETGDIKRFKNADCFVSYSGTSPRNKRSGTSVETMGKISKKGSRYLRHAIYMIAEFARRHNPVLKHQFERIKNGNKKRHKLANIAIANKIARYIYSIMKNESGFVIFHEHIMRLPEETQNTFFNSISLDFPKNTRKQIYQYSDINGEVHKFVYTKLEETMII

SEQ ID NO: 150179 - protein, 344 aa, unidentified
MHAGLDLGRNSIAVALVTDGGEVIDEFSVRPTGPGLGALVDRFGRSQTVRGVVESMSGARFVYDFLTDAGWEMQMADAYRVKGIGSLAAKTDRIDARVLAELSRRDLVPAVWIPPQGVRAERERARFRRHLIKHRTGLKNRIHSGLIAHGQPCRVSDLFGKTGRRTLDTLDFDEPWSYDVAACLQLIDHLDDQVKQVDIEIRRLGVDHRYVPLLKTAPGVGDILGYTIAAEIGDIGRFSSAKKLVGYTGLAPRVHQSGQQDRRGPLTRNGPKHLRWALVEAAIWASRHPAYAAHYQKTKQRLGKQRGNKVARVEVARKLATAIYWMLTRNQPFNPGGPTKPLVA

SEQ ID NO: 150180 - protein, 320 aa, unidentified
MTIVETRAITGGVDTHADVHVAAALDPIGGLLGVQEFPATPAGYGQLLGWLGGFGTVCLAGIEGTGSYGAGLARHVSRAGVRVVEVDRSDRQDRRRQGKSGPLDAISAARAAQSGRARGASKGRDGAVEAIRALMVVKRTARSERTQTISQARSLVLTGPDDLRIRFIHHTTSGLVADLAGLRPRPGATVGYATRIALRELGRRAQFPGGQLESLDELIVPLVTAHAPGLLARYGAGPDTAALLLIAAGDHPERLRSEAAWAHLCAAAPIPASSGKTVRHRLNPGGDRQANHALWRIVITRMSSGREVDAQVAVGETVGQ

SEQ ID NO: 150181 - protein, 387 aa, unidentified
MQSVTSATAVAITARANNITLFASLELSKSKWVVTINSPGSEKFSKHVVEGGDGACLLDLLSRSRAKAEQRYGVQIKAIVIQEAGLDGFWIHRLLLANGIESHVVDAASIAVERRHRRVKTDAIDGETLLRTLMAWARGERRVCSMVRAPSPEDEDRRRLTRERGTLLKERIQHTNRVRGLLSGQGVRDYNPLRRDRFERLEALRTGDGRELPPMLKAEIRRELDRIALVTTQLAAVERARDALIRTDAEERNNPAALLLKLKGLGPEFASLLWLESLFRSFGNRRQVAAYGGLAPSPWQSGGVERDQGISKSGNRRLRKTMIELAWFWLRHQPDSALSRWFQARVGAAKGRIRRIAIVALARKLLVALWRYVTQGVVPEGAVFKAA

SEQ ID NO: 150182 - protein, 418 aa, unidentified
MEVLFPCCCGLDVHKDTVVACLVRSVTAGVRTKETRTFGTTTGELEALGAWLRAVGCTHAAMESTGVYWKPVFNILTEPGDDLAVWVVNAQHARAIPGRKTDVKDAEWLADLLQHGLVRPSFVPGREQRELRDLTRTRTSLVDERSAAVKRVQKVLEDANIKLSGVATDVMGTSGRAILAALLEGTADPAEMAELARGKLRAKIPQLERALAGRVREHHRQLLALHLSHIDFLEGAIAELDARIADKTRPFEAELARLDTIPGVDRRTAEVLVAEIGVDMAQFPSARHLASWAGMAPGNNASAGKRKGGKTRKGSKHLRRALVEAARAAARTKQPGRTAFAQQYRRIVVRRGPKKAAVAVGHAILVTAYFLVSRHTTYREPDPSQFDDRRRARVRQRALDQLRALGYHVTLAPKEVAA

SEQ ID NO: 150183 - protein, 299 aa, unidentified
MPVIIGVDPHKASHTAAALDEHGQLLDRQRVAAPLLGYRTLRGWAARWPDGRWAVEGAHGIGRALAQQLVGDGERVMDVPAKLAARVRVLSVGHGRKSDPDDAVLVAVAARHAPSLRQVGVEDQAVVLHLLTKRRQDLVAARTQTINRLHRLLMDLVPGGARRNLTAKRAAGLLAAVTPAGAAAVIRWQLATELVDDVRQLEQRIAEVEARIKTAVAQSQTSLVQLFGVGPVLAATFMGEVGDVGRFPSKHHFAAHTGTAPLEASSGQVVRHRLSRAGDRKLNHALYMMAGGRAAAGAR

SEQ ID NO: 150184 - protein, 369 aa, unidentified
MEKDTTYVALDDSKRKIVAGILRPDGLHLELREIANDPRQVRRLFERLKGEGPVTACYEAGVSGYDLYRQIIACGVDCAVMAPALTPRRPGQRIKTDRRDAAKLVRLFRAGELTAIHVPAEAEEAVRDLVRCRDDLRRDVLRWRHRVLKLLTRHGRAYLLGPNWSQAHWRWIRAQRFALPPLQRAFEATVFALEHALAQQAELDKELEALAATAPYREPVGWLRCFRGIDTLSAIILLAEIVDFQRFRRPRELMAYLGLVPSEYSSGETHRRGALTKAGNRHARRVLIEAAWHYRHRPALGPALAGRSAGQPPAIVGQAWRAQQRLHRRYRHLVGHGKRSPVAVAAVARELVGFLWAALTRHESRSSAA

SEQ ID NO: 150185 - protein, 324 aa, unidentified
MSDAIVGIDVSKETLDAYCARGQRKQGRTFANSPDGWKLVRAWLKAMGSKQAHVCMEATGRHSLGVALALHEAGHVVSVVNPAQIRDFARTKLGRNKTDKVDAALICEYAELFKPEPWTPPSPAMRRLCELQTMRAGIIRSRAEWKNRIGSGLGDSTATKLAAATIDHFTSQLEAIDRAIGETIKQDAELRGRCDLLLSVIGVGETLAASLMAEMPEPGVLRRSGEMVAYAGLNPSHHRSGTSIDRPTRISKIGNATLRSSLYMPALSAMRFNPAVAILVARLKSAGRLKPKQIVVAAMRKLLVLCFGVLKTGKRFDLAIAMPA

SEQ ID NO: 150186 - protein, 426 aa, unidentified
MRAIGLDVHLEFCEVAIAEGGKVRSAGRIETKPAELELFARSLGADDRVALEVTGNAWEIKRLIEPHVDRVLVVSPNDTGIRQARAKTDRLDARTLARLLAAGELDGVWMPDRVTWVMRRRLQRRGQLVRARSRAKNQIHATLMRCLVGRAPFAEPFGPKGRRWLEALELPEEEREAVDSALRQIEFLDSEIEAVERPIATEALKSTEIRRLMTVPGVNVICAATFLATIGEIDRFESPRKLVGYLGLDPRVSQSGTSPATHGRISKQGSVAARHALVEASWSAVRQPGPLHAFYQRIRSRRGHQIAVVAAARKLACLFWCLLTREQDYAYQQPSLTAKKLRLLEIRAGAKTHKGIHTGVFATRQRMRAAERGLAQKAEAAYRRTVADWQRTQAKRKGAGATPARASSGPSSGQAARQVQAPGPAL

SEQ ID NO: 150187 - protein, 367 aa, unidentified
MEKSSTAFIGMDVHKESIDIAVADSQEARHFGRIAGDAAAVDRAVRRLRSVHKRPMFIYEAGPCGFWLYRRLKSQGLPCMVVSPSMTPRNAADRVKTDRRDAMKLARLARAGELEPIYVPDTVDEAMRDLVRTREDAVCMQRQARQRLQALLLRNEIRYVGRSSWTQAHRRWIAKLKLPNPAQQIAFEEYVQAVHEAAQRLERLGKAIEAELPGWRWRSVVEALQALRGVQAIHAVRIVAELGDFQRFDSPRRLMGYLGLIPSEDSSGPRRRQGSITKAGNSSARRAMVEAAHAYAHPARLSWVIARRQTKLPKLVCDIAWKAQLRLCARFRKLTARRVPRNKVVVAIARELSGFVWAIARQVKPVA

SEQ ID NO: 150188 - protein, 357 aa, unidentified
MPSSNAKYIGLDVHKETIAIAVLNAAGKLVMESIVETKASTLLDFLHGLRGELHVTLEEGTWAAWLYEVLKPHVAELVVCNPRRNALLKEGSKSDKIDARKLAELLRSGMLRAVYHGENGLRALRELVRSYEAVSKDVRRVMNRLKALYRGWGIPCKGIQVYGRRHRQQWLEKLRESGVRRRAELFYQQLDALQDLRHTVRGELLVESRKYPAVKILRRIPFIGPLRAAELVALMQTPQRFRSKRQLWTYSGLAVVTHDSAQYRYVHGQLQRAKKPQQVRGLNRNHNHAMKEILKSAAESASRRAGPFQDFYQGLLAKGIKPELARLTLARKIAAIILTLWKKGESFDAKHVKPQAA

SEQ ID NO: 150189 - protein, 367 aa, unidentified
MKKVSTVAAKQSRDFSQATLTIGLDLGDRNSWYCVLDEAGQIELEQRVRTNAKALREVFGGMASSRVALETGTHSPWISRLLSELGHEVIVAHARKVRLIGESRKKDDRLDAQTLARLARIDPELLCPVKHRSAQAQADLTVIRSRAALVRARTALVNTARSLAKSYGERLRGCNVRNMNPEKAESLSPELRCALEPLLAAIEELSERIAEYNERIEALAEASYPQVELLKQIKGVGTLIALTFLLTLEDPHRFGKSRDVGCYLGLQPGRRNSGQSEPQMHISKEGDPYLRTLLVQGAQHILGPFGVDCDLRRWGMKLAERGGRNGKKRAIVATARKLAVLLHHLWVSGDVYEPLHNSSRVTVAAAA

SEQ ID NO: 150190 - protein, 411 aa, unidentified
MENVFLCCAGLDLHKKSVEACVRRMEPSGHVHQQTRHWGTMTRDILMMADWMAAQGVTHVAMESTGVYWKPIYNILESRFTVLLVNARHLKQVPGRKSDIRDCQWIAQLLQHGLLKGSFIPPRPQRELRDLTRHRTQLVEEKTRTSNRIEKVLEDANIKLGSVASEVLGVSGRSMIQALLQGEKDPTQIADLAQRQLRGKIPELEKALEGNLTEHHRFMLRLLWKGLTQQEALIAELEAKIEEVTRPFASEIERLDAVPGVDRRVAEVLLAEVGAKIDPFPTHQQLAAWAGICPGNEESAGKRRKRRITPGNRWLKRTLVQAAWAASHAKNSYLGSQYRRLAGRRGKKRALIAVGHSILVILYYLLKEGSQYADLGADFFDRLEPERLTRYYVKRLERLGHNVKLEPCVSA

SEQ ID NO: 150191 - protein, 367 aa, unidentified
MKKISTVGVKQSKNFREQKLTIGLDLGDRSTWYCVLDEAGEVVLEQKLGTTPKAMKEVFGEMPRSRIALETGMHSPWVSRVLSELGHEVIVAHARNVRLIGESRRKDDRFDARTLARLARIDPQLLSPVQHRSAQAQAHLMVIRARAGLVRARTALINTARGLTKSYGERLRGCSPRSLNAEKARQLGPELQAALEPLLVAIESLSQQIYEYNQQIEKIAKESYPQVARLKQVKGVGTLIALTYILTLEDAQRFRKSRDVGCYVGLQPGRRNSGQSEPQLHISKEGDPYLRTLLVQGAHHILGPFGADSDLRRWGLKLAERGGKNGKKRAVIATARKLAVLLHRLWVSGEAYEPLRNSSAVRLPAAA

SEQ ID NO: 150192 - protein, 556 aa, unidentified
MPTAELSFVKNRQASDSQIVSSFPFGNALARATDTVSKVIPKRCKGHPKAPSSAPIGNNFAARENRVVKKSAARDNRGGGNAKSRTQSQATVSTRNEWRPLTGSSAHVQKSERTASHEVHCISSTGDKAKALRRKVTPRKKPMKAWQELTHFAGFDWAKGHHDVVIVDKGGSIVAEFQFTHDAPGWEQFRKKVASFEALGIVIETSTGFAVEQLLNVANCTVFPVTPRSAKSYRERKAPSGAKSDHLDAWSLADALRTDGRDWKSLSLLDPIIQELRVLCRDEEALIEERTALVNQIQQAIYEYYPIALKAFDDWTMPSVWAFVIAFPTPEALKKAGKRKWENFLHSHRLWRSNTAPERLAWFAKATEFHASDAVTRAKSRLALTRAKQLQTLETQLELYRKAIEELFSKHPDHNLFDSLPGVGPKLGPRLLSEIGDDRALFGDAESLQCVAGTAPVTKKSGATRIVKIRWCCNKNLRHAVHLWANSSLNFCAWARVYYEALKKRGMTHAKALRNLGQRWLKILWKMWQTSTCYDPEFHAMNQLKHGSWVLSIDPK

SEQ ID NO: 150193 - protein, 319 aa, unidentified
MMMHPVLNVGVDVAKDAVVVACAQRSFPVKSVPNQRAPLRAWLKTLPNGSRIGLESTGAYHELLADLAHTHGHTVFLLNPLDTRHYAKAMGTRAKTDRVDAELIARLIMQEHTRLRAYTPPTANQRKLDRLIRRRAKIVAIKGTLKMTRRHLGGFAAELKAVVGKLEALLAKIEATMNAIAACSPQHQEAQQRGETIVGVGPVVGISLTNTLERVPFRKADAFVAFIGFDPRAHDSGRKTGRRRLSKRGPAELRRLLYNAAMSAITTKVWKPIYEHYRTRGWSTTASLVIIARKIARAACSIHHYRTTFHPERITKGLT

SEQ ID NO: 150194 - protein, 327 aa, unidentified
MTASVASHNQIFIGIDVGGLSFEAAWHRGGSTQYQNRPDAIAAFVARLSAEKQIIRIAVEPTGGYEKVLVKALRGAGLPVEMVHTSRFAAYRKLIGAKAKSDTSDARLLAAYAAAPEEVRGRKAGHVVLPQEDVREQLAELAARRDQLKHMIHAETCRLSTVRSPSIRDEITAHLQAMRQADRKTHDAMMQLVRQRDELRNAKRLLQTIKGIGDKTALTSIAAVPELGLISNKAAAALVGVAPFVRQSGTMKAPARIHGGRALVRNAFYMAAVTASRHNPVLAPFYARLIAAGKPVKVALVAVMRRLVVYANAVLRSGQPWKGAEIG

SEQ ID NO: 150195 - protein, 376 aa, unidentified
MAKLDGFDRIIGMDLSKRTFKACVLTREKNFEDRNIISGTMDAKGRQRFIATLGAKDIVAIEGGTSSNNFARELEMIAGKVYLLNPGKLHIIFQSQRKTDKIDAVKISHYIRDTHEESICLMNIPTKCESEIRQIVNSYNFAKKQRTQLINKLHSIFNMNGVPEVKKSDLEKNESRVFIIAERLDDLACLDATMVEELITSVELKIEKYIDIMRNFILANSEVALPWLSLPGVGLISCTSILAYIGDGSRFYTPNQLRNYVGLVPRIDQSGDHNWQGGTSSFGCMPVRRNIMQCAWSLDHLKSNCILKDEWDKIVNRGKRKSKVAIHVANKLLSIGWSLQRSKKLYAGFGDYTNLKKKLKREKLEGIDTSSFLELA

SEQ ID NO: 150196 - protein, 343 aa, unidentified
MKLHVLGIDLGKTVFHLVGLDSTGRVVIRKRCSRKQLLAFTANLEVKLIGMESCSGAHFLGRALREQGHEVRLMPAQYVKPYVQTNKSDYLDAEAIAEAVQRPRMRFVPIKTEEQLDLQALHRVRERWVMRRTAVVNQIRSLLLERGLTLPKGRRHLDEQLPRILEDAELNLSGSFRVLLAQLQLELKQLAARIEEMDRVIQKMAKENEACQRLTEIPGVGPVTATALISAVGNGSTFQKGRNLAAWMGIVPGEYSTGGKQKLLGISKRGNKYLRRLFVQGARSVLQQRHKQAPGLSSWLAQLLGRTHQNVVVVALANKLVRMAWAVLCKNQRYRAPVFAVTT

SEQ ID NO: 150197 - protein, 408 aa, unidentified
MEVLHARCCGLDVHKKTVVACLLTPGLRGQPVREVRTYGTTTRELLGLADWLRASGCTHVAMESTGSYWKPVYNLLEATFQLLVANAHHLKAVPGRKTDVRDSEWIADLLRHGLIRPSFIPSRPERELRELTRYRTTLIRERTSEVNRIQKVLEGGNIKLASVASNVVGVSGRAMLSAMVSGVVDVEAIAEMARGKLRNKIGPLKEALHGRLGPHQCFLLAVQLRHVDELDQLIDEVSAEIEERLRPSQEELTRLATIPGVGRRTAEILLSELGADIARFPSARHLASWAGICPGNYQSAGRSGTGRTRKGSPWLRSALVEAARAAGRGRTYLGAQYHRIAARRGAKRAAVTVAHSILVIVYHMLSDRCDYHDLGGNYFDERHREQVSRRLTRRLEALGYSVSLSPAA

SEQ ID NO: 150198 - protein, 409 aa, unidentified
MEVVITRCAGLDVHKATVVATVRVPEEHGRRRIVTETFGTMTPDLIALREWLQAFGVTHVALESTGVYWKPIYFVLEDAFQLLLINMLELKHVPGRKTDVKDSEWLAQLLECGLLRASFVPPPPIRELRDLTRYQVHQVRDRSREVNRLCKVLEDAGIKLTSVATDVLGVSGRAMVDALLAGTTDPTVLAELARGKLRKKLPELRRALHGRFRRHHAFLVEQILAKIDFLDETLARITAELDERLAPFAPMLANLDTIPGVNRTTAVSILAETGGDMTRFVTAARLCSWGGMCPGHDESAGKRRSGKTRTANRYLRAALIQSALGASHTKGTALQARYHRVKRHRGHKKAVVAVGHQILEIAFHIMRDGVTYDELGADYFDRRHRDRTVRRHVRQLEVLGYRVTIEEAA

SEQ ID NO: 150199 - protein, 358 aa, unidentified
MYKFMKKFFIGVDVSKDTVDVSFFDDDRMKSPEYLAQYSNSPKGFREMVKDLRMCCHGVSSGQWLFCCETTGRYDHPMCHWLVDHGMVVWRESALQIKWSSGIQRGKNDRVDSLRIAEYAWRHQDKMQKFVKPSESLSNLKAAFTHRRRLVEKRTATRCQLKSMSSEKGLSASLARMIVRDLSREIERLSASIATMDESIQKIIRSDSELDRNYRHIISVKGVGPITAVALIVCSGNFKAITSAKKMACYCGVASFRCQSGTSINRKASVSNLSNRQIKSLLSMAARSASRSNPVFAEYFNRTLSRGKPVALVYNNLRNKIITVVYKLIERDCDFDVDYMRMHSTGQRANEPAIREAV

SEQ ID NO: 150200 - protein, 304 aa, unidentified
MFGIGIDVSGENLDVAVHEQAFRQFKNSKRGWNSLIRWLQQWPAKQVVLEASGGYEQKALDALHEAGLPMVRINPGRGRSFASATGKQAKTDRIDAMVLAHMADALKLTRYVPPAAWQRRLGELCQRRRHLVQMRVSEHQRMRAFSEPSLISMLNQHLCEIQKSIKQLDATIAALLAEQEGWRDFAKLKGAGPVLMATLACELPELGKLSGKAISALVGVAPMNRESGTWKGRRSISGGRAVVREALYMAALTAKRYEPRLKEFFESLVKQGKPGKVALVAVMRKMLVILNARKRDAEAQMASA

SEQ ID NO: 150201 - protein, 356 aa, unidentified
MSREVKYIGMDVHKEAIVIAVLNSSGQLVMESIVETKASSLLQFIHGLQGELHVTWEEGTWAAWLYDLLQPHVQQVLVCDPRRNALLKEGNKSDKIDARKLADLLRTGMLRPVYHGEHGLRTLRELARSYQTISKDLIRVMNRIKALYRGWSIPCAGTQVYAPRYREEWLHKIEQVGVHRRAELLYQQLDGLQTLRRTLRPELLAESRKHKAAKLLRQIPCIGPIRAARLIALMQTPHRFRSKRQLWTYSGLGIETRDSGQYRFVRGQLQRAKKPQQIRGLNRNHNHEMKEIFKGAATRASCGVGPLRDFYVALLDKGMKPEMARLTLARKIAAIALTLWKKEERFDAEQLKTQAA

SEQ ID NO: 150202 - protein, 435 aa, unidentified
MEEVEDEPLFCDRVAGIDIGKATVMVTIRVPSEARAKGRQQEAREFGTTRRELLALADWLRGWQVERAGMEATSDYWKPVLFTLEQEGFDCLLYQASQVKALPGRPKTDKLDSVWLARITEQGSLAGSFVPPEEIRRLRTHTRYRRKLVQMRTAQKERCEKLLEDAHLKLSAVISDIHGVSGRDMLRAIAAGERNPKVLAQMARGVMRSKIARLEQALDCSFFTGEHAFILTMMLDSIDSLTAQAGVLDARIADMCQPYQRQLEQLDEIPGFGITTAQDLIAEIGTDMNVFPTAGHLASYARQAPRVKESAGKRKGKNATGRGNPYIGGALGEASISAGRTQTFLGEKYRRLTRRMPKRKAQVAIMRSQLVIAHALLSDPDARYQDLGPDYYERKADIRRRARNPARALERLGYKVTLEAIDPGTGELHLIATAG

SEQ ID NO: 150203 - protein, 406 aa, unidentified
MLNAVGIDVSKGKSTVAVLRPAGEVVRRPFNVVHSVNGLSELVSYVRSLDGETKVVMETTGHYHEPVLKAFLDAGIFASAVNPCLIRHHDSDKNPLRKVKSDPADAKKIAKYTLDKWELLRQHSIMDTTRTQLKTLNTQFHFFMQQKVSLKNNLISLLDLTYPGANTLFDSPVRSDGSEKWVDYVHSFWHADCVRKIGLKAFSVRYQNFCKHHGYNYQPGKPEELFKASKELVAVVPKDPVYKQMILSTIEQLNTVSKQIERFRRKMNELASALPEYTTVMSMYGVGPTYGPQLMAEIGDVARFERRSAITAFAGVDPGVDQSGQVYHESNRASKHGAPRLRKTLFQIMTTLLQLAPEDDPVYRFMMKKKSEGKPYQVYMTAGANKFLRIYYGKVKAFLASQTDMQ

SEQ ID NO: 150204 - protein, 355 aa, unidentified
MCQIEVVKNFNRREPSVEQISRIFIDTSKQIFQLHGVNAAEEVVVRKKLGRNQVLAFFAKLAPTVIGLEACGASHHWARELAALGHEVKLVAPQYVKAYLKRGKNDARDAEAGCEAMSRPTMRFVPVKSAEQQAALMLTGVREQLVRARTQLANAIRGHAAEFGLVAPRGLAHLGPLLTRIAEDETIPELTREWERLTGELKLVDARLMSWHRQNRMSRRLAQIPSVGPIGASMLVMKTPDPGAFKSARHFAAWMGLTPKDHSTAGKQRLGVITRAGDEALRSVLVVGATAVLLQVRHGRGPRSPWLLKLLRKDKPKLAAVALANKVARIAWRMMMTGEDYEPARLLRELPPNAA

SEQ ID NO: 150205 - protein, 394 aa, unidentified
MERPAPVPHLSWVVTLKAEGATYGRGPAVMTSIGDRGAIYLGLDVHKNTISAGILGPGEETPHTDRIGSDDDAVRRLIARFDDPGRLRSCYEAGPTGYELARLLDSLHVRCQVIAPSLIPTSPGDKVKTDKRDCCRLARLLRAGELTAIRVPTPAEEGVRDLCRARADMIIDATRAKHRLGKFLLRHGRVWRDGENWTAKHRVWIAGQRFDDPAVRVTFEHYRSTLAAREAAVAAIEADVVGWCTADPFAGQVTRLAAYRGVTRIGALTLAAEVCDWRRFPSAGAFMGFCGLVPSEYSSGERVRRGHITHAGNVHLRTQLVESAWAYRSHPSLGVGIRERQQGLPPAVTARAWRAQQRLCTRFRHLDARKTSRNVVVTAIARELAGFLWAEMTA

SEQ ID NO: 150206 - protein, 384 aa, unidentified
MIKENKNKQFPVVIGFDWADEKHDFCLWDAERDPLETGVLEHCPETLNEWLLNLRDRYQGKSIAVGLEQSKGALAYLLMEHAFLTIYIVNPSTVASMRDAWKPSGAKDDPTDAELIMSIVRDSNYKLRAWQPDTGQTRQLKLLCEHRRGLVDFRVKLTNALRSCLKTYYPLACKVAGDKLNEPMALDFITKWPTFDKLQRSRETTIRTFYTRGNSRSEKVMDQRIETIHAADPVTTDEVLIESYSMQALALVAQLKVLRESIKEYDRKILKVYRSHSDVSIISSFPATGAVFGPRLIAALGTDRTRFNSAEEVANYSGIAPVTERSGKSNWVHQRWKCSRFLRGVFEQYLCQGIASLIAHRDGARLQSLPEAMRGRVELMRNEL

SEQ ID NO: 150207 - protein, 322 aa, unidentified
MDILGIDISKEDFHAALLQGDHAAKKSFPNSSKGFAQLEAWLRNRRVSEVLACMESTGAYWRALADHLFKAGHQVRVVNPRRIKAFAEVELSRNKTDAGDALLIAHFAAAHRTRPYQPLAPEILELQGLVRHLEFLKKVRTQHITRVQTPGLPSSVVTSTQKIIAELESQIEDIERAIKDHIDRHPGIRTNKDLLVSIPAIGLKTAAGILAEIPTITEFASAQAVAAYAGLSPKLRESGTSVRGRSRLCKTGSARLRNLLYMPAIVAQRHNPTLRSFAERLRSAGKAKMVIIGAIMRKLLILAYGVLKSRQPYDPAFMAQPA

SEQ ID NO: 150208 - protein, 337 aa, unidentified
MELYSGLDLHSRNTYIGILDTDFKRVFKQRVSNNLNLILETLEPFRDRLKGLVVESTFNWYWLVDGLMDAGYDGVHLANPSAIKQYEGLKHSDDQHDAFFLAQLLILGILPQGYIYPKKDRPVRDLARKRMFLVKHKTAHILSLQSLIARCCGQRISSNEIRTLTAADLRQLLKEEYLLLSAQANLDIIAFLIQQIKTLEKAIKKKVKLDKAFEQLMTVPGIGFILAMTIMLEVGDIERFAKVGNFASYCRCVSSQRLSDGKSKGSGNRKNGNRYLSWAFVEASQLGRRYSLRFGRYYDRKAAQTNTIVATKALSNKLARICYYIMRDQVPFREELF

SEQ ID NO: 150209 - protein, 459 aa, unidentified
MARKKKIGMEIINANAAGIDVGSKSHFVAVGQSLEDVKEFGVYAEDLVKLCEWLLSFGISTVALESTGDYWQNLYVELQKHGLEVVLCNGKFTKHAKGKKTDVKDCRWIQKLHSLGLLTSSFLPDKTTEILRTYCRQRTNWIELAASASRKMQKYLKFLNFRLDVVVNDVCGQTGLKIIEDICNGNLDPYSLAEHRHYNCRKPKEEIVKALHGNNRKDFLFGLKQEFDSYNFFQKKIKACDKEIEQLVKQEIKKSPQKQNLKTTDKPYKRINKNAVDIKQFNQIAFQYFSGVDLMAIEGVSHATVMAVMSEIGIDGFRKFKSAKEFCSWLRLAPNNKISGGKVLSNRIPKGSNRLKIALRHSANAIGNLKDTHLSNFFGRIAYRKGRQAAVSATARKLATIIWTMVTKNVPYKPPTEYLFLDQKRKMGIAKKIQKQMAKFDIKPEEIGIGNSLIPNYNF

SEQ ID NO: 150210 - protein, 355 aa, unidentified
MKYYTSITQFNCGIDLHARQMYVCLMDRDGHKLVHTNIKNNDFDYFLQRVAPYRHDLTVCAECMFGWYWLADACQSAGLTFVLAHALYLKAIHGGKNKNDRIDSEKIAHLLRTNLIPPAYVYPADKRPLRALLRQRILYIWNRSELLSRIQSHQLAYNRPTFRQNPYNREPWEKQLLAHEAHPLRQFALQNDLALIRHYDTQLALLEKELLQLTRQTANRDFTLLQTAPGIGEYLGLTILHEIGDIARFPTVKNFLSYCRLVKGTVASAGQIKGLRGAKLGNPYLRWAFGEAAVIAKRDPAVIGPLAQRLEARMHGNKFKANTVLAIKLARAVYYMLRHHTVFDPDRLVAALTHN

SEQ ID NO: 150211 - protein, 338 aa, unidentified
MKKLSVTYFFGIDVSKKKLDFAFAKGLVFLSHQQIDNNYKSIIAFIRAKLKAEKISIAQCCFCMEQTGIYCNHLIRVLLDLGAQFSVVHSAHIKLSFGLTRGKNDKVDSKRIAEYAYRFNDKLEPYKPKRAVVDELDTLCKLRKKLMKMKNQISLPLNELKSFGAEAKYKLYKSNTAKSLEAIALDIKSVTKAIRQLIKSDERLKELDTWIGSVVGVGAVTTPALIVVTNEFTNDFSAKQMCSFCGIAPFAHQSGSSLNGKNKVSHKANKYLKTLLNMCAMSAIQTNSDLGRFYHRKLSEGKNRMSALNAVRNKIIHRIFAVVAGERKYERKLCLPAS

SEQ ID NO: 150212 - protein, 311 aa, unidentified
MNTTLCGIDISKDWLDAHIEPMGAANRFANDAAGIADLAAWCQNHDVELVIMEASGGYERLAFLLLWEMGQPCGMANARSVRYFAEAMGFLEKTDRIDAAVIARYGAVKRLKPTPPPSAAQQRLKALVARLSQVGGDLTIQKQRKSTADAETIASLDEVIALLARQSRRLEGEIATLIDDDPLGACLDRAFRSLKGVASRTVARLMAQLPEIGILSNKAIAKLAGLAPIANDSGKRSGRRPVRGGRAGPRGVLFLVASIVAKYDPHLAAFKQRLQTAGKEKMVIRIALARKLLVILNAKARDARNEFANAT

SEQ ID NO: 150213 - protein, 460 aa, unidentified
MGRKKRTKQKAVVQEIPKLEALEQINLNAAGLDIGDDEIYAAVPEGRDEVSVRVFETFTVDLYAMADWLAACGVDTVALESTGVYWIPSYEILEERGFKVYLVNARHIKNVPGRKTDILDCQWIQQLHTYGLLQASFRPPEEIRALRDLVRQRENLIRSCTREIQHMQKALQQMNVKLTNVISDLTGVTGMRIIRDIVAGERDPTMLARHRDPRCAKNEEEIAKSLQGRYKPEHVFVLQQALEAYDFYQQQVKACDAEIEKCYAAFEPQVDLSAKPLPPDKKGGHKRRKNEPYFELREYLYQWAGVDLTQIDGLNALTVQKVLTETGVDMSAWRTVKHFTSWLGLCPHNDKTGGKVIKRGTKKSQNRAAAALRVAAQSLTRSQSTLGAYHRRMRARLGGPEAVTATAHKLARILYAMLKNQTEYVDPGEEYYEEQARQRAIQSLKRKAKTLGFELIPVAA

SEQ ID NO: 150214 - protein, 351 aa, unidentified
MVVVGADVHKGTHTFVAVDQVGRQVGQRTVAATSEGHAKALAWAREQFGEALTWAIEDCRHLSARLERDLLSAGQQVVRVPPKMMAEQRRIARTRGKSDPIDALAVARAFQRDPELPIASHDEVSREAKLLVDRREALVATRTRTINSLLWRVHELDPAHAPKERSMGLVTHQQALRAWLLTLDGIVAEMAVDELDDIIALTARIKEFDKRIGALARREVPTLLALPGCGELSAAKLLGESAGITRFHSEAAFARHAGIAPIPVWSGNTAGRVRMTRSGNRQLNAAIHRIAITQARLPDTLGRAYYEKKLAEGKSKTEALRCLKRRLARVVFQLLTTDHHNRQTTPIPTAA

SEQ ID NO: 150215 - protein, 400 aa, unidentified
MLSIGIDVSKGKSTVCGMKPGGEIVYTPFEIQHTREGMSELVSLLHNSGEEVRAVLESTGSYHCPVVAALLENGIFVSVVNSLRMKRFCSQSIRKVKTDRIDAMQIALYGLAYWQELQPARLPEDTYRELQLLARQYYQMTSMLIKAKVDFNALCDQVLPGMQELMNDHAGRHKLSDFVLRYRHTTHILEMGETRFRKDYCKWAEKKGYRNRERMAALIFATAQNGIPVLPNAPSTQIVITEAIRVLHTVEASRDAILTQMQALAKTLPEYSLVREMPCIGDTLAPRLIAEIGDVRRFHSKRALIAYAGIDAPPYQSGKFCANNRHISKRGNRYLRKTGYEVMQSYVMHKPANDPIFTFIEKKRGEGKSGKLAMVAGLNKFLRVYYGKVTELYRSLPAIE

SEQ ID NO: 150216 - protein, 326 aa, unidentified
MTVSHSSDNIFVGIDVGGASLDVAWHRGDSAHYANRPDAIATLVKRLQVGPKVTRIVVEPTGGYEKPLVKALRQAQLPVEIIHTTRFKAYRELVGVKAKSDTSDARLLAAYAAAPDEVRGRKGDRVELPEDAIREALGELASRRAQIKHMIHAETCRLGTVRLAELRQAITAHLEVLRAEDKQVHQMMLTLVRQRLDLRRDQRLLGTIKGIGVKSALALLASVPELGRIDNKAAAALVGVAPFVRKSGTMTAPARIHGGRAAVRSILYMAAVTASRHNPVLRPFYERLIAKGKPPKLALIAVLRRLVVFANAVLRSGQTWKGAIAS

SEQ ID NO: 150217 - protein, 395 aa, unidentified
MFIVGIDIAKRSHEAIIIAEDGQVVRKAFSFRNNCTGYNLLLEQVRKLTLVKSQIVFAMESTAHYWLALYARLLKDGYTVMVLNPIQSHSLRELYIRKAKTDARDSLIIADLVRFGRCKASNVPQDKILALRELCRSRAYLVDMAADLKRKLIALLDRIFPEYESLFDSVFSKASIAVLRKYSTPQKVKNAHLGELTDILMERSNGHFGEWKAHQLKEAACSSFGIDDSGGVYSMLLGMFLEQILSLTAQADSLEKQISVFFQEFNNPLTSIPGVGTVLAATILSEIGDITRFSSAAKLLAYAGLDPSVKQSGEFKSNQNRMSKRGSPYLRRAIWLASTVAVHRDPMFQTYYEKKISEGLHYINVIGHVSRKMTAVIFAVLRDGQPYQPILQSAG

SEQ ID NO: 150218 - protein, 344 aa, unidentified
MDYFVGLDVSVKDTSICIVDETGKIVREVKVASEPEAFLAVLKNPAYRFKRIGLEAGPMSQWLFNALAEAGLPVICVETRHMQAVLKAQINKTDRNDARGIAQMMRAGLFRPVHVKTLRSQKLRMLLTHRKLLQSKAIAIENDLRGTLRNFGLKVGMVGKVKFEARIKELVENLPDLAVLVEPMLIVRRVLREQIVILHRRLLAIVRDDEVCRRLMTVPGVGPVVSLTYRATVDVPARFHKSKAVGAVFGLTCSKYQSGELDRSGRISRCGDEMMRAMLYEAAQSMLRSTRWSWLKAWAMQIARRRGMKKAIVALARRLAVIMHRIWVDGTEFRWTREQATAAA

SEQ ID NO: 150219 - protein, 425 aa, unidentified
MSEQYAMLVGLDWADQKHDLCWRDTATGKMHTAVLEHHPERINEWITECLSKYPGGRIAICLEQSRGPVAYALMGYEGVDLYPVNPATLSNYRSAFRPSGAKDDPSDAGFLLELLERHPEALKVWQPGDEQTRLLHSLCEDRRKAVDLRTSLCNRLRARLKEYYPQALQLVGRELYSELCCAFLMKWPRFEALAASRAQTLRSFYYAQHSRSEKKIGQRLELIAGSRPLCSDAAVVEAAILWVKTLVPQLRALNRAIKSYDQRIGELFLAHPDRLIFQSFPGAGAQLAPRLLTAFGTDRNRYATAVDATTYLGVAPVVVRSGKQEWIHWRWHCPKFHRQSAVEFAAKSIGYSGWAKLYYDEQIKRGKGHHAAVRALAYKWIRIIFRCWQQRVAYDETIYLAALQKHGSWISNKLKEASEINDCTT

SEQ ID NO: 150220 - protein, 329 aa, unidentified
MLGPDPANMVEVGMDGKRMIGIDIGKRWLDMAREGSARVERFANESPVIAALVTTFDPGCDIVVFERCGGYERELEAALAGAGVPWAVVHSARVKAFRQVQGIKAKTDPIDARLLRDFGRDRLNADNLRLGRAEDVALNALMARLRQLKAALHAEHCRRETAAIEPVRASIERMIAQLEAELVAIEAELACHEANDLQIAFKEKVMCARKGVARATARALLAELPEIGRLDRREIASLGGLASRVDKSGRSDRRRGLVRGRCAVKVILFNPARTAMRWDPEIKAFCDRLRARGKPGKVILVAVMRKLLVRLNAAVRDEVAIAAAAHAAV

SEQ ID NO: 150221 - protein, 344 aa, unidentified
MIVVGIDPHKRSHTAVALEEASGASVGERTVSADASGRGELLAWAAALGGACRFAIEDGRPFSGALERSLLAGGYDVVRVPPKLMGQARRSGRTYGKSDPIDARAVALAAIREPDLPRARIDPADEQLRLLVEHRNDLVGERTRMHNRLRDHLHQLEIGLEVPPGGLERPVWLKRVRTALEALGPSVRRRIALELVERCAELTGAVRALDVELGTLVSGRPDGAALTAIVGCGVLSAATVLAAADGIGRFATEARFASHAGVAPLPASSGGRIRHRLNRHGNRQLNAALHRIAFTQARMHAPAKGYLERKRTEGKTRKEALRCLQRHLARVVYRTLVTASVQTT

SEQ ID NO: 150222 - protein, 429 aa, unidentified
MNFRPIAGIDVGKFFSEMAILSPSNELVARMKIKHDSYSDIERAFELLKKVEKDFDSRPFIVMESTGHYHKILFHSFYRFGYEVSIINPIQSDCIKNIGIRKVKNDKVDAKKIALLYRFQELKATNIPNEDIECLRSLCRQYYKLNDELTAYKNRLIGVVDQLMLNFKEVFSDICSKTAIAVLEECPTPSLMIKADRDKLISIIKKNSRKSHEWATKKYDLLILKAKEFEPLSIDNPANIAMLEIYISMIKTLQENLKKVLKTIEQLIANDLSKDMPVMWLTLELLQSIPGVGLITAATILAEIGDFSAFSKPKKLVAYFGIDPSVVQSGEFTGTRNKMSKRGSKYLRRVLFTIAIANVRTKRNGQPTNPVLLEFYNKKLQSKPKKVALGAVMHKLIFIIFAVFRDKKPFELRTPEEHAKRLKTKHIAA

SEQ ID NO: 150223 - protein, 325 aa, unidentified
MNDKGTIVLRERLTRAALPKRLANIPPCLIGMEACAGAHHIGRQLAMLGHDVRLMPAKYVKPFLKGHKNDYRDAEAIAEAVQRPTMRFVPFKSDEQLDLQALHRVRSRLVGQRTAVINQIRAFLLEHGVAVRQGPGALRQALPSILARRTDVLSPRIIHLIEDLADDWRRFDQRIADVTREIEQLAKQDEPCKSLMGVPGIGPMTASAMVAAIGDGAAFSKGRDFAAWLGLVPKQISTGDRTILGGISRRGNRYLRTLFIQGARSVLQRSDGWEKKSFGRWLITASKRLHKNVLAAALANKLARIAWAVLNHAREYDAAFAPKAA

SEQ ID NO: 150224 - protein, 485 aa, unidentified
MHLPTPVRLLGIDLGVTSDHTAVVVDGTGRVHARRRARSTVTSLAALEAAALATAAAGTHLVVVIEPTGPAWRPVAVFYGRRGHTVLRVTSAKAADLRRFLARHAKSNGIDAETLARLPLIAPTGLTAVEFGSPARTSLDRRVRAVARLTAEIGRRKTRIRTLAQQLVPTIGGALSEGLSHTDLAVLERYADPRALLAAGPTRLTRLITTTSRGQLGAAKAQALRTAAAEAVALWEGDSAAALDDLAAEVASEVRLVRAAEAERARHEHARDAAFAQVDPARLAASLPGLGPVGTTQLVATMGRPGRFPNSGAFKAFTGLTPRANETGQTDRKHQPMTKAGPRLLRSQLVQSANTARKLDPQLAAVYHAQMTQRGATHRKALCVVAARLAERGWLTLARGEPYVICDLEGRPVTPEQAKRLIAERFTVTPEVRRRRRSTKKAGKAPHKALKAQGKSQHEAGHEATFPTASLDAPPTIVNNSHAPV

SEQ ID NO: 150225 - protein, 387 aa, unidentified
MYFIGIDISKFKHDCAIIDEAGDTVTASWSFANNCEGFSLLKQLLDALDGQKKIGFESTGHYGHNLKLFLETNNFSFMEFNPLLVSKFVRSKSLRNTKTDSLDAVSIAQYLMTVEYKPYPPSFYHMDQLKSLTRFRDSLVRQHSRQLVELTNILDKVFPEFKPFFDGRFSATALYILTHYQSPEKIANMNAKSYEALRKKSRGKFSMVKFTQLKTLAKNTVGRSDAFLLKQMEITIDIENQLDAKIDEIESQILECIRALNPPILTIPGIGELTAAIILSEYGNINKFENPAQLLSFAGLEPGYYQSGLAEHQGHMVKHGSSHLRYALMNACLPLITYEPVFAEYYAKKRAEGKPHRVALTHVAKKLLRVIFTLQTKNISYDPTLIR

SEQ ID NO: 150226 - protein, 400 aa, unidentified
MQSFAWTQSQPAPSLLQHDMLAMSANGMVRPCSGPASKGSWQGAPKTRSTPMPHKLNSGIAVIGIDIGKNSFHVVGHDKRGAIVLRQKWSRGQVETRLANLRPCLIGMEACVGAHHLRRKLQMLGHDARLMPAKYVRPYSKGQKNDFRDAEAIAEAVQRPTMKFVATKTAEQLDLQAMHRVRERLVSQRTGIINQIRAFLLERGVAVRQGLRFLRTELPRILAAPCDALSPRMLRVIEDLAGDWRRLDERIEGLSSEIEVLARRDVGCERLMTVPGIGPIISSAMVAAVGTGDAFTKGRDFAAWLGLVPKQISTGDRTILGKISKRGNRYLRVLFVQAAWVVLIKPKSWDRHGLKPWLETAKKRLHHNVLAIALANKLARIAWSVLAHGRAFEASKLQVG

SEQ ID NO: 150227 - protein, 369 aa, unidentified
MNDITYVGLDVHKATVCVAIAESGRGGEVREVGIFENRPDVLRKMVARLGKQRHRLNFCYEAGPCGYGLHRLLTGLGHDCVVVAPSLIPMKAGDRVKTDRRDALMLARLHRAGELTPIWIPDAAHEAMRDLVRARATAVRALSKARQHLQGFLLRHDRICHEARAWTLAYRRWLTTVRFDHPAQQIVLQDYIHTVEDAECRRDRLTRQIEELMPTWPMAPVAAALQAMRGVALVVAVTVVAEVGDFRRFTNARQLMAYLGLVPSEHSSGSTVRRAGITKAGNALARRVLIEGAWTYRMSARVSRKLHDRLEPLSAAIRDIAWKAQVRLCARYRRLAATGKPKVVVTTAIAREMVGFIWAIAQVAQPELT

SEQ ID NO: 150228 - protein, 355 aa, unidentified
MSQEKYIGMDVHQATISVAVMDAKGKLIMECVLETKAATILEFIQGLRGTLALTFEEGTSAAWLHDLLKPHVSRLVVCDPRKNALLKDGNKSDRVDARKLAELLRTNQVKPVYHGKHGTRALKELGRSYLTITKDVTRVMNRIKAVYRSWAIPCAGTSVYTPRHRAEWLAKLVEPGVRIRAEHLYQQLDSLEPVRLEARRELLLESRKHAAVKLLRQIPSIGPIRAALLVALLQTPHRFRTKRQLWAYSGFAVEIHDSGEYRSVRGKLQRNRERITVRGLNDNHNKDVKSLFKSAAISASTRPGPLHDFYVTRVERGMRPTMARLTLARKIAAITLTMWKKGVSFDPKQLQRQAA

SEQ ID NO: 150229 - protein, 413 aa, unidentified
MQSILVAGIDVHKAMVAVVVGGAGIDESGYERRKFGTSTTQIRSLAAWLRERGVVEVAMESTAQYWRPVWLGLEGHFRLQLAQARSNPAPKGRKSDYRDALRIVRRMLANDLTWSFVPSAQQRIWRIWARTRVQMIHTQQQFRNQLECILEEAQIKLSTVVSDLLGKTGRRILDALVRGDSDPAVLAALADRRIRATQAQMQDACDGNMLPAHRQILQMFLNQIDGLEKQIQEIEQHLGKEQQEYADAIRRLCEIPGIDVQAARIILAEVGAEAVAFATAAQLASWAGVCPGREESAGVSHSNASPKGNRHLRRILNQIAWAAIRTKGSYFQIKFERWVVRLGPQKAAWAIAHKILRLIWKVLQQGVRYQEHGTLPTDPKALKRLRLRHTAALKKMGYEVTLTPANQESGPRA

SEQ ID NO: 150230 - protein, 341 aa, unidentified
MEHYAGIDVSLECSSVCVVDGQGKILREARVASEPEALIAWFRSLGFGLARIGLEAGPLSQWLFAAMKAAGLAVELLETRHVRKAFEAMPVKSDRNDARGIAQLMRLGWFRPVHCKSMGAQETRAMLTARKLVQSKLRDVENSLRGILRGFGLKVGKTTKRGFAGRIGELVSGHPHLEMIARALLEVHAVLRSEFASFEKQSRKLARSDARTRLLMSTPAVGPIVALTYASAIDDPRRFRSSKQVGAHFGLTPKKHQSGETDYTGRISKIGDGAVRTALYEAAHVMLVKPVKGCSQLKSWAMRIAKRAGMNKAKVALARRLAVIMHRMLADGTTFNVAAAT

SEQ ID NO: 150231 - protein, 436 aa, unidentified
MTHSTEAVLAIDFSLDRLDVSLRADEATWGWPHRAYANNGPGFQQLKTDLLAVLGQQAAVRLTAVGESTGLYWWHAFYQLSHDDELARYDPSLALLNPLYVKRFRQALSQQDKSDQLDPLLIDRYYRAVGIKDHYQFNDRYLSLRFLSRAYCRVTHCLAAEKAYLLALLFLTASEYQRLKPFSDLSGVTSGQVLDEFSDIQALADLSLETLTAHLQTYAGQTLPDPQRNAQRLRQVAQDSYPLLLALAQTLHLIVQQTLAQIRFLSDNQKAYRQQITQALTELPEADLALAEPGLGPILVAGCLSEIQNTQRFITGSKFDRQLKTDRPKTYRDGQAAVAKLAGLWWPTHDSGRFHSQDNPLSRERNPYLRYWLVQAAHTLQRYQPDYHTYYWRKYHETQKHQHKRALVLTARKAVRMIFALLHKGQLHCREEGLLT

SEQ ID NO: 150232 - protein, 441 aa, unidentified
MPRRIGLDVHREFAQIAVWEEGLVRQAGQVATTPEALRTLADSLLPTDEVAIEATCNTHAIVRLIAPRVARVVISNPMKTRAIAEAKVKTDKVDAEVLCQLLAADYLPAVWMADERTQALRRQVARRAHIVKQRTRLKNQVQSILHRNLVPRPPVADLFGIKGRCWLANQPLPPDEELTVEALLRQLDFHGQELRIIDAELGRVALEREEVKRLMTIPGVDATVALSIVAAVGDFHRFPRPEQLVSYLGLNPRVRQSGGAPASHGRITKHGRAHARGMLVEAAWVAVKTPGPLRAFYERIRSRRGMQIAVVATARKLAVLCWHLIIKGEDYAFQRTSLTQQKLRKLELRAGMPSRRGQKGKAAGYSLKEVRRRERELAEQAEQAYRQLVADWQAKAPKSKPGVAAANGTRVSRPSAGQAARQASVPEPALRSGVDHALTEA

SEQ ID NO: 150233 - protein, 355 aa, unidentified
MNQEKYIGMDVHQATISVAVLDSSGKLIMECILETKAATILEFIAGLRGTLSITFEEGTSAAWLHDLLKPHVSHLVACDPRRNALLKDGSKSDRIDARKLAELLHANKLHAVYHGEHGVRTLKELGRSYLTITKDLTRVMSRIKALYRSWAIPCSGATVYAPRHRDEWLAKIPHPGVRLRAERLYQQLDVLQPVRQEARRDLLAESHKHHAVKLLRQIPSIGPIRAALLVALLQTPHRFRTKRQLWAYSGFAVEIHDSGEYRYVRGKLQRNRERITVRGLNRNHNHDLKNLFKSAAQSASTRPGPLCDFYVALVEKGMRPTMARLTLARKMAAITLIIWKKGVDFDAKQLNQQAA

SEQ ID NO: 150234 - protein, 344 aa, unidentified
MNDMIIGVDLAKSIFQVHGALMATGEIQFKKKLTREQFRVFMPKLAPSVVIFEACGSANYWAGQMEAMGHQAKLIAPQFVRPFVKRHKKNDAADADAIIVAARQPEMRFVTPKTVDQQARAALFRGRERSIRQRTEDVNALRAILYEHGHVFPIGIGHLKRMQDLVETETCDLCGIVRDECRDLLAQIAEKTARITSRDTKLKELGAHADTARRLQTLPGVGPLTALAVEAFAPDMSQFKRGRDFAAWLGLVPRQHSSGGKERLGRISKAGQADIRRLLIIGAMSRIIGRARHKIPAESWIGRILERKPKMLVGIALANKMARQIWAMLTKNEDYRDPALAAVA

SEQ ID NO: 150235 - protein, 348 aa, unidentified
MAHFVGLDVSVRETSVCVVDAAGKVVLEQKVPTEPADLIALLTSLGQTYGRIGIEAGPLSQWLVNALAAADLSVICVETRHMKALLTAQQINKTDRNDARGIAQMMRVGLFKPVHVKTLVAQEQRMLLTSRKLLQRKLLDVECDLRGTLGNFGLKVGVVSGGRYEARVRELVASFPRLAAIAEPLLNVRRVMRQQFAILHKMLLDTVRGDPICRRLMTAPGVGAVVALTYRATVDQPQRFAHSRAVGAHVGLTPKRYQSGETDYDGRVSKCGDALLRTMLYEAAQVLLTHGRKWSWLKAWGMRVAQRRGLRRAIVAVARRLAVVLHRMWVDGSEFRWSKENAAVPAVV

SEQ ID NO: 150236 - protein, 501 aa, unidentified
MLVHAPCPSRFRYNTKHEPPRWGGYVTLKLCQSSMAWGRRGLVAGRISVTTWLGIQSEDISLEVVHPDAAGIDIGNESHYVAVPPSRNSQPVRRFGCTTAELKAMADWLEQCGIRTVAMQSTGVYWIAVYDVLEQAGLEVYLVNARETKNLPGRKTDVQESQWLMKLHTYGLLRNSFRPSQEIRMMRTYWRQRNDLVQSAGRHIQRMQKALTQMNIQLANVLSDVSGVTGQAIIKAILGGERDPHKLAAFRNSRVKASEEQIARSLEGNWQEDLLFVLKQEQDGYEFCEKQMAECDRQLNHYLKQRADRSHGAPLPEEKRKGRLKKKSGNKPQFDLRTGLFRMSGTDLTRVDGIDVITATTILSEAGWDMSKWVTEDHFVSWLRRCPDNRISGNKVIGKGRLPTNNRVTIALKMAASTLRLSDTYLGAQFRRFRTRLGAPVAIKAMAAKLARLVYRMLCYGMKYVDKGAALYQAQHRHLQIKQLNRKAASLGYQLIPVPAA

SEQ ID NO: 150237 - protein, 424 aa, unidentified
MNLTQNDRLKQVTSDTLIVGVDVGSQTHFCRAFDWRGFELSRRVFKFSNTGMGFLTFLRWTEELMNKTEMKKVIVGCEPTGCYWLTFQKFLQDHDIQLVTVNPFTVNRSMELDDNSPEKSDLKDPKTIALLVKDGRFSTSYLPSGVYAEIREASVCRDQIMKQHVRLSNQIQGWLQKFFPEYFECYADWDSTSGLMLLKEAPLPQDILKIGAGGVNQIWRDAKVRAAGIKRAQTLVEAAQNSVGLEAGEAARLEIWVLVNDYILKAEQLKRLDEYLEEKVKEVPNVEKLLAIKGVGMSTVIGFIAEVGDIGRFTDPKQIQKLAGLEIVKKSSGKKKGQPRISKRGRRKLRRTMYESAKALMLWNPAFQDVFLYYRNRTRNPLGGMQAKIAVACKAIRVFYVVLQTGCDFDEEKFRRDIIRPEAA

SEQ ID NO: 150238 - protein, 402 aa, unidentified
MNAVGIDVSKGKSMVAIMRPFGEIVSAPFEIKHTASGINSLVELINSVEGESRIVMEHTGRYYEVLAHQLSEANLFVSAINPKLIKDFDNDSLRKVKSDKADAVKIARYTLDKWQNLKQYNVMDELRNQLKTMNRQFGFYIKHKTAMKNNLIGILDQTYPGVNTYFDSPARSDGSQKWVDFASTYWHVDCVRKMSLNAFIDHYQNWCKRKKYNFSQSKAEEIYGKAKELVPVLPKDAITKLIIKQAVDQLNSASTTVESLRTLMNETASKLPEYPVVMAMKGVGTSLGPQLIAEIGDVSRFTHKSAITAFAGVDPGVNESGTYEQKSVPTSKRGSADLRKTLFQVMDVLIKTHPQDDPVYQFLDKKRAQGKPYYVYMTAGANKFLRIYYGRVKEYLSSLPES

SEQ ID NO: 150239 - protein, 401 aa, unidentified
MNAVGIDVSKGKSMVAIMRPLGEVVAAPFEVGHTATELNELAKFILKISGETRVVMEYTGVYFEPIAMALYDAGLCVCVMHAQLIHNYGNNTIRKVKTDKADAIKIANYALDNWDKLKPYTPIDELRRQLKAYSRQYCKFNKLKTMLKNNFIALTDSTFPGVNELLSSPPRKSDGHEKWLDFAMKFWHAECVCSLSQKAFTERYRKWCHKAGYYFLESKVEDIYAAACGHIGLLPKNENTKQLVQQTIIQLTSICSSLSVIEYKMTGLAGLLPEYPVVMEFRGVGRILGPQIMAEVGDVLRFEKKESLVCFAGLEAPPYESGKFESHNRTISKKGSPHLRAALFQVMDCLLKTQPANDPVFQFIDRKRSEGKHYYSYMCAGSAKFLRIYYARVKEYLSALE

SEQ ID NO: 150240 - protein, 461 aa, unidentified
MAKQPGKRKKDGAKADATVGLPPLNLHAAGIDVGSAEHYVAVPPDRDAEPVRKFGSFTADLHRMARWLKDCRIKTVVMQSTGVYWMALYDVLEKHGFEVNVANARHTKTLPGRKTDVQECQWLQKLHTFGLPNNSFRPAEEIRVLRGYLRQRENLVAAAATCIQHMQKALTEMNIQLANVISDISGTTGLAILYDIVRGERDPYKLAMRKHSRIRASRQEIARSLEGTWRQELLFVLEQSLDLYQTYQQKIQTCDERIDGQLRSMEPRIDPLSEPIPEPRRGKDARGHQSGFDLRGQLYRITGVDLTRIDGIEVQNAQTIVSEVGVDMSRWKTEKHFASWLGLCPDNRSSGGKVLKRGTRHVVNRASTALRLAASALLRSQSALGAKFRRLRSKLGAPKAITAMAHMLARLVYRMLKFGHDYVDRGIAFYEARYQQQQLQRITKQAAALHMQLIPLTRVVS

SEQ ID NO: 150241 - protein, 414 aa, unidentified
MFAVGVDVSNGRSTVAVLGARRTVVVKPHEVPHTTDGFAELTERLRGLEGEVRIVMEHTGRYYESFAMSMYRAGFFVSAVNPLAIKDYQEGISVRKVKTDKTDALKIAQFAIDKWEILPHYTPMDTIRYDLKTLHRQFQLSSKTKTALNNNLIALLEQSYPGANRYFDSPVRPDGSQKWVDFVDTFWHVDCVASISRKAFVERYQKWCKRHGYNFSEAKAGEIHEDARQKFPLVPKSDTCKLLVREAVAQLNAVSRTVETYRAEMDRLASQLPEYETVMAMAGVGKSMGPQLMAEIGDLRRFPHQKSLVGFAGTDPIKDDSGDKVSDSKPSSKRGSPYLRKTLFVIMTILLQLQPPDDPVYQFLDKKRSEGKKYYVYMTAGMTKFLRIYYGKVRDCLKEKGLWEHPTVDEVNPV

SEQ ID NO: 150242 - protein, 346 aa, unidentified
MIDTVTGETRSRRLAHIKEDFNNFIGDRAGTRMVIESCRDWSRTYELVEDLVEEITLAHPLKVKAIASAKIKTDKIDSHVLARLLMANLIPQAHLRKGDNRIKQRLIRHRAFWVVMRTRVKCRIHDLVDSQLWPPEVLKAKPRGLFSKQGMKWLASLEWAREEDRMMVESYLRVMEAINKEILVSNDMVEEIYQKDREAQLLTTIPGIGVTLATLISTEIDGIDRFPSPSKLCSYAGLVPSTHSSGGKTYHGKITLEGNRWLRWALVEAAVPASYADAAIKERLDTFRKKKGANVAKTAMARWLLEVVYHVLKERRPYTTAYNKRVKERSRLLRRLANPQKVDCAV

SEQ ID NO: 150243 - protein, 392 aa, unidentified
MVVSVGIDVAKDKHDCFILNSEGEVLADVFTIPNNMDGFNCLLQTIRDCTTPQDIIKVGLEATGHYSYNILGFLLDNGLATYVLNPLRTNLYRKSLSLRKTKTDRVDARTIAAMLLSDIGLKPYTDTAYHNEELKSLTRYRFNKVKERAKLKSSVSRLVCILFPELEKLVPTLHGASIYALLEEFPGAVQAAGAHLTRLKYLLSDASRGRYGRDMAVEIRDAARNSIGSRMPAKSLELQHTIRLIRELDAEIEKIETAIQTIMDEIHSPITTIPGIGYRMGAMILAEVGDFSRFESPDKLLAYAGLSPSTYQSGQLINCYPHMEKRGSRYLRYAIYNAAKYVCLWDPTFAAYLANKRAEGKHYNVAISHAAKKLVRLIFALEKSRQPYNLAA

SEQ ID NO: 150244 - protein, 329 aa, unidentified
MSKNSIVCAGIDTSKLKLDVAIRGVKGQLLELLVENTADGHEVLSAWLREHKVKRVGIEASGGYEQAVVLCLRKKKFVVVVFQPKQVRAYATFNLQIAKNDKLDAALIADCTAAIKEINAPPDERVTAFAKRMTFIDQITEDVARIRTRCESCRDKQILHYWREEIARLERRKKAELKALAAAIREHDDLSKRLDLIESVDGVGLLTAVAILVRMPEIGTVTREEVAALAGLAPYDHESGNHVGERHIKGGRGRLRKSLYCAALPASMRWNHQLVSMYRRFIAAGKLHKVALVACARKLLIFVNTVVERGSPWEKSRAPGKFELGLRAA

SEQ ID NO: 150245 - protein, 346 aa, unidentified
MEHHVGIDVSLELSSLCVLDATGKVMREAKVASEPEALVAFLRGLGVTIVRIGLEAGPLSQWLYDGLHEAGFEAVLLETRHVKAALSAMAIKTDRRDARGIAQLLRMGWYRPVHRKSVPSQEVRALLAARKQMQIKAMDLEQTLRGLLRGFGLKVGDVSRGKLAARIRELVSGHAMLGRIAEPMLTAREVLWSEFTKLHREVLSVVKEDQVCKRLMTVPGVGAVVSLTYRAGVDDPSRFAKSKSLGAFFGLTPKRYQSGETDVTGAITRAGDASVRTALHDAANALLTRATKFSTLKRWALDVAKRRGMRRAKVALARKLATVLHRIWVDGTEFVWGKDPAAGAAA

SEQ ID NO: 150246 - protein, 415 aa, unidentified
MDTTYASVAGLDVHHKTIQCAVRRQESGKLFAQSRSFGTMTCELRALADYLEALGITHVALESTGVLWKPIWNILEGRFTLLLVNPRHLKKVPGRKTDVSDAQWIAQLLQFGLLKGSFVPPRAVRDLRDLTRHRAQLTAEHTRVANRIHKLLEDANIKLGAVASNILGVSGRAMLEALLDGETDTIKMADLALSSLRRKIPQLRLALEGKFTEHHRHVLRRLMAHLEFLETETCLANESISRVEEQLLPRSDFKRLDAIPGLNRVSLQAILAEIGPDMSAFPDEHHLCSWAGICPGNEESAGKRLRSAIRRGNRWLRRALGEAAWAASRSKNSYFAAQYHRISPRRGKKRALIAVAHSLLIVIYHVLKGHKEYKDLGRDYFDRHGSERLERYLIHRLEALGHEVILRPQTPDQSA

SEQ ID NO: 150247 - protein, 346 aa, unidentified
MDQITRIGMDTSKHIFQLHGVDAAERPVLRRKLRRNEVLAFFAKLPPTVIGMEACGAGHYWARELRKLGHEVKLIAPQHVKAYVKRNKNDGRDAEGLCEAMSRPTMQFVPVKTEEQQAALMLAGVRQQLIARRTQLGNAIRGYAAEFGLTAARGLDKLDPLLARIAQDESLPEPAREMFAVQGRDYARLQIELKAIEAKLLAWHRANADSRRLAKIPGVGPIGATALVMKAPDPRLFRSGRHFAAWIGLTPKDHSTAGKTRIGKITRAGDEMLRSVLVAGATAVIQQARNGRGRPSPWLLALLARKSPKLAAVALANKIARIAWKLLTTGESYDGARMLGASALAA

SEQ ID NO: 150248 - protein, 310 aa, unidentified
MIIAPGFVGIDVSKHHLDIFDAAVGTAARLANTAAAVAELAHDWARRDAFVLFEATGHYDLDLRHALTAAGVRFARVNPARARDFARAAGFLAKTDAVDAEMLAAMAQCLQLPAEKAGLAARERLAALNRRRDQLVANRQQERTRQRECSDPFSRQSIAAHLAWLDAAIEAIQAQIAAAIAAEPELEHDRRLLSSAPGVGPVTAATLLALMPELGRRSPKQLAALAGLAPFNNDSGTRRGQRSIRGGRKRVRDALYVAAFVAARHAPRFKAFFKTLFEAGKPRKLALIAVARKLLIVLNAILRDRQPFHA

SEQ ID NO: 150249 - protein, 385 aa, unidentified
MNRNRTVAGLDVHKDSVYLCIMGYNESVIFQKTYGVLTTELRQMRDDMLCHGVTECAMESTAVYWVPVWNELCGSMELKLVNPYFIKQLPGRKSDVKDAQWIAECVLKNLIKGSFVPEPVVQDMRKLNRRIMDLNEDMTYNCNKLDAALQRCGFRLSNYVSSTTSKSYQSVLQAIIGGQTCPEELVKLVHGRTLNKHGRDIVKDAVTASFSKTDRQIEECQKELTALCKEHFPKQYERLQTIPGVKERAATAIIAETGIDMKMFATAACLVGWCGLKPRNDVSNGHYKSRKVTHGNRYLRQILIEIAWAASRTRNCFFSNFSYIQTTVKKKSKMKIQVAIARKILVAVWHMLSKEEDFIDVYLKRLEEQRAMEENIRLLESFMAN

SEQ ID NO: 150250 - protein, 415 aa, unidentified
MYYVGIDIAKSFHVVSVIDDEETKVINKPFKINNDAKGFEKLLIILDSVTLDKSEFTIGLEATGIYGENLQEFLKSKSYLVKLLNPFQTTRYREQITLKKVKNDEIDSLVIALLLKSGKFSSGYITDDEYQSLRTLYRNRATIQADMKDVKKRILTQITVTFPELEGFMKPFSVTGLVLLDKYPTAHHYKHSSVDRIMKLFRHIQGNNFTQSKALQLLELSKESIYSGKAKDARAIAIRSSIRLLQMYLSELDIIEAEILSLLKNSSVETTVDEAGIEIQKADTLLANLKTIPGVAEKTIAALISECGDLTRFPTIPKFIGYLGLFPNENSSGNSKYVGHLSKRGSPLAKHALYMSAVSCLIHNTQLKQLYDTKRSQGKSKKEALIAVSRKIATIIYSIFKYNVPYNPNRVFAKS

SEQ ID NO: 150251 - protein, 387 aa, unidentified
MPVSAHRSEGTAAIRTDLGAIFVSLELSQSKWVITSLSPSGGGKMSKHAVAAGDVAGMLGCFVELKRKARARTGRCFPIIVIQEAGLDGFWIHRVLEAEGIESHVVDPASIAISRRRRRAKTDRIDGEALVRALLAYQRGEPRVCAMVRVPTPEEEDRRRLSRERQALTSERIRHVNRIKGLLFSQGVSDYEPLRRDRRKQLEERKTGDGRPLPAHLKAQIGRELDRLELLLEQIKTIEAARDAMLAATQAVSPAPAMLLTLKGIGPEFAAVLWSEGLSRRFDNRRQVAAYAGLAPTPWQSGSVDHDQGVSKSGNPRLRTTMIQMAWLWVRHQPHAALTLWFRDRVKQNGGRLKNSTIVALARKLLVALWKYVNAGVVIEGAVIKTA

SEQ ID NO: 150252 - protein, 320 aa, unidentified
MNSSVLGLDVGKYKISACLLRENKKRDKTFSNTAAGHTAVVQWLEQNNAGSVHACLESTGGFSEALATALHDAGHQVSIVNPSRIKAFAKTEMVRTKTDKVDAALIARFCQKHEPAPWTPPPAEIREIQGLSRRLDALIDMRAQEANRLEAPGNVDAVRASIRQTLEWLDAEIAKIQKQLHERVDDDPDPRNKRDLLLSIEGIGGRTAERLLAEMPHLEEFRTAKAVAAYIGLSPRHWQSGTLRARTRISKIGNSRIRGALYWPTIVAMRKNASIRRFSQRLIAAGKPMMLVITAAMRKLVCLAYAVVRSGCPSVAPRAA

SEQ ID NO: 150253 - protein, 343 aa, unidentified
MQAVKTIGLDIAKSVFQVHGVDTDGQVVIRRKLKRRYVLAFFQKVPSCLVGMEACATSHHWSRELQALGHRVRLMPPAYVRPYVKRQKNDAADAEAICEAVTRANMRFVETKTIEQQSCLVLHRTRHLFIRQQTSVINAIRAHLAEFGIVAPVGRKGVEQLLDAVANSRDQRIPAIARACIAALGAQLRALKGQILEFDRQIMFWHRSHETCKRLDEIPGVGPALATALVASIADPKAFRSGRDFSAWIGLVPRQHSSGGKERLGSISKQGDRYLRSLFMAGALAVIRYAKIYGSKHRPWLTALLARRPTKVAAIALANKLARMVWAMMSRGERYKEPVALAA

SEQ ID NO: 150254 - protein, 340 aa, unidentified
MDTIGLDLHKRESQLCVLTEAGEIVERRIVTSRERFTAVLGSQPSARILVEASTESEWVARHLESLGHEVIVADPNFAPMYATRRRGVKTDRRDARTLAEACRLGAYRPVHRASAPQRHVRAQLAVRDALIRTRTRYVNVVKALARRDGLRLPPGNPVHTEAKLAALPLSAPLAGELAPLRALLDPLNQEIAGADERLAAVAAADPVVRRLQTAPGIGPVTAVAFVATLDDVTRFASAHHVAAYLGLTPREYSSGEQQHRGRISKTGNARMRYLLVEAAWRVLRTADPAAAALRVWADGIAQRRGRSVAAVALARRLAGVLYAMWRDGKDYQAPPPAAAP

SEQ ID NO: 150255 - protein, 374 aa, unidentified
MKKDGEAFVGIDTAKLRNAVAVAEAGRNGEIRYLGEFDNTAEAVAKLARKLSERHEVLHFCYEAGPTGYGLYRQIQSLEHDCIVVAPSLIPRRAGERVKTNRRDAQSLARLLRAGELTAVWVPDETHEAVRDLVRTRAMAVEDYRRKRQHLSAFLLRLGRSYKGNATWRGRHLRWLDEQSFLHPAQRLAFQETLNAIRSAAERIDRLDAALLEIVPSWTMAPVVAAFQALRGIGFLTATILVAEAGDLRRFDHPRQLMAFLGLVPSEHSTGETRQRGGITKTGNMHARKALIEAAWTYRHPARIGDHHQRRQADLPESVRNIAWKAQARLCGRYRRLMAKGKKATVVTVAIAREIAAFLWDIARQVAPIPVAGP

SEQ ID NO: 150256 - protein, 347 aa, unidentified
MNISVVGIDLAKNVFQLCALGTNGSVVWNRKVTRSKFAAMLADLPKSALIAMEACSSSNYWGRYLTERGYRVALIPAQHVKPFAKRQKNDANDALAICEAATRPGIHFVSVKTIEQQDIKTLRTIRRRVVQQRTATGNQIRALAGEYGVVFPIGLRRLISAVPAALEDAENGLSIIARALLSQSLHRLHEMDRLVTDLTTQIGQLCKQLPSYSALQSIPGMGPLVSAALISEIGDGRQFKNGRQMAAWLGLVPRQYSSGGKLVLGSITKHGNNDLRVLLVHGARAVVRFVQRRSDPLGEWLRGLIARRGRHRAIVALANKLVRIAWSVLATQKRFDVALAFAPMRAA

SEQ ID NO: 150257 - protein, 387 aa, unidentified
MSTVVIGMDPHKRSATIEVMAGDESVLGAGRFGTDVAGYRAMLAQARRWPDRTWAIEGCQGIGAHIARRLIADGERVVDVPPKLSARARVFSAGQGRKTDATDAHSVALVATRMSGLRAVADDQQLAVLRILADRRRSLGEDHTRMVSQLHRLLLELVPGGAQVSLSAAQARALLAKVRPRDAAGKIRRRVAAELIGDLERVYQRKKAADRELRELLAATGSTLTQLHGIGPSGAARLLVEVGDIARFPDKAHFASWNGTAPIDASSGEHIRHRLSRAGNRQINRALHIMAVVQLRNPTEGRAYYDRKVAAGKTPMEAMRCLKRRLSDVVYHQMHSDATAAATGPGGHSGTTLQSSVTGLTPAAGSSDKPLPGPAGRQPKPLSLTPS

SEQ ID NO: 150258 - protein, 307 aa, unidentified
MSSSHRAPIFWVGLDVHKDSITAAVFRDRDPEPLRVDRLPYDLRKIRRYFERLQSEGSARACYEASGAGYVLQRSLTEWGVECHLAAPSLIPRRPGGHRKTDRRDAIKIARDFRDDRLVLIHVPSEADERVRDPVRCRETFQREIVKSRHYILKFMRRRGFVFREGTHWTVRHLNWIRQVLQPGRLMAHVGLVPGEYSSGDRRRLGGITKAGNTRVRHVLIQSAWHYRKRPAVGASLRQRQKGQDPAVVRHAWKCQHCLFSLFHRLAARKPKQVAATAVAREMVGFLWAVMRDVDVSQFQQEVNADA

SEQ ID NO: 150259 - protein, 347 aa, unidentified
MNYCGIDLAGVSSYAFVTDEKGNKLWSGPIATEKAAFERLVKKFAGGGLSIAIEAGNQTAWVHEELVKLGAEVTVVNPTKVKLIAESRRKTDKIDAKILCELLRLNALPHPVHMPGPQARELRGLLVARRQLVSARSKLSNVARGMLRQTGVRLPAGGLSSLAAWKRLLAGGFDQEHLLIIVAAYYDSFLALTKSIRELDRQLAQREKNEPRVQRLKTMPKVGRIASLTFLAAVDDVNRFSSSRKLVGYSGLAPTVRQSGERTEYGAISREGRSELRAVWVQIAHLVARDTTKTTQPLRSWFNRVAKKRGKKTALVALARRLLVIAYQLLRTEQDFDVGRLKKKRAA

SEQ ID NO: 150260 - protein, 458 aa, unidentified
MSKAQAKATARPRRRLSLINEAAAGIDIGATFHVVAVGEDRCEQPVRSFPTFTADLRALADWLSEAGIQTVAMESTGVYWIPVYEILEARGFEVLLVNARDAKNVPGRKSDINDAQWLQQLHQYGLLRASFRPREVLVRLRVILRHRERMVEYAASHIQHMQKALMQMNVQLHHVVTDITGVTGLRIVRAICAGERDPAILAQFRDSRCKSSTDVIRAALTGHYRSEQVFALRQALELYDVYQAKIEECDRELETALSQINRDRSVAEEPLTKRRDAGGRNEPHFDVRMALYTLLGRDLTQIHGLGAYTVLRLVGECGDDMTKWRTSKHFASWLCLAPGNKVSGGKLLSSKTRRSSNRAATLLRIAAVNVGRTQTALGAFYRRLAARAGKAKAVTATARKLAVLFYNAIRFGRDYLDPGADYYEERYRGRVIRNLHRRAAQLGLLLTEAPATAGSRVS

SEQ ID NO: 150261 - protein, 408 aa, unidentified
MSIVFGIDVSSRDSSVCVLQSGATREYKITNDTIGFKTLLIDLKEYAEHPQIILEATGVYSRRITRFLDEYDYDYVLLNPLKAKKEINQGLRRNKTDRNDAYHLALAQDQNQHQPNRKEPDVYHQLQSLSRAYEELTHDIISSKNRLHKYLQLTFPELETIFNNSRGVNYWYLVELFPHCQDVRNLEVSTIAKQIKDFKGYGINRAQKLAIKLKHLADLAYPAVDQDDPERDEVVYYANRLLRLTADRERRSEEMIKLAKTLPNRDLEILMSIPGIAEITDVRILAELGDIRRFSNPNKINAFVGIDPGRYQSGEKDSSLRISKHGNAVARKILYRAIGQIDLAAKTSPCHIADYYERKKQFSQTKGFKKIAIASIHKLLRTIYILIITDQMYDYNVANNNQKDFCRN

SEQ ID NO: 150262 - protein, 364 aa, unidentified
MKNYIFVGCDSHEKTLVNKVACNRGEAESRRFGAGRAGRQRFIDYLREKSRENQGAEVIVAYEASAQGFILADELGAAGFRCHVLAPTKIERSIKEKRSKNDARDAERLLDIVRGHYLAGNKLPAVWIPDHDTRDDREPVRARYDLIQKQVTVKTQVQMLLKRNGLEKPEGIGSSWSKPYRRWLEGLRTSASTATGTRQVLESLMRQLEFLEKEVESIDQCLQQLAGSERRRPIVDALMKEKGVGLITALKYATDIGNFKRFRRGRQVGAYFGLAPSSDESGDIKDRKGHITREGSPSARKALCQAAWSRVQHDRAERDFYSRLIRKNPKKKKIALVACMRRLAVRLWQVGLQVQLQMEAAANP

SEQ ID NO: 150263 - protein, 332 aa, unidentified
MNYVGIDVASKELSVVFGVNGKHRKAQSFENKAEDYKRLISSIQKLAGETIVCMEATGVHHFDLAVALSRAERIKVMVINPKAAHNFAKALNQRSKTDSIDADVLTSYAERMEFVPWVRPCEEALSLRALARRISAIGKIKAQLKNQLYSLTATEETPDIVIAQTKTLIETLEQQINSFRSSALEIINQNDEIQKKYTLIVSVKGIADASAVQLLGELLSLPAKLSVKQWVAYAGLDPRQFESGTSVSKRARISKAGNRYIRQALYMPALVACRSEPNVVAYYAHLQNKRGLKKIQAICAVMRKLLHAIYGMLHNNMPFDGDKFFKIKGANM

SEQ ID NO: 150264 - protein, 427 aa, unidentified
MHYTQNDKIRQATEGTIVLGVDIGSEKNYLRAFEPNGIEITKKAISFLNTLEGFKSFEEIVTNMTVPLAGKKIIVGVEPTGHYWFNFADYCQSKNMTVVTVAPQHVKHSKEMDDNTQRKDDRKDPRVIAKLVIEGRYCIPYRPKGVYAELRVAYNRRCEIVEAETRAKNRIRRWFDLYFPEYRKVYGSVAAITGMVILKQAPLPQDIVSLGVDGILQIWRANKLRAAGLKRAKTLFEAAQRSICPPDAGRAVRMELWQLLEEYEYIKKQLHEADIMIGIVTAEIPEVNELMKIPGIGLITAAGMISEIGDIRRFDDPRQIQKLAGLAIVVNESGKHKGQSEISRRGRKRLRKILFQAVLVLVRSNKEFKTIHEYFTTREKNPLKKKQSLMAVAAKLIRVCFGMVKNGTPYDPAKVLKDIRRAEPKVA

SEQ ID NO: 150265 - protein, 397 aa, unidentified
MYIVGIDIAKRKHEAAVIDGDGAVIIKPFSFTNNCSGYNRLLAMLAKAKLPLDEVSFAMEATGHYWLALFTRLQKEGFRVQVINPVQTNSIRSFYIRQAKTDPRDALLIAEVIRFGHFSESTLHPENIYELRELCRGRHAIVSMQADVKRKVVALLDQVFPEYETAFTNLFGDTSMAILQTCPTPKELSEMPLEELCHLIEVSSRKRFRMVKAQELQELARNSFGFAMAGDVFSTMIRLYAKHLVFLKQQVQEMDRKIAEIMDTLDTPITTITGIGPTLGAYILSEIGDIGRFSSAAKLAAYAGIDPTMRQSGEYNGVRNRMSKRGSPYLRHAIWLAASSAVLHDPALKLYFQKKRDEGKPYMASVGHACRKMVSIIYAVMRDNKAYTPYIPNEISA

SEQ ID NO: 150266 - protein, 417 aa, unidentified
MTSDSRRWFAGVDWASSKHDVTLTDGDGRLLGRRTIEHSGAGLAEMADWLTRKARALPVAIHVAIETPHGPVVETLLDRGFTVHAINPKQLDRFRDRFSVAGAKDDRRDADVLASALRTDSHAFRPIEPLDPVIMELREWSRMADEHSRDLRRYVGRLREQFQRYFPAFLTLGGDDDAAWKLALLELAPTPARAARLPRAKVARILKDHRVRCHDADAVLAILGAQPVAVSEPTVATASAHVLSLLKSIRLAAEQVKGANTMLDRLTDRLAASEEDAPGQTGQRDVTVLRSSPGMGRAVLATLLAEAPQAVRRRDYHALRCHAGIAPVTKQSGKSRRVVKRHACNRRLQNAVYHWARVAIQHDPASRFKYDALRARGHSWARALRGVADRLLYVLCAMLEAGTLYEVKHVTASTKSA

SEQ ID NO: 150267 - protein, 317 aa, unidentified
MANAAVYLGIDVSKDVLAVAAEPAARTWQVPNADAGIGSLVEELRALNPALIVLEATGGYEVAAVSALSAAGLPVVVANPRQIRDFARATGRLAKTDRVDALVLAAFAARVRPTPRPLPDEALRELEALLTRRRQLVEMVGAERQRLALARRIVQKSLRAHIAYLEKELDRTNTDLTRLMRASPVWRAADDLLQSVPGIGPVVAQTLVAELPELGTLGRRQIAALLGVAPLNRDSGRRRGLRHTWGGRASVRRVLYMAALVATRWNPVIRGFYHRLLALGKPKKVALIACTRKLLTILNTMLRTKQLWQPSLASTTA

SEQ ID NO: 150268 - protein, 413 aa, unidentified
MDVLHSRCCGLDVHKSSISACVLLREAGRVQKHQRRFGAMTQELQELAEWLRQFGVTQVAMESSGVYWKPVWNILEGQFTVVLANAQHIKNVPGRKTDQKDAEWIAQLLQYGLLRASYIPCEIIRDPRDLTRMRASLSQEASRISSRIQKVLEDANVKLASVATNVLGKSGRAMLEDIITGEDDPEHLASLALGHLRVKIPQLRLALQGKIRSHHRFLLRRLLDQIQFLEHEIALLDERLEDIGRQRPDLAQAVARWDTIPGIDQVAAWALLAEIGNNMAQFPTADHLASWAALCPGNHESAGKRLRGTTRQGSTWLCRMACQCAWAAARTKNTYLSSQFRRLAARRGKKRAIIAVAHTLIVIGYHLQKNQSNYEDLGGDYFDRIHSDGLKRYLVKRLQQLGHKVTLEPMEAA

SEQ ID NO: 150269 - protein, 384 aa, unidentified
MGSRAGNRAWLREWPSLRVMELETTESGWACSKHHRGTTMEHYAGIDVSLESASLCVVDATGRIVREAKVASEPDVLIGWFRGLEFTVTRIGLEAGPLSQWLYAGMREAGLPVELLETRHVRNAFKAMPVKTDRKDARGIAQLMRLGWFRSVHCKSLPAQEVRALLTARKLLQTKNHDVEMSLRGVLRGFGLKVGRTTPRTFVGRIRELVAGHATLSTVAEALLAARGTLFEQWQKLEKRLRSLAREDRRVRLLMTAPGVGTIVALTYASAIDDPGRFRSSKAVGAHFGLTPKKYQSGETDVTGRISKIGDGGVRTALYEAANVILTRPVKGSTLKSWGMRLAARTGMRKAKVALARKLAVVLHRMLADGTSFLANKAAAAVAR

SEQ ID NO: 150270 - protein, 386 aa, unidentified
MLKIERAATAIQTNLAAVFVSMELSRSTWLITALLPGNGERMSKYSVAAGNVAGLFDLFSKLREKSRGKTGHDWPIITVHEAGLDGFWIHRVLMKEGIESHVVDPASIATPRRHRRVKTDRIDGEALLRVLMAFKRGEPRVCSMVRVPSPEEEDRRRIGRERKALMVERISHITRIKGLLFSQGITDYEPVRKDRRQRLEELRTGDGHPLPAHMKAQLSRELERLELVLTQIKVIEDERDALIAAQTTEEKPAPVTMLLELKGIGAEFANILWSECFYRHFDNRRQVAAFAGLAPTPWQSGSIAQEQGISKAGNPRVREILIEVSWLWLQNQPNSALTKWFKARVERNGGRMKKSTIVAFARKFLVSLWKYVTSGIPVEGAAMKKA

SEQ ID NO: 150271 - protein, 419 aa, unidentified
MEQITEDDEIVARVAALDVGKATLVACVRVPGEDKPGRLQEVRTFATTTAALLELRDWLVCLGVTLCVMEATSTYWKPPFYLLEDAVGCWVVNARDVKNVPGRAKTDKLDAIWLCKLAERGMLRPSFVPPPWQRELRDLCRYRRTLVQERTREKQRAEKLLEDTQIKLSSVISDIFGKSGRDMLEALISGQRNPAVLAELARGSMRGKKSVLQEALTGQFRDHHGWLLRMMLDRVDALTAQIDALTGRIDEVLAPFAHQVAQLDEIPGVGKTGAQELIAEIGVDMTRFPTSGHLVSWARFAPRARQSAGKAEPGTTGKGSPWIAGMLGEAVPGAGRTKTFLGSRYHRLARKRGKQRAIVATGRSILVIAYQLLSDPGAQFADLGPDWHDRIAPLRRKRQLIAELERLSGKKVTLQEAAA

SEQ ID NO: 150272 - protein, 374 aa, unidentified
MLPQPTLYLAFELGQNTWKLGFTIGVAQQPRERTLPAGALDTLQQEIARAKQRFGLPEDARVVSCYEAGRDGFWLHRYLVAHGVQNHVIDSASIEVNRRQRRAKTDRLDVRKLLTMLLRHSAGEKKVWSVVRVPSVEEEDRRQLHRELTTAKQDRTRVINRIKGLLAGHGVQLTLQGDVDAQLDQVQQWDGSPLPSALRTRLKRAWQQVGFLTAHIQTLEAERRALWRRREDPGIAQVRQLFTLRGIGVNSAWLYVMEFFAWRDFQTPKQVGALAGLTPTPYQSGQSRRALGIAKAGNRHIRAMAIEIAWAWRRFQPDSALSQWYERRFGAGSARLRKLGIVALARKLLIALWRFLKTGVLPEGAVLKTAAPRR

SEQ ID NO: 150273 - protein, 367 aa, unidentified
MKKVSTVAAKPSKKMSQQKLTVGLDLGDRNSWYCVLDESGQIQLEQRVRTNAKALREVFGEMPHQRIALEIGTHSPWISRLLSELGHEVIVANARKVRLIGESRKKDDRLDAQTLARLARIDPKLLYPVKHRSEQAQADLMMIRARAGLVRARTGLVNTARGLAKSYGERLRGCNVRNMNPEKAEGLSPQLQMALEPLLGCIESVSEQIREYNQRIEKLAQDSYPQVALLKQVKGVGTLIGLTFLLTLEDPHRFRKSRDVGCYLGLQPGRRNSGRSEPQMHISKEGDPYLRTLLVQGAQHILGPFGVDCDLRRWGLKLAERGGRNGKKRAIVATARKLAVLLHHLWVSGEVYEPLHNHRATTVAAAA

SEQ ID NO: 150274 - protein, 429 aa, unidentified
MTKTYILKTQTVPADRSAVETYLAPPPPSKGKIIGLDCHPDTFTAALFVGQTPHDARKIGSRENLSLDALLKWAAAELTPQDIILMEAGSNSFELCKRLGNLGLKACVLESCHVGKHAKTYADNDKMAAARIALVYLAGNAPCVWVPDEQSRERRELLHAYRKAVGDHTAATNSIKSYLNGRGIRLGKHSLEDKATTAWIFEQAEWSGLQKNILTEHLANITESKERRKRLYRLIAAEMAADPKMMRCMKVLGVGIVSAFALLAVIGDIGRFHSPEKLVAYIGLNPGQRQSGKGKDIRLGVGRRGRGDIRNLLIQGAHAIMRSGRNTPLGQWGWKLFTRKGNRNVAVAAIARKLLVQVWHLLHGNPPLALESDKSFRLKLQKLAVAIGTTLRAGIGLGKTLEDSIKTLLLRCQSHPEPSASPCETPQPA

SEQ ID NO: 150275 - protein, 334 aa, unidentified
MLYAAIDIHKHAFQAAVLDPETGSVVEARFAANRECLGRWAEEWRGRVAAVAIEATTGWRWVWRELSARGFDVRLAEPVQARALLGRRRSAKTDRLDARWLARLLAKEMLPESWIPPEEIQRLRDRTRLRKTLAEDQRRWGQRLHAFLLHEGWPCAKSRLLTPEGMRWVAALRLGAHARLQVDSLLAIIAALEVQLDTVDGELRRFARTDARCQALQSIYGIGPILACHLLAEIGEACRFRRAKQITRLAGLDPVVDESGETRRRGHLAKAGSPQLRWALVEAAVHANRPNAPDLGLYQAVRDRRDTTVARLSVARKIGKRAYHVLRELELAAA

SEQ ID NO: 150276 - protein, 343 aa, unidentified
MEQYAGIDVSLESVSVCVVDADGRIMREAKLACEPEALITWFGKLEVDMARIGLEAGPLSQWLYARMREAGLSVELLETRHVRDAFRAMPVKTDRTDARGIAQLMRLGWFRSVHCKSLPAQELRAILTARKLVQTQRHDLEMSLRGILRGFGLKVGQTTPRSFEARVRELVDGHPTLTVVADAMLLARAVLVEQLGKLQKRLVSLARQDMRARLLMSTPGVGVLVALTYAAAIDDPARFRSSKAVGAHFGLAPRKYQSGETDVTGRISKIGDAGVRTALYEAANVILTRPVKGSSLKSWAMRVAKRAGMRKAKVALARKLAVVLHRMLANGSAFVAGKAAAKA

SEQ ID NO: 150277 - protein, 413 aa, unidentified
MEVLYARCCGLDVHQRVVVACLSLVEAGLRHKEVRTFGTTTRELISMRNWLIEAGCTHVAMESTGVYWRPMYQRLFGFFELVIANAQHLKAVPGRKTDVKDAEWLADLLQHGLLSPSLVPPQDQQELRQLTRLRLSLTQERSQFVNRIHKLLQEGGIKLTSVLSDVMGVSGRAILEALASGESDPERLASRAHQSVQHKHEALVEALVGDLREHHRFVLRELLTLTQSVDRSIQHVEEEIEQRLRPFEALLERLCQITGVSRHILQVLLAEVGTDMKRFPDAAHLSSWAGVCPGNNESAGKRRAGRTRPGNHSVKVALVQAAHAAAHTQTYLGEQYRRLQHRRGAKRAALAVAHSILVMFYHMMVTGHPYQEKGVEFFQQMDRHQVPDRLIQRLQGLGYQVLAPEMSQGPPAA

SEQ ID NO: 150278 - protein, 375 aa, unidentified
MSKANTLFIELDVHKETADVAWVSDKSAETVHYHGTIPTNLRSFDKLIKNQTVKTSKLCVIYEAGPCGFWLYRHLLRRGIECWVVAPALIPKAPGDRVKTDKRDAMTLARLARSGDLHSIYVPDERDEAIRDLIRCREDAMLDLRQARQRLKSFLLRHGHPCTGRQNWTEAYRRHLADINFPQSATKITFQHYIHIVTERYERLQRLELELQSLAESWRWYPLVQRLTVLRGVRFLSAMTLLAELGDLRRFASPRSLMNFVGLTPSEHSSGQRERRGGITKCGNSHARRILIESAWAYRFPARVSRELESRQQEHSIKLQTRSWEIQQRLCRRFHALKARGKEYNKVVTAVARELTGYIWDLAQGFDADMPQQAY

SEQ ID NO: 150279 - protein, 511 aa, unidentified
MSVATVEYLVIHDSFASMTSHWFTSCVLLREPLIIINLSLPRRPESSDIKGFWIPAFADLMIEKALFETNVTTCCSGELSPWCAESSEILPFGPAQPHLEGAGLKSLRSLAPLWITSEKDASCTLRTKPLKKKGKSHIFGYNLVAEQNPTERRLAMLNVSRIDFTGQPIYIGLDVHKKSWSVSIYSKHGEYKTFSQPPEVETLLHYLRHHLPGAQYNAVYEAGYCGFWIHDQLKEKGIQCIVVNPADIPTKNKERRTKRDRIDCRKLARSLRNGEIEGIYVPCRPKLEDRSLIRTRQSMVRKQTRCKNQIKGMLLFYGIDLLEEETRGHWSRRFIQWIEQIRMERGSGDIALKAHLEELSHLRQLIASLNRAILRLTRTEEYRPLVRLLKTVPGISTLTAMILLTELCEIARFRSIDELCSYVGLVPDIQESGEKEHVEGMTQRRHSQLRWLLIEASWVAVRKDPALMMAFDQYCKRMRKTKAIVKIARKLLNRIRYVLKNQAEYVPSVIQ

SEQ ID NO: 150280 - protein, 341 aa, unidentified
MEKFIRTAIDLGKNYFQVHGLESEGGRSISRKVKRSKMHEVYSQIEPCRVGMEACGSAHYWARQLTAMGHEVILIPPAYIKPYIKRGKNDVVDAAAICEAMSRPDMRFVPIKSADQQAVLMLHKTRELLVKQRTMAVNALRGHLAEFGIVAAKGIGRVDELLALAKADAALPLIAGAAVACMARHLEGLDLSIETVDEEIAKAHRQNPISRLLDEIPGIGTLIASATAASVPDPGVFKSGRDFAAWLGLTPRQNSSGGKEKLGAITKQGNRYIRKMLVTGATSVLRVAGKRKGALADWINALRARKPERLVAVALANKLARICWAIMTTGEGFRTDTYVKA

SEQ ID NO: 150281 - protein, 426 aa, unidentified
MEKNSIEQWSEYSYYLGLDWSRRHHNIVVVDHVGEIVLDLQIDHTEQGWGQLREKLLALAGEDLSGVAATIETNCGPAVEQLLELGCDVYPLNPKAAQRYRDRKAPSGGKSDRLDAFSFADALRTDGHGWRRLRLEDPKIQELRLVCRDEQVLIEQRTALVNRLRQALHEYYPAALEAFDDWTMETAWAFVEQFPTPQALEKAGKRRWEKFLHAHHLYRQETYQKRLDIFACATKFCGGRAVTNAKKMLAVALAKQLRVLEQQLKIYRTYIQQLFKDHPDHDLFGSLPGVGQKLGPRLLGECHQGRSPFKDIQALQCYAGTAPVRYQSGQLEKVKLRRACNKNLRNAVHMWANLSRRKSVWAQAYYQQKRAEGKSHACALRCLGQRWLKILWKMMQTNQLYDEQMHMQNQIKHGSWVMAMTQAENC

SEQ ID NO: 150282 - protein, 409 aa, unidentified
MRYYVGVDWADAAHAIWVVDEAGGMVTKRTVAHSAEGLSEWSRELDEWRAQGIELWAAIERPEGRVVDFLLDHGVVVYPLNPKALDRARDRFRQSGAKSDPFDARVAADFLRTDQGHLTALQPSSTAAQELKYMTEDCQRLIRQQTRLLNQLTATLKAYYPRGLEVAELPTALARAFLAAYPTPEALSQLTERRWQRWARAQHVSASRTAELWGVLHAPQLPVPAHVVRAKARLMHTLVAALEPVLAAVSSYRQAIDDFFAGMPAAATARTLPVGERGLLVPTLWARLGDAPGRWQSFRHLQAQAGSVPVTERSGRQHHIHFRYACDKTLRYILDHLAFRSLQTSDWARAYYDQQRARGHGHRQALRALGAKWLKIIFVMWRDDVAYSEEHHLATMARQQLRCSVTKSA

SEQ ID NO: 150283 - protein, 417 aa, unidentified
MFKIHRKNCCGLDVHKTWIYACIGITDANGRTEYKQERFSSFPKGLRDLDDWLTLYSCDEVCMESSGKYWIPVFNALEINHSVTLAHPKYTKPQKGNKTDRKDAKWICDLFMCDMIKPSFIPPPAIRHLRDLIRYLRKLTNMETGEKNRAQNCLTVSNLKLDDVFSDVFGKSAMSITRYMLEHPGEKFDVAPFIDRRCKTPVEQIQAAVDGAISAEQAVKLRQCLDHIDELEEHKDKIIQAILRIVEPFSDVLALIRTVPGFDKNPMTAITVLSEIGADMSVFPTDKHLCSWAGCCPRNDQSGGKVKCTRISRAGTYLKPLLVQVANALIRSTKHVEFSERYRRLKARRGHMKAVIAICRMLLTAIWNILSKHVPYTAEGFLQRRPVKPEKILTVAEGLYLLRLRGYEIRGISAGAT

SEQ ID NO: 150284 - protein, 428 aa, unidentified
MNCNTQNAKIASITEKTLIVGIDVGSETHFARAFDWRNYEYTKKPLEFSNTEAGFLTFKAWVEDIAEKQGKTAVIPGMEPTGHYWFALGKFLQDNGMKPVHVNPHHVKKSKELDDNNPNKNDRKDPKTIAALVNEGRFSYPYIPTGIYAEIRSLSNLRFQTQEELTRIKNRIARWFAIYFPEYKDVYGDLKTVSGRMVLKVAPLPEDIGKLGVEGVNQIWRSAKLRGAGIKREKTLVSAAEHSVGSKEAPEAARMELKNLLDDMDVYVSRLDELLVNIEEKLKEIPYVDKLMEIKGIGLVTVSGFIAEVGDIGHFDNPKQLQKLAGYAIVANDSGKHNGESRISYRGRKRLRYVLYEAAISLIGKNAEFKSIHEYYRTRKENPLKKMQSVVAVACKILRVFYTILTKGVDYDPVKLLGDIKRPQLQAA

SEQ ID NO: 150285 - protein, 412 aa, unidentified
MNSSQIGVGIDISAYKLDVAILNDTELLQTFCIAKNSAGFLKLLNTLDTLPTTPHIVFEATGVYSVSVATFFNQNSYDFDCINPLMARQLNARLRQNKTDRVDAIKLAEIATSRNYAVTSVKTDVYENLKVYDQWYENDNKDIVSAKNRVHRALQQVFPFVKFPVSNELPLYYELFHEFPHAALVRDLTTEQITAQLYDALHDAHPLTHWTKYAKILQQAAAESVPGLSRNSPEVMRLRQLTQRVLELMADKDSLVTQMTQLAEPLPEYRLYCSIPGISAISACQLMAEIGDSRHFQRASQVNAYVGIDLRHYESGKFVGTDTISKRGNAVARKVLYRIVQQIYRTCQNSNHFCHIADYYQKKKQSFARKTAQKMTKKFTIACIHRLIRTLIGLVKHGEVYDYNKAIMRSNI

SEQ ID NO: 150286 - protein, 386 aa, unidentified
MPQPKDDLSRSLVALDQHSSLIAVVELSLSTWLVGGMVPGIERDPLKKLVPDEDGLLKLLHRWRDEAVKAGHQINRMVVAFEAGRDGFWLARWLRSRGIEAYVIHPTSVSVSREHRRAKTDRLDIALLKRSLLGWLRGEKKHCSMAAIPTLEEEDAKRPNREREQLVGKRTGIVNRMKAALVRLGIRGFNPKLRKAPQQLATLRTPEGGTIPPNTLAELQREMAHLSFINEHIKQIEDARLIQLKQAPQHGSNAKVVQLGRINGIGIETADMLANEVFSRDLRDQRAVARYAGLTGSPDESGRRRREKGLAKAGNARVRLGMIQLAWRFLFHQRNSALTQWYRQSVAAGKKRTTVIVALARKLLIALWRFVTIGDVPQGVILRTAS

SEQ ID NO: 150287 - protein, 433 aa, unidentified
MKKINRANQRLNEITPNTLIVGVDIAKNEHWARFVDFRGIEHGQAIKFKNDINGFTAIVSEIDKLCNNKILVYPFNKVIVGMEPTGHYWKDLAQYLMKKGIKVVGVNPYHTKKSKELDDNSQTKSDKKDAITIARLVKDGRYFEPYIPEGVYGELRVLVTARTGLMKRYNAVKNTITAVIDEYFPEFDKVFKYPLKGKASIQILKECPFPAYVMKAGAEGVLRVIKAAVKKTVGMKKAKALVEVAKSSVGVNYGLVAAKIKLRQNIEELELINKQLDEIEQEMAVQLAETGYGDKILAIKGIGVVTAASFLGEVGDLKRFESARQISNMAGYNLTEDSSGKNKSGTGISKRGRKILRSVLYSMAMVCVAKNKELKKLYSYLITRKHNPLKRKQALIVISKKIVTIIHAIVTKDVTYQPEKVLGKVRREMLMAA

SEQ ID NO: 150288 - protein, 328 aa, unidentified
MAKNKFDLARSDTGELLVFPNDAQGIGKIVDLLRAAGPTVVVVEATGGLERALVDALLDAGLPAALVNPGRVRHFAIGMGIIAKTDRIDASVLMEFGRHGKSRLAQKRSENQVELDALITCRRQLTKTRTEQGNIRLATRSKSALKSIDTILKALDRELAALNEKIRKLIDSDDDFKHTDRLLQSVPGVGPVLSATLTAELSELGDSDRREISALVGVAPYNRDSGQYRGKRSIFGGRTAVRSVLYMATLAAMRCNPVLRDFAARLRRTGKVAKVVIVACMRKLLTLLNAMIRDDLQWDQLAVVRRLAPLARERNEAGFGAEPQVYFP

SEQ ID NO: 150289 - protein, 645 aa, unidentified
MFTVELYAGIRRAVMVDGLSRREAAKRFGVHRNTITKMLQFSVPPGYRRRERPASKKLGPYMAWIDKVLEDDRSVHKKQRHTAHRIFERLRVEEGFSGGYTIVREYVARATLRAREMFVPLSHRPGHAQADFGQADAYIAGKKVRFHYFCMDLPHSDGSFVKAYPAETAEAFCEGHVAAFDFFGGVPLSILYDNTRLAVARIVKGGRRLRSQMFAELQSHYLFDDRFGRPGKGNDKIPWGLPPAMLPVLARSAIEELIMEANVCNREPSLSNSVEEAAIFVSIELSRARWLVTSLSPNTNKFSRHSVPGSDIAELLRLLGELRAKAERRINAGVRIICIQEIGFDGFWIHRVLESNAIESHVVESASIAVSRRHRRAKTDAIDGELLLRTLMAFKRGEPRVCAMVVVPTPEDEDRRRLSRERKTMVKERIEHINRIKGLMASQGIAGFEPMRSKSHDLLDNLRTGDGRPLPERMKAEIKRELKRLELLRKQIAEIEAERDALLRPCETTEPSPGAQLLKLRGIGPEFASVVWQEGLYRQFANRRQLAAYAGLAPSPWQSGDMNKEQGIAKSGNPRLRTTMIEAAWLWLRHQPKSALTLWFQNRVKGDRGRHRRIAIVALARKLLIALWRFATLGEIPEGATLKIA

SEQ ID NO: 150290 - protein, 412 aa, unidentified
MRVIIERCCGLDVHQETVVACLLIGAPGDRPTKEVRTFRTVTRDLEVLRDWLAAAGVTHVGMESTGVYWRPVYAVLEGHFDLIVGNARHIRNVPGRKTDVKDAEWIADLVRHGLIAKSFVPPRPLREMRELLRYRRKLTESQAAERNRLLKLLETANIKLASVMSDVFGVSGRAMLRALIEGWVSVEAMADLARGQLRRKRSDLILALEGRMEEHHRFLLATQLRRLEAIEQDIATLDLRITERLEPYRTPHALLMQIPGVDWLVAAVLIAEIGVDMSVFLSVHHLSAWAGVCPGSHESAGRQKSGRARKGNVHLRTILVGAAISAARTKGSYLKDKFHRLKARRGAMRAALAIAHKILVSAYHMLAKGLPYRDLAEAYLDQIGQTRTVANLKRRLERLGYHVTLERTTQAA

SEQ ID NO: 150291 - protein, 327 aa, unidentified
MRQNIGMDVGKSNIDVCIFKQNQKPIFKKFTNCSEGFQHLLDWVLVTSSSNPNDILVTLEATGVYHERLASFLYASEFMVFIANPGKAKKFALSVGSIHKTDKGDSLMLARFGASHEEIPKLWMPMNPMAQDLKAMNHRLSALEKDFLRENNRLEAATIGNQSQLTIDSINRMIQYLFQEISICKADIDALIESNVVLRNNKKLLMSIKGIGPVMARELVSLFAYKDFKNAKQLAAYLGLIPQINESGIFKGRTSLSKNGPSRIRAKLYLAAVKAFTHNPDIKSQKERLLKAGKTKMQALGAAMRKLVQICFGVIKSQTPYTPQNII

SEQ ID NO: 150292 - protein, 331 aa, unidentified
MKFKIYVGIDVSKLKLDVFIRENQVHKLFKNDLNGFDLLVRWLQEQTRQPLDSILVCFEHTGLYSISLAIFLEESKIPFSMIPSLEIKRSLGITRGKNDFVDSKRIADFAYRFRDKISVTKLPLADIRKIHSLLTLRNRLVAHMKGYTVSRNEAMRVLQREELTELFSTYEQMIVTLKGEIKKLENAIKTVIQENKELRTSFNLITTIKGIGFIIASYLIVYTHNFTRFDNWRKFACYSGIALFDYQSGTSVHGRTQVSSIANQQVKKMLHLAAACALRTDTELKEYYHRRLADGKSRMSVINVIRNKLVARIFAVVKRGTPFVDIKKYMA

SEQ ID NO: 150293 - protein, 402 aa, unidentified
MGIDLHKQHHTAVFIDCWNQKLGEIKFDNKPSAFPLLEKEVKKHTKKGLSVVYGLEDVGGFGRALAVYLTENKRWVKEVNPKLSTARRKSHITVQKSDSWDAECVARVLKDELLQLPDARPIDLYWAISQLVTRRKGVVKVLSGCIKNLHQQLGYHYPSYKKFFSEIDGKTALCFWETYPSPRYLKDMEAQTLAEFLRSHSNNGLSHKKAAQILFLIEADGDTYRDFQDKRDFIVQSLVRSIRFNQQELAQIEEEIGGLIKQLGFQLETMTGIDVVTAAELVAEIGDIHRFATPDKLARFAGIAPIICGSGNKVRNYKSKQGNRELHDIIKNLAIRQIAVTRNKKEPRNPYFHAYYEQKLTAGKTKQQAIVCIMRKLVNVVHYLMRTKAAYIIPEVSIKQAG

SEQ ID NO: 150294 - protein, 342 aa, unidentified
MYYIGLDVHKKTISYCVKEVSGQIHSEGALQATRAELDSWMKTLPQPWAAAMEATIFTGWIYDHLLPHAAELKVAHPLMLRAIALAKKKNDRIDAGKIADSLRCDFLPECHMASTAIRERRQTLRYRNLLVRQAVQLKNKISGLLMETGVSYNRQKLHKVGYFCERMATNQDVTARLRPLLKLCREALERSQKTEGALVRSLSRDPLLVQRVERLKTIPAVGPITALTWALEIGDVKRFPSLKQVISYCGLCGDEKSSANITKRTRLSKQRNKHLQTVLVEAAKMAPRYSADLALVYEKEKQKGNANRATLAVARKIVAYLLAVDRGERDFVALENYKRTAA

SEQ ID NO: 150295 - protein, 312 aa, unidentified
MDMANQYVGIDVAKATLDVAIGSDGELVQVENSEAGVARLLERLGAVAPKLVVLEATGGYESVVAGAIVGRGIDVAVVNPRQVRDFAKATGVLAKTDRIDARVLARFAEAVRPEPRPLPTAEAKELDEYLSRRRQLVDMLTMEKNRQSIATTDRMKKSLKKHVDWLEEALRRANDDIDKAIRNSPAWREQEDLLRSVPGIGPVSARTMLAELPELGRLNRKKIAALVGVAPLNRDSGTLQGIRTCWGGRASVRQVLYMAALSAVRCNPVIRRTYAALRARGKKHKVALVACMRKLLTILTAMVRDKRHWSPS

SEQ ID NO: 150296 - protein, 390 aa, unidentified
MPQTNDLSRSLVALEQDNTLIAVVEMSAASWLVGGLVPGLAREPQKKLEPDAPALLKLIHRWRDEAEKAGRRIKRIVVAYEAGRDGFWLARWLIARSVEVYVIHSTSVAVSREHRRAKTDRLDVGLLKRSLLGWLRGEAGHCRMAAIASLEAEDARRPNRERERLTKEATRLVNRAKAALARWGVRGFNPKLRKAIDKLEGLCTPEGAPLPPNSVAELRRDLERLALIRRQVAELEAARLGRLERAPAEDGGPMVRLLARVIGIGVETADMLVQELLSRGLRDRRAVARFAGLTGSPDESGARRRERGLARVGSARVRRGMIQLAWRFLRFQPDSALAQWWRKRTDGAPAKVRLTMIVALSRKLLIALWRLVTTGDVPQGVHLRPEITPA

SEQ ID NO: 150297 - protein, 326 aa, unidentified
MTNAVLGIDVSKATLDVALLNGRSYHHIFDNTEKGFEELEMWLEKHQAKASHVCLEATGQYGFPVAKHLYRQGYPVSVVNPFRIKAYRKTGLVRNKTDKMDAFVIADFCKRQQPDLWRPPEPCYAELRALTRHLDSLKDMRQQERNRSKAGITSNFVLQMIAEHIAQLEQGIEKIKGEIQRFIASHPQLQYQKDLLVSILGIADLSAANLLAEIQDISRFENVKQLDAYAGIAPEQHSSGSSVHGKSRMSKVGNVYLRKNLYMPALVAKRYNPIVKAFCARLEERKKPPMVILGAAMRKLLHIIYGVLKNGQPFDPDYLLKATQKA

SEQ ID NO: 150298 - protein, 371 aa, unidentified
MKKYSTFVGMDVHKNSIEIAIAQRGRNGEVRSYGKIDGTLNALDKVVRKLVSKGDQLHFVYEAGPCGYGIYRHLTAKGYDCSVVAPSRVPKKSGDRIKNDRRDACMLARLDRAGELTPVYVPCAEDEAIRDLTRAREDAKTDEKRSKQRLKSFLLRHGVRYVGTASWSKAHMRWLSDIKMDHPGQQIVLQEYIDTIGECSRRVHRLTDQIRQLVAQWRMAPVVKAIQALRGVSLIVAATTVAEIGDLNRFKNPAELMSYLGLVPSEHSSGEKIRRGSITKSGNGHVRRVLTEAAWAYRLPARISRALLKRQEELPEKVRDISWKAQLRLCSRYRQLWARGKPKQVIVTAIARELCAFMWAIAREIEIPSTT

SEQ ID NO: 150299 - protein, 399 aa, unidentified
MFHVGIDISKFKHDCFIATNAGDKIGSFTFTNDHDGFQTLKSELESLGKQNQIKIGFESTGHYGINLKSFLSKLGYTHLEFNPQLTNKFSKATSLRKAKTDKIDAKLIASMLGHFDYKSLHTSFYHENDLKELVRLRDKYLESRSKELVNLTNALDKVFPEFKPFFNNTFGKTPMYILKRYKTKEKIANLNNSHYETLRKMSMGKFNYPKFSKLRHLAKTSVGVSSEVYEIMIPMIIDNYYHFNNLIEQLDQQITTLYNKTRSLIHTIPGIGIITAASIYAEIGNINRFNNAGQLTAYAGLDVSVNQSGLKEHRGKIVRRGSPLLRKKLFNYSFISLRFIPQFHDYYHKKKSLGKHHKVVLIHLCRKILRMIFHIESNKIPFDINKVKWSVANYLPSYY

SEQ ID NO: 150300 - protein, 366 aa, unidentified
MTTGAHTVTDAVTDAVTTTVIGGVDTHKHTHYAAAVDDQGRLLGHREFPATDRGYQALLSWMREQGRIEAIGVESTGSFGATLTRALSAAGERVVEVNRPNRLARRMDGKSDRLDAEQIARAVLGQTATAIPKTKSGVVEVIRTLRVTRTSAVKARTQTFNTLWGVMIGAPSPLRDELVVLTKRTLVNRCLRLRPETVELIALTGAPERLLLTAVKTALRELARRWKILDEEIKSLNRQIDTLVRATAPELVELHGVGVEIAGQFLVTAGDNADRIRSEAAFAKLCGVAPQPASSGRTTGRHRLSRSGDRAANSALYVITIVRMRRHQPTRDYVDRRTAEGLSKREIIRCLKRYIAREIYAKLPKG

SEQ ID NO: 150301 - protein, 391 aa, unidentified
MFYIGIDIAKHNHEVSIIDDNGKALGKSFSISNSQKGVDKFNTYLDSFNITSENCVIGMESTGHYWINLFSFLVNLKFNVFVINPIQSDAFRKMYIRKTKNDSKDSYIIAQIMRFGEYSSSNISDENIFALRQLSRYRTSLVDECSSWKRKIISILDQVFPEYSNLFSDTFGVTSKELLSKYPLPENMLELSTEELTNLLNKASKGRLGNEKAQEIKESAKNSFGVSFAKQTFLFQIKQIINQISFIESQLKELDNEISNMLKELNSEITTITGIGDVLGACILSEIGDISRFEKASQLVAFAGLDVAVKQSGEFTGTEMKITKRGSPYLRRAIWLAATVASFKDPALSTYYKSLIARGKKHLTAIGAVSRKMCNIIFSVLKNKKAYTPNI

SEQ ID NO: 150302 - protein, 462 aa, unidentified
MARREAKPRDPAARKPAGSLPIVNPDAAAIDVHSDNHVVCVPADRATPNVRTFGANSCDLLQIAAWLKECGITTVAIESTGIYWIPLFELLEAQGFEVDLIEPGQAARCGARPKTDVLDAQWLQRLHSHRLLQGSFRPPDEVIALRAYLRQRQMLISYASTHIQHMQKALEQMNVKLTEVVSEINGVTGLRIITAILAGEHDPARRAALRDGRCKNDEATIARALEGTWREEHLCELSQAYELYRAYQMKVTECDRRIEQAVARLPDRSAGDALQPKLRTRGRKPNDLQFDGANPVFRALGVDLTAIEGIDVSTALVILGEIGVDVSKFPTEKHFASWLGLCPNHQASNHKLKSRRVRKGKNRVAIALRMAARSLHRSHSALGAFFRRMHSRLGTKGAITATAHKLARYVYAMLKHGQAYVSQGLAEYEAAMHERMTRALRKKARALGYDLVASQQSSPAVP

SEQ ID NO: 150303 - protein, 318 aa, unidentified
MPEPIVVGVDIAKKTFDAAIGCTGDILSLPNDDAGHEALIAALIDRTVALVVMEATGGLERHLACALQAAGFAIAVVNPRQARDFAKAMGHLAKTDRIDARSLAEFAQVLNRHADRDKFIKQLPTAQHQELQALVARRRQLIAMLVAERHRLSTSHSVARKSIEAIIEAIRNQLDTVETDLSTHIEQHHAELSRQLTSVRGIGPVSVTTMIAEVPELGILSRREISALIGVAPFNRDSGQMRGKRIIFGGRADVRRVLYMATLAAIRFNQVIQRFYERLVAAGKPKKVAIVACMRKLLTILNAMVKSQKKWDESLHLT

SEQ ID NO: 150304 - protein, 346 aa, unidentified
MEHYAGIDVSLEWSSICVVDALGKIVKEAKISSEPATLVAFFEALGFAVKRIGLEAGPLSQWLHAGLKRAGFEAVLLETRHVKAALSAMTVKTDRKDARGLAQLIRMGWFRPVHAKSIRSQEVRALLVARKQLLGRLIDVELSIRGILRGFGLKVGPVTRKGFEARIRELVTGQATLERIAGAMLSARVALKAEYEKLHKTVLAIVRDDAVCRRLMTVPSVGPLVAITYKSAMDDPNRIPKSKAAGALFGLTPRKYQSGEKDVTGGITRAGDEMVRTALYEAANVLLSRITRFSKLKRWGIDVAKRRGSKRAKVALARKIAVILHRMWVDGSTYRWTETQPIAAQA

SEQ ID NO: 150305 - protein, 416 aa, unidentified
MSDQDKVASIDIHAKVLMVVVGSREGEVMAPECKLERRRFGTMASDRRCLLAWLQAQGVKEVVMESTGQYWKPIWWELEPYMRLHLAQAFSNRAPRGRKGDFRDAERLRRRLVAGELILSFVPDPEQRAWRTMTRTKTQLARERVRLYGQVDSLLQEMRIKLSNVLSDLFGASGLRILHALAEGETDPKKLAALGDDRLKCTEEQLIDALTGNVQAMQQKLLELYLQRLELVEEQIEKLDGMIAQALKGHQEVVARLAEVPGFGPDSAQQVVAEVGVQASTFPSAANLASWVGACPGREESAEQNYNSRSAKGNKYMRRLLTEAAQAAVKTKGSHFQAVFRRLLPRLGYKQALWAVAHRLCRLVWKILHDGVHYIEQGEYRDPKAKKQRAQALARALRKLGYDVVIVPTPPATANA

SEQ ID NO: 150306 - protein, 366 aa, unidentified
MDKVKVYVGLDVHKDSIAIAFAKAHSRDDPQFVGTTRYSVISLTKALSKLGSPSDISICHEAGPCGYGLVRALREQGYHCEVVAPSRVARRPADRIKTDRRDALLLARLHRAGELVPVAVPEPQDEAIRDLVRAREDAVSDQRRVRQRLKSFLLRHGHAYTGTRWGPKHELFLSTIKFEDSAQHIVFTEYRMAVRFATELAVRLTQSLRDHAETWRWLPTVKGLMTLRSIDFISALTIVAELGDLRRFPHPREFMGYLGLVPSEHSSGNSKQRGSLTKTGNTHVRRILVEAAWNYRLPARIGESLQPRLEGQPRYIIDIAWKAQVRLCHRFRRLRARGLHQNKTCAAIARELCGFIWDIGTRLQPA

SEQ ID NO: 150307 - protein, 422 aa, unidentified
MSYCPVAGIDVSKRFSDMCILSPDNKIFAQEKIYHDETSINRANALLQKAERLFFSKPVIVMESTSHYHLILFQFFLEHGYDVIVVNPLQSNSMKDFSIRKRKTDRVDAFKLAMMYRTKTLRPSQIPQTATRALRQLCRHRAELLNDVSSYKNRLTALLDQTFSGYDKVFSDVGGVTSCAVLVRFPTLTILLVEEESELVEVIAAASKSGYSFAKKKAGLLISAAQKAQTLGIHSCADETLIVCTIQMLRTLSESVLQIETAIDNLLAQIKEMRNNVSLLQSIPGVGSHSAALLLGEIGDISLFKKPKQLAAYFGLDPTERQSGSFRGTKNKLSKRGSSYARAALHMGIVNSICKRGKDSAANPVLLSYYEKKCKNKPAKVAQAASMHKLVFIVFAVLRDQMPFELKTPEQHAVEQGFVKAA

SEQ ID NO: 150308 - protein, 355 aa, unidentified
MNDAKYIGLDVHQATISVAVLDSAGNLMMEAILETKAETILQFIHGLRGGLRVTFEEGTCAAWLHDLLKPHVAQVLVCDPRKNALLKAGNKNDRIDARKLADLLYLNKLNPVYHGETGIRPLKELARSYLALTRDTTRVMNRLKALYRSWAIPCAGQRVYAPRHRSEWLAKITEAGVRRRAEIYYQQLDALRSLREQVRRDLLVEGRKHSAMKLLRQIPSIGPIRAVLLIALMQTPYRFRTKRQLWAYCGLALKTSTSGEYRIVEGRLKRSKKFLAIRGLNQNHNHDLKNIFKGAATRAAAVPGPFQEFHAGLVARGMKPTMARLTLARKIAAITLIVWKKGVRFDAEYLKQQAA

SEQ ID NO: 150309 - protein, 368 aa, unidentified
METIHRSRTLYVGIDVHKDTYTAVALSPFGEKIFEMTISNESEDFISLVEKTKAEASRIGLIPSFGLEDVHSWGERLSSFLVEEGLPVTAVAPILVDHLRQKTTHPEKNDSLDALGVAKVMIQRIDTLPRYTLTEEAKKAKQIRELSVEREWLVKERTRLKNQLHILLHRIHNSAYRIKFKDPFSKKALRHWMRSMPKDIDSILDQRTKRALRRLLDLIEETQEIEDELTASMEANGFKIHTASGCGPVIAAEIIGEVGDISRFKSPGALAKYAGCCPRECSSGKKIRWRKTRSGNRRLNRSLHRMALSQISRSGNNAAREYFKRKISEGKTKSQALVCLRRQLVNIVWMMLKHKTEYVCPLRSKSLN

SEQ ID NO: 150310 - protein, 373 aa, unidentified
MPRYSTAFGMDVHLRSTTVCALDAETGEAVTRRFRGNPWGEVAEWMSGFPGPSLAAYESGYLGFAPQRELSGLGVDCVVAAVSKVPRSAADLSSKNDRNDAARMAKAILSHDVTPVWVPSPEIEGLRDLAAAHDAATARLAAAKQRLLAFLARRGYVYGGTTPAGNPRKYWTYGFLRWLDGIHPADDGGIRALAALRNEVEAADETREALLAEYRAAVAAGPLSAEVEALQSIKGCGFALAAAFASEVGDFSRFRSGRQVTSYFGLAPKQRSSADSVRLGGISGAGNALVRKLAVEGSWCYAQAGHQPKLMPKGSGVPLEIRMHGRKGSERLLRRREEMIARGMPQAKANAATAAELVRWLWALGTMCREGAE

SEQ ID NO: 150311 - protein, 331 aa, unidentified
MKFLETSGIDVSKDTIDATLHLKKCHNQFSNNTTGFRSFIRWVEKRSDLDINQVQICFEHTGLYSMKLATFLSSNEIKFSMVPALEIKKSLGIVRGKNDKLDARKIAEYAYMRRDKLTNYNLPSSQVLKLQALLTLRAQMVRNRSGYQSSLKGIKTFFKRKDNKELFQTLQSEISGLNKKTKKIENQIIAIIKSEETIAFLYYLITSVKGVGLVLGTNFIVVTNCFTNFKNSRRFACYSGIAPFDKQSGTSLNAKSRVSHFANKKMKGLLNLAASSAIQCDPELKKYYNNRIENGKSKMSTLNIVRNKIVSRVFAVVKRGTPYVPLYKHAV

SEQ ID NO: 150312 - protein, 314 aa, unidentified
MAKSIEPILVGIDVSKAELVIARSDTDQVEPIPNNITSIRRWLKSIPSGSRMAMEATGIYHRQLAKLAHEAGHPLYLLDAYKLSHYRDGVGTRAKTDLADARLILRYLVRELDELKRWVPPHDAFYRVQSLMRRRVALVQTRVALSQSLKDLPELRQAAKQLDQHIRRIELLIAQRIKQALADVGWHADAQRCDAIEGVGELTSMALANTFHRGRFKNSDAFIAYLGMDVKVRDSGTMRGRRKLTKKGDPELRRLLYTAAMAARKTPAWKELYETYLTQGLKPVQALVKLARKLARIAFALMQNQTTYQPKTAE

SEQ ID NO: 150313 - protein, 330 aa, unidentified
MTAVSTLGIDLAKNTLSVHGVDAQGVVTVRRTVSRAKLGELVARLPPCLIGMEACSGAHEWARRFSEAGHTAKLMAPKFVTPYRKSGKNDGNDAEAICEAVGRPNMRFVPIKSVQQQCDLSLHRVRLGFVEERTATLNRIRGLIAEFGYVVPLGTERLRREVRDLLERLPARAASCVRDLLEHAERLRSKALEYEREIRSSLQHNELALRAHTRPGPITASALVATVGNGHDFRNGRQFSAWLGLVPRQYSTGGKTRLGHITKRGDPYLRTLLVMGARSVLQRAYRETDPLSRWALALQQRRGYHRACVAIAAKNARVAWALLAKGAAAA

SEQ ID NO: 150314 - protein, 386 aa, unidentified
MTQPNDLSRSQAQLVQDKTLIAVIELSLSSWLVAGVVPGVDRQPLKKLEPDQAGLLRLLQRWRDEAMKAGCTIERIAVAYEAGRDGFWLARWLRGQGIEVHVIHSSSVVVSREHRRAKTDRLDTAMLLRVFMGWLRGERGHCGMVAVPTIEEEDAKRPHRERESLVGERTRIINRMKAALVRLGIRGFKPELRRAPKKLDELRTPEDLPIPPNTLEEIRRDMARLAMVRDQIDLIEQARLVRIQQAPETGPNAMVRLLASIIGVGVETADMLVQEVLSRNLRDRRAVARYAGLTGSPDESGSKRREKGLAKAGNARVRRGLVQLAWRFLLFQKDSALAQWYRTRTGVQGVRKTVLIVALARKLLIALWRMVTTGEVPHGVMLRAAA

SEQ ID NO: 150315 - protein, 338 aa, unidentified
MDVIEERCGGADLGKADVKVCIRVPGTGKRARYEVRTFSTMNDGLLELRDWLVENRIARIGMEATASYWKPLFYLLEATEGIEPWLLNARHIKTVPGRKTDVKDCQWICKLVEHGLVRPSFVPPRDIRQLRDLTRYRTETVRDRARDVNRLAMFLEDTGIKLSSVVTDITGRSARAMLDALVAGERDPQVLASLALGSPQSKVPLLTRALTGDFNEHHAFMIASMLRAIDEADNRISCLSEEINRQLQPLRQQVDLLITIPGISLTLAQVLIAEIGIDMTRFATAGHLASWAGVCPGNKESAGRRLSGRTRHGDTWLKTALFIAGASASHSKTTYLGA

SEQ ID NO: 150316 - protein, 322 aa, unidentified
MAMHSFGGIDVSKDRLDVMILPGEQCSSVRNDPAGWTELVEQLRGFSISAIGIEASGGYERGVMRALLAAGMSVRQVNPFKLRQFARASGVLAKNDPLDARMIASFVAIMPTRQAQRPTPAVERIAEMLTVRRQLSAEKVAAENGSRLLEDAMLQRLSRRRIARVAAEIDLLDARLVEIVATGAALLHRYQLLTSMPGVGPVLACTLIALLPELGGMRRKQLAALVGVAPYAFDSGKLKGRRCIWGGRAHVRHVLYMAALSASNWNPALKAFHDRLKAAGKLPKVAIVAVMRKMITTLNAMVRDDIVWADRSTGRHNVPTAR

SEQ ID NO: 150317 - protein, 355 aa, unidentified
MLYLGIDQHARQITISLRDEHGDVLLARQISTQPDKIHAFFQQLTRQRLQKGEHFVAVLEVCGFNDWLIRMLKDYRCHKVILIQPDERKKRKTDRRDAAALSELLWVNRDRLLHGKPVRGLRQIDMASSTDQENRRLTTLRKEAGQARTRLVNKIKHMVRRHNLQWEMPTKRLPSKSAIAWLKQLVLPEIDRLEMDQLLADLEQIQQRLKELEGVIAKRCGVSKEAVLLSSIPGVAHFTATSLACRVGRVERFPRSHSLANYWGLTPGCRNSGENNQRLGSITKAGSAMARWLLAQVTHKVLRKDARLREWFKRLKRRRGASIARVAVMRKLATIIWHMLSKEKSYAECRAHVAA

SEQ ID NO: 150318 - protein, 418 aa, unidentified
MEAIVESCCGLDVHQATVVACLLVGKPGKKPRKDVRTFGTVTAELIRLREWLEAEGCTQVGMESTGVYWMPVYTILEEAFKLVVGNATHIKQVPGRKTDVKDSEWIADLLRHGLIRPSFVPPKPLRELRDLLRYRRKLVESTTSERNRMLKLLEMGNIKLSTVVTDVFGVSGRSMLQALLDGQQTPEQMAKLARGRMKGKLLQLTAALDGRMEEHHRFLLKMQLERLEEVEADIARLDQRIDEKLEPYREVHTRLMQIPGVDRIGAAVLIAEMGVDMSVFPSVRHCAAWAGVCPGNNESAGKRKGQPARKGNVHLTTALVQAAVSASHAKGTYLKDKYWRLKAKRGPKRAAMAIAHKILIAAYHMLSRGVDYKELGPAFLDQRSADVTKHGLVKRLERLGYQVTLQPIEPQPQPTVAA

SEQ ID NO: 150319 - protein, 340 aa, unidentified
MINIIKQIFGIDISMDTFEVRFGTTDFHQDQKISNSFTFNNTTSGFKKFIQWTQKNIISKEIPLFFVMEATGVYYENLAYFLFLNNFNVSVVLPNKIRNYARSLESKSKTDPIDAASITSFGLQRKLNPWTPPNNLVKSIKSLCREYHSIKTMITEVKNQLHAKNHSHLPDKQTIKRKTLLLGMLNKQTKQIEKEIHDIIQTDKELYEKVERLDKIKGLGFISVVTVIAETNCFELVANQKQLASYAGLDVVFNDSGIKKGKTSISKRGNKFLRTVVFMPALSACKHNHKMKELYIRLLSKGKNKKLALIAIARKLLLLIYTIWKNNTDYIPNYNPIISK

SEQ ID NO: 150320 - protein, 427 aa, unidentified
MSEVETGRQEPQFAAFVGIDWADQKHVWCLQAVDSGKRESGELEHTPEAVEAWVGQLCQRFSHRPIAVAVEQSRGALVFMLAKYEPLHLFPVPSTMSASMRKALYPSGSKDDPRDADVLLDLLLQHRDKLRRLSPDTEATRRVQNLVEERRKLVDEKTEQTNRLTSHLKIYFPQILNWFEHLDTELVCALLERWPTLEELQKAPPTKLRAFFRKHHCRDQELIERRILAIRQSIAAIRDRAVIEAKSMVVKVIVQLIRTLLEGSADLDERIEEAAAAHPDLFIFESLPGAGAVLAPRLLAAFGSQRERYGNAGELQTYSGIAPVMEKSGKKQWIHFRWACPKFLRQSFHEWAGHSIAHSVWARSYYHQQRNKGQDHHAAVRALAFKWIRIVFRCWKDRVAYDESKYLAALARRGSPVAAVAAIAKTL

SEQ ID NO: 150321 - protein, 383 aa, unidentified
MKITMPEVSRIIGLDLAKKSFVGCILSGEGFLQKRMFSGKMTQDEEGWKYIQSRINTDDLVLMEAGTSSFSLARYLIAHSAAKRIEVLNPGMLRVIWMSQRKSDKSDAVKIACIARDMAMEAWPTIPIPTEQEQAERSTINSYVFTKKQETQLVNRLYGLFNSLGYPEIKRSIIRDNPEGRRQLAQELLSNHRLALYDAEMMMDQLDLVQLQVDARLESLRKICLAHPRQALSWLSIPGIGLVNAATLIAYIGDGSGFSNPHQLLNYAGLVPKQDQSGDLDKHLGITKRGNRAIRRNIVQGAWVVTTLEPTCPITKYAYRKKKEGKQKQKVAVAVANKMLRIGFSLLKSGDLYRPMMENGVGKLKEKLRTYKLQALMKTILED

SEQ ID NO: 150322 - protein, 404 aa, unidentified
MRFCGIDWANDHHDALGIDENGQRLGSIRVAHTPEGLSQLDAFLEQLAEGVGKEQIACIIETTHGLLIAHLLEAGWPVYPVNPRTVERRRAPSGAKTDTIDAYLLAKTGRADFVDLRRLNPDSEQIQELKTLTRDQDALIQMQTRLVNQLTACLKAYYPVALEIFGKLHQPSTLAFLRAYPTLQAARAASVEELATLLKKVRYPGARQAAQQIASRLQQPCLQATAVTTRTKSRLMLVLVDQLEPLLKQIAEYDKEIEHLFLTHADSELFQALPGAGKRLAPRLLAEMGDDRSRYADASSLQALAGTSPVLFQSGTYQKAHRRLGCIKPWRNALQQFAWQSTLQETWAKEYYQRKRAEGKSHTVAVRALANIWARILYAVWKTKELYQTTTFEQARQAHALRSA

SEQ ID NO: 150323 - protein, 427 aa, unidentified
MKYTQNEKIMQIKETTLIIGIDVDSEKHYARAFSFRDVEYGKLLIFNNSAEGFAKLKECTGKIAETEGFTEVILGMEPTGHYWFNLAENTMKSGMRIVLVNPHHVKKSKELDDNNPTKSDRKDPKTIAMLVKDGRYIEPYIPEGIYKELRSAMDSRWRLVKEISAVKNRISRWISIHYPEFIKVFGNWEGKAALLILKECPTPKKVVERGIEGIIAIWKEHKIRAVGIKRAVMLVESAKISIGTSEGLISAENEISMLLEDYERKMRQLERTMVLIEEMAMQISEFEKLLEIKGVGLVIAAGFLAEVGDILRFKHPKQIQKLSGLSLKENSSGKHKGQTTICKRGRKRLRYYLTFGIMPLLSKNEEFRALHQYYTTRKERPLKKKQSMIALSNKLIRIFYAILTKDIAYDSQKMMSDIKRPEAKAVA

SEQ ID NO: 150324 - protein, 432 aa, unidentified
MEKMHFHAAGIDIGSRKVFVGLEDKPVRWFETFTSDLVALKDYLLENRVSTIAMEATGVYWYVLYDILLTAGLDVWLVDGRQTRQLPGRKTDVKDCQWIQQLHSYGLLNRCYVSEGLVKELRSYQRLREDHLRSAAMHVQHMQKALIEMNIRLPEVLSQVHGVSGMALITAILAGERDVQKLVSLCHASVREKKGEELRKALEGHYTTQGVFALGQALKAYQFYQAQILDCDRQIDSTLQKINKDKTFPPGTSTGKRKAIRHNKPNINGLGDHLLKIFGGRDATKLPGFTDYNWLQLYAEVGSDLSKWPSEKHFTSWLGLSPGQDRSGKKNKSKSKGKPTVGQIFKQMAHGLLNSKYIGWGAFARRLRGRKGPAIAIKATARKLAVQYWRLVVKGAEFVEKGMDAYQNILQEQKKRRLEKLALELNMNLMPA

SEQ ID NO: 150325 - protein, 373 aa, unidentified
MNYNQNEKIAQITSQTLIIGVDIAKFKHVARAQDYRGMEFGSPCYFDNTKQGFQLFLDWINQLKLEQHMEKVIVGMEPTGHYWLNLAHILKENQIKFVAVNPLHVKKSKELDDNSPTKNDVKDARVIAQLVKDGRYAEPTIPQGVYAELRVAKKIRDLLTEDLQTVQGQIHNWLDRYFPEFLTVFKSWEGKAALQFLRLGALPNELINFSDQYLLDHLRKAVSRSVGINKIQELKQAAKESIGLCQGSNMAKLELATLLDKYDLIQKKFEELDQKIDNLIEHIPGVQQMLAIKGVGRDTVAGFFAEVGDLQEYSHPRQIIKLAGLSLKENTSGKHKGQTRITKRGRKKLRALLFRVCMIMVAKNSAFKALHAY

SEQ ID NO: 150326 - protein, 437 aa, unidentified
MMLESIPYLSVGLDVGADFTWMSIMLPNGILTGKPFKIIHSDPQSRELAVAKIKEAQEMYSLESRCFLESTGIYHIPLLYFLRDKGFDCSVINPIITKNSTNMNVRKLHNDKFDSKKAAKVGLDASLKTSIIPDDEVIDLRNLVRDYYYFKDLQSAVVLKLTAELKVSFPAYRKVFSKVTTQTSLKLLEAYPLAADMLAAPKDILVETIRKTARFGEKYAVSKYDAIRAAAKDAAVFGRALQSSALRIRLYIKTYREYQEHLDNILEDLHKAVDKLEGTPVYDRIFLLQSLRGVGFLSAAVLIAEMGSFDLFSSPKKLYAYFGLDPAVKQSGKFNGDKVHMSKRGSGLARRILHMVAINNLKVDKGTKTPVNPVIHGYYSDKCKSKKKNVAVGAVMHKICNIIFAMLRDNKPFEIITPQEHCERYLAAHPDKIQNAA

SEQ ID NO: 150327 - protein, 447 aa, unidentified
MARSTRTSMKSRLTLTHPNAAGIDIGSASHFCAVPPDRDDDPVREFKSYTVDLERLASWLKECGVDIVAMESTGVYWIPLFELLERRGFTVLLVNARHVKNVSGRKSDVLDCQWLQQLMSYGLLRGAFRPADEVCVLRALTRQRAMLLRSQARHVQHMQKALTQMNIQLANVISDIVGESGLKILRAINAGERNGHKLALLKNSRIQASVDEIAKSLQGSWRAEHLFSLKQALDGFDFCGIQLAECDAEIEDQLQRLHAHEGEPTKGKKRSRSRNAPKFDLRSRLYQMCGVDLTRIDGIDVTTALAVISEIGADLSRFPSDKHFASWLGLCPGTKITGGKVMSGKTKKCANRAAQALRLAAAALRSSQSALGAYFRRMCSRMDKPKAVTAAAHKLARLIYAMLTKGEEYTDKGQEYFEERYRERVLRNLSQRAKQMGMQLIPTEQMT

SEQ ID NO: 150328 - protein, 354 aa, unidentified
MIIIGVDFHPEFQQIAFMDTDTGEFQEKRLGHREEAEKFYRALAAAGQKVRVGMEASGHGRWFERLLAELQFELWIGDAAEIRTRRVRKQKTDRQDAQLILKLMLKDDFPQIWVPSWENRDLRQLLWHRHRMVQARTRIMNQLQAVALNEGLRCKKRLWRDSGRKQLESFALAPWASRRRRDLLELLDRLTPTIAELTQAIEQEAEKCPEARRLQTHPGVGALTALAFVLIIGRAERFQCSKQIASYLGLVPLEDSSGNRRRLGHITKQGNSLMRFLLVEAAQVTVRSDPDWRSKYFHLAMRRGRKIAKVAMARRLAVRLYWMWRKGWNYEQLNKFGSHAGQPENRHGVQSITE

SEQ ID NO: 150329 - protein, 344 aa, unidentified
MNEVITIGVDLAKNVFQVHGVDAEGAVIVRRQLRRSRMLPFFKKLPPCLVGMEACATAHHWARQLMALGHEVKLMPPHYVKPYVKRGKNDAADAGAICEAVTRPSMRFVSVKSTEQQSVLMLHRSHELLVRQRTMLINAMRAHMAEFGIVAPVGVPQVKKLLKIIADRDDARLPPPARTCLESLAGQFLSLNEEIYAAEKQIHAWHRSNEVSLRLESIPGIGPITASALAASITDPDVFKNGRELAAWIGLVPRQNSTGGKQRLGKISKQGDQYLRWLLVAGAMSVIRQAKRRGASNPPWLANMIDSKPTMVAAVALANKNARIVWALMKQGGTYQNPVSVPAV

SEQ ID NO: 150330 - protein, 321 aa, unidentified
MYKVIGIDVSKATLDGCFLDGSQKESFVVSNTQQGFKKIALKAKGALVVMEASGPYYLQLSNYLHTHGIEVSVVNPLVIKRFSQMNLQRAKTDKKDAETIANYGRIYDPKRWSPNSKNTNSIGQLHSAMELLDKQIRQLKGQQEAFDNSGELASLLRKELKSMVNFLVKQKQKLSLEVERLAEQEFGEKIDKITSIPGIGKKTAIMLNVITDGFTKFEHHKQLTAYIGFSPRVYQSGTSVKGKGHICKMGNAQIRKLLYLCSWTAKFCNKACREMYERLKEKGKPERVIKVAIANKLLKQAFAIGKSQMNYSENHGDNICF

SEQ ID NO: 150331 - protein, 320 aa, unidentified
MAKEVERQWIGIDVSKAELSVAVHGGTEVLTFANTPAACAKWLATLPAHSVIAVEATNTYHLEVLMQAYRLGLSCYVVDGYRLNRYREGVGGRAKTDRSDALLLARYLAHEHTALRPWSPPAGGSRTVQRLLHRRATLVRAHTALAQSLEALPELKAQAEALFAQIKVMDKALRKAMHRALRTSGWGEDLTRCQALEGIGPLSATALVATFHRVPFRNSDAFIAFIGLDVRVRDSGTYRGQRKLTKHGDSELRRLLYNAAMAACRSATWAPFYQRCRARGLSTTQALVILARKLARIAFALMKNQSDYHPRTPLEGCIAA

SEQ ID NO: 150332 - protein, 319 aa, unidentified
MSKTVLGIDVAKSKLDVALMFNGKVLMKKFDNNIKGFKLLQGWLTSLRIEEVHACLEATGPYGEAVAEFLHEHGHRVSVVNPLRIKSFAKSDLKRNKTDQADARTIAEFCLLKDPENWQPLAPEIKQLQALTRRIEALERMLLVETNRREMAPAATRPSIERMVENLKKEIENVKRLIKDHIDNHPDLKQQSELLQTIPGIGEKTARLLLGEIEFRSFESARALAAHAGVTPRQFQSGTSLNWTRLSKLGSGRIRKALYFPAITALKYNEIIKQFARRLDQNGKTPMQIVCAAMRKLLHIAYGVIKHKRPFDPNPAFRI

SEQ ID NO: 150333 - protein, 398 aa, unidentified
MRVPHESRPGRRMQELRGFATTTSALLAMADWFRCWGVTRVVMESTSDYWKGAYYLLEAEGFECWLVNAREVKNVPGRAKTDKADAVWLAKVAERGMCRASLVHPKPIRELRNLTRYRRSLIRDRTREMQRVEKLLEDAQIKITSVVSDVFGVSGRAILHALIDGQRDPAVLAGLAVGRLRPKTAQLAEALRGFFTDHHATILAMMLDNIDRLSAQITALDTTIGDAVDPFAHQVAQLGEITGAGRTAAKELIAELGVDMTRFPSDAHLVSWAKFCPQTRESAGKTKNKGRAKGSPWLAATLGNIAASACRTDTFLGARHRRIAKRRGTQKAIVATGNAVLVIAYHLLADPALRYHDLGADHYDTRINKHRRARNLATQLQALTGQKITIRDGKAIIA

SEQ ID NO: 150334 - protein, 309 aa, unidentified
MDNIVGIDVSKDRLDVAFAASGTAFFIDNSHAGIDDLVQRLKEVHADIVALEATGGFETLAVARLSSAGFSVIVVNPAQVRAYANAIGRRAKTDAVDAAVIAAFVSATKPQIRPLRDQQAQLLSALVDRRRQIVQMIVAEENRLRMALEKATRKSIQRLLAALRREVDSIDAEMDDHIRKSPVWRVREALLTSVPGVGPATARTLLAEMPELGNLDRRQIASLAGLAPWTRQSGKWKGKSFIGGGRGKVRAVLFMAALVAARHNPVLKAFRDRLVEAGKPKILATVATMRKLLTMLNAIIRDNKPWQNA

SEQ ID NO: 150335 - protein, 343 aa, unidentified
MAQNMQTYVGLDTHKKFVFGCVKNKDGNILFEQKFKNEPHSIDTFLLNVDKDSKIALESSSCWQYVFDYLVDQGYNVFLSNPAKTRLIGESKKKTDVEDARKLADLLRMNMLPLSYAAPLHIRMQRQITRHRASLVSMRTQTKNKIHAILRRHGITTELNDCFTQKGLEYLESIDLPMCDRFELDQYIGILRHYSKKIQDTQERIEEIAADDPYAKIVMTHVGMSHYSSLMVVAEIADIRRFCSCKKIVSFAGLNPSVSQSGEKCYLGNISKQGSKHLRWILIQCANIAAQKDKKLKSYYMKKKLGKGHNKAIVAVARKMLINIYVMLKHNITYDHLRANKAS

SEQ ID NO: 150336 - protein, 339 aa, unidentified
MQKRYFIGIDVSKHTLDVAFIIREQSFFSKVTWKQFSNTATGLRQLHQWLTEMQVPLSNQAIVVIENTGIYHRLLWHFFSSLQVDLCIENAAQVKWSLGIARGKNDKVDSRRLALYAVRHADRLKPTPALHQQVLPLKDLLTLRNKLLVQIRSITTNIKELKNISVTESFANASKKLLQPALNGLQQSLKQVEKEIKETLNKDKDLQNIYKRLITVPGIGPVTAMYLICCSNVFTMCKSGKQLACYCGVVPFDHQSGISIKGGQHVHKMANKELKRLLHMCALTSIKNHAEFKEYYNRKKREGKHAMSILNAIKNKLVLRAFAVVKNERDYVNNHAKAA

SEQ ID NO: 150337 - protein, 371 aa, unidentified
MNSIVYVGMDVHKESYTLCCYCYDTDKVEYKQTIPSDYKLILKYMESMRKVYGEDATFICGYEAGCLGYSLYHQLKDHTVDCKILAPTTMAITNTNRVKTDKRDAANIARCLAFHTYSEVYVPDDEDNSVKEYIRMRDDQKLMLKKIKQQILAFVLRQGKKFEGGKTYWTIAHMKWLKNLDLTGLDKETLSEYLVTYEYLTEKIERLDDRIEELASGEKYKEKVQNMECFLGIKTHTALSMVVEIGDFNRFEKAPKFAGFLGLVPSENSSGDDRNRYSITKAGNSHLRRLMVEAAQSYTRGNIGHKSIALKQRQKGCSAEVIAYADKANERLRRRFYKMTLNKGINRNIATTAIARELACFMWGMATGNIS

SEQ ID NO: 150338 - protein, 370 aa, unidentified
MSVYVGIDVHRKRSQVAVVTGDGTVELNKNVVNGSEPMLRLIGDLPPGTPVAFEAAFGWGWLARLLEDYGFEAHLVHPLRCKAIASARLKNDKVDAATLAQLLRADLLPEAWIAPPAVRQLRALLRHRTGLVRLGTQQQNRIHAVVADFGYDRSGSYLSGPGRGWLAELDLPPASREIVTDCLAVIDGLAPLIDRIDTELRQHAKADPRVKAPTTLPGVGQFTALVMLAEIGDITRFPSARKLASWAGLTPTVRGSDLTVRHGHISKQGSAWLRWVLNQAAQTAKRSPEFSATYAAITKRRGKKIATIAISRKLLTRAWHLLAEAQAPRPATPDASTATAAHPQTGRVTKPRASSLSRHEPASGRARSSD

SEQ ID NO: 150339 - protein, 339 aa, unidentified
MSLYCGIDLHSNNHVISIIDENDNRLFERRMPNKLETTLNCLSEYQDDVAGIAVESTYNWYWLVDGLMDAGYSLHLVNTSAVKQYEGMKFTNDEHDAFHLAHLMRLGILPTGYIYPKEQRAIRDLLRKRGFLVRHRTAHTLSAQSLHSRLTGRQASCNVIQGDHAESIYLPGLDDANRRLEMKANLRMIQALHHQIVEIEKTVLNQMKLSPEYIGLKQVPGIGNILALTIALETGDISRFPKAGNYASYCRAVKSCRESNRKKKGEGNRKNGNKYLGWAYVEAVNHMVRFSNDGNRFFQRKLAQKNRAVAVKATANKLAKACFYIMRDKIAYDAKLLFR

SEQ ID NO: 150340 - protein, 387 aa, unidentified
MTVRTVNNVPATTHGETMRCLFAIELSTMSWVIAFNTPLSEKISRRTLTGCKWKRLLELIEEVRARVSRETGRAVEVVSCYEAGYDGFWLHRQLEAHGIRNYVIDPASLQVDRRARRVKTDRIDTDRLLRSLMAYLRGEPKVWSVVRVPSVAEEDARRLHRERDRLVSERVQHVNRIKGLCALQGIYDYHPLRPQAMARLEQLRTTRGDAFPPRLKSEIMRELQRLEMVVEMIATLEAERDAIVDDEASTHLNAKKIQDLHKLKAIGPEFATVLVGEIFHRNFNNRRQVASYVGFAPSPFQSGNVAHDQGISKAGNRKGRTTGIELAWLWLRYQPDSDLSVWFRTRVGTTKGRIRRIAIVALARKLLVALWRYLETGLVPRGAVLKG

SEQ ID NO: 150341 - protein, 348 aa, unidentified
MAVAIVESTRPVTGGVDTHLDTHLAAALDANGGVLGVESFPATRAGYESLSSWLAGFGPIDRVGVEGTGAYGAGLARHLRSLGIGVIEVDRPNRQLRRAQGKSDTLDAIEAARAVLSGRATGVAKTADGNVEAMRALLIAKRSGREARITCLNQIRHLGFTAPDELRERFQSVPRTALAARAAALRPRPDRDAVLFATKLAMRSLGRRVLTIDDEIARLDAALAEFVTATAPGLLGLYGVGVDTAAILCVAAGDNPERVRSEAAWAHLCGVAPLEATSGKVTRRHRLNRGGNRQANHALWRIVFTRLGSDARTRTYVARRLDEGLSRPEIIRSLKRYVARETYRHLPR

SEQ ID NO: 150342 - protein, 459 aa, unidentified
MENKFYLGVDVSKGYADFTILNGNKDVVENNFQLDDTFEGHNQFFKILSGFFAANADAHLYAAVESTGGYENNWFNCLSKFQAQFNISVARLNPFGVNYNSKATLERIITDKQSAKNIAGYMISHPKKVNYQKEDYFAAERKQFTFIKMLTKQRVQLLNQLESFLYIANTEILSYCKDGVRLWVLKLLKQYPTARHLAKAGVTTVSKIPYVTKERAEDLVANAKRSVASALDDTTAEVIRSLTIQIISLSKLIALQTKQLEKNCNLPEVELLKTFPGIGTYSAIGLMIEIVSASRFSNVKKLASFFGIHPVFKESGDGISGFKMSKRGRKQPRQILFNVARMSLIHNPLIKEIYASHLKKGMSKMSAIGALMHKILRIIYGMLKNNSAFDPKIDKKNSNKIVNAKPNGKQNKERRYLKFNKNAPISRRQSKKRKEQNSSQDEISSNTGSSSDSFQITSL

SEQ ID NO: 150343 - protein, 454 aa, unidentified
MKKKVEKQLPDVVTMPLVHPRAAGIDVGDRLHSVAIPEGIFAERVKTFGSMTCDLEAIADWLLQAKITTVAIESTGVYWKSIFSLLNKKGFEVYLVNSRQTKNVSGRKTDEDDAMWIQKLHSCGLLKSSYLPDDEQEALRTLVRYRHTLVQDCSRFKNRMQKSLELMNIKFHTLFADIAGKTSIAFIEAILAGERTPANFLPLVDGRIKASKDEILQSVEGTWRSEHLFTLSQSYEMNKIYNQKITACDTAIEERLQCYQAFANEGECGPEEPANENPISKKKKQRGAPVFDVRSYLKRIYKTDVLAIYGLSEMGGLEILAETGVNLKKWPTENHFRSWLNLCPNNKVSGGKLISSKLLKKKPKAASQAFRIAANTVQRSNHWLGDYFRRMKARGGNKFAVVATANKIAAIFYKMVTQQQEFKPVDLEAYQQKYKQAKIAFYEKKLQQLKNVAA

SEQ ID NO: 150344 - protein, 347 aa, unidentified
MSEYIGIDLHKAKSFVTRLDRRGQVLEQIELQHATGALQQYLERVPADTRIAVEATGNWMWLYELIEERHPDLVLAHPLKTKAIASARIKTDKIDATTLAHLLRADLVPAAYIPPRAVRDTREILRFRASLVRLRTQVKNKIAAILSKNGLTPPTKTAFGVKSRQFLATVAVRPCYRLALDGYLRQLGHLTDEIDQVAQTIETQVATDSQAQLLCTMPGIGAYSALLILSEIGDVHRFPDSRHLCSYAGLVPSVHASGGKTRLGRLTKQGSTWLRWILIELSMHAIKGAPQFRQLYQRVARKHGRNAGRTAVARAMLKTIYAMLKHQEAFRPIEQGRTGQRLGAMAG

SEQ ID NO: 150345 - protein, 457 aa, unidentified
MEQALAQRNRSISLKPGKSGQALTLTHPNAAGIDIGSASHYVAVPPDRDAEPVREFPSFTADLQRLADWLAACGVDTVAMESTGVYWIPLYELLESRGFKVLLVNARHVKNVSGRKSDVLDCQWLQQLMTYGLLRGAFRPADGVCALRSLSRQREMLLRSQGRHVQHMQKALTQMNIQLANVISDVVGETGQKILRAIVAGERDGHALAAMKNTRIRAGTEEIAKSLQGNWRAEHLFALKQTLALFDFIGTQLAECDREIEAQLESLHVHDGCPAKGKKRSRARNAPKFDLREQLFKMCGVDLTRIDGIDVTTALAVISEVGTDMSRFATVKHFTSWLALCPGTKITGGKVLSGKTKRVANRAAQALRLAAAALRSSHSALGAYFRRMCSRMDKPRAVTAAAHKLARLIYTMLTKGEEYTDQGQDYFEERYRERVLRQLSKRAEKLGMKLVATSQPA

SEQ ID NO: 150346 - protein, 368 aa, unidentified
MEKFITFVGLDVHKNTIDVALADAGRNAEVRHYGTIGGGLEDLDRLVKKLSSPNKELHFVYEAGPCGYDIFRSLTDKGFDCAVVSPAHIPKKPADRIKTDRRDAMMLARLHRAGELTYVFVPRADDEAMRDLTRAREDAKKAQRVAQQQLNGMLLRLGFRYSKDNWTKQHFLWLADQKMPMPAQQVVFQEYINATNETNARVERLTQQIETLVPTWRMASVVKALQALRGVSIIVAATMIAELGDLTRFDHPKKLMTYLGLVPSEHSSGEKTQRGKITKTGNGHARRVLVEAAQAYSHPARITRPLLKRQEGLSQEARDIAWKCQVRLCTRFRRLMAKGKNRNAVITATARELAAFMWAIANHTPIAV

SEQ ID NO: 150347 - protein, 383 aa, unidentified
MQPTRDNHFTPGEEILAVALELASGAWKIALQDGKHEKPAIRTVSDEAAAGRLNEAVQEIEKIKRKWRLASGIRTVVLYEAGQDGFWIQRALSKLGYETLICDPASIPVERQARRAKTDRLDAIKLVLCLRAWLRGEVDRMHVIRVPGVKDEAQRHLSRDRGELQKELCQHRDRLRKLLRTVGCWQSVDGDVATRLAKGELKCHDGCALPAELHERLSRECERLALAEQQFALLEQELANQLPQGTQERIDNLMRLKAVGPVGATRLVLELFWRRFDNRRQVGSCVGLVPQPYDSGQSRVDQGISKQGNRRVRHLLIELSWFWLRYQPRSAIAKWYAQRTAGSGQSKRGKRSAIVAVARRLAIALWRYLEQGVVPDGAVLKRS

SEQ ID NO: 150348 - protein, 347 aa, unidentified
MEYFAGLDVSLETVNVCIVNAAGDILLEKKIAAEPAAIVHLLKGFGSPFKRIGLEAGPTSSWLYGELRAAGYGAICLECRHVKAGLSAMRNKTDRNDARGIAQLVRLGWFRQVHVKSEEAQRTRMLLVNRQQLLTKALDIENSVRGSLKVFGLRVGVVARRGFEARVLELVADDPILLAVTEPMLRVRQALLEEFERLDRLCQQLARRDPVCRRLMTVPGVGVVVALTYRTGVDAPERFSKSRDVGAHFGLTPKRYSSGQTDYDGRISRCGDEMVRTALYQAANVLLHHGRWSSLRSWAMRIAKRGSVKGAKVALARRLAVVMHRMWTDGTDFRWSDTSRMTVPTAA

SEQ ID NO: 150349 - protein, 387 aa, unidentified
MYFVGIDISKFKHDCAIVDEFSDVITPSWSFQNDREGFSLLKELLDALDGEKKIGLEATGHYGQNLKLFLENNDFSFMEFNPLLINRFVHSKSLRKTKTDSIDALMIAQYLMTVEYKPYPPSFYTFEKLKSLTRFRDSLIRQRSRQLVELTNILDKVFPEFKPFFKGRFSATALYILSHYASPEKISNMNSKSYEPLRRLSRGRFSMVDFVELKTLARNTVGSTSDYLLQEMEITIDIYNQLQSKVEEIELQIHDCVLALAPPILTIPGIGAASAAVILSEFGDLSKFNNPSKLLSFAGMEPGYFQSGTSESTGKMVKHGSSHLRYAMMNCAQTVINNEPTFAAYYAKKRAEGKEHRVALTHVAKKLLRVIYTLQTKELSYNPDLVR

SEQ ID NO: 150350 - protein, 409 aa, unidentified
MEVIYPRCCGLDVHKREVVACLVRTDADGTTHKEVRAFGTMTPDILTLADWLATHEVSHVAMESTGVYWKPIWNLLEDSFILLLVNARHVKAVPGRKTDVRDCEWLADLLRHGLLTGSFVPDRPQRELRELTRYRTSLVRERTAEANRLQKTLEGANVKLASVATDILGKSGREILAALVAGETDGAELAQLAQGRLREKIPQLERALVGCVGAHQRFLVAEQVAHIDFLDEAIARVSAEIAARVHPDEDAIVRLDTIPGVGRAVAEAMVAEIGVDLDRFPSAQHLASWAGLCPGNHERGGKRRSGSTRKGSPWLRTCLVQAAHAAARTKGTYLAAQYRRLAARRGKAKAAIAVAHSILVIAYHLLTEGTIYRDLGSHYFDERDRQGVERRLVHRLEGLGYTVSLAPAA

SEQ ID NO: 150351 - protein, 326 aa, unidentified
MDILGVDLAKLTFDATLLTTSGEQLYQSFPNTPDGFTQLQSWLTQHSVTQLHACMEATNIYYEALATWLHTHGHTVSVVNPARIKGYGQATMQRNKTDKLDSAVIAFFCRTHRPKAWQPLSESQHRLRALVRHRDDLLQTQLQQKNRLRDTSDSMVRASLEAVVEVVAKQLQAVERAIKEHLAAHEELRTNLQLLTSVVGIGMVTAAKLLAELGAIEQYESAKAAAADVGVTPSTFESGTSVRRRARMSKMGKAGLRAALYWPAITAMQRCPGCKAYAERLAARGKAKKVVIGAVMRKLVHIIYGVLKHQTPYDPSKVFGPTTTST

SEQ ID NO: 150352 - protein, 337 aa, unidentified
MKRFAGLDVSLSTTSICVVDGQGRVVFEGVVTTDPDAIGAVLAPHGADLVGLEAGPMSEWLHAGLSRHGLETVLMETRHVRAALKASLIKTDRRDAYGIAQLLRMGWFRPVHVKTASARERRVLLGARDTLVRRLRDLDNSVRGLLRGFGLRSPRLLRERWSGAVRRLIAVHPVLVAAIDPILVARDRLSEELARLDKLVRDQARDDAVCRRLMTVPGVGAVVALSYVAAIDDPARFARSKAVGPALGLTPSRYQSGETDRPGAITKAGDARARVALFEAAHVMMTRVARWFPLKAWAMRVAARRGAKRAKVALARRLAVILHRIWVDGTAFQAQSG

SEQ ID NO: 150353 - protein, 457 aa, unidentified
MPQPKRSRSRTGLSAVHPAAAAIDIGATMHVAAVGPDRDTEPVRTFGTFTEDLHRLADWFARCGVKTVAMESTGVYWIPVFEILEQRGFEVMVVNARDAKHVPGRKTDVSDAEWLQRLHEYGLLRPSFRPQAEIAGLRAYLRQRERLLDYAAAHIQHMQKALMQMNLQLHHVVSDITGVTGMNIVRAIVAGERDPNVLASHRERGCHASVETICQALVGNYREEHVFALSQAIELYDVYQTKVAACDRQIEVILKRLKESATPPASKLLPPKHRSRQPNAPSFDARAALHAILGVDLTQIHGLGPYLALKLVGECGTNLTAWPTAKHFTSWLGLAPHNKISGGKVLSSKTRRTSNRAASLLRLAAVSVGRTDTALGAFYRRLAARAGKAKAITATARKIAVLFYNTLRHGMSYADPGATYYEERYRQRVLGNLQRRAKSLGYVLHQAERDPVQMVVS

SEQ ID NO: 150354 - protein, 338 aa, unidentified
MYYTGIDLHKFTSYLTTIDSSGVILKQENLKNVAHNFVQYFNSIPGEHQATVESTMTWYWLNDLLTSINIPLVLAHAKYVKAIAYAKVKTDKVDSHTLAQLLRMNFIPVAHKISNDNRTLRDALRARLKIVQRHTSVTNSMQLLLAKYNFDSPTQLSGIPEFQYEQLTKVEELLNEQMLELEKQLYPSLIPNDDIQRLLWIPGIGKMNAFTILLEVDDINRFPDVKNFFSYSRLTPSARNSGGKSKQRSSKDGNKYLKSVFTDAAIHAVQYYPVIKKFHNSLLHKKNKFVARTIIAKEIARVVFYTLKYKTDFNNKFKGKELEHTKSLQWPRVVSPSA

SEQ ID NO: 150355 - protein, 357 aa, unidentified
MAIVGGLDIHRKQLTFDWVDDQNDKWERGRISPADREHLADWLTRFDPATAGPVAFAMEGCTGWRYIAEEMDKAGVIAHLAEPADTSVLRGPKRRAKTDKADAKLLRELLATGRLPECYIPPAQVLEWRALLELYQDLRSQHTGWAQRIQAVCFHQGTTAPGQAGVVRGDRARLKAIVDGQLSIVGRLQVNTAMSIMDVLAEHLDRLRRRLLSTARGVKGARALMHDIYGVGPMSSLALCAWLGGEQRFSSSRKAVRFVGLDITVHSSDGKRSPGRLSRQGPEVLRWLLFEAAKTSARPCAPGYGYYTQVKDRYDANRACLSQARRIVRHATHILTGLGDDAFTILAQPAAPTTITR

SEQ ID NO: 150356 - protein, 352 aa, unidentified
MIKFIAKNKDIFVGLEDSKRSWKLCVRSEKIVIQETSMPAKYEALKSYFRNNFPGCKIKIIYEAGFKGFTLHDRLISDDFECVVTPPHTVTQEKDNRVKCDKIDARRLALNLENGDFKSCCVPDKELREDRQISRMLIQVQKDINKCKNRIRKFLDFHGYDEEFPAGTWYDREYKALEEFKFPEPLKAQMDIYLSTLKHFAETKKKLTELLKALTKKKRYARVFELFESAPGVGWYTAIRLILEWGTDIAQRFKTDKKIASFTGLTSSEFSTGETVKRGRITGQGNRTVRAWLIESAWTAYKRDPALLHKFQEVYKHTSSKKKAIVAVARKLAVRLRALVVTDTPYQIGVAR

SEQ ID NO: 150357 - protein, 273 aa, unidentified
MEIARIGLDLAKNIFEVHGVDAQDKAVLKKTLRREAVTPFFANLSPCIVGMEASSGSHYWAKVFTDLGHEVRLISPQFATPYVKSNKNDRNDAEAICEAISRPSMRFVPPKSSEQLEIQAVHRIRQRLVANRTRLVNQIRGLLAEHGLVVARDISRIRRALVQIADGVDHNLGEMFVELVRDVREELRELDERVVAYTKLIRDFFRSNEMCRRIGKIEGIGPITATALVAAVGDRTCFKNGRQFAAWLGLVPKQRSSGGNSRLFGISKRGDRY

SEQ ID NO: 150358 - protein, 416 aa, unidentified
MKLFVGLDVSSEKLDACFMTDDSTCSVLKEASYGNSQLGASQIKEYILEFSQKFEIESLVIGMEATSLYSFHPAMFFKEDLELNQLNLMVSVEQPNKIKKYRDIFEENKNDQIDAFYIADYFRIQRQVNSIIKEEEYLALQHLTRTRYQLIKQLVRTKQHFIENIYYKCNTLSKELKAEGGSVLSATLVTLMTEDYTMDQFAELSLEEFANLIQKLGKYRFKNPEGIAKAISKAIRSSYRLGKVHQDSVDIVLGVLAKEIRSLEKLIKDLDKAIDDLVVVLPEYQCLTSIPGIGPVYATGILAEIGPINRFSDESKLAKYAGLYWRQNQSGNSEYENTPMAKRGNRYLRYYLVEATNSVRRYEPEYHAYYKKKYAETPKHKHKRAIVLTARKFTRLVDTLLRNHQLYMPPRSVIDK

SEQ ID NO: 150359 - protein, 491 aa, unidentified
MTKGKTYRPPRDEALPIDTMDFADGDIVQPLYPYGIGIDCHSKFIEVCVFVKTGEGIRKFEGTYSTSWKSLLAAHDWARRIVHVKSNPTLTPEQLRYTIESTSTYHMPVMQAWGGKPCVVNPLLASSTRRKTDKLDARMMAYQSMTGLWPASFIANPEVQAFRLLMKHRQDAGRAATAISNRINNYLLRFGHTIGATGSVRGITARAIIEDMCQDGFTYQDGMYEGLREGEYICPAGLPDDVKPLIKIMWSEFDIQKARENEFLKKALCKAKGMMWETRNGEIKGDTLINHLMSVPGVGETTALTWLAEVVTPLRFSAKQKLVAFCGCDPSLKVSAGKVTSQTRRGGNTRLHFQLIKVAGSCINRHSEPFGQWGYAISQRHAKGGYKKACGAVARRIATAMYFIHAYGEPFSYDKYNFYKIKVPDVSLDEMQFSTRTRNVLTHNNLSTSQAITSLFITGELHKLRGLGRKSIAEVDSWIQSNKSKKRSITP

SEQ ID NO: 150360 - protein, 410 aa, unidentified
MNSTRNKKIEQVKETTMIVGIDIGSEKHYFRAFNWRGIELTRKPVAFSNSMEGFNSFYNTIVELIQKSELEEALVGIEPTGHYWFDLGQFMGEKNIKFVMVNPHHVHKSKELDDNSPSKNDRKDPRVIAGLVRDGRYFYSYMPTGVYAELRNASNRRFVLVEEQTRAKNRLQKWIAVYFPEYKGIYTRIDAKGGLLVLKQAPTPEEIVRLGVEGIIKIWKDAKLRGNGHKKAMLILNAAMKSIGLKAGLTEARMEIQDLIEDYELQTKRLERVNDLIKELCQQIRYADKLLEIKGIGITTIAGFIAEVGDITRFDSAKELQKLAGLELVADSSGKHNGKTKISKRGRKRLRYLLFEAAISVVGKNKEFKKIHRYYTTREKNPLKKMQSLIAVACKLIRVFHVILTIICTI

SEQ ID NO: 150361 - protein, 341 aa, unidentified
MKNEQGLLSQNVGIDVSKDSLDIVFSTIDIQQYVKVQGSRRFSNSLSGFEQIHKWIENKRDGDVEMRISMEATGIYHESLALFLHKKKYSVAVILPTRAKRYLQAIGHKSKTDAIDARGLARMGLEQRLPIWEPLSRNIYSLRLLTRQLEDFNNQRTVFLNQLHALSHSGYEVKEVEKSLRKMVKGLEQGIFQLEQAIKKLIEKDETLNSKVEKLLTIKGVGLKTIAVLLSETNGFAGFESQGQLVSYAGYDIVKNQSGERLGKTRMSKKGNAHIRRAMHMPAFSVVRHQVPPFFSLHQRLRDKGKKKMQAYVAVQRKLLILIWTLWRKNDDTPIVRTKNR

SEQ ID NO: 150362 - protein, 344 aa, unidentified
MQHFAIDLGSMESQICVRQPDGQISFERKVPTASLKAYLGRQPKSRVIVETCAEAFRVADLAMDLGHEVRVVPATLVRSLGVGARRIKTDRRDAQVLSEVSCRIDLPSVHVPTHLARQRRSMCGMREELVASRTALINCVRGWARTQLLKIRSGDVVTFPKRTRDATLKSPSGLPEYVERLLKMVEALSEQISAANSELEELAAQDPLCQRLMTVPGIGPVSSLRFAAALDDCSRFASAHAVQGYLGLTPGENSSSQRQQRTGITKAGPAPVRRLLVQAAWNFRRLCPDDTISVWASAIEKRRGKFVATVAVARKLAGVLYALWRDGSIYEPNHHSRVQNVTPS

SEQ ID NO: 150363 - protein, 355 aa, unidentified
MISTKYIGMDVHKESISIAVLNAAGKVVMECVVETKASMILQFIDGLRGDVQVTFEEGTSAAWLYDLLKPHVTKLVVCDPRKNKSMREGNQNDKIDARRLAELLRLDHLTPVYHGEHGLRTLKELVRSYLTITRDLARVKSRVKAIYRSWAIPCTGKQVYAQRHRAEWLSKINEPGVRRRAECYYQQLDALRVLRLGIRRDLLAESKKQKAWKRLCQIPSLGPIRAAVLLGILQTPHRFRTKRQLWAYGGLAIETHSSADHRRVDGQLQRSRKNVLVRGLNRNSNHDLKNLFKGAAAVASSKPGPFEQFYTALVAKGMRPEMARLTLARKIATIVLIVWKRGVSFDAQHLKPQTA

SEQ ID NO: 150364 - protein, 348 aa, unidentified
MTTIVEDARAITGGVDTHADLHVAAALDPIGGLLGVQELPATAVGYASLLSWLRSFGTLAVAGVEGTGSYGAGLARYLAAAGVRVVEVDRPDRQDRARQGKSDPLDAVSAARAAQSGRASGAPRGRDGAVEAIRALMVAKRSARQERTQAINQARALIVTGPEELRARFGQRSPAQLIEAIAALRPRPGEVPGYATRVALRELGRRAQFLDAQLERLDELITPLVTARAPGLLALHGVGPDTAAVLLVAAGDHPERLRSESSWAHLCGAAPIPASSGKTAGRYRLNRGGDRQANSALWRIVLVRMRSHPATRAYADRRSKEGLSKKEIIRCLKRYVAREVYRQLRAES

SEQ ID NO: 150365 - protein, 335 aa, unidentified
MEVTKQSIGIDVCKSSLEVKFKEKSTKGIKIKGSSKFDNTSNGFNKLLEWCTKREKVKNVVYVLEATGVYHEDVLYFLFDQRKKVSVELPQRIKYFAKSKGVKTKNDLIDSGIIADYGLERELKVWQPPGKEFKTLRDLSREHNTLTNSKSVAKNRLHAAKYSHDKNIKVIERLQSTIKFYSNQLSEIEKDIKTTVDADKELSMRIKKVTTIKGIGVMTVVKVIAETGGFYLFQNINQLISYAGLDVVENQSGNHNGKTWISKKGNADLRNALYMPALSAIRFDEKIKSFNDRIMATHLYKKQGIVAVMRKLLILIYTLWKKNEEFNSDYKWGRG

SEQ ID NO: 150366 - protein, 369 aa, unidentified
MPSSPIDGRSGLTTIAQSAGERRVLGGVDTHKDVHVAAVIDDVGRILDTAAFVSTRGGYRRLLAWLGAFGELIAVGVEGCGSWGAGLSRYLAARGVGVVEVNRPNRQNRRRRGKSDTVDAEAAARAVLAGEATVTPKAGTGPVEALRQLRVARAGAMKARTAAANQLHSLIDTAPERVRAQLRDLTFKKKITLAARWRPTRTATPDGASRYALASVARRWQALATEIGELGRRIKTILDDVAAPLVAVHGVGYDTAGQFLVTAGDNPDRLRHERSYAALCGSSPVQASSGKTDRHRLNRGGDRHANSALWRIVIVRMTSLQPTKSYIARRTAEGRSKQEIIRCLKRYVARELFPHIAAIVPPERLRGAA

SEQ ID NO: 150367 - protein, 369 aa, unidentified
MSDYREAFVGIDVAKLRNAIAIADAGREGEVRFIGEVDASDESMRRVIQRIANRFDRVHFCYEPCPTGYGLYRLIRSLGHECTVVAPSLIPRKPSDRVKTNRRDALGLARLLRAGELTAVWVPDEGHEAMRDLVRARAAAVETLWVHRQQVSAFMLKHGRSYPRKKGWTMRYLCWLQAQQVDHPAHQIALQEMVEAVRFSKERAERLERVIEEFVPAWSLAPIVRALQALRGVDLIVAVTFATEIGDVRRFESPRQLMGYVGLVPGERSTGETVRRGGVTKAGNGRVRHMLVESAWTYRHAPKVGAKKLYRLEQAPPGVREIAWKAQARLTARYRMLSGRGKKTTVVCTAIARELVGFMWAVAREAHAT

SEQ ID NO: 150368 - protein, 362 aa, unidentified
MKKDLQHTEQNPPTPGASKTIGIDLGDRWSRYCILDRDGEIVEEDRLRTSVAEVEQRFKKMSATRIAIEAGTHSPWISRLLEKLGHEVIVANARKVRLIYESDQKNDRLDAQMLARLARVDVNLLAPIHHRGAETQADLAVIRGRDSLVAARTQLINAVRGTVKSSGGRLPKSTTAAFAGKVSALIPSELNVALEPLLRSIAALTEQITKADEQIAKLAEEKYPETQLLRQVKGIGPLIALTYVLTVGNPHRFANSRTVGSYLGLRPRQRESGASAPQLGITKAGNNHLRWLLVQAANYILGPLAPDSGLRRWGLGLAAKGGKNGKRRAVVAVARKLAVLLHRLWVTADVYEPLYGIESEAA

SEQ ID NO: 150369 - protein, 325 aa, unidentified
MTQTTSPDSSYFVGIDVAKAKLDLGRSDTGEILNVNNGPEGIGRIVDSLRSTPPKMIVVESTGGLERPLLDALLEADLPVALVNPRNVRHFAIGIGIIAKTDPIDARVLVEFARLASPRLAEKRSANQVELDALITCRRQLVQARAVQINCRGATTSRAAIKTIDAILKALRKEILKLDKKIRALIESDDDFDSTDKLLRSVPGVGDVVSATLLAELRELGSTDRRRISALVGVAPYNHDSGTMKGQRSIFAGRASVRSVLYMATVTAIRCNPVIKAFADRLDGLGKSKKVQIVACMRKLLGFLNAMIRDQLTWHQLSVVKALAI

SEQ ID NO: 150370 - protein, 342 aa, unidentified
MQVTTIGLDIAKNVFQVHGIDAAEKVVVRKQLRRRQVLEFFKALPACLVGMEACATAHYWARELTKLGHRVRLMPAKDVKAYVKRNKNDAADAEAICEAARRPTVRFVQIKSTEQQGRLMLHRARDLLMRQRTQVINAMRAHLAELGIVAAQGRDGIKELLKIIASEADARLPVDAHTSLVVLAAELQAMQTLIGSIEKRIMVQHRLSEASKRLESIPGIGLIGATAIAATVPDPKVFGSGRAFAAWIGLVPREDSTGGKQKLGPISKRGDRYLRRILVVGACAVLRYARHKPEKYPWLTKLLERKPFKVVAVALANKMARIAWALLAKGDTYRVPALAAAA

SEQ ID NO: 150371 - protein, 342 aa, unidentified
MTELSAIGLDIAKRVFQVHGADAAGRPVLRKKLKRRQVVAFFTALRPCAVGLEACATAHHWAREIGALGHDVRLIPPQYVKPYVKTNKNDVTDAEAICEALMRPTMRFAKAKNAEQQSVLMLHRARELLVRQRTMLINALRGHCAEFGITAPQGISRAGALISCIDEGDDRLPPLARRALASLVAQIKAIQAEIAGLEKELLAWHRSSEASQRLGVIPGVGVITATALVATVGDASQFRSGRQFAAFLGLVPRQSSSGGRDRLGRISKRGDGYLRRLLVHGSRAVLRWTRSRPQRRSPWLEGLLDRRPTNVVLVAMANKMARIVWAMLSRSEAYEPNRLATA

SEQ ID NO: 150372 - protein, 408 aa, unidentified
MEVLYPCCAGLDVHKDVVVAAVRCVSTPRHSEVRSFGTTTSGLLALSEWLASHACTHVAMEATGVYWKPVWHVLEGDFELVLANAQHVRNVPGRKTDVGDAAWIADLLAHGLIRGSFVPPAPIQELRDLTRTRKQLTREIAQHTLRLQKILEDANLKVASVLSNILGCSGRAMLEALVAGETDPGRLADLAQGTARKKRSALVESLRGHVTPHHRALLRLHLQLVDALQAALQEIDSSLGKALASIRQAVRRLTTMPGLSDIAAHVVVAEIGLDMERFPTPAHLISWAGLCPRSDESAGKRRSVRVRKGAPWLKTTLVTAAWAAVRKQDSYLRSQFLRIKARRGAKKAILAVAASMLNACFFMLRDGVDYKDLGSAHFDRFDRRKTIRRLVRRLEDLGCQVEISANAA

SEQ ID NO: 150373 - protein, 322 aa, unidentified
MSVTVLGIDIAKQKFDVALLADEKIKHKTCKNSAEGFEVLTDWLEKQGVGNTHVCLEATGNYGEDLAIYLHEAGHTVSIINPARIKGFAQSELIRTKTDKIDAALIARFCLAMKPETWTPPAPEIRSLKALVRRVDSLIDMRSQEKNRISMAHESVLLLIKEHIAYLDEEIEKIRRQIDDIIGKNPHLKQKKDLLASIPGLGKATIPHFLAELNNLDKFTHVREMVAFIGLAPKETISGSSIKGKPRLCKIGHARLRKVLYMPALVSIQCNPAMIAFHNRLKERGKNGKVIVCAIMRKLVHIIFGVLKSGKKYDPNYKPSLA

SEQ ID NO: 150374 - protein, 318 aa, unidentified
MKENSTKTWVCAGVDIGKSSLAYALAGGDGPVESPNSAEGRAQLVAFLRRHDVRRVGMEASGGYEIEVADDVRAAGLEVVVFQPMQVKAYARFKLQRAKSDPIDAVLIAQCAAACDKARDAPDPRLAAFAEHLTLIEQIEDDIARAKVRRERYRDARLKQTIEDEIKRKTALKRAELRLLVNAVRAHKDLARKLFLLGSIQGVGERTALALVVRMPELGRLSREQAASLLGVAPFIHESGRYKGQRRTGGGRARARTSLFAAALAAARQWNPALIALYDRLTKAGKPHALAIVACVRKLIIYANTVLAQDRPWEIRPC

SEQ ID NO: 150375 - protein, 358 aa, unidentified
MRLATRVDFVVGVDTHKNSHTLGLLDRTGAEVADTTLATDAFGYRKMLAWVRERTTDPERRCWAIEGTGSFGAGLTTYLLEQGEWVVEIDRPARPARRNGAKSDVLDAYRAAREALARDHVAQPRRRGIREAIRVLLTTREGAVRARSRALCHLQALVVNAPTQLRDQLRRHKTDALVERCARLRIMANHSIEHRATIRALRATARRIQALTAEADDLEAELELLAADTAPELLAEPGVGAISAAQILNAWSHPGRIRSEAAFAMLSGSAPIPASSGQTVRYRLNRGGDRQLNRALHTIVLSRMRFHPETKAYVARRTAEGRTPREIKRCLKRYVARRLFRLLETSHPSENTTSLEAA

SEQ ID NO: 150376 - protein, 408 aa, unidentified
MEVLHPRCGGLDVHKDTVVACARVAADGKVGQEVSTFETTTKGLLALSDWLSERQVTIVAMEATGVYWKPVWHVLEGTFELVLANAAHIKNVPGRKTDVNDATWIADLLAHGLIRASFVPPTSTQELRTLTRTRKQLVRERTQHTQRIQKTLEDANLKISSVISDILGQSGRAMLNALIAGETDPEKLVALASKRVRASRESLVESLRGRVTSHHRFMLKLHLTQVEALEMAMDAIEAEVGSVLEPFRAKAELLITIPGISDIVAQAVVSEIGIDMSRFPTSGHLISWAGLCPKNDESAGKRRSTRLRKGGSWLKTILVQSAWAATKCKDSYLRAQFLRIKSRRGPKKAIMAVTASMLTAIYFMLRDGVAYRDLGADHFDRHDKSKTITRLVRKLKTLGCDVDVKQAA

SEQ ID NO: 150377 - protein, 359 aa, unidentified
MRFYNQQHRHSCGVDLHVKMMYLCILDATGQVLLHRNMATTPDAFLTAVAPYREDLVVAVECMITWYWLADLCAAQGITFVLGHALAMKAIHGGKAKNDKIDAHKTAVLLRGGLVPQSYVYPAAMRATRDLLRRRLHLVRKRGQLLAHIQNTRAQYNLPSFERRLAYPANRDGVSLHFPDPSVRKSVEVDLALIDQYDVLIADLEQTLVREAKYDDPDAFHRMRSVPGIGPILALTILYEIHHIGRFDRVQEFASYARLVTCAHQSAGKTLGTGGAKMGNVHLTWAFSEAAVLFLRHTHTAPVSKFMTRLEKQHGKAKALSILAHKIGRAVFYMLARGTVFSLPKFLAAYRKGAGEPLV

SEQ ID NO: 150378 - protein, 353 aa, unidentified
MGVRDMKYVGIDLHRDFFVAVAQDETGSELFKKRYENSIVSVEELVSTFEVPPMVVVEATRNWMWFIQALQKRGCSVQLAHPFRTKAIAFARIKTDSIDAKTLCDLLRADLIPQAYIAPVETLDNREIGRARIYLVHDQTMLKNRIHAIVIKENFKFEGTDMFGIKGKEWLSKQELTTGAREVIMVYLKQLEGVQKSIARVEELIKQRSSSIPEVKQLQTIPGFGTTTAFLLAAEVGNVKRFTTAKKFASYFGMVPRLSQSGNHAYYGRITKLGNPYVRWLLVQAAHRYYRMDKEAKRFVDRLSYRTGKKKATVALARKIGVIAYTVLKENRSYEKRTKETLKVCPVIIPERS

SEQ ID NO: 150379 - protein, 338 aa, unidentified
MTIAQAPRTYELFVGVDIAATMAEVSTQRTGAKASRSFTIDQTPEGYHRLVRKLQTFGYAPSRILVVMEATGSYWISLATHLVHEGFRVSVINASQAHHFAKALLKRAKTDAIDAQTLAQLAMVLQPETWMPPPQIYYELQQRMAQRDDLLNLRQQVRNQLHALEQHPKVIQAVRNRMESLLSTFQSQIDEVEVEIAAALNQDSAWATAAERLQSIKGVGWVTATWTLVTTLNFTTCDTVDSLTAYAGLAPMPRQSGASVWHRPSIGHSGNSRLRTAYYMASLTAARFNPVIQVFYSRLIEAGKPEKVARCAAARKLLHIAWAVVKKDQPFDPNYARG

SEQ ID NO: 150380 - protein, 489 aa, unidentified
MRTSAPIRAVVADQNGSQLSTRTIRTTSKDHLALLRWGAEQCDDRMWAVEDCRHLSRRLERDLLAAGERVVRVPPKLMANVRDGARTYGKSDPIDALAVARAALREPNLPEARLDGMEREVRLLVDHRDDLVAERTRIIGRLRWHLHELDPGWTPPKRLDRASAYDKIEAFLSELSGLVSDLATRLVDHLRRLTVEIKELATEITTRITVLAPSLLAIPGCAPLTAAKLIGETAGVDRFRSKDAFARHNGTAPLPVWSSNRARHRLSRTGNRRINAAIHTIALTQAHCHDDARALMSRRKANGDGGMEALRILKRQTFRCRLSRHARRPTIDGLRYRCLTEEQVTVADLAECARVLAGDARRGGSALDEPGVVGDPRIRGDQTTRPARQCFPHRCDIPRRSGHELLQLLVIDLQPPTGTRRGHVTSRRHERSAPEEVELGHDHRRGRVREAEFDPHPVPAGIEPYLNYQSVYKTSASYRVPDISGPPVE

SEQ ID NO: 150381 - protein, 309 aa, unidentified
MLTAEADKCKTKVVVNTAAGVQALLAWCAKHGAQPAQLHAILEPTGLYHEQAATALPQVRVSLVNPAQARDFAKALALRSKNDALDSYVLARYGQTLSPALWHPAPLHARQLRALLTRREALSKDLLRELNRKEKSQFSPSAPLVDGSIDKAIAFLREQIKQIERAIDQHIDNHPDLKQDCELLNSIPAIGPQAGNAILAVMHNRHIDSAQSLAAYLGVVPVQRQSGSSLNSCAHLSKAGPSQVRATLYMAALVGTRHNPHIRALYQRLLKAGKSKKAALGAAMRKLVHLCFGVLKNRIPYQPNYAMNG

SEQ ID NO: 150382 - protein, 362 aa, unidentified
MSMKATCLVGLDVHARQTHAAILYLESGELAVSRLRMVPDEVVSFLERLPGPLVAVYEAGPTGFGLARAGRQRGIDVRVVAPGSIPKGSGDRVKTDRRDAIRLVRLLAAGELRFAFVPTEEDESFRDLVRCIEDLRGDLMRARHRLSKFLLRRGHRYQNGGAWTPKHNRWLRSLSFDGCAQATFVDYCSSVELLAGRRATLLMTLEQTAPGCSHAQTIGRLRCFRGIETLTAAGLCAETGGFERFPRPTLLSGFLGIVPSERTSDLKRRQGAITKAGSPHARRLLVEAAQHYRKQPAITHTLTRRQDGQDPRVIEIAWRAQRRLHQRWQHLHTERKKPAGVVAIAVARELAAFLWEAATLDA

SEQ ID NO: 150383 - protein, 351 aa, unidentified
MNNATARKRTQLTIGLDLGDRRHTYYVLDGAGKMAREGSLGNTRQQLATMARSYPGATVVMEAGTHSPWVSRFLQELGLRVIVANPRKTRAIYQNERKSDRRDAMMLARLARMDPTLLHPVEHGSQEAQQDMLQLKLRDSLVRARVALINAVRFTLKSLGYPVSNPSSERFHKLVLSEVPESIGEMIAQNVAAIAELTQRIKALEVSISRLAAERYPETIYLQQVSGVGPITSLYFVLKVGTPGRFQRTRDIGAFLGLCPRRDQSGETDKELRISKCGDQYLRGLLVNAAQYILGPFGTDSALREHGLRLAQEGTARAKKRAVVAVARKLAVLLLTLWKSREPYESFHTMV

SEQ ID NO: 150384 - protein, 402 aa, unidentified
MNSVGIDVSKGRSTVAVMRPFGEVVISPFEVRHTNSELSALARLLKSLDGETRVVMESTGYHHTPVAWLLHDAGLYVSVVNAMLVHDYGNNSLRRAKTDKKDAVKLANYGLDHWLTLPRYIPEEDTRLMLKICYRQYQQYSKVQTMLKNNLISLLDTTFPDANRLFTSPPRADGSEKWVDFVATFWHCECVCGRSEKAFTTQYQKWCRKHGYNFSEDKALDIYASACRHFGVIPKTDTAKLLVEQAISQLQTTSSALAALKQEMQSLAASLPEYPVVMGMFGVGPTLGPQLLAEIGDVRRFHSKKALVAFAGIDAPPYQSGQIDVRSRSISKRGSASLRRTLFLVMSVILQCAPIDEPVYQFMDKKRSEGKPYRVYMMASANKFLRIYYASVKAYLESLEHD

SEQ ID NO: 150385 - protein, 334 aa, unidentified
MKKRYFMGIDVAKATLDFCLLSKNATLLWRGQLRNEAQAIGQFLAQMQARGYKLAQIHFCCESTGVYGQRLVEALDQSALALSVLNPAQVKFFAISVLRRTKNDKVDAEIIARFCRERKPLATRPLRPIESQLKLLVHERESRVNEQTRERNRAKKDPYQIALPKLISQQRQSRLKQLAKEVAQFDAAIDSLMASDEGLKQQSRLLCSIPGIAKVTAAKLLCELAGKEFQSARQLAAYAGLTPQECRSGFSSYGKTVLCKIGNAFLRKALYLPAAVARRWCKPLRPWIALLETRKLHALAIRGAIMRKLLHIAFGVLANHQPFNPMLVFIPKAP

SEQ ID NO: 150386 - protein, 343 aa, unidentified
MEHYAGIDVSLERSSVCVVDATGRIVREAKVASEPEALVVLLRQLGLPLARVGLEAGPLSQWLHAGLAEAGFEAVLLETRHVKAALSAMVVKTDRKDARGIAQLLRMGWYRPVHRKSLSAQEVRALLVGRKLLQAKLRDVELSIRGILRGFGLEVGEVSRGRFAARVEELAAGHEMLGTVIGAMLQARDGLRAEFVRLHRRMLAIVRDDAVCRRLMTAPGVGALVAVTFKTAVDDPGRFRTAKAVGAHFGLTPKRYQSGETDVTGGISKVGDAMVRTALYEAANVMLTRTSRVSALKRWAMEVAKRRGAKRAKVALARKLAGVLHRMWANAADFRWGKEEAAA

SEQ ID NO: 150387 - protein, 425 aa, unidentified
MNDSTLCIGADIHKKDIVLRGVDKADGHEVVERFRVTNNLPGAQSAVEIIAAAATELGYGRIAIGWEATGMLWIPFHRYLSTAPLLQPFELELICFNPKLIAKFKDSIDLRGRKDDDRDAYDIAARVRFGELPVSFVPDDFWQGLRRLTRYRFKLSQTLSREKMRFRSYAFLKCSGWKPKQPFADVFGATSIALLTQFTAAQLRDFSQDQLADIISHRGHGRFHDPHATARAVQRVLASSYPIDLEMDEMITFTLATMWDNIRHIKRLMKRLDRQITQMIEPVPNPLITVKGLGPVITAGILAEIVDISRFPDQAQLAQFTGLTWHKRSSGNFVSENTRMTKIGSQQLRYYFILGADSLRRHNLEYKAYYWRKYQQVTKHQHKRALALTARKLVRLVHALLTKNVPYVRPQMPAHFLLEEDALLQ

SEQ ID NO: 150388 - protein, 328 aa, unidentified
MSASAIVPLGIDISKGSFDVALLRESTRVKRAKFDNTAAGFAQLSEWLKSQDSEQAHACLEATNTYGHALARYLYHQGHQVSIVNPARIKGYGKSQLSRTKNDAADAALIARFCRDLKPTLWHPAPDEVAKLQRLTRRLEALEQMMTQEKNRRELCNDDELKADIDAHIEFLEAQETALKKRLQQHIQAHDHLAEQQTLLESITGIGTQTALTVLGEIGSIEVFGSARQLAAFAGLTPQEFQSGSSINGKTRLCKIGNARLRKALYFPALVMIRYCPEIQAFRQRLLAAGKQKMQVVGAVMHKLIRIIYGVLSSGEKFDSAKLVPQNT

SEQ ID NO: 150389 - protein, 369 aa, unidentified
MAGGCLPIVTEVGCDQAEVGQTEEDDVEQYVGLDVSLEQTSVCVVDAGGKTLWQGKCGSTPEAIAAAVRNRVPEVTRIGLESGPLSAWHWHELTKLGLPVVCLDARHAKAALSMQLNKSDRNDARGLAQIVRTGWYREVMVKSMDSQLVRSLLTTRAQLVRMRVDLANQIRGVLKPFGLVAGKGSGQPFVERVRSLVADGPLQEVAEALLSAWQAINGQISTLSRRLIVMARQDQNVKRLMTAPGVGVLVALTYVSVIDDPQRFAKSSSVGAYVGLTPRRFQSGEDDYTGHISKHGDALLRTSLFEAAGIILHRVAKWSALKAWGTRLAKRIGAKKATVAVARKLAGILHRMWRDGSEFRWSAQDAQAA

SEQ ID NO: 150390 - protein, 343 aa, unidentified
MEEVSTIGLDIAKQSFHAHGADASGRRLFSRKITRGKILAFFAAQPRCVVALEACGGAHHWGRELMRLGHEVRLLPPSYVKPFVKRHKNDAADAEAICEAAQRPSMRFVAVKSEEQQASALTFRTRDLFVRQRTQAVNALRGHMAEYGWVAPQGRTHIATLAELLEEEAGASVPHAAVAMLKIMLSVVEELDGRIAELDKEIVRRAREDMVARRLMTIPGIGPIAATAIAALAPPLETFRRGRDFAAWLGLTPLQKSTGGKQRLGKMSKMGERTIRRLLIIGSSSVVRHASRPGAPERPWLAAMLARKPRMLVTVAQANKTARIVWAVLTKQEDYRAPAAKAA

SEQ ID NO: 150391 - protein, 319 aa, unidentified
MASRSGRRVSASERGYAQALRLAEREAPGRRAWAIEGTGSYGAGLARFLAAHGERVLEVGRTKRERRSHPKTDALDAQQAARSVLGEAKHAAPRAAGEREALRALMVARAGALAAKKAGLCQLRALLVTCPEPLRSELRSLTLARLLRRLALVRPNRHHEAEMRGALIALRALARRVQALTAEERELKREIQALVAGLAPALLDEPGVGPVAAAQVLISWSHRGRFRSEAAFARLAGAAPIAASSGLVLRHRLDPGGDRQLNRALHTIVVSRRKHDPATIAYLERRRAEGKSVRETIRCLKRYLARHLFRLLETGPIAA

SEQ ID NO: 150392 - protein, 366 aa, unidentified
MTSVSSAAELIHLGMDTSVNEIVVAVLRPGQEIPAVDRIRNDEESVRRLIGRFPDRRLLSACYEAGPGGYELHRLLASMGVACDVVAPSLVPKGGSDRVKTDKRDSARLALTHRAGLLTAIRVPSTAEEAVRDLVRARADLVDDRKRMQQRLNAVLLRHGRVWRGGSKWTYAHRAWVDKQVFAEPALAETLALYRGALEAREAELAAVDRQLSAWAQRDPLAGPVARLGGYRGIAELTGLTLAAEVIDWRRFASARAFMGFTGLTCSEYSSGSRTRRGSITKAGPQAVRTALVEAAWAYRSRPRIGADLRRRQDGLPPATLARSWKAQQRLHATYAKMTARGKPPGVVVTAVARELAGFVWAEMTS

SEQ ID NO: 150393 - protein, 338 aa, unidentified
MKITTVGLDLAKSVFTLQGADERGSIVLRKTVRRGRLLELFAQLPPCVVGMEACSGAQHWARELRKLGHEPRIMAAELVEPYRCGGKNDANDAAAICEAVSRPKMRFVAIKSVEQQAVLAVHRLRQGLVEERTALANRLRGLLTEYGVVVGVGLNRLRRALPEIVEDGANGVPGIARDVLADAGQQLRELDARVTAYDRRLAALAQASEPVQRLMKIEGVGPVTATALVASVGNASVFNNGRQFAAWLGLTPRQHSTGGKQRLGAMTKHGDVYLRTLLIHGARAVLRVTANRSDAKSRWAQSLRRRRPDNVAAVALAAKHARIIWALLAREQDYRPAA

SEQ ID NO: 150394 - protein, 285 aa, unidentified
MTITTIGIDLAKNVFAVHGVDQNGKTVLVKSRVTRAALPGLIASLPPCVIGMEACSGAYYWARLFLQYGHEPRLMAAKFVSPYRMAGKSGKNDAADAQAICEAVRRPHMRFVPVKDESQQAMQCLHRNRQGFIEEKTATYNRLRGLISEFGVIAPQSTDALRHMVSAQKSSLPLQVQQCVDDLLEHVDRIEANITEYDRILSRIAKTDHRSQRLMKLKGVGPTTACALVACIGNAHDFKNGRQLAAWLGLTPSQYSSGGKSKLGRITKAGDSYLRTLLVQGLVQY

SEQ ID NO: 150395 - protein, 397 aa, unidentified
MIAVGIDVSKSKSTVAILNGDGSIRAKPFDVHHVADELQALVDYIKRTSDPPTILMEPTSYYHYPLLKAFTEAELPVCLINPYQMKKYGDTELRKAKTDKRDSLRIAQYALEKSYSLIPYTPQDQKYEDLRFLSRQYSQRISTLTVAKVQLLSLLDETMPGITTILPLKSRDPDNCVLLRFIKRFKSFDVIRKMGKTRFLDSYQVLVKKTKDRFAGSKGLAIYELVLNSVTTRGENPLSAMTQDQCVDLVSTSQKAADEINLQMRIIAETMPEYKVLRSMAGVGDRLGPIILGEIGDIRRFHSGKALNAYAGNDAPPYQSGQFESRNRHISKRGNPALRKACFEVMQALKLTKPQDDPVYLFLLKKEQEGKPYNVAKMAAVNKFLRIYYARAMELYK

SEQ ID NO: 150396 - protein, 316 aa, unidentified
MLYVGIDIAKNKHDVTALNVPGKTVLKPLTFSNNKAGFELLDLSLRQLNQDCLIALENTGHYAFNLLNFLHEQGYKVYTCNPLLIKEFAKSLSLRKTKTDKKDAHGIALKLLSDPNREQFQHDNRQVELKILARHIHRLKRKQSDWKVQYTRCLDIIFPELDKIVGKHSEYTYQLLTCYPNPQKRLEAGFDKLIEIKRLTASKIQDILSVAPHSIGTTSPAREFEIIENIKHYKRLIDKAEKCVNDLMAEFNSVITTVTGIGNRLGAVILAEIQNIHAFDNPAQLQAFAGLDSSIYQSGQIDLAGRMVKRGSPHLR

SEQ ID NO: 150397 - protein, 352 aa, unidentified
MEIIGLDLHKRETQLCRQQPDGRIVDERIPTSRVRFTQTFGGVAPARILLEASTESEWVATHLERLGHTVIVADPNFAPMYATRSRRIKTDKRDARALMQACVLGAYRPAYRLSAPRVHARAALAVRDTLVRTRARMITLIKTLVRRDGLRVPTGTSRTVGQRVATLELATTAPALGAELAPLLAMLPVLHGQIAMLDATLAAVAADDPVVARLATAPGVGVVTAVAVVATLDDITRFHSAHAVEAYLGLVPSEDSSADRRHLGHITKAGNARPRWLLVEAGWRILRSKQPETAALRAWGRAIAARRGARIAAVAVARRLAGVLYAMWRDAVPYDAAKLQRRPRRSGAPQTT

SEQ ID NO: 150398 - protein, 447 aa, unidentified
MGQRTVGIDLAIRGDHVARIFDDGRPHAKPIRFRLTSDSLHSLVARLQNGLPADSTITAVMEPTGMSWFPVACWLEQAGIKAIRVKGQRVRALRRYLSEHTKTDAADAYVLGAIPLFGGVPADPVYVPTADRHALQRLTRQRERLEEEASTIKRRLIDLVRWACPAIEAVLPDFRTNLALAILHDLFDPAIVTKTRRTTLLGFIAKNASGNHPHSGPFAEKLVDGLKAAAVETHRLHGAAVNFQHLQLEVVIEIDRMRLLESQLGILGREIQALYSALHPSDALRSIPGIGDALAPLILGVLHEAKRFAGLHQLRGFCGLFPRTNSSGGADRPGQAITQSGNNRIKRALYLAADAARRIDPGLAEVYWRLMVRKGHHHKQALCAVATRLVNRIGKVLRTGDSYELRDCTGKPITVAEGKAIVAEHFVIPVEIRNARRRQRVESLLLT

SEQ ID NO: 150399 - protein, 355 aa, unidentified
MTSAKYIGMDVHKESISIAVLNSVGKVAMECVIETKASVILQFLNGLSGDLHVTFEEGTAAAWLYDLLKPHVTRLVVCNPRRNALLKVGNKSDRIDAQKLAELLRGNQLQPVYHGEHGLRTLKELVRSYLTVSKDLARVMTRVKALYRSWGIPCSGTQVYSRLYRVTWISKLTEPGVRLRAAFYFQQLDALRTLRQEVRRELLAESKKHKVWKRLCGIPSIGPIRAAVALGILQTPHRFRTKRQLWSISGFAIETRSSADHRHVHGRLQKVKKRVSIRGLNQNHNHDLKNLFKGAAVVASTKPGPFQEFYEALLAKGMRPEMARLTLARKIATIVLIVWKRGVNFDAQYLKPQTV

SEQ ID NO: 150400 - protein, 402 aa, unidentified
MDIGDIEVFIGIDVGKSEHWATALSRDGQKVLDKALPNDEDRLREVYQRLQAKGQVLVVVDQPATIGALAVAVAQDMGITVGYLPGLSMRRIADLTPGSAKTDAKDAAVIAGAARSMPHTLRAVSTSDEDAAALSMLTGFDLDLARQVNQTANRIRGLYTQIHPALEAVVGPWLEHDAVLEVIAAWPTPADLKRAGKARIDARLKKHGCRRHATWAGQIVSALEHQTVVVAGTDAAAVVLPHLARQLTSLHSQRADVATQVETLVEAHPLYQVLTSMPGIGVRTAAVFLAETLGKTFNTGAQLASYAGLAPVTRRSGSSIRGEHVSHGGNKRLKRAMFLSSFASLRSDPVSRAYYQRKRDQGKRHNQAVLALAHRRILTLHAMIRNGALYDPQPATKLPAAA

SEQ ID NO: 150401 - protein, 449 aa, unidentified
MPELDAEKPQLYAARIGIDWADQKHYWAMLTDDGKRTRGELKHTPEEIEIWAAELAQRFGGRPIAVALEQARGALVAILSKYAHIHLFPLHPTKLAHYRKSVCPSGAKGDPTDADLILDYLVKHPEWLRCLEPDTVETRSLQFLVEERRKLVNQHTRELLILTHWLKQIFPQILQWFDDVSTPLVGDLLQRWPGLPELQKASAKTLRKFFCQHNCRSEELIQQRLDGIGQAVVATTDAALLMTGHLCIQISVPLLAHLRAGIARFDSQIEALYQTHPDRFIIESLPGAGPALEPRLIAALGTKRERFESASNMACGFGIAPVTESSGNSRWVHWRWACSKFVRQTLHEWANCSIRTCEWAREHYDRQRHKGNGHHAAVRSVAFKWIRILFRCWKDRVPYSEQRYLEALRKRGATPAAPAATVEKQIQVVSGAHQWESCGGFSKFAKVSS

SEQ ID NO: 150402 - protein, 350 aa, unidentified
MRFYTGQHGFHCGIDLHAHTMAVCVLDAAGKIVLERNLATTPEAFLEAIAPYRGDLVVACECLFTWYWLADLCAKEQIPFVLGHALYMKAIHGGKAKNDRIDAHKIAVLLRGGMLPQAYVYPPGMRETRDLLRRRLHLVRKRGQLLAHLQNLTHAYNRGAFEKRIAYPSNREGVVAHFAGEPMVQANAALDLSLLAHYDEILVELEARLVKQAKKEAPRGFHLLRSIPGIGKVLAMTIVYELHDVHRFERVQQFASYARLVKCAKESAGKRKGTSGAKMGNVHLKWAFSEAAVLFVRHSAEAKALLARLTKRHGKGKALSILAHKIGRAAYYVLVREKPFDAAKFFAHAR

SEQ ID NO: 150403 - protein, 342 aa, unidentified
MDHYAGIDVSLECSSVCVVDASGKIVREGKVASEPAALIAWFGSLGWSIERIGLEAGPLSQWLHAAMREAGLAVELLETRHVRDAFKAMPVKSDRNDARGIAQLMRLGWFRPVHCKSIGAQETRAVLTARKLVQSKLFDVENSLRGILRGFGLKVGETTAQRFAGRIRQLVADYPSLAMIAEALLSIHAALLREFKAFEKQVRSMARADAKAKLLMSAPAVGPIVALTYASAIDDPRRFKSSKRVGAHFGLTPKKYQSGETDYTGRISKIGDAAVRTALFEAAHIMLVKPIKGCSQLKSWAMRIARRSGMKKAKVALARKLAVILHRMLANGTPFNAAAAAA

SEQ ID NO: 150404 - protein, 386 aa, unidentified
MVFVGIDVAKDKHELYAVDSDGVVLCDHLTFANSAVGFASLLERVSAWGKIKVGIEATGHYSSNLLSFLEAHDFEVVVFNPLSVSRLRSANSLRRTKTDKNDSRYIARLLMTGNANPYQSQSYDISVLKSLTRARFRLFQEIQPLKNRFRRLLHILFPELQGFFSNLYGNTSLNLLSALPSAKDIAECNILKLTKILSVSSHGKLKRSRAEQLKSLAKSSIAAYNYGDAFELKQTVQRILFLSSQMSEIEKEIDSVMAELNSPITSIPGIGNLLGATILSEIGDIKNFNNPDKLLAFAGCEPSTYQSGKYTASNTPMVKHGSRYLRRALYCAADMAYVNSISFRTYIDRKRAQGKHYYVAMSHGMKKLVRIIFAVLSRNIPFSEPA

SEQ ID NO: 150405 - protein, 340 aa, unidentified
MNQSMTIGIDLAKHIFFVAALDGSGKPARRKKLRRHEVLPFLANHPGAVVGMEACSGAHHWARKIRALGHSVQLLPAQHVKAYLRGQKNDYNDALAIAEAVQHGRIRCVEIKTVDQQLDQSLHRLRQALVTEQTGLINRTRALLAEHGVDLPEGKQRFRQAVIAQLEDAENGLPWRLRELLGRQYQLFIALEQELAWYEREIKTKAAENEACQRLMSVPGYGPIVSSAFYGWLGSGQQFRCGRDVAAALGLVPKQYSTGGKTVLGSISKRGDRHLRALLVHGARAVARYAKERDDRLSRWVCSLIERRGYNKAVVALANKLARIGWAVVARGQPYQAVPA

SEQ ID NO: 150406 - protein, 316 aa, unidentified
MTEAGGFVGIDVAKAELEVVVRPSGARGTVTNNPAGLAQLQERLQALAPALIVLEATGGYEVAVVAALATAALPVVVLNARQVRDFARATGRLAKTDAIDAGVLAHFAEVVRPPVRPLPDAMTQSLQAWLMRRRQLVEMLLAEEQRRSRAPRPIQRQIDQHGRWLRAQLGAVEKDLAQTLRASPVWREKDDLLRSVPGVGPVLTTTLLGDVPELGQLNRKQIAALIGVAPLNRDSGTYRGRRAVWGGRARVRATLYMASLTAARYNPVIRAFYERLVAAGKPKKVALTACMRKLLTILNAMIARRTAWKPPAAVSA

SEQ ID NO: 150407 - protein, 336 aa, unidentified
MEPTTIAIDLAKRVFQIHYVEPETGAIHSKVLKRAQLAPFFANRPASRVVMEACGSAHHWARVLARLGHDVRLIAAQFVRPFVKSNKNDAADAAAIWEAAQRPGMRFVAVKTEDQQAMLAMHRIRQQLVRIRVMQVNQLRGLLYEFGVVLPQGRRASIEAAKAALASLADELPAMLLDSLQDQLSRLCALDEQIARIEQRILSWRRNDDACLRISEIPGVGVLTATAAVSVIGQARTFRSGREFAAYLGLVPRQNGSGGKIKLGGISKRGDVYLRTLLIHGARSVISSSKHLPERLRQMLSRRPTNVVAVALANKMARTIWALLAHGRTYEAAPSQ

SEQ ID NO: 150408 - protein, 409 aa, unidentified
MYDKTKYIYVGLDLHKEQHTAVIMDCFNEKLGEITFENKPSEFTKLITKCKKHCTDSKGIVFALENSYGYGRGLAAWLIERDYIVKDVNPALSYAYRKSVPQYKKNDSYDAQCVARVAINELNKLPDAMPEDMYWTLSQLVNRRANLKTHHIRLKNQLHEQVCVAYPSYKQFFQDIGRPTALYFWEHYPSPRLLRGKTVEELAEELIPVSHNQFSTRKCQIILDAVKADGDTTRDYQPERDEITRGLVKDVQHYVEQLEAVDKSIADFLPRFECTLNTIPGVSDTTVAKLLSEIGDIRRFPNADKLANFAGIAPVNFLSAGKGDDKHSKQGNRRLQGTIYFLAIQMIQLSSKGLPRNPAFYAYYQRQLARGKTKPQALILISRRLISIIYGMLKNKTEYVMPKVQDNWG

SEQ ID NO: 150409 - protein, 335 aa, unidentified
MQIYGIDLAKEKFDVSFFDLTSKKVSNQPSHKVVTNNLKGIGKFFKGLPSDAVLVAEHTGVYGDTLLKCCMDSNVKIAFVGGYVIHRYRATPDRAKTDVLDCALLRDFGERYPDKLKYKTFPEEALYELRQLARHREMLVEQRKQLITADKSEDCRPIRSLAVKRSMDRIKEMLDTEIAETEKEMLKVINGHESIHHNYELVKSVDGVGLITAVELLVKTENFTKITTARQYSAYAGTAPYEKSSGKMDKGAHISKIGNRRSKTLLYICAESARLHNKEIKLYYERRTLIDKKPRHYVLNAIANKLLRIIFTLVEKGEYYDANFIRQDPRVVKYN

SEQ ID NO: 150410 - protein, 401 aa, unidentified
MQDTQQRDAVDVFVGVDVGKGHHHAVALDRNGKRLYNKALPNDEAKLRALIAELKTHGRLLFVVDQPSTIGALPVAVARAEGVLVAYLPGLAMRRIADLHAGEAKTDARDAAIIAEAARSMPHTLRSLRLADEQLAELTMLCGFDDDLAAQVTQTSNRIRGLLTQIHPALERVLGPRLDHPAVLDLLERHPSPAALAGTSEKTLANRLTKLAPRMGKGLAAEIVQALSEQAVTVPGTQAATIVMPRLAQQLAALRKQRDEIAAEVERLVLAHPLWPVLTSMPGVGVRTAARLLTEVAHKAFASAAHLAAYAGLAPVTRRSGSSIRGEHPSRRGNKVLKRALFLSAFAALRDPVSRAYYSRKIQQGKRHNQALIALARRRCDVLFAMLRDGTIYQPKSAPNA

SEQ ID NO: 150411 - protein, 318 aa, unidentified
MNSPSMTVGIDVSKQRLDFARFPQGDTFSVAYTDTGLAKLLKRLRGWSPQIILLEASGGYEYGVVAALVAASLTPVLINPRQVRDFARALGILAKTDKIDAKVLAEFAFRVQPEPRPLPAAQQQELNHLLSRRRQLLEMIQMECNRREVSPFLRVRQSIDHNLDSLRRQLTDLEREIDDFFNQSPLWVQQDALLRTVPGIGPQTVLSLQAWLPELGALNRHQIAALVGLAPFNRDSGVLRGRRMIRGGRHKVRQALYMATLSAVRYNPVIKAFFERLAGQSGKPGKVALVACMRKLLTMLNAMVKNQTTWRPMTPLTS

SEQ ID NO: 150412 - protein, 345 aa, unidentified
MKQITIIGLDLAKQIFQIHGVDAEGNVIINRKLRRAEVLRFFEKTPPCLVGIEACGSAHYWAREIAALGHDVRMMPPAYVKPFVKRGKTDAADAEAISEAVTRKSMRFVPIKSAEQQAASMMLKTRTLLVSQKTQAINALRAHLSELGIIAAVGAGKVATLIEIVRDEADGRLPRAARLALMEIADQIETLTRQIEKLEREVVAEARRDADMRRLATIPGVGAITAAATKAFVPDPAAFRSGRHFAAWLGLTPKPHSSGGKERLGRISKMGNPMLRSLLVVGATSVLRHARGKANASQWLIGLLARRPFKVAAVALANKMARIIWALLVKGGIYRKVEAMSPASA

SEQ ID NO: 150413 - protein, 393 aa, unidentified
MFFVGIDIAKNTHEATIIDDHGNTFVKPFKFKNSVVGFEKLLVSLNNLSPTVTDFEFGMEATGHYWLNLYTKLVESGYSVHVINPVQSDALRGLYIRQTKNDAKDAFIIAELIRFGRYSETTLADGNLISLRELTRQRFYLVDCVSDAKRKVISFIDKIFPEYQTLFSDTFGVTSLELLSNYTSPDVIAELDIKLFSNFLKSVSHGRFGLTKAKEIQSVAKNTFGSFLFADSAALAIRQFIRQIQLLEEQISELDAYIAEKLSMFDTQLTTIIGVGNTLAAVFVAEVGDINRFDAPDKLAAFAGIDPSVKQSGEFNGTRCRMSKRGSPYLRRAFWLAAIAGIKSNTALRALYDKKRSQGKAHAVAVSVVMRKLCNIVYAVMKSGQPYHMDLPD

SEQ ID NO: 150414 - protein, 321 aa, unidentified
MTSRGAEKMKQDTIGVDISKDHLDAHRLIDGASRRFANDKTGHKAFLRWRAEKPTERVVFEPTGPYHRAFERALAVAGVAFAKVNPRQARRFAEATGKLAKTDRLDAAMLARMGALLELPTRPPRSEVVLELKDLHLARQALVKDRTAAKNRGKVLVLSLLKRQNALRLEQIERQMEAIEAAMRDIVQADADLSARFAIFISIPGVSAITAFAMLVEMPELGTLEAGEAASLAGLAPIARQSGRWTGRSFIRGGRAGLRQALYMPALVAMRFNPDLKAKYQQLISAGKPAKVAIATIMRKLIVLANALIKANRPWQPKIAA

SEQ ID NO: 150415 - protein, 413 aa, unidentified
MSVTDPVEPARPTAGVDWANTEHAISIVDHDGEQIDRFPIAHDAAGLRALVRRLLTAGVGEVGIERPDGPVVDALRQGGLVVYVIPPGQLRNLRSRYGSAGNKDDRFDAYVLADVVRTDRRRLRPLLADQPGTTALRQTVRARRNLVAHRVAVANQLRAHLQICLPGAVGLFADIDSPISLQFLERFASQDRADWLSAKRWATWLSSVSYSGRTIPDTFHTRLTQAPRGTSGPAADTAAVVTAAFVAVLRTLGTQIEALAASITGQLDLHPDAPIFTSLPRSGRVRAARLLAEIGDARGRFPTADSLACLGGVAPSTRQSGKTKAVTFRWGADKQLRDALCDFAGDSVKANPWAADLYRQARDRGHDHPHSVRILARAWVNIIWACWTTNTPYDPDRHGALQRLLNQDQPMAA

SEQ ID NO: 150416 - protein, 344 aa, unidentified
MICTRRTRVVCFLNADDTAARTETFPLTADGLSRFTRQLDREDEVAVEATQNIYYFYDQVKPHVARVAVVDTYRFQVIARSKKKTDRADAAALARFLKLGWLPEVTVPSEQTRALRQLLEARETLVSTRTKLKNMGHAAFSRNGIALTRAAFASQVSRARLLEREDLPLHDLAILRACLRQIEELGKEINALEAEIIGRGKVLKGLRRLLQVHGLNLLSAISLLAEIGDITQFETSKQLVSYAGLATSTRQSNETTRHGKITKQGRRRLRTVCIQAVLAMVNRTQTPLMEFYQKKKREKGAGKAICATARKLLTVIFVVLKKELDYWYLEDRLYNRKLRALNAA

SEQ ID NO: 150417 - protein, 408 aa, unidentified
MKTLHKRCAGLDVHKVEVVACLRLISKRKVEREVRRFPTTTQGLLALAEWLESAGCTHVAMEATGVYWKPVWHILEGRLALILANAAHVKNVPGRKSDVNDATWLADLLAHGLIRASFVPPPAIQELRDLTRTRKQLTREIVQHVQRIQAVLEEANVKLCSVITDIMGVSGRRILKALIAGETDAAKLAALGHERLGCTRAELVQVLTGCVREHHRFLLGQHLRTIEQLEDSVAAFDARIEAALLPFHDVVERLNEVPGLGATAVETVIAEIGIDMSQFPSAGHLLSWAGFVPGLDESAGKRRSTRIKKGAPWLKPVLLQSAWGAARKKNSYLQAQFLRLKARRGAKKAAIAVAASILTIVYHMLRDGTYYQDLGPEYFARRNPAKTAARLANRIRNLGYQVEIRAAA

SEQ ID NO: 150418 - protein, 324 aa, unidentified
MMTPALGIDVSKDRLDVEIAACGKPRSKYFANSPDGWRHLIAWLKELKIKRVHACLEATGRYSLGIALALWEAGHIVSIVNPAQIRDLARTKLGRNKTDAVDAGHIREYAEIFKPQPWTPPSPAMQRLGELQTIRAGIVSSLTEWKNRCGSGLADDTALALVKATITHFAAQLAEVDKAIAGTIDNDSDLSAKRDLLLSISGVGEVLAGLVLSELPGTDVLRSSAQAVAYVGLNPRSHRSGSSIDRPTRISKIGNATLRSALYMPALSAMQHNPVVAALAKRLKAQGRLKGKQIAVAAMRKLLVLCFGVLKSGKPFDPALAMPN

SEQ ID NO: 150419 - protein, 338 aa, unidentified
MTIVMGLDQHRGQITGEWIDTDTGEVQRTRVAPADRAGVRKFVQRFRGRELEVALEATTGWRFVVEELRRVGAVVHLAEPAETAGLRGPKKRAKGDRADARHLRELLMVGRLPESWIPPDHILDLRARVRLRHTLSEQRGEWQQRIQATLYHHGCPRRRNLMVGDGREWLGAQPLPVTAREQVTIALAMIDGIEARMAPLDKELRGYAQRQAGCKALMAHYGIGPLVAVTILAELGDCTRFSSSRHAVRYAGMDITVYQSDQRRAPGHLSRQGPPALRWALFEAAQNARRQGSPDRDYYQQAADRLGPNRAALSVGRKLLKRSYHTLRELGEEALQPA

SEQ ID NO: 150420 - protein, 404 aa, unidentified
MFYAGIDWADQKHDGLVLDEAGRKLGSIRVPHTPEGLDKLDAWLSSALSGQDKEQMACIIETNHGLLIAFLLEQGWPVYPINPRTVDRKRSASGAKTDAIDAYVLAKTGRADFADLHRLTPDSEKVAELKGLTRDQDSLIHMQTRLVNQLTACLKAYYPVALDLFAKLQQRSTLVFLQTYPTLEAAQTASVEQIRQLLKSAGHTTAENVAPKIFEHLHQPSLRANAVTTRTKSRLAVALIVQLQPLVEQIAAYDKEIEQLFLSHEDNVVFSSLPRAGKRLAPRLLAEIGDDPARYETAASLQALGGTSPVLFQSGNYSKPHRRLGSIEPLRNALHQFAWQSTLQEDWALAYYERKRAEGKSHSVAVRALSNIWVRIIFAMLTSHKPYTSTTFETARHLHASKAA

SEQ ID NO: 150421 - protein, 346 aa, unidentified
MTVTIVDEARAVTGGVDTHADTHMAAALDTIGGLPGVQEFPATQDGYARLLAWLRGFGTVHLAGIEGTGSYGAGLARHVAAAGIRVVEVDRSDRQDRRRQGKSDPLDAVSAARAAQPGRASGALRGRDGQVEAIRALMVAKRTARAQRTQTINQARALIITGPDGIRTRFTGQTPAGLVAELAALRPRPGSIVRYHTLLSLREPGRRAQFPGAQLERLDELLIPLVTARAPGLLSLYGVGPDTAAMLLIAAGDHPGRLRSEAAWAHLCATAPIPASSGKVTRHRLNRGGDRQAGHALWRIVITRMGSHPPTRDYVARRAKEGLSKPEIIRCLKRYAARQVYPHLRG

SEQ ID NO: 150422 - protein, 406 aa, unidentified
MLFVGDDWAEDHHDVEVQDETGRRLAKARLPEGISGIARLHALVGRFLPEDGDAAGVKIGIETDRGPWVAALVASGYQVYAVNPLQSARARQGNGVSGAKSDAGDAHVLADLVRTGCHQLRTVAGDSAQAGAVKVLTRMHQTLIWDRTRQVLRLRSSLREFFPAALEAYEDLVSPDVLELLTKAPEPSRAAALTRAQITAALKRAHRRDREAKTTVIMAALRSEHLTQPPLIAAAYGATVRALAAMITTSNEQITALEGPVEACFGQHPDAEIYLSQPGLGPILGARVLAEFGDDPTRYDGARARKNYAGTSPITRASGKKKVVLARYVRNKRLTNALHQQAFSALSGSPGARAYYDALRDRDIGYNAALRQLGNRLVGILHGCLKTRTCYDEATAWDQHTQRVAA

SEQ ID NO: 150423 - protein, 332 aa, unidentified
MIYIGIDVSKAKLDLALLDGTGKVLEQAVVKNTSQAILGRLSHWEQAHGLSREQSLACFEPTGSYSDTLMRTLVEAQVPAWRIHPLELKQRMGMVRGKNDKVDAVRMADHARRYHDQKRLVGPGTLAVLELKQLLAFRRRLVVDQQRHQVYKSDVYPYVSKDLRTDFAAYSGRRLSQVKAMLKKIDVQVKALIIADPVMAKQYRLLLTVERVGPVLAAYLLATTEAFTRISDPRKLACHAGVSPHEHTSGSSIHSKARVSHQADKRLKHALHMAVLGVAQGRGELGAYYKRKVAEGKSPRSVFNAVRNKVIHRVCAVIKRGTPFMEREPVSV

SEQ ID NO: 150424 - protein, 388 aa, unidentified
MGSTQSDTTTTGGLRPALYVAIELSKKGWLIALRGPTADRISLRRLVAGDAAGLLVLIERFRKLAAEAIGAGVAVLTCQEAGYDGFWLHRVLTAAAITNHVVDPASLHVDRRARRAKTDRIDAQALLRALMAYHRGEGRVWSVVHVPTPEEEDARRPHRERENLIKERGRHVNRIKGLCAQQGILHYEPMRADRHERLAELRTGDGRPFPARLLDEIRRELARLELLLGQIAELEVAREAALRAEQPDVTEAERVKRILTLRRLLAVGPESSTVLGHEVFFRRFENRRQIAAYVGLAPSPHMSGGLSREQGIAKSGNPRARTVLVELAWLWLRYQPRSALSEWFMRRVGEQRGRLRRIMVVALARKLLVALWRYLEIGLIPQGAILRA

SEQ ID NO: 150425 - protein, 423 aa, unidentified
MISFPKRERAQRAAACVGVDAGKFAHTLVVRPTGRPDSKPCTFPTTRAGFEQAVAFVRQQVPGASPANILVGIEFAGNYGFTFAHYLRELGFPIVSVLPAHTKRWKDVAHNQPLKTDAKDAGTITDLLAQGHFVGFPFLEPAYADLRYLVTARERLAVLRRGAITQLRALLQVVFPEYETIFPLVSQRTAVLLLRAFPGPQQLLAAPKAKVLRVLRAGSRGHLGAEIYERLVGAARATLGLPGAQVRLRQEIVLTLDRLALFEHQIRALEVELVAALEAVPETPYLLSIPQVAAVTAAVFLGSIGDPRAYDAGAQILRVAGLSLVERSSGVLHGTKRISKRGRPLLRAAAYLFAVRSITKGGLFRADYEGLCARNGGQKLKAIVAVMRSGLQLLYSIARDRRRFTVEPPPRRRARPTLEVTPA

SEQ ID NO: 150426 - protein, 372 aa, unidentified
MGDEMDAPLNGVNAPNWLTHTQLKGTSIMKISTLSIDLAKNVFQVAGFNHHHKRECNKRLNRPKLNAFMANAPPCRVVMEACYSSHYWGRVFTSYGHTVDLIPAQHVTPFVRGNKNDSNDALAIYEASLRPNIKFVPIKTEAQQEILMLHKIRERLLQNRIAATNQLRGLLVDFGYVFPVGIKAFQQGIIALESDSELRPQLRIMVSDIYTEYKTLVKRIKAIEAMLTAHVERDTNAKILHSIPGVGVLNASAYEASIGNGQAFKSAKELGVWLGLTPKQYASGDKSKMSGITKRGNSYLRKQLIHGARALIARSHHKTDALSQWINQLREKKHFNCVVVATAHRLARLMWILLTKQTLYSPQFVQNTQKDA

SEQ ID NO: 150427 - protein, 416 aa, unidentified
MTTGSEAGRKHDRRMHVIETGDIDVYLGLDVGKGEHHATAVTPAGKKAFDKRLPNTEPKLRELFAKLQAKHGTVLVVVDQPASIGALPLAVARDMGCPVAYLPGLTMRRIADLYPGEAKTDARDAFIIADAARAMPHTLRSVDLEDETIAELEMIVGFDDDLTGEATRVANRLHGLLTQIHPSLERVLGPRLQHPAVLALLERFGSPAQIRRAGRRRLVTLLRPKAPRMAERLVEDIFTALDEQTVVVPGTEAAALIVPSLAASLAAVLDQRKLLAGRIEELLEAHPLSQVLISMPGIGIRTGARILIEVGDGSSFPSAAHLAAYAGLAPATRNSGSSIRGEQPSRRGNKQLKRAFFLSAFAALGDPASRAYYDKKIGQGKHHTQALLCLARRRADVLFAMLRDGTFYQPQPARSA

SEQ ID NO: 150428 - protein, 325 aa, unidentified
MKSLQSASNVGADVAKDEIVVACAERSFTPRKIANNRAALLAWLKTLPAHSRIGMEATSTYHELLAQLARKLGLEVYVLNPKDVRHYAKGVGQRAKTDRVDAQLIARFVANEHTRLHLFAPPTPNQRQLDRLLKRRTKLTRIRGALKQSLKGVSGFASELKSIVVRLDAMIKRIDGKVRELIDASPESQEACARLQRIPGVGPVVGSGVLNSLQRVPFGNADAFVAFCGWDPRPDDSGRKSGRRRLSKRGSSQLRYLLYNAAMAASRTKAWRPFYERALGKGLSRIEALVILARQIARTAWSIYAHKTQFDPKRISQPQQASRNA

SEQ ID NO: 150429 - protein, 340 aa, unidentified
MLDLYCGMDLHGDNVYCTLMDRNYKSVFDQRLPNDLPTVLAALAPYRERLAGVAVESTYNWYWLVDGLQAGKYPSRLANPARMQENIGLKNANDKTDSRFLAKQMVMGVLPEGYIYPKEERPARDLLRRRMTLVHTRTGEWLRLEGMVARHSGKDLGIPALSKLETEALKELLGNNPLVMEAAQISYRHIAFLDREVRSIERHLEPLIKLHDNYERLLSAPGIGRILAMTIMLETGPIARFHGPGNYASYCRAVKSTHTSNDKRKGGGNSKCGNKYLSWAFVEAANFAVRYSPELRAWYQRKAARTKRVVALKALSNKMAKACYFVLRDGVDFDVKKLTG

SEQ ID NO: 150430 - protein, 452 aa, unidentified
MKKSEVIKENLTASTWRELETNGKFDKNKKLSFISDDMLILGCDVGSETHYVRAIDTRGRELSKSAYSFNNDYEGFQSAKEWAVKIAAEHDKSQIVLGLEPTGHYWFCLATWMIANGISVVQVNPYAVKQTKEVEDNSQLKDDRKDPKLIANLVKDGNFGMPYLPEKIYAELRRLSMFRDQLNEDRIRTINRMHREMKIYFPEYKEALGKVDGAFSLELLKEAPFPDELTALGEEGIRQIWHAAKLRGRGYSRAREILQYAKASVGIKDGSIASKTAVKWFVQKIMELDVELAVIENQINQKCHEIPHTGNVLEISGIGENTLSGILAEMGDISRFDDVKEIQKLSGLGLVACSSGKHKGETKISHRGRKRLRYWLFQAAKSAVAHVEEFKELHMYYTTRADNPLKKMQSLIVIACKLLRIIYTILNTGTKYAPKKMLMDIRRPENKEAIVA

SEQ ID NO: 150431 - protein, 437 aa, unidentified
MMLESIPYLSVGLDVGADFTWMSIMLPNGILSGKPFKIIHSDPQSREQAVAKIKEAQEMYSLESRCFLESTGIYHIPLLYFLRDKGFDCSVINPIITKNSTNMNVRKLHNDKFDSKKAAKVGLDASLKTSIIPDDEVIDLRNLVRDYYYFKDLQSAVVLKLTAELKVSFPAYRNVFCKATTQTSLKLLDAYPLAQDLLAAPKELVVEMIHSTARFGEKYALAKYDALYAAAEDAAVFGRALHSNALRIRLYIKLYREYQEHLDGILEELHKAVDRLEGTPVRNRISLLQTLPGIGFLSAVVLLAEMGSFDLFSSPKKLYAYFGLDPGVNDSGKFHGDRVHMSKRGSSLARRILHMIAINNLKVDKRTKSPVNPVIYDYYIRKCASKKKIVAVGAVMHKICNIIFAMLRDNKPFELITPEEHCEQYLAAHPDKAPNAA

SEQ ID NO: 150432 - protein, 355 aa, unidentified
MSSEKYIGLDVHQATISVAVVDSQGKVVMESILETKASTILEFFAGLRGSLFVTFEEGTWAAWLYDLLKPHVTEVLVCNPRKLPQLKQGNKSDKIDARKLAERLRLHDLKPVYHGETGVRILRELARSYLTVVKDLSRVMNRLKALYRSWAIPCAGRDVYYKRHRSQWLEKIPEAGTRRRAEQLYEQLDMLQHLRQQARRELLAESRKHAITAKLRQIPALGPIRSALAVALIQTAHRFPSKRQLWTYSGLGLETRDSGEYRYVGGQVQRRKKQATIRGLNKDYNHDLKGLFKGAATRASVQPGPFQEFYQRSLAKGIKPTRVRLTLARKIAAITLTLWKKGEDFDIDKLNSQAT

SEQ ID NO: 150433 - protein, 349 aa, unidentified
MVLLGVDPHKKTHTVVAADEAGRELSTVTVPATAAGHLKLFGWVTATYPQRRWAVEDGRHVAGRLLRELMAAGESVTCVPTKLMAGARAGARTRGKSDPIDALAVARAALREPGLPAAHLDQECLDLRLLVDHREHLVAERTRNINRLRWDLVDLDPALEPTGQKMTTQKVLRELIDRLGRLPTTVRRNLAIEKTERILVDTIRIKELERDITRAVTPLAPTLLALFGVAALTAAKIMGEVAGIERFSTPAKLANHAGTACIPVWSGNTEKHRLNRGANRQLNCAVHRIAVTQVRRHPPAQALFARRRAAGDTKAGAYRVVKRHLIDVIYRAMNQDTRARQTIPLPKAA

SEQ ID NO: 150434 - protein, 313 aa, unidentified
MNTTITYLGLDIAKRSLDLSPHPACTQGSFANDAAGHRALVAALRQVSGPLQIICEATGGYEHHLLAALHAAQMPVTLVNPRQVRDFARAKGLLAKTDSLDAALLAEYGRLFTPAATVALSPVQQRLAQLVTRRQELLGLITQEQHRAEHHHERFVVRQAARLLATLRRHLKQLEEEMAQLEKSDATLGGQVQRLTGIQGVGQRTAWLLLAALPELGTLQRGQAAALAGLAPYNHDSGPLRGQRHIAHGRALARTALYMAALVAARCNPILKPFYERLRAAGKPGKVALVALMRKLVELANLLLKSSSFKLTQ

SEQ ID NO: 150435 - protein, 328 aa, unidentified
MKNYQEVIGIDVSKNKLDAYGHNRGSHREFSNDVAGYKALLKWAKVKGQRVFFCFENTGHYSLKLALYLASKKQVYVQENPVVIKRSSGVIREKNDVVDAIMIARYGWLHREELSPSELKDNELLEVGRLLALRDQLVRNRTGLKSTLSELKKLLSSSSTDTCCKTLVSSITHLTSQINKIEKQLKTLIKTSEALSQNYKLITSLKGIGLVVGAQLLYHTNNFKRFDSWRQFSSYCGTAPFGHSSGSSIHKKRKCHPMGDRQMKSLLSMAACTAIQYDSELRHYYKKKREEGKLKMIALNNVRNKLLSRVFAVVKRGTPYVELHKFAA

SEQ ID NO: 150436 - protein, 387 aa, unidentified
MQTKTPATTVETTVRDHSNTLFASLELSKAKWLVTANSPGEEKFSKHVVAGGDGASLLVLLARLKAKAEQRRGVSVKVVVIQEAGLDGFWLHRLLVQSGIESHVVDAASIAVARRHRRAKTDAIDGVSLLRTLMAWARGERRVCSMVRPPSPEEEDQRRLSRERGTLLKERIQHTNRIKGRLSGQGIRGYDPLKPDRLERLDALRTGDGRPLPDRLKAEIRRELARIDVVATQLAAVERARDALVRTQTTEPTNPSALLIKLKGVGIEFASLVWLEGLFRSFTNRRQVAAYAGLAPSPWQSGGTDRDQGISKAGNQRLRRVMIELAWFWLRHQPDSALSRWFRNRVGTAKGRVRRIAIVALARKLLVALWRYVTQGIVPEGATLKAA

SEQ ID NO: 150437 - protein, 368 aa, unidentified
MKDYSMFVGLDVHKDTIEIAIAEEGRDGEVRSWGTIGGDLESFEKTVRKLQSKGRTLRFVYEAGPCGYTIYRYLVAKGLDCTVVAPSMIPKKSGDRVKTDRRDAEALARLHRAGELSSVYVPHKEDEAIRDLIRARKDAKNSQMVARQQLKAFLLRNGIRYEGKTSWTPAHMRWLTLVTLPSSAQQIAFQEYLDAVTSASLRMERLTREIARHVELWRMKPVVDAFQALRGVQMITATTMVAELGDISRFENPRQLMSYLGLVPSEHSSGGSTHRGSITKAGNIHARTALVEASWQYRLKPRMSKAILLRQENLPKKITEIAWKAQLRLSHRFRLLSAKGKPHQKIVTALARELAGFMWAIAREVPVS

SEQ ID NO: 150438 - protein, 414 aa, unidentified
MEVLYTECCGLDVHKETVAACLRVVMDGKVVKEVRTFATTTADLIKLSVWLAENKCTHVAMEATGVYWKPVWHILSDGDFELVLANAAHIKNVPGRKTDVKDADWISDLLAHGLIRPSFVPDGPTQEMRTLLRTRKQLSREKASHILRIQKTLEDANIKLDSVVTDIMGLSGRKMIEAMIAGQTDPGKLARLADPRVRASQESLREALRGRVTRHHRFLLRLHLQQIDALDDAIVKIDREVEAGIAPFRTAIEQISTIPGVKDLSARAILSEIGIDMTRFASDAHLISWACICPRNDESAGKRRSSRIRKGAPWLKTTLVQCAWAAARTKGSYLQAQFHRIRARRGAKKAIVAVAASILTAIYHMLKDGTMYQDLGPNHFQYRDKERQKRRLLQRLADLGFAMELVPLTANVSP

SEQ ID NO: 150439 - protein, 372 aa, unidentified
MIVIGTDTHKQSHTAGAVDAGTGRELADLTVRAKRRSFDDLLVWARGLDGERVWAIEDCRHVSGALERFLLARGEQVVRVAPKLTAGARKASRERGKSDVIDAVQVARAALREGLHNLPAAQLAGPELDVRLLVDHRERLVAARTALINDLRWQCHDLWPEFEIPLRALITATWQERLGGRLARAEQTARVRVARDELRRIRDLTRSIDALQRELGTLVAGLAPQLLAETGCGVLTAAKLVGEIAGIQRFASDAKLARLAGAAPIPASSGRTDRHRLDNGGNRQLNCALHRLAVAKGRFDPESADYLARKQAEGKSRREALRCLKRHLARRVWRLLQPVTGPSVAIGERPPVIAGAGVTLNCSAPFNAYSLT

SEQ ID NO: 150440 - protein, 409 aa, unidentified
MSKLYVGIDVSSRNNVAYLMKPDGSKHSNFSVENSPRGSAELVKQIVKALTSYNLTEVTVGLESTGCYGDHLVYFLKENAELAKFNRSIHVLNPKQVKKFKDTYNDLQKNDYIDSFVIADCLRFGRINKEVYMDDARFKALQILTRQRFFAVRSLTVEKQRFLNVIFKKYSSLAQNKVFSNTFGASALALYEEFDSADTLAYMDLHELTDFLVKKSKNRFSDPEAVAKAIQKAARSSYRLPKTVNDSVNQVLSSSICLIRALEQQIKVLDKAIAEQLELIPNTLQSIPGIGPVYSAGIIAEIGDIHRFKNQSALGKYAGLAWTQNQSGDFESKNTKLIRSGNKFLKYYLCEAALSLVRCDTEYSRFYHLKYNEVNKGQHKRALALTARKFVRLVYALLIDNKLYTPSEL

SEQ ID NO: 150441 - protein, 391 aa, unidentified
MIYVGVDAAKDKHDCCILGGNGQIVQEVFTFQNNRQGFEQLRDKIQRCSEAEGSGQIKAGLESTGHYSGNLETFLRESGVDLVVFNPLQVNLYRKSQTLRKTKTDKVDAKCIAQLLMTAESNPVSVSYQIQELKALTRHRSRLVSQQTKLKISISRLVVILFPELPTVCNSVTQAAIKTMLLELPGARQIAACRIDRLTNLLTKASKGRYGRAKAEEIKDLAQQSIGANSPAAALELQLTLQHLDFLLQQINELDKTIRTAVVQTQSPIMSIPGIGPTLAAIILAEIGDIHRFSSPDKLQAFAGLDPSTYQSGNFKADRTPMVKHGSTYLRWALMQAARLAAVHCETFGQYLATKQAQGKHYFVALGHTTKKLIRVIFHILTANEVFVPQT

SEQ ID NO: 150442 - protein, 309 aa, unidentified
MTTSSYVGIDVSKERLDVAVLGKGQEKQVNNTEAGIAELVAWLVELQPELIVVEATGGYQRAVVDALFQAGLPVALVNPARVRQFARACGLLAKTDKLDAQVLAVFGQRVQPRRYEGKSEAEKQLSALLVRRKQLEETLKAEQNRLRTISPSLRGSVERMIAVLKEEKKRLDDQIREAMKEQKAWQEQSAILRSAPGVGPVTTATLLAELPELGKMDRKKIAALVGVAPMNYDSGRKRGYRKTKGGRGEVRSVLYMATLVATRRNPVIRTQYQHLLKRGKEKKVALTACMRKFLIILNAMQRDRQPFRM

SEQ ID NO: 150443 - protein, 348 aa, unidentified
MAHFVGLDVSVKETSVCVVDDAGKVILEQKVQTEPAAIIAVLTSLDVSFGRIGIEAGPLSQWLVNALTAAELPVICVETRHMKALLTAQQINKTDRNDARGIAQMMRVGLFKPVHVKTLVAQEQRMLLTSRKLLQRKLLDVESDLRGTLRNFGLKVGVVSSGRYEARVRELVAGFPRLAAIVEPVLSVRRVMRQQFAVLHKMLLDTVRGDPVCRRLMTAPGVGAVVALTYRATVDQPQRFHHSRAVGAHVGLTPKRYQSGETDYEGGVSKCGDALLRTMLYEAAHALLTRGAKWSWLKAWGVRVAQRRGMRRAIVAVARRLAVVLHRMWVDGSEFRWSKDGTAVPAVA

SEQ ID NO: 150444 - protein, 322 aa, unidentified
MTVYLGIDIASKKFDAALLCNGNYRCKAFANTAAGFTALVKWTGEGDFSEIHACMEATGDYGTALATFLYEKRIKVSVVNPSRIKGYGMAELSRTKTDKSDSKLIARFCRATVPAIWRPVPQPVRILQALVRRMDALKGMLRMESNRADKADASIQPSLQRILSHLKEEIETIRQDIKKHISSNDELRMQEALISSVPGIGSVTGAVILSFMADKKFSKAKEVAAFLGLNPRHHQSGSSVRGRSRMSKTGNAHLRSAMYMPALVALKHNPDIRAFGHRLRLAGKPGMLIVGAAMRKLIHIIFGVLRSGTVCVPQTIGEPACK

SEQ ID NO: 150445 - protein, 411 aa, unidentified
MSQMLVGVDVSLRSHHVHFMNADGVTLADFSVSNDRTGADTLIKRILETAEKSQCAQLKIGMEATDQYAWHIAHYLQDQLKGYEPDVVTKVYVLNARKVARFKKGYDTLPKNDKIDAWVIADHLRFGRLPQEMKEAHHYEALQRLTRTRFHFMKEIGRNKTYFLNQLFLKFSGLRQDNPFSSTFGTTSLAVIEELDPETIAEMELEELISFLQEKGKNRFAEPEELAKYLQKLARSSYRLHKTMEDPVNISLSVTLSTIQHMESQIKRLDKEIAKLMKGIPQTLTSVKGIGDVFATGLIAEIGDVKRFKDHHALAKYAGLVWNQHQSGEYEAENTSRMRTGNKYLRYYLIQAAESIRKHDSEYKVFYTKKYNEVPKHKHKRALVMTARKLVRLVYSLLRTNQLYTPPERRG

SEQ ID NO: 150446 - protein, 400 aa, unidentified
MRAVFGIDVSKTSSEVAILVNGEKVHGYTILNDTIGFNRLLGDLKTVHNPEIIFEATGVYSRRLQAFLEEYSYAYTRLNPLEAKKQLDSLRVRKTDKIDAEKLAKSQLVHNRKPTYVQEEVYQHLRDLSRFYQNMTEDLVRTKNRLHKVLQVTFPELENLLSTPTGEQYWNLVMAFPCKEFVLSLSQSNLCEIIRQSTSKRISEKRIAYLTDKLIKLAKQSFCAVKKTSPMLEEVRYYAQELLRLSERRQVVLNDMVALAQPLPEYDILRSIPGIAEATATSIIGELGDIRRFQSTNQINAFIGIDLRHYESGNFLAKEHITKRGNPYARKILFKCIHNIASASHTNPCHIADFYEKRKRQSTIASTKPHTIASIHRLIRTMYYLITHNKLYDYSLTQNR

SEQ ID NO: 150447 - protein, 346 aa, unidentified
MLHAGLDLSRHRVDICLLSDRGELVAETAAPPDADGLRGLADRVAGYRQPVRAVIESMNGARFVHDTLEELGWEVLVADAQKVKGLAPLACKTDKIDARVLALLSQRDLVPAIWLPDPSIRRERELARYRLHLVRHRTTLKNRIHATLITFGHPCPVSDLFGFAGRQLLDRLAIPDPWRRNVDASLELIDDLELQIARLTCELKRQGADHRYIPLLVTAPGFGWINAFTVASEIGDITRFPSPAKLCGYTGLCPRVIQSGSSDRRGPISKHGPRYLRWGLFEAAMNACKHPLYAERYQHTKRRLGRQRGPKVAQIELSRRLTEAIWHMLTRNQPFAPAGAGFRLAA

SEQ ID NO: 150448 - protein, 386 aa, unidentified
MRVDDLSRCQIAFDQDSSLVVVVEMSESSWLAAGMLPGVGRQPLKKLEPDPAALLRLLERWRAEAIKTGRTIGRIALAYEAGRDGFWLARWLQARGIEVHVIHSTSVAVSREHRRAKTDRLDTAMLMRVFLGWLRGERGHCGMVAIPTLPDEDAKRPSRERESLVGERTRIVNRMKSALARLGIRGFKPGLRKAPKRLEALRTPEDSAIPPNMLDEMRRDMARLAVVRAQIDEIEQARLERLEQAPEVGPHAMVRLLARIVGVGVETADMLVQEVLSRNLRDRRAVARYAGLTGSPDESGSKRREKGLAKTGNARVRRGLIQLAWRFLMFQKNTALAQWYRARTEGAKGARKTTMIVALARKLLIALWRMVTTGILPEGIVLRPAA

SEQ ID NO: 150449 - protein, 409 aa, unidentified
MMKPQHNSRSAAETDCRRQPEGRLKGVNHTIGKELLYVGLDVHAQTVSIAIAGSSGEVRNYGSVSSSLGTLEKTMCRIRKAHPGAELRVCYEAGPTGFVMARRFAQLGVDCTVVAPSLIPNRSGDRVKTDPRDAVKLARLHRAGELTGVHVPDATDEAMRDLCRARTDAVQDLRRGRAQLKAFLLRNGYRYSGKSAWTEAHRRYLRELVLPHAAQRVVLEDSLRAITTAEERIARLEEQMEVLLESWPMKPVAEALMGLRGFQTVSAMVLVSELGGAWRFSHPRQLMSYLGLVPTENTSGGRRRQGAISKAGNSHARWLLIEAAHHYRLSPKISKELSRRQEHLSTEIKDCSWKAQTRLHHRMMKLYARGKRPNKVIVAVARELVGFVWAIFRLMEPEMNQRERPAAAL

SEQ ID NO: 150450 - protein, 335 aa, unidentified
MKGFNYYIGIDVSKLTLDISVFCDDAKSTKTAYYKIENSEKSIAQFVKKTLNGYELKQVLFCFEDTGIYAVPLSYYLSINELVYWKVPSLEIKRSKGISRGKDDKIDSKDIAFYAYRNLDKFRPSKMPSESIQKLRLLFTEREKLLKSLSSFEKTAENKDFLSKTVYKVVESANKSVIKKLKDTIQLIENEMLTIISSEEKLRRQYELITSIPGIGRQTAIYLLIATKGFESFENWRQLACYAGVAPFPYQSGTSIRGRNKVHPFADKKLKSLLNMCALIAVRYDKELKTYYEKKCAEGKSKMLVINNVRCKLLARTFAVINRNSPFINTQKFAG

SEQ ID NO: 150451 - protein, 356 aa, unidentified
MITVAQLEPVRVTVGVDTHKDVHVAAAMDHLGRRLGESSIPTTPSGYRDLLAWAKSHGKVEAWGIEGTGSYGAGLSRFLHDADQTVIEINRPDRKARRLKGKSDPVDAEAAARAVLSGEASTVPKAGDDRVEMIRALRTARSSAIKARTQAINAIKALVVSAPAGLREQLRALSAGELVRTCVRLRPGNVVDPLAATKLALRSLASRYETLVAEIKVLDPQLERLATEAAPGLVALFGVGPDVAGTLLVTAGDNPERLRSEAAFAHLCGVSPIQASSGKTIRHRLNRGGDRQANAALYRIVIVRLRFDAKTQQYAARRLAEGKSKPEIIRCLKRYVAREVFAVLTDTVQKNVRHAA

SEQ ID NO: 150452 - protein, 293 aa, unidentified
MNYIGCDCHISSLDFAVVNERGKTTKKQRVDTGVKGLMEFVKSIPKPRKLIIEEGTLASWLLEICTDYGEKLIITDPKTNRWIGRAGQKNDSIDATKLAHLARGGYIKEIHHPIGDRRRFRELVMSYHDTVKSHTRIKNKLKAKFRQNGIRCSGETVYSTKHRKEWKKKLPKNKVVQVIVEGLWQQLDHIHEVQEELLSHIRRQGRNYSEIKRFKKIPGIGTVHAATISAIMENPHRFAHKKKLWMYAGFGLAEKVSGGKVYSRNLTRDYNRLLKNALKQATEATIIAKDNQC

SEQ ID NO: 150453 - protein, 421 aa, unidentified
MLGVGIDWAEEFHLVALGRPGEGVFDVARVEHDPRSVDALIARIATLEPDPAEVRVVLETSYGMLVEGLLDAGFTVVPVNPDLIARRRGPAKKKDDAEDARIACLLALDRFERLRVLVPHGEEAAELRAITRDDERASRDERRLLNRLRADLIATFPAAMTIAGDDMGSPTFLRLLARWPTANALATASRDDLVAFARAGKHGWPDRFADRVRAALEADNFVARDWLVRAKADTIALTANQLLVIGTQRRVWERRMGELLLGAPRHGRAKRPKDGDRGPAVPGGEIYLSFPGLGDRLAARVAGEIGNIANFDTPNGLQCYAGKAPVTRRSGKSELVVANRLACNGHLRDAVQQWSFCSLRGSGWAREFYDSQRARGKGHHAALRALGNRWLEVLWHCLQRGVTYDEATHVANRNRALQRAA

SEQ ID NO: 150454 - protein, 337 aa, unidentified
MELYSGLDLHSRNTYIGILDTDFKRVFKKRVSNNLDLIVETLEPFRDQLKGLVVESTFNWYWLVDGLMDAGYGCVHLANPSAIKQYEGLKHSDDQHDAYFLAQLLILGILPQGYIYPKEGRPVRDLARKRMFLVKHKTAHILSLQSLIARCCGQRISTNQIRTLTAADLRQLLKEEYLLLSAQANLNIIAFLIQQIKALEKAIKNKVKLDKAFEQLMTVPGIGFILAMTIMLEVGDISRFAKVGNFASYCRCVSSQRLSDGKSKGSGNRKNGNRYLSWAFVEAAQLGRRYSQRFGRYYDRKAAQTNTIVATKALSNKLARICYYIMRDQVSFKEELF

SEQ ID NO: 150455 - protein, 434 aa, unidentified
MAKRKMSTFERLRSGKMNRQERKEWQQRLCAEDAGLEVVHPDAAGIDVGNASHFVAVPPDRDEPPVREFGSWTADLRRMAEWLKRCRIRTVAMQSTGVYWVALQEILEHEGFEVYLVNARGTKNLPGRKSDVQECQWLMKLHTYGLLRNSFHPPEQIRAVRTIWRQRDRLVKEAGREVQQMQKALTTMNVQLANAWREDVLFELQQVVDAYDFHQKQIAACDVQLQRYLSAVPMRSRLGAGEPSTADAPSEKPKKQRKHKWQKNQPVFDLAVELQRTMGVDMTAIDGVDVMTTQVILSELGPDLSMSFPSESHFTSWLELAPRRDVSGGKVIRQKSRKSNNRVATALRMAAQSLWRSDSYLGARYRHLKARLGGQKAIKAMARYLACLIYRLLTKGQEYVDRGAAHFASKRTERELLALQRKAAGLGMQLVAIS

SEQ ID NO: 150456 - protein, 432 aa, unidentified
MKHNQSSKQNQRISRISETTLVIGTDIAKFNHVARAFNYRGIELGKRCLFQNDDNGLTNLLAWAKSIMQEHALTDVILGVEPTGHYWFPLYHYLNQHGIEVVLVNPHHVKKSKELDDNSPTKNDIKDAKVVAKLVIDGRYTQPQLPKGVHAELRVLMNQRDRLCGDLNRVKGRIHNWLDRFFPEYTQIFKDWEGKASLITLQHFPLPQDVIAAGETTVVATWKKDGVQRAVGPKRASLLYRKAQISIGLTEGAIAAKHELAMYLEQYAMLCRQIEQLMELVADLLEKIPGATHMMSIPCIGPVTVAGFLAEVGDLHGYDHSQQIVRHAGLSLRENSSGLHKGETTISKRGRCRLRALLFRAALTLVAKNPEFRALHRYFTTRRDNPLKKKQSMIAICNKLIRVLFELGCKQKNYDANKVLGPHREAQLQAAA

SEQ ID NO: 150457 - protein, 430 aa, unidentified
MTETTQKQESPEPQFAAFIGIDWADREHQVCLRAAGSSEKELSKLPQEPEAILEWVGKLRERFQSRPVAVAVEQSKGGLVYALMAHEFITLYPINPAMLAQYRKAFVSSRAKDDPLDAGLLTDLVQIHREHLRPWKADTPETRRLQLLVEHRRQAVDERTRLTCILTAALKAYYPQALELTGANLFAPMALDFLTKWPTLDAMKKTRVETIRKFYYAHNIRRGDVIEERLEYSRKTPPLTEDAVIVETFAMKVNMCVGQLRALHRVIVEYERQIARLFAQHQDAFIFDSFPGSGEIFGPRLLAAFGSQRDRFTAPEDMQRFSGIAPVTVQSGQTRWVHRRWACPRFLKQTFHEYANISIQKSVWARTYYEHLREAGKGHHAAVRAVAFKWIRIMFRCWQDRVPYDEITYLKALQKSGSYLLKYMPQPANS

SEQ ID NO: 150458 - protein, 428 aa, unidentified
MNNQEIIRRKQFCQIVKEVRSSKEYLVVGIDVAKDKHHAFMGTATGKSLFRKLIFENNIEGFSRLLRTADEIKSQNSLSKIVYGLEPTGNYHKPLARHLIRCDCNVVLVTGQAVKNNRNLLDGRWDKNDTKDAANIADLVSRGRCLYYDCPSHGIIEIRSLLSLRRRLKREEHSLRMRIRNNLLAQYFPELDRFYNACESETLLIVRYLLDPDTIAAMEFGEFFHLVKRTRRGTAQTLRLRKIHGLAIESVGCPLGPAGEYESDLLVEKLNQVRQQVKKTDDLIKDFCLEFDEYSYLLTIPGFGPYISARVLASIGDPFRFENRKQLIKMAGYDLCANRSGKTSDKAIPIISKKGNGELRYALYQAAKVASARVDLFRTYFARLLKGRERERGIKTKMCVKLAAKMLVIAWTLMKKREPFDPAYLNIE

SEQ ID NO: 150459 - protein, 322 aa, unidentified
MSGSILGIDIAKQKLDVALLIDGKIKNKSVKNNPEGFEALSLWLRKLGIQKVHACLEATGNYGEALAVYLHDAGHMVSIVNPARIKGFAQSELIRTKNDRIDAGIIARFCLAMRPDAWIPPSLEIRSLRALVRRIDSLNDMLTQEKNRLGTAHKSVIPMIKEHIAYLEKEIDRVRDQIADLIDNNPDLRKKKDLLGSIPGIGKATIAALLAELDTLDKFSHVRELVAFIGLAPRETLSGSSIKGKPRLCKTGNARLRKALYMPALVSIQYNPLMTAFYTRLKERGKNGKVIVCAIMRKLVHVVFGVLKSGKKFDPNYKPVCP

SEQ ID NO: 150460 - protein, 445 aa, unidentified
MRTDSEDVWWLLRVGLTHGLTDADWLSSRGFVGPLGEATARDRTGVRDLIGAWSRSPTTVLSARPAGACRPTGISERTAVTSMTDQALEVTGGVDTHGETHHAAVVDRIGRHLADREFPATGTGYRQLHAWLRSFGMVTAVGVEGTGAYGAELARTLRRAGLKVVEVDRPDRRTRRMKGKSDPIDAYAAAEAVASGRATGTPKSRDGIVEAVRTLRVVRRSAVKSRTQAVNQARQLLVTAPESLRAQLRGLSAAALAKACARLRPGTDLADPARAAKAALRRLGRRILALSEEIDELEAELKPLTARAAPELLALKGVGADVAGQLLATAGDNPDRLRSEAAFAHLCGAAPIPASSGRRDRHRLNRGGDRAANHALHTIVLSRMRWDERTRAYVERRTGEGLAKKDIMRCLKRHVAREVYRVLMRSIHTTNTGRNTAQSDLIEAA

SEQ ID NO: 150461 - protein, 330 aa, unidentified
MNSICLSTDQLTAALPVLGLDVAKKSVQAELRTNGKRVRFGFENNPKGFAQLARMLKEQGAPKVWAGLEATGPYSHALALWLHGQSHRVSLLNPRRVKQYARSAGNRNKTDLLDAAIIADFVCAHLPAAWQPPTLEVAQLQALVRRREELSLMLQAEKNRLEGVASHVRCSLERIIDTLSAEKTRLEKLITQQIRSHQQLSRDHQLLCTIKGIGSLTAAILLAEMARPGQVERARQAAAHAGLAPRREQSGTSVRRNRGLGKEGNRYLRKALYMPALVAIKYNAPLRHFASRLRTAGKPKMSIVCAVMRKLIHIAFGVLKHQKPFNPSLA

SEQ ID NO: 150462 - protein, 408 aa, unidentified
MEVVVEVGAGLDVHKKRIVACCLDGRSNPPKAIRCTFGTFRDELERLRDWLVKHGCTHVAMESTGVYWMPVYRVLEGSLQIILGNARHMANVPGRKTDKLDAEWIAKLLRHGLIRPNFVPPRVIRDLRMATRYRRKLLQMRSASQLRVEKLLQSTNIKLSSVASDVFGKSGRLMLTALAEGITNPGTLAEMAKGTLRNKRVDLVRAMRGSFDEQDARLLKVELAVVEDIDTRLEELKKLIDQKIVPFENTINLLDTIPGIDRILAIDLLAEIGTDMTAWPSARHFAAWSGTCPGNRESAGVRRRARSREGNPYVKTVLVQAAVSASHTVTSDLAIRYRRLTSRRGPKRAAVAVARIIAVAVHYMLSKNEPYTSPKSADPELIRNQRRNHLLRQLNKLGFEVVCEPMNR

SEQ ID NO: 150463 - protein, 342 aa, unidentified
MLGEKGEVLEEGSVGNNRAALSELGGRYPEALVVMEAGCHSPWVSRHLEQAGCEVVVSNPRKTRAIYQHERKSDRRDALMLARIARMEPALLYPVRHGSEEAQQELLRIKLRDSLVRARVALINSLRFTLKSLGYSIANPSTERFHKVIQSALPQSVAQVIAPSVQALEELTLRIKLLEREISDQARSKYPDTAWLEQIPGVGRITALYFVLKIEDPARFKRARDVGAFLGLCPRRDQSGENDPQLRISKRGDAYLRRLLVSSAQYILGPFAPPSALRQYGLALATGATARAKKRAVVAVARKLAVLLLTLWKNKSSYQAFPQRSSREKMRTNDLERLRCIA

SEQ ID NO: 150464 - protein, 433 aa, unidentified
MKIPTNIMAVGIDPAKQVHQAVAIVYPEVVLLNCRFENNYEAISSIDEKVMKIAKRNDLKVIYGLEDSGAYGRTIKEVLTSRYREVREVNPLKTNRQKDFYGGDKSDEIDAKCIAQILLRSHENLPKIEEDNQVYISIREAERFRETLVKAKTQNVNRLHFYLTKTWGGSYKKFFSNLQNKIALDFFSTYPIPQTLKEIKAKELAKFLYEASSHRLGKGNPWKLAHEKVKFILSSIKTVKDLPLNWEREIKAEIIRQLIANISQAKDSIKAIERKLEKDLLPQTGQRLTSLKSISTVTASVLLGETLNPDRFNTRDKFARYNGTAPQEMSSGGKIKHRARKGCNHRLKKTLRQISITAILREPLTKEYYQRCLSRGLSKSQALKRVDRKISDIVYKMMRTKQPYDRELAVRNIIERRQSFLYSCQVPPGRMGE

SEQ ID NO: 150465 - protein, 400 aa, unidentified
MRTVFGIDVSKASSEVAILVNGERVHSYTMPNDIIGFSHLLKDLKTVSNPEIIFEATGVYSRRLQAFLEENSYDYTRLNPLEAKKQLDSLRVRKTDKIDAEKLASSQFVLNRKPTYVQEEVYQNLHDLSRFYQNLTEDIVRTKNRLHKVLQVAFPEIENLLSTPTGEQYWNLVSIFPTKHWVLELSEVELKETIRNSTSKRISENRVGNLAEKLVGLAKQSYSAISKTSPMIEEVKYNAQELIRLTNRREQVLQQLIALAEPLPEYEILLSIPGISETTATSIIGELGDIRRFKSANQINAFIGIDLKHYESGDFLGQEHITKRGNPYARKIMYKCIHNIASASHTNPCHIADFYEKRKRQSQTTSTKPHTIASIHRLIRTMYYLIMHNKLYDYTLAKSH

SEQ ID NO: 150466 - protein, 352 aa, unidentified
MQHFIGCDVHTRNQVVAWIEEETGEIRKRRLEHEGQEVKEFYAQFPPGTVVGIEVTFPAYWFERLMGELGHELWVGDAARIRASEVRYQKTDARDAEGILDLLRSGRFPRLWVPSLDERDLRQLLVHRMKQVRARTQVKNQLQALAISQGVCRKRKLWSARGRAELEKLVLLPWAARRRKELLEWLDRLDEQVRELDRAVEEAGRARPEVALLRTHPGVGMVVGLAFVLSVGPVERFSNRRKLVSYWGLNPREDSSAGRQRLGSISKQGNTMMRWLLIEAAQTAARLDPRLRRTYQRLKHQRNSGVAKVAVARRLVVRLFWMLRTRHNYAQLVHMSGSPSSAVVPPQGGPKV

SEQ ID NO: 150467 - protein, 350 aa, unidentified
MKVTTIGLDLAKNVFQVHGADAAGTPVLRKQLRRAQMAEFFAQQPPCVVAMEACGGAHHWGRKLRALGHQVRLIAPQYVKPYVKSQKNDAADAAAICEAATRGHMRFVSVKTVEQQSVLALHTARSGFVKQRTALSNQIRGQLAEFGVVLPQGLSKLNGQLPIALADQNNELTGTIRNLFRTLHAELAHIDDLVARLERQIREWANQDPGARLLQQILGIGPITASALSAVIGDIRQFKNGRQLAAWLGLVPRQHSSGGKSVLLGITKRGDKYLRTLLIHGARAALKAYQRNPEKMPAHLAQLLARKHPNVVCVALASRNARVAWAMLSRGEDYKGWEVAKRPALPAQLN

SEQ ID NO: 150468 - protein, 320 aa, unidentified
MQSPSAALNIGADIAKDAIVVACSEGSFPVREVANQRPAVLAFLKSLPTGSRIGVESTGTYHELFAEAAHQLGFRVFLLNPKDTHHYAKAVGLRGKTDRVDAELIARMIAHEHTKLHAWNPPTPQQREIDRLIKRRATLISLRQAVAMSLHELGGFADELKALRTRFNQLIARIDLRIRALVEASPDRKQNFTRVCTITGVGPVIGTALVNTLERVPVNSADAFVAFTGLDPRPDDSGQHRGKRRLSKRGPAELRRLLYLAAMSAAKTKTWRPLYEHYRAKGLSSTATLVILARRIARTAWSIYTHKTEFDPSRLTNPLT

SEQ ID NO: 150469 - protein, 454 aa, unidentified
MAQRKRRRKRLAVADLPEHLQHVNLNAAGIDIGSDRHVAAVPAGRDEVSVREFGAFTTDLNALADWLTKCGITSVAMESTGVYWIPLFELLERRGFEVKLVDARQVKNVSGRKSDVLDCQWLQQLHTYGLLAGAFRPPDQVCVLRGYMRQREMLVQASSMHIQHMQKALQQMNLLLHNVVSDITGVTGMKIIKAIITGERDPKVLARHRDQRCHSSAATIAKSLLGNYREEHLFALTQAVSLYETYQAKIVECETAIACYLKQQPNRTDEEPPPTDKSVRNRDRQRGGVDVRSQLYKMTGVDLFNLPGLAADTLLTLAGEVGFDMTPWPSEKHFTSWLALCPGTRKSNGKVLSRKTKRSANRAAAAFRIAAASLTRSKTALGAFYRRIRVRVGPAEAITATARKLAVLYYSLLKHGSAYVEIGQTVYEEKYQQRRLNSIQKQALAMGYQLIPMA

SEQ ID NO: 150470 - protein, 402 aa, unidentified
MYNAVGIDVSKGKSTVAVLQPAGVIIRKPFNVNHTSSELDELAKYIGSLEGETRVVLECTGRYHEPVVKTLSEAGLFVSAVNPHLIKNFGNNSIRKVKSDPADAKKIARYTLDNWIELRQYSSMDNTRTQLKTLNSQFSFFMKQKVAAKANLIALLDNTYPGVNKLFDSPVRDDGSEKWVDYAYSFWHVDCVRKIGLKTFTERYQAFCKKHHYNFQPAKPAELFLASKDLIAVFPKEASYKLLIQQSIQQLNLTSSHVEELRSKMNELASTLPEYATVMGMYGVGKTFGPQLIAEIGDISNFSHREALTAFAGVDPGVDQSGTHNSKSNKASKCGSNRLRKTLFQIMSTLLQTAPEDDKVYQFLVKKRAEGKPYYVYMTAGANKFLRIYYGKVKECIRNLEQ

SEQ ID NO: 150471 - protein, 335 aa, unidentified
MQIYGIDLAKEKFDVSFFDLTSKKVSNQPSHKVVTNNLKGIGKFLKGLPSDAVLVAEHTGVYGDTLLKCCMDSNVKIAFVGGYVIHRYRATPDRAKTDVLDCALLRDFGERYPDKLKYKTFPEEALYELRQLARHREMLVEQRKQLITADKSEDCRPVRSLAVKRSMDRIKEMLDTEIAETEKEMLKVINGHESIHHNYELVKSVDGVGLITAVELLVKTENFTKITTARQYAAYAGTAPYEKSSGKMDKGAHISKIGNRRSKTLLYICAESARLHNKEIKLYYERRTLIDKKPRHYVLNAIANKLLRIIFTLVEKGEYYDANFIRQDPRVVKYN

SEQ ID NO: 150472 - protein, 342 aa, unidentified
MKFYCGIDLSARDCHVCVIDEQLKIVVQQKLRNELAKICQLLAPYKAYLKIVVESTFNWYWLIDGLQAEGFDVVLAHTLGLYLITGAKVKTDRRDAYSLAKLLLVGAVPVAYIYPVETRPVRDLLRRRMHLVQVRAGEYGSLRRLLLRQGILSSKQQEIKTATEAELEQWFEHPLVRLHASQELRRIELYSEQIAELEKTILALAKTEQSYELLQQLPGVGQTIALTILYEVGELTRFANVKVFSSYCRVVPGIAQSGNVSRRGRASKQGNHYLKAAFSQAAVHAVRCYPKVRRYYERQLKRHRGRGRQMICYNIIAHKLAQAAFHVLKEQTEYREELLFGP

SEQ ID NO: 150473 - protein, 376 aa, unidentified
MITCFIGIDAHTTNYTLSTAIDAEDKPFNTCKYAPKLTYILKYANALCKKYNLKKEDILLGYEAGCLGFKLQRNLNENGFNCVVMAPSTIPGTAINRRKKTKNDIRDAEAIAKALRNDDYSSVATPDEEDEAIREFIRAREDVRMELKRCKQHIMAFCNRHGQHYEETGWTQKHMKWLNNLAFSQPVLKETLNSLLLEYEYLTEKLEEKDRRIEEFAQMDKYRESVHKLTCFKGIKTLTALAVIVEIGDFARFMKAKNFVAYLGLSVGEQSSGNDHNQTGITKQGNRFIRKLLTEAAQCFSRATSKKSKELKKRQEGNVEEVIAYADKANERLRKRYHHLVIHNMKSPNKAKCAITRELACFIWGMMTDNIHTVLV

SEQ ID NO: 150474 - protein, 455 aa, unidentified
MVKQKHQEKMKVQVNALEQIKPHAAGIDVGAEEVYVAVPPDRDEQSVRSFPTFTADLRRLAEWLKACQVETVAMEATGVYWIPLYEILEEEGFEVCLVNARHLKNVSGRKTDVLDCQWIQQLHTYGLLSPSFRPPEQIVAIRSLVRHREMLVRYRSAHIQHMQKALTLMNVRLTNVLSDITGVTGLKIIRAIVAGEHEPKQLAQFRDERCKRSEAEIAKSLEGHYKREHLFALKQALELYDFYDQQLQACDTELEAMYQEFDPPENPGTPPPASRTQKRRKNQAHFDLAPALYRLTGVDLTQIDGVDELTVQNVLSEIGTDMSKWPTVKHFTSWLHLCPNNKITGGKVIQTGVQPTKNRASAALRVAAASLKSSDSALGAFFRRLRARLGTPVAITATAHKLARIIYFMLKERKPYHDFGADFYDLQYRTRVLHNLNRRAAKLGFRLEPVDPAVS

SEQ ID NO: 150475 - protein, 381 aa, unidentified
MTTAATHHEQSNTTEALLFVAFELSEKTWKLGFTTGHGQKPRERTVTARHHEHVLDEIAQAKRRLGLPATAPVVSCYEAGREGFWLHRFLQAHGITNHVVDSSAIEVNRRRRRAKSDGLDVRKLLSMLMRYAQGERHVWQVVKVPAVEAEDQRPLHRDLETLKQERASTMTRIEGLLSSQGLRVTSLTKLPEQLEALRLWDGSPIPPGLRRRVLRVYAHYTFLSEQIAAVEAERRALLQTSQEASIEKVRQLMHLRGIGINGAWLLVMEFFGWRAFKNRREVGGLAGFTPTPYQSGESAREQGITKAGNRHVRWMTTELAWSWLRFQPDSALSVWFRTRFGGGGKRLRRIGIVAVARKLLIALWRFLETGVLPEGAGLKEG

SEQ ID NO: 150476 - protein, 405 aa, unidentified
MLYVGIDVAKRSHTAAAVGEHGCVVVAPFRFDSTAAGFTKLLKRLSENGVVPFSAAVGMEATGHYWISLFDFLVRQGFEVSVINPLQTDAFRRVETVRKTKTDSTDALQIAELMRFKTFEPSALGDETIQAMQQLSRYRSYLVEERTSLKNKLAALIDLVFPEYSSLFSDMFCATSLEVLKGFGTPKELLATSVATIEKTLCSFSRGRIGKDRAKALRAAAASSVGVSFRSDAMAFEIKLVVENIQFLGSQIKDLEDELERLLGKSAGRWLTTIPGIGVVLASAIASEIGDAKRFETPRKLIAYAGMDATKRQSGESDPKGHMSKRGCPHLRCSLMRAADTVRRFDPYFKDHYEMKIAEGKHHYVALSGVARKLAEVILALMKEQRAYEPVPPPHHRPSTVMSEK

SEQ ID NO: 150477 - protein, 337 aa, unidentified
MKCDKYMGMDVHQAMTVVAVLDADGKVILETMVPTVAASIIRLVQSLSGPLRVTFEETTQAAWLYEVMRTYVTEVIVCDPRRNKLLGEGSKADKVDARKLADLLRTGMLRSVYHGHEATRNLKELVRAYETLSIDTLRTMVRIKAIFRGRGIPTPGRGVYQPKQRERWLEMLTEAGMHQRAAWLYEQLDQLRVLRRKAKQIMLSESRRHRAVGLLKTIPQLGPIRAAFIVATVDTPHRFRTKRQFWSYVGLAVVTHMSSEYEMKAGRVVRRRKPIATRGLNQNCNRRLKEVFIAAATGGSRHEPYGPFLEKLKQNGMRAEMARLTLARKIAAVALIV

SEQ ID NO: 150478 - protein, 368 aa, unidentified
MKDVTTYVGIDAHKKDLFIAMLVGTQATPLTWTVANEPNAIRRLVRKLEREAPGPVRSCYEAGPCGYALQRRMTTTRVVCQVIAPALIPRKPGERIKTNPRDARKLAELLRAGLLTEVQPPTPEEEAVRDLCRARDDAREDLQRSHHRLGKLLLRRGLHYSGRNWTRAHRQWIDSLEWAHAAERVVVDDYLLAIDHLEARLIELDARLTAIAATEPYREPVAWLRCFRGIDTLTAILILAELHDFRRFQSPRALMAYVGLVPGEDSSGEKHRRGRITRTGNALVRRLLVETAWHYQHRPSIGVALTRRRKGQPTRVIAIADKAQQRLCRRFRRLAEHHKPAPKIAVAIARELAGFLWAVLQPASVSAS

SEQ ID NO: 150479 - protein, 428 aa, unidentified
MNFTQNERINQITSSTLIVGVDIAKFKHVARAQDYRGVEYGKPIMFENSREGFELLADWFRKITMEQGFQDVIIGMEPTGHYWLNLAYYLKEQHILCGVVNPLHVKKSKELDDNSPTKNDIKDAKVIAQLVKDGRYAVPNLPQGIYAELREAMKIRDHLSTDLRVVQGRVHNWLDRYFPEFLTVFKDWECKSARQMLSLYLLPHELVSLSDEILLKHLREAAKRGLGLGRVKSLKAAASRSVGMKQGTELAKIELQLLLTQYEYLQSKFSELDVKLDELMEQIPYVQQLLAIKGVGRDTIAGFIAEVGDIHQYRHPKQIVKLAGLNLKENTSGKHKGQTKITKQGRKRLRALLFRVIMPLVAKNGACRALHEYYTKRPDHPLKKMQSLIALCNKLIRILFGIMKKGHEFSEEKMMQDIPRFKEVPLAA

SEQ ID NO: 150480 - protein, 329 aa, unidentified
MKSVCGLDVHKDSVYLCILSEFGELIEKVFGVLTYQLEEMRDLMLHHHVVEVSMESTSVYWIPIWRVLSPHFKLNLANPYFIKQLSGRKSDVKDAQWIAECTMKELIRGSFVPPETIQQLRQYDRRIFDLNEEIVRKLSKLDAVLQRCNIRLSNYVSNVDSKSYKAVVRAFSQGITAPEELVKLIHGRIINHHGIDAITASLKGVVSLAEIDMISQLRDELDMAEAHKEKCQARMLEICEREFPEELKRLQTIPGIKERAATSLIAEIGTDMNKFETANHLASWSGLKPRNDESNKKIKSRSITHGNVYLRKTIIECAWAASRTKEQIQ

SEQ ID NO: 150481 - protein, 374 aa, unidentified
MADYSEVFVGIDTSKLRNAVAIAEGGRNGEVRYLGEIDNTEAATSKLVKKLAAQHRRLTFCYEAGPTGYGLHRLIKTLGHECVVVAPSLIPKKPGDRVKTNRRDALNLAKLLRAGELTAVWVPDARHEAMRDLVRAREAAVDDLKSKRQQVLSLLLRLGRHFTGKRTWTRAHMNWLVSQKLAHREQRIAFEEMLLAVRQADERVIRLERAIAAAVPDWSLAAVVTALMAVRGLDLISATIFLAEIGDLSRFASPRQLMAYLGLVPGEESTGDRVWRGGITKAGNHRARRILVECSWSYRHPPRVGKKKLAKVEAAPPAVQEIAWKAQARLTARYRALARRGKRPTLVVTAIARELSGFIWAVSRAVGAPATPAM

SEQ ID NO: 150482 - protein, 440 aa, unidentified
MRRCFGLDVHREFAQVALWQDGVVRDAGRIATTPEALRIFADSLAPSDEVALEATGNTHAIVKLLRRRVARVVVSNPHKTRAIAESRVKTDKVDAQILAQLLAADYLPEVWIADEATQARRRQVARRAHLVRQRTRLKNQVQSILHRNLVPRCPAADLFGLKGRRWLAEQELPADERQAVAALLRQLDFHGEELRLIDSELARTALACEDTKRLMTIPGVDVTVAMAITAAVGDFSRFSAPNKLVRYLGLNPRVRQSGEQPAAHGRIAKQGRAHARGMLVEAAWVAVKTPGPLRAFFVRVRARRGMQIAVVATARKLAVLCWHMITKGQDYAFARPSLTAKKLRALELKAGMPSRRGQKGSAAAYSLRQVRAREKALAEQAERAYAQLVADWQAKAPGAGVAAANGARLSRPANRATAARQDTAPDPALRSGIDHAQPAA

SEQ ID NO: 150483 - protein, 406 aa, unidentified
MADIFALDVSMGKSYCVWYRGKHCLKEFSLVHTKAEFNALRDMINKAQKPIIYFEATGIYSRVIEHFFETNGLRFCRLNPLELHLKSESLRRVKTDQKDAHRITLTVQENTFRLTVPWKKDYLQLHELSRFYNQLNADWNYRLNHLHTALEQVFPELKQLFVNKTSKLALNIVELFPHPALVRPYSRVKLKNILMASTDKRISKMKAYKYADRLIDLAQQSYPAVSSDAIQVDEVRYYTRQLIALARKKEEMIKRIESIAQLLPKYGLYYSFPGIGKQTAAQLVGELGDISRFDNSNQLNAYVGIDIRRHHSGTYAGQDHINKRGNPIARKLLYFTIGNMIRQQHVNPNHIVEYYYRLKEKRPYPKLNKVAMVACMNKTLKCLLSMIKHHEKYHYRYTDSMVPVRA

SEQ ID NO: 150484 - protein, 421 aa, unidentified
MRGIRGKKIRMVKEGTLIATVDIGMTTNTGYCTTIDGRDIKPFKFENTREGFEKFLHMIVASKSKFGCTEVMVGYESTGPYAEPLAQYLMDKPVTVVQVNPLHTKRLKEVNDNSPGKTDDKDPRVIGDVLRLGHALSVVVPEGDAAYLRRLNNGRERHVGERTALLNQIQQLVFLIFPEFKKVFKDVTIKTPRHILKIYTTPERIRTLDKDALGEEIRKRSWGKFGMREAEALINLARDTVGIKEGVAGIALDIQHILVQLEALNAFIEEIETEMKKALDRIPYSARILSIKGLGVVTVAGLIGEVGDFSKFRTQAEIMKLAGLDLFEISSGKRKGQKRISKRGRHLLRKILYNAAVGTIRKNGIMCDYYARLIARGMVRTSALIVVAKKLLRIIHAMLRDGRDYIHNYASSKRVVIKKAA

SEQ ID NO: 150485 - protein, 394 aa, unidentified
MRFVGIDIASETHVVAVVGANSEVEVKPTAFAEDSTGYQKLFAVLGTPGEVLVAMEATGHYWKNLFAALATAGFAVALLNPLRTHRFAGEELERTKTDAIDALGIARFAAHKQPLPTQLPDAATDELRELVRLRERLLQDFGDRVRQLHRLVDLGFPEFTRYVHTLDSELASAILHDYPTAAAFHGVSVKRLARLRYDQRHQVGLELARSLIDAAQRSVGRHHGAAYRVQVRYLCEDLDLLRRRLRELDRDIDGKLREHEVGSLLTTIDGIGPTTAARLIAELGDPAHFRTPSALAAYVGVIPGLKQSGKQKRARAGLTPLGNARLRAALWMPTLTAVRKNPWLRSYYEQLRARGKLPKVALVACMHKLLFAVYTVAKHRRPFVPKPAITGVHA

SEQ ID NO: 150486 - protein, 410 aa, unidentified
MEVLHAHCAGLDVHKDTIVACIRHMVDGKVTTVVKTFKSTTPELMSLSEWLSSESVTHIAMEATGVYWKPVWHILSDGEFELVLANAAHVKNVPGRKTDVNDATWLADLMAHGLIRASFVPDEPTQQMRDLLRTRKQIARERSSHIQRIQKTLEDANIKLDSVVSNIIGLSGRRILKALIDGQSVPQALAVLAHRRIHASSDELEAALRGRVTKHHRFLLKLHLDQIDAFDATIARIDEEVDSNVEPFRVAIEMLSAIPGVGQLSATVIVSEIGIDMSRFPTASHLISWAGLCPKNDESAGKRRSTRMKKGAPWLKTTLIQCAWAASRSKDSYFQAQYLRLRSHRGSKKAVCAVAASILTAAYHMLKNGTVYQDLGANYFDNRAKDKQVLRLVGRLQKLGFEVNITSVAA

SEQ ID NO: 150487 - protein, 437 aa, unidentified
MSDNKALELRVSVDVGYRRHSVAIGLPSGEVLEEFEIAHRPEGFEEFFSRIEKHHKARRCGVAVAMEGFNGCARPLDRMVRRRGYRLYNINNLKLARFKEIFPGAAKSDRIDARKGLELFQLSDHLPLAKEVLQEVKGTPQENEVLKRLTRRRRRLVDERVRVISNLQTDLQAVCPGLLEITKNAGNQWFLNFLVSAQTLPQLARLRPSTLLKIPAVGRKYASLIEDWQKRAHFSEEVKWVSEMIQEDAQRCLDLNEKIKALKAKIKEVAKDSKMAKILLSIPGFGTICSPELAGEIGTIERFSKEGSLALYLGMASLDNSSGKYQGSKQPKHVNTRAKAAMMVALDRHRKYVPESQRYYEKKRSEGKKHNQAIRALGRHLSRIIYKMLTEEREYEMRPEKGNTKSKVRPRSLIKTQIRKPKISAKGKNNNIYQQSA

SEQ ID NO: 150488 - protein, 320 aa, unidentified
MAATSDRSQYVGVDVSKATLDVAIGDERPFPVSNSREGLDQLLPRLRSHDVALIVLEATGGLEALCAATLAAAGLPVAVINPRQARDFAKATGRLAKTDAIDATVLVAFGRAVRPEPRPLPDEATRELDALLDRRRQLVGMHTMEQNRLSGTVPSRVRRDLEAHLQWLDRHIAEVDRELEERIRSSPIWREKDDLLRSIKGIGPVVSRTLLAAVPELGRLDRRQIAALVGLAPMADDSGQHRGARRIQGGRSSVRSVLYMAALAARRYNPALRAFAERLEAAGKRPKVILAAVARKLLVIADAILRSGRPWDPDFVAANA

SEQ ID NO: 150489 - protein, 392 aa, unidentified
MSQHFRFDASRSLTALEQDNTIIAVIEMSQTKWLVAALVPGVERQPLKKFDAHEETLLKLLHRWRHEAGQAGRNIKRIVVAFEAGRDGFWLARWLRARDIEVYVIHPTSIAVSREHRRAKTDRLDTELLMRVFLGWLRGERRHCSMAAIPTIEEEDARRPNRERQNLVTEQTRIINQMKAIFTRFGIHSLRPTMRKIAEKLEDLRTAEGTPLPQNTLAELRRHLARLRVVRDQIRAVEQERLRKLAVAPAAEKKSPHAMVRLIARVLGVGVETADMLVNEIFSRQWRDRKAVARYAGLTGSPDESGSRRRERGLARAGNVRVRSGMIQLAWRFVRFQKNSALTQWFAARTADGRASTRKTMIVALARKLLIALWRLVTGGEVPQGVVLRPAS

SEQ ID NO: 150490 - protein, 334 aa, unidentified
MENIALIGIDLGKNSFHIHCQDRRGKAVYRKKFTRSKLIEFLATCPATTIAMEACGGSHFMARKREELGHFPKLISPQFVRPFVKSNKNDFVDAEAICEAASRPSMRFVQPRTESQQAMRALHRVRESLVQDKVKTTNQMHAFLLEFGISVPRGSAVISRLSTILEDNNLPLYLSQLLLKLQQHYHYLVEQIKELESQLKRKLDEDEVGQRLLSIPCVGTLTASTISTEIGDGKQYASSRDFAAATGLVPRQYSTGGRTTLLGISKRGNKKIRTLLVQCARVFIQKLEHQSGRLADWVRELLCRKSNFVVTCALANKLARIAWALTTRQQTYEA

SEQ ID NO: 150491 - protein, 406 aa, unidentified
MLLVGDDWAEDHHDVEIMDPAGRTLAKARLPEGIAGLARLHALIAGQRGDDAEQVEVRIGIETDRGPWVAALTAAGYTVYPVNPLQAARYRDRHAVSGAKSDAADAHTLADMVRTDAHQLRPIAGDSPDSDAVKVVARAHKTLIWERTRQTQRLRHALREYFPAALDAFDDLDAADTLELLAKAPDPTAAVRLTRAQIAAALRRARRRDVDTKTTAIRAALRTPQLGRPAVVVAAYAATTRAAVAVLATLNAQITALEAQVGAHFRRHPDAEIILSQPGMGPVLGARVLGEFGDAPGRYADAKARKNSAGTSPITRASGRRKTVHARHVHNDRLVDALMLQAQSALQASPGARAYYDRQRARSLDHNPALRQLANRLVGILHGCLKTRTRYDEATAWSHHNQQTAA

SEQ ID NO: 150492 - protein, 356 aa, unidentified
MQHTILNFINQHFFVGIDVHLKQWKVTIRSAGIELKTFSMNPSPQELFQYLHKHYPGGTYHLVYEAGFCGFWIQRAFTELGVQCIVVHPADTPTSAKEKVHKSDPVDSRKLARELENGSLKAIYVPQVASEQLRALMRLRFRLVQQQTRTKNRIKGFLRVNGISIPAVHLTNPRWSGAFILWLKSVHPSHDAGRYTLGNLILQLEQIRLHLSGVLKQLRREAASHNLASAFEAIDSAPGLAFITTMTLITEIIDIRRFSRFEQLCSFVGLVPSVYSSGETSYTRGMSFRHNQYLRPLLIEAAWTAVRKDPAMTLRFNELCRTMSKQMAIIRIAKKLLRRIFHLWKKQDRYVYALVA

SEQ ID NO: 150493 - protein, 411 aa, unidentified
MKEQKRKVKANTVLVDHRNIVGIDIGKRKHAATAVTPKGTVIASLKSFENNQAGVDLLERQVLRPAINRSKPLIAMEATGQYWNALHDELQRRGYTCVVLNPIQTNNRSNKQIRKAKTDPLDSAVIARTILAGDAQATLVPSESIYELRLLVRHRWRMIKVHGCILRYAIGLLDQVFPEYDGVFCKPFLASTRALVRDIGLTPKSLNSKKAEVILTLQKTSRKRLSTETIDDFLKRAKDSIGTQQANDVINEQFRMVVDYLDFVETQVQTINKDLRSRMEKLSSPLMSLGIGAEVVATILAESGDLTRFPGPGEYSAFCGLDPSVRDSGDSIRGISHISKRGSPLLRWALYVSAQTMVNKHQDFARVYERHVKRRKGHRFSLIAVAHKLARVIWRLAKDGRNYTKRPPKRK

SEQ ID NO: 150494 - protein, 342 aa, unidentified
MTMIIGCDFHPRMEQIAYVDKDTGECGERRLNHPQEASEFYRSLRGRQVRIGVEATGNFRWFRRLMSELGHEVLLGDPSAIHASNPRRQKTDKRDARHILSLLVEDRFPVVWQPPMENEDLRQLLLHRCRLVRMRTRIKNQLDSMAKNEGLLSSRVWSPSRRQQIEALPLPGWYAERRTDLLDLLDQLYQRIEPLDKAVRAAAAADRQAGLLMTHPGVGPVVSLAYVLIIGDWQRFPRGGQVASYLGLIPAEESSGNRRRLGGVSKQGNSMLRWLLVEAATIAQRHDPSWHRQYLRLSIHKHHGVAKVAIAHKLAVRLYWMLRSGQDYAEVKERGSHAGQSV

SEQ ID NO: 150495 - protein, 331 aa, unidentified
MSVWVGLDIGSRTSVVGVRKDGRTAGQWDIAQTPAGRKAAVKKLQALKPTSIVMEATGIYYLDLAIELHAADLPVSVINPKSFHNFAKLMLVNSKTDAIDAQLLSQYGERMTPRLWTPPSTVQLELRGLGRHINRLVGHRIRAKNELHALQATATTASMLIEDQEEEIASLSNRIERFRKAGRELIAQCPRLTRQYEQLLAGPGIGEVSALAALAELTTLPETLKSSQVARHAGLDVRQTQSGTSIDKPGRLGKSGNAYLRAAMYMPALTAVRCDPYAKAFYESLISRGKKKMQAIAAVMRKYLTGIWACMSGDEPFDTAKLFSSEHLRKP

SEQ ID NO: 150496 - protein, 416 aa, unidentified
MKISQETRVIQRYIALDIHKEYVLAGGMSAAQEWLLPPRKIEMGRFREWALKDLCDTDAVVIETTTNVWDIYDIVQPRVARAVVAHAGAVRQIAEARVKTDKEDVKRLIRLLIAGIVPEVWVPPMHVRELRGLISYRQRLVKTGAMIRNRLHSLLHRHNLLLPEEGLASLEWWAQQEKISTLEKMQIHQEISMLSQIEQHKVEIDNELGRQSLGETWGREAVCLMQLPGIGVVVAMTILSAIGDIHRFESADKLVGYSGLGAGVHDSGKEHIEKRITKSGRKELRWAMVEAAWRAVRMSPYWKEQYEKFLRRMRRPNQAIVVIARKLLVAVWHVLSKEETDERANEADLAYKMLLWSWSLSEEVRQGLTHKQFAKYALMRLGVQTDLTRFVRGKVPRRIASREEVLVRMTELGLSS

SEQ ID NO: 150497 - protein, 329 aa, unidentified
METYILGIDVSKDTLDVVLRDQEHNQHQVFSNNAVGYARLSHWLIARKAGVVHACLEATGQYGEGVAEYLYQAGHTVSVVNPLRIKRYGESKLHRNKTDKADAALIAEFCAKENPPLWKPLPDSLKQLRQMVRRLDDLQCTYQQERNRLTSGVDNAWVVADLQGHLQELRQRIQAMKTAINQFIAADPQLQHQSYLLDTIPGIGMLTAARLLAEIGEITSFEDAPQLAAYAGLNPKGARSGSSVRKKTRISKEGRAFIRYILYMPAIVARKHNPIIREFCTRLAQRNLPEMAIVAAAMRKLLHLVYGVLKNDTPYNPNILKERFLALDF

SEQ ID NO: 150498 - protein, 475 aa, unidentified
MVVMFLSKKLFVGIDVSLKSNHVCLMDHDGSVMGKSLSFDNNLPGTLAMVEHLNSVLSNGDFEKLTIGMEATALYWFPLFNFLNNSSRVFVEKEAEIIPLNPKVVSHFRDAYTDMDKTDIKDSFVIADRLRFGRVHSGRIPSVDFLALQRLTRFRYHLVQYESRLKNYARSFLFLTFSEWNRVKAFSDVFGATAKKLLKKFCSAQELSELSIEDLKELLNEFSKGHFKNLDEKARLVNQTVKDSFPIPPELAEQVHLLIKQTLQQLELLEKHIARLDKKIEKLMNKFHNPLMSIKGIGPVLAAGIFAEIGDISRFPGQAQLAKYAGLTWRKNQSGNFNGDITPLTKTGNPYLRYYLIQAAQCLVNHNPEYREYFTRKFNETPRHPHKRALSLTARKLVRLVYALLSKNQLYLAKERQLAKDREVNSASVPEVQAEVLEVSEKTAAKKVKTQRLPHASRTLPCGQEHMRGRRAVNT

SEQ ID NO: 150499 - protein, 333 aa, unidentified
MAGQVEVGYVAFDVGASKHAFAVGLGTRQERGEVDNAPDEVLAFLKARLGACQRLRVVMEATGVYFLDLALLAQQAGAEVMVINPKAAHHFAKARGQRNKTDAIDAAMLLDYLQRMPFRPWQPPPLAVLQLRQYGRHLVRLTDQRTRARNQLHALEATATSPQLLREDLREAIADLDRRIQRISALAMAQVRADARLTAQFEAVDSVTGIGPSTAIALLGELLVLPQDLNSRACVCHAGLDVRVHQSGTSVALAPRLSKHGNKYLRRALYMPALTAIAHDPHAKAFRDRLLARGKKKMQAVAAIMRKLLTAVWALVRNPAQYDGSKLFAAVEG

SEQ ID NO: 150500 - protein, 484 aa, unidentified
MAKRKMSTFERLSTGQMNRAQRRELGRRVAASDPGLTIVHPNAGGIDVGNESHFVAVPADRDANPVREFGCWTAALNEMAEWLKSCRIDPVAMQATGVYWIALYDVLEQHGIRVVLVNARHTKNVPGRKTDVQECQWLMKLHTYGLMRDSFRLQQDMEYLRTIWRVRDRHVKEAGQEVQHMQKALTKMNIQLANVISDISGVSGQAIVTAVLKGERDPYKLADLADYRVKASREEVARSLEGNWRADVLFELKQAVDSYHFARRQMEECDEKLSLYLVSLPTRMLAIPAESNDAPQTAAQKRKKAKKPRGNEPRTDMKEELKRICGVDLTSIDGINVMTAFTVISEIGTDMSRFQDEDHLTSWMGLAPSNDISSGKIVGRGKKKVKNRVAVVLRTAATTLLESDTHLGARYRHLRRQLPTFKAAVKAMARYLAVLIYHLLTKGEQWVDRGAAQFERRRTERELANLSSRARANGFKLIPIAEAS

SEQ ID NO: 150501 - protein, 350 aa, unidentified
MLIIGVDFHSRFQQIAMVDTESGELSERRLDHSNGEAQKFYAGLQKPVRVGMEATGYAQWFERMLAKLGYELWVGDAAEIRAAMVRKQKTDSRDALHILDLLLTNRFPRIWIPSPAERDLRQLLRHRHKMVCLRTSVRNQLQALAMGQGVYRKRKLWTATGRTELEDLRLDPWASRRRRELLAILDQLDPSLAELDRAVAQEAEQRPAARGLMEQPGVGPVTALMFVLTIGPVERFRRSKQVVSYLGLNPRESSSGGKQRLGAISKQGNSMARFLLVEAAQTASLYDEELRRDYRRLKFRRGTAVAKVAIARKLAVRLYWKLRKHSSPAPPARMQGSPKNPVVGASLSGN

SEQ ID NO: 150502 - protein, 343 aa, unidentified
MQIRSVGIDLGKTTFHLVALGASGKVLVKKKFTQKQLLVFTANMETSLIGLEACSGAHFLGRALRQQGHDVRLIAAQFVKPFVKSNKNDFVDAEAIAEAVERKNMRFVPIKTDDQLDLQAMHRIRDRLVSRRTAVINQIRAFLLERGMVFAQKPAKLKAAMADVLENAENALTPMMRNMIGILWDEWKTVEHQIDELTDRLEQIAASDVGCCRIRQIPGIGPIVATAIVAAIGNGAAFRKGRDFAAWLGLVPRQYSTGGKTRLLGISKRGNIYLRKILIHGARAAAMRIKRDRFAIGGWMNALEARAPRNVLVVAMANKLARIAWAVLSTGEDYRSGVILAAA

SEQ ID NO: 150503 - protein, 317 aa, unidentified
MAQNGTIVGIDVAKGKIDAAIRFGAEASFANSAEGHRELLAWLNEHGVCKAVMEASGGYEKSWARLLRGAAVEVVIADPNRVRHFAKSAGQLAKNDPIDARMIAWFGAVFGQASGQPHDEERQELDQIVTARLGIVRLKEQIESWREHEQPKAVQKAQRALLKAVALQLAKLETIIAAKIDKTERFAQRAEIIQSVPGLAGTAAAGLIAFLPELGLVDRQAAAALLGVAPFDADSGQRHGPRHIQGGRHKLRKLLFMPILSAATQHNPVLKACYQRLIAKGKKAKVALIACMRKLIGILNTMLARGAKWDPAKHAVA

SEQ ID NO: 150504 - protein, 358 aa, unidentified
MGEITRVGVDLAKRVIQVHAVDATGRVIVAKQLQRDGFMAWCAQLPPGCLVAMEACSGSHHWGRRLRAMGMEVKLIAPHFVSPYRLSGKTGKNDAADAAAICEAASRPSMRFVPVKSVEQQSMMALHRLREGYKEERTACINRIRGLLAEFGLVFAQRPEVLRAVLSEVVEDAANELGAIARMALQRAHLHWIELECHIAWCDERIARHVRSDEQAKAAAKLCGIGPVTASALVATVDDFKQFKNGRQFSAWMGLVPRQSSSGGKAVLGEITKRGDEYLRTLLIQGAKSAVFTAHRRSDRLSRWIVQLRERVGWQKAAVALANKHARILWSILVNGQSFDPEHVPTKHRMPSLAAVAG

SEQ ID NO: 150505 - protein, 348 aa, unidentified
MERYIGIDAHSQSCTLAVIGPSGRRLKSQVVETNGTVLVEAMKSIAGRKHLCLEEGAQSDWLHEILGPHVDEVVVTMPRKRPGQKDDLRDAYALAEELRVGALHSKIYKPPKQFSGLRNAVRAYGMVVGDIVRTKNRLKAVYRSRGIVTDADVYSAAERWLDKLPPGHRRLAESLTRQLEALTPLEKQTKSWLRQEAKAHAIVGKLETAPGMGPIRTAQLLAVVVTPHRFRTTRQFWSYCGLGIVMRSSSDWVRQNERWVRAEAQQTRGLNRNCNPLLKSIFKGAATTVIQSLPDHPLQQNYQRMLSAGIKPNLAKLTLARRIAAAVLAMWKNNEVYDAKKIELNKKA

SEQ ID NO: 150506 - protein, 363 aa, unidentified
MNFIGVDLHKKSITICVLNENLKVLARKTVFCDQTDQIVEFFRPFRPFKVVVEATASYLWFVELVEPLAEEVVLANPKKLRVIAESTKKTDRLDAQVLAEFLARDQIPRAYMPTPRQRQHRRLVRHRQYLRQRMTSVRCKIRHILSDYNADRKDLFSTQCGPAYFKEIALSDADRFVIKQLWSEWQDHQSRILALTKKIKAFIVKAPNREKETRAILKTAPGVGFVTAEVIVSEVGDVSRFRNAKAICAYAGLVPTVRQTGGKKSKDLRITKEGSGLLRWALVESAWRLVKTSPKWSAFFSQLRKRSGSKRAIVAVARKLLCVLYAMLKTSTPYKIVATETKAPKPTRRRLVRKSSPKETVTT

SEQ ID NO: 150507 - protein, 350 aa, unidentified
MVVLGIDAHKRNHTAVAADERGRELGTHTTGTTSSDHLRLLAWARRFGEHRLWAVEDCRQLSRRLEADLLAAGERIVRVPPKLMANCRKAARTYGKSDPIDALAVARAALREPDLPTAQLDGPSRELRLLVDYREDLVTERTRIINRMRWHLHELDPGLDPPARSLTHSRQVAVVEDRLRDSDGIVARLARRLLARCQALTDEIRELEKEITGRIETLAPNLLKIPGCGTLTAAKILGETADVTRFRSEAAFARHNGTAPLPVWSGNRARHRLSRTGNRQLNTALHRIAVTQAHYHPDARAYLQRRQNAGNTTTEAIRALKRHLSDVVYRALRRDARESHSNVITLATAA

SEQ ID NO: 150508 - protein, 430 aa, unidentified
MPQKSGFTLGGGQYRNAVASGQSRTYEILSKIERLYVDPTLPRYGTDVMKQAPPTVSAKLTAQSLISVGLKGGAMAPIYIGVDFHARQQTICYLKTETGELVISELKHQNKEQVRAFYQQFQEPVIVGLEASGYSPWFEALLEQLGCEVWLGHATEIRRRARWRQKNDRRDAELIWDLMVHDEFPRLHQPALSSREVLRMLRYRQKLIKLRTMTKNSLQAIALQAGLAKGPQLFTAAGQEQFKAAEMSPVLQWQRDHWFELLKPFNQQLLETVVWFKAQSKDDVQIQRLLTHPGIGLLTALCILHTLQPVSRFRNARKVAAYGGFDPVERSSAERQHFLGISKAGSRMLRYLLVEAVQTAVRHDEDLKRFYKRLAERRGRPKAKVAAARKLLIRAYIMLRDEIDYAEFRRRAVAARLARHGQGPTKCPRY

SEQ ID NO: 150509 - protein, 411 aa, unidentified
MDVLYPVCCGLDVHKKTITACLRFPSARARAEEVRTFGTTTRELLRLADWLTAAECTHVAMESTGVYWRPVYHILEASFEVLLVNAQHVKAVPGRKTDVKDCQWLAQLLEHGLLRGSFVPPAPLRELRELTRYRRQLVQEHAREANRVQKVLETANIKLGDVATDVLGVSGRAMLHALIAGERDPERLADLARGALRQKAEALREALVGRFTLHHAFMLQGLLDHIEFLDQQIARFDERIEEQTRPFGPAIERLDTIPGVGRRSAEQILAELGDDMRRFPTAAQAASWSGICPGNHESAGKRRNGRTRKGNAWLRSTLVESARAAVRNRGCYLSAQYHALARRRGDKKAVVAVAHSILVAAWHILRDGVEYHDLGPDHFDRLNRERLVQYHTRRLAELGLTVQLPGAQATA

SEQ ID NO: 150510 - protein, 472 aa, unidentified
MRYIGLDLAQTTSHKALVIDEGGQVITPVMSVKTSAISLELLFQHAREGAPADEPLIVVMEPTGMAWFPIAVFCQRQGVKVYLVNSQQVADLRRFYRKHAKSDRIDARVLARLPIVNPEKLHALQLIGARQMACQRGCKELDRMTDLMVAIQNRLRAIDRFAWPGLEQVLSENIAPLTRWFRENWYDPGTVLAVGAAGLLAAWQENGPKSAEMPESDEWATALVQLAEEVRALYGHEAAFLDYGYLQAEVSREQALLATLEAEHQQLQLGTVRPLYRQLHPSRNLETLYGVGQDGAAVYFSFVGDPQRFPDHASFRGWSGMIPRSSQSGGSEAKGLSISQAGPGLVKKFSFLGAETARQWDPQIAAIYYDQVANRGKHHTQAICTCATHLLDRIWTILKEDRAYELRDVDGTPVTTEQARQIIGTRYTVPKEVRQRNNQRIRRARREQLVEKKQKRESHPDWVRGESETPSR

SEQ ID NO: 150511 - protein, 361 aa, unidentified
MNESTPIIAFDQHAASIVAAVLLPGQRTPASQQLTPDLPTVGRFVERIRRRGSVRCCYEAGPCGFELQRFLHARSVHCDVIAPALIPRRAGVRIKTDRRDAAQLAVLYRAGALTAVHVPTEQEEAARDLLRCREDIRADLLRARHRLSKFLLRHGRRWTPTKAWSKRHLAWLQMQHWSIPALEQTFQAYQRAVDEAIMRLRAVELDLRELLTLEPLRHRVTRLRCFRGIDDLTALTIAAEVGDAKRFARARHFMGFTGLVPSEHSSGTARHRGGITKTGNAHLRRVLVEAAWHYRHRPALGHALRVRQRGAPPTAIRQAWVAQHRLHQRYRRLLGRGKPPQAVVTAVARELAGFTWAVVTQ

SEQ ID NO: 150512 - protein, 474 aa, unidentified
MVVGVDQGDENVLLVSLTGLESQYIQEDVVTQGSGLSRGDKRRNAKLARLRELVPVVNAILAIDLADEKQVAVLTDHDSRVLARRRVKAKAWRLGPVLQWARQQARAQGFDDVTIGCEPTGHRWRVLDQLAVQRGMTLVCVQPLLVGRAREAEDYTRDKTDDKDAVLIARLVAQLDCYVPERAEQRWAELRQLGSYRDRLITTATAAVQQLRDLLECAWPAVLSAAAEPCDSITWCAALAVVLRGCDGRPERLAEGYPRFESAVRREFPCWGGQRGPRRCIVAAVYAALADPAGVSAQRPGALRRATWVLADWKATKARLAEVENRMLEILDELELTELVSSIPGVSALGAAAILAETGDLSRFDTPRALVKHAGLCPRENTSGTMIGRSRISGRGRPRLRLAAWRAVWGALAHNPAMSTRYRHLTTREHNRLTDGQARAAIAAALLRWIHVIVTRRITWDGAIAAAAEIPAAA

SEQ ID NO: 150513 - protein, 316 aa, unidentified
MTDSPVFVGIDVSKARLDIAIRPAGPPMSVPYDETGIALVVNQLQPLHPTLVVLEATGGLEVVVSGALAAAGFPVAVVNPRQVRDFARATGRLAKTDALDAHILAQFAAAVRPPVRPLPEPNVQELGALMARRRQLLEMLTAEKNRLSSAPRRIRRDIQAHITWLEQQLARLGDDLTHLIRSSPLWREHDDLLQSMPGVGPVLATTLLASLPELGTLNRRQIAALVGVAPLNRDSGTLRGKRMIWGGRAAVRAVLYMGALVGARHNPVLRAFYQRLRQAGKAPKVALTACMRKLLTMLNAMLKHRTPWRPPCAQVA

SEQ ID NO: 150514 - protein, 428 aa, unidentified
MNEENCTRLKEFRQLQKEIRGSKEHLIVGIDVAKESHKAFFGTATGKTLFRRLVFQNDREGFERLLLQAEAMRVQHGLEKVVLGLEPTANYHKPLGEYLITGGHDVVLVSTKSVKRNRELLDGRWDKHDTKDSANVADLISQGKCLYYEHPELKLRQLRGLLSFKRRLKRQEHGLKVRIRNHLLAQYFPEFDRYFGRSESESLAIVRWCLDPSVISALAYDEFVRLVAPGRRALRQQERLRAIWQKASASIGCEGSEAVQFEAKLMVEGLRQIREALRATEAKITGICRGFPEYEYLLTIPGYGPDVSSKVLGAIGDPFRFTRGKQVLKMAGLDLVANRSGKRSDGVVPVISKNGKAELRYALYQAAMIASIRNREFIMWFTNRLRGRQREKGIKVKMRVKLSAKLLIIAWTLMKNKESFNPDCLRIE

SEQ ID NO: 150515 - protein, 347 aa, unidentified
MRFYTHQHKHYCGIDLHARSMYVCILDQAGTIVVHKNMPATPEAFLRVIAPYRDDVVVAVECIFTWYWLADLCAQEGIAFVLGHALYMKAIHGGKAKNDKIDAHKIAVLLRGGMVPIAYVYPPEMRATRDLLRRRCHLMRKRAELLAHIQNTNSQYNLPEIGKKLAYKANREGVEEHFPEPSVRKTIEMDVSLIDHYDKLLGEVELYITRTAKGHDAQSFSRLQSVPGIGQILALVILYEIQDIARFPRVQDFLSYCRLVKCAKESAGKRHGLSGKKIGNPQLKWAFSEAAVLFLRQNKLGQAYFAKLERKHSKGKALTVLAQKLARAVYSMLTRHQAFDLTRFVSA

SEQ ID NO: 150516 - protein, 347 aa, unidentified
MEKYSRVGVDTSKQIFQLHGVDEAEHPVLRRKLKRREVLSFFAGLSPTIVGMEACGGAHYWARELARLGHEVRLIAPQYVKPYVKRGKNDAADAEAICEAMSRPTMRFVPVKSEESQAALMLAGLRERLVRNRVQLANAIRGYAAEFGLVAAKGPAKLEPLLSRLSTDESVPELARELFAAQAEEYAQLQAKIAAVDAKLMAWHRANATSRRLTRIPGVGPVIASLLVMKTPDPHAFRSGRQFAAWIGLTPKDHSTAGKTRHGVITRAGDETLRSLLVVGATAVIWQARRGTGRCASPWLLALLKRKPPKLAAVALANKIARIAWKLMTTGEAYDARHALLAVPVEV

SEQ ID NO: 150517 - protein, 461 aa, unidentified
MNQYFLGIDASKGYSDFVMLNAKKQPVIENFQLDDTFEGHARLYELLGRFNQDHPEATIYAAVESTGGYENNWFQSLLKFQASLPIKTAHLNPLGVNYNHKADLKRNVTDKISAQNVAEYMIAHPEKVSYQHQDSLASLRKQWGFITMLTKQNGQLLNQLESLVYNANPEILMYCKDGTPQWVLKLLTRYPTALRLSKARVESVARIPYVSMDRAQQLVATAKKSVASADDQITEQLIGATVKQILDLNNTIKAQTKILTDKCAVPEVELLKTFIGISDYSAIGLMLEIQSVKRFLSSKKIASFFGIHPAYKKSGDGTWKYRMSKKGRREPRRILFMVAMSAIKSNPLIRSIFQQAVERGMEKKAAVGLCMHKILRIIYGMLKHNKAFDPEIDRRNRQKKPLRQRRVCQDKNRRYQDFDSKAPISSRQKKKRKERKQQSQNVSNVEYGIKQASVPVTELAN

SEQ ID NO: 150518 - protein, 403 aa, unidentified
MNAVGIDISKGKCMVAILRPFGEVVASPFEIQHTAHELRRLVERLKSLEGETRIVMEHTGNYYLPVAMHLHEAGLYVSVVNAILVHDYGQNSLRRVKTDKKDAVKIASYALSHWLDLPQYAPEEDVGHMLKTCARQCNQYVKQSVMLKNSLIALLDQTFPSVNMLFSSPPRKGDGHEKWIDFVGKFWHCECVNSLSKNVFTQRYQKWCKRTGYNFLSTKAAAIYNSACIQVSTLPRSTFAKQLITQAVSQLNSLSETLALIRQQMLSLASGLPEFPVVTAMQGVGNVLGPQLMAEIGDVRRFNRKQSLVAFAGIDAPPFQSGAFEAQSTGISKRGSSSLRKTLFQVMDRLLKHAPSHDAVFQYLDKKRGEGKHYYVYMMAGANKFLRIYYARVKEHLGSLAVQ

SEQ ID NO: 150519 - protein, 413 aa, unidentified
MEVLHPRCAALDLSKRDAKVCVRIVPLGRVRAIETTTTWSSMSGDILALREHLIAAEVTCVAMEATGDYWKPFYYLLEDAPFEVMLVNAHDAKNLPGRKTDVSDAAWLAQLTAHGLVRASFVPPEPIRELRALTRTRAAVTRERTREAQRLEKVLEDAGIKLSVVAADITGMSGRRILSAMVAGERDPAVLADLSVRQLRAKIPALTQALQGRFTGHHAYLVDLHCTLIDQHTAAIESLTARIEEAMTPFQAVRELICSIPGIGIPTADVIIAETGADMTVFPTPGQLASWAGVCPGHHESAGRKKSSKTRPGNRWLKGALGAAALSIARHPGTFLHVKYQRLAKRRGKSKAIVALEHTLLTLVWTMTTNGTYYDEPGPDYYARRDPARAKNHAIRQLEALGYNVTVQPRDAA

SEQ ID NO: 150520 - protein, 335 aa, unidentified
MEVTKQSVGIDVSKDSLEVKFKEKSTKGIKIKGSSKFNNTSNGFNNLLEWCTKREKVENVVYVLEATGVYHEDVLYFLFNQGKKVSVELPQRIKYFAKSKGVKTKNDLIDSGVIADYGLERELKVWQSPGEEFKTLRDLSREHNTLTNSKSVVKNRLHAAKHAHDKNARVIERLQSTIKFYTSQLDEIEKDIKTTVNADKELSGKIKKVATIKGVGVMTVVKIIAETGGFYLFQNINQLISYAGLDVVENQSGNHNGKTWISKKGNADLRTALYMPALSAIRFNEKMKSFNDRIMETHSYKKQGIVAVMRKLLILIYTLWKKNEEYSSDYKWGQA

SEQ ID NO: 150521 - protein, 329 aa, unidentified
MTDSLNTIDIIGADVSLCEIVFAWARPQKPCLTIANNRKAIVAWLKLLPDHCIIGMEATGRLHHLLADLAVAHGHTVYVVNPKHVASYARGVGQRGKTDPMDAAVIARYVDRERDGLHPYTTPSALQRKLRDLISQRAAVVRHCTALKQSIKATGEGLNRTLKRAHQAALKSLNTLLTEINNELKRTIAADEALENNRKRLQTITGIGFINSAALTHRFDRTPFANSDAVVAAYGMDPRPRDSGNQVGKRRLTKQGNPEDRRLIYLAAQSASKTKLFNPLYKVLLAKGFSTTEAILIIARKLLRIAFAVWTSGKPFDPDKVGRKTCKKP

SEQ ID NO: 150522 - protein, 319 aa, unidentified
MRITDDGEVLETVRVVNDPLQLALAMANAGQDLEVALEATYVWYWAADLLEAEGAHVHLVHPLGLHWDSRRVKNDVLDATELARRLSRGDLPEAWIAPPELRELRELVRYRAKLVALRISAKAQVHAVMAKLGILPPLVDMFGPGGQKLLDEMAFEGAYAIRIASLRDLLEIYESELTMIERAIARRLRGHVGYRAVQAISGVGPVMASIFVAEIGDVSRFHSAGHLCSWAGLTPTHRESDIKVTRGHITKQGSNLVRWAAIEAVACYHGGAPIAPTYARVAARRGAMIARVAAARKLLCLVYYGLRDGEIRCLAEATA

SEQ ID NO: 150523 - protein, 319 aa, unidentified
MQDILETCCGLDVHKETVVACLLKGDRNNKPEAITRTFSTLIPSLEELKTWLEEENCRHVAMESTGVYWQSVYNVLESAFDGTIVLIVANARHMKNVPGKKTDMKDAEWIATLLRAGLLQGSFIPSQPIRRLRDLNRYRKSIVEEITSQKNRIEKHLQSCGFKLSTFLTDIFGVSGRAIIDHLARVGSISPEEVDPLVKKRARNKLNDIKQAVNGNMDRLQRDFLTILLKRLDESLEHLQLIEQKIDEELLKYEQQLKQLDGIPGINKIAAAAILAEIGIDMAQFKTAEHICSWAGLSPGNNESAGKKSPPVHSVGIPI

SEQ ID NO: 150524 - protein, 311 aa, unidentified
MRMSVGVDLRKKQFTVYWRAEGQPERGEYERYLTKEEGYRQFEQKLRTVASVAEAVSVAVESTGNTRYFKNRVEALGIAVVVVNTLKFKVVNESVKKTDRHDASTLAEFLEKDMLPVARLCSQESEELRRLVKARSSLVRTVVAVKNQIHGLLLSLGIESKRGELQSKKERRRVQSVLAAQHMTGAAVDPLFETIDRLNAEVKKLEAVMERLVADDPVVELIRTIPGAGLITATTIRAYVDDIRRFDSPKQLAAYAGSRRGCKTRPSESGTDGSPSAGRTNCRPRWCRLYLAWYATSGVPARTESWNATTR

SEQ ID NO: 150525 - protein, 430 aa, unidentified
MHNKNYISVGIDVGSAFSFMTILAPDETVILKPFKITHNNKDSLERAVSEIKKAEELYSLESRIFLESTGIYHFPLFCYLVDCGFNASIINPIITHSTKNGNIRKVKNDKIDSKGIAKLGLSKDIPVSQFPAKLVLELRSLTRKYYDLTDERSAHINKLKGDLHTVFPQYLDVFCDVTGKTSTMILRQYGTPDKILRSHKKTMIEKISKASRKGLAKASERYEKLCAAANAAKTFGCQIDSIYFNIFLTLDLVEKLDSALDSILNRIRQLITFNKNEKFIQQIKLLNTIPGVGFLTAVTIMCEIGDFSAFRNPKQLFAYFGLDPEVNESGKFVGTQLHMSKRGSRIARRAIFAVALASIRTKRNGEGINPYLRKYYELKSGQKPKMVAIGAVMHKVCNIVFAVLRDEKAFELRSPEEHCKQYQRPALAAA

SEQ ID NO: 150526 - protein, 345 aa, unidentified
MNQYENRNKSIETHWVGADVAKSTFDAALIRCGQHYPDTALREIPVRTFERSIEGVKTFLGWLDSQEARRDNVRVVMEATGKYSTELALWMLAQRPTLTPAIANPSQTAAFIKSMGVRNKTDRLEARALGFYGIERRPGPYEAPSPEYMELRELSRYRDSLVRERTGLKNQMTETCGSAFIKKTQGKRLRLLSADITRVEKEMKQLIAQHQDLKRDVALLSTIYGVAFINATNILAELGDLRRFTLARQLTAFAGMSPKHHQSGSSIHGKSRLCKKGNPRIRQALYLSAMSAIRGNNQFSRTYRKLLAEGKLKMVALGAVMRKLLILMRAILISQKPYQPLGITR

SEQ ID NO: 150527 - protein, 445 aa, unidentified
MSESLISAASEPEWAAFAAIDWADQKNFWRLVPAGSQHFEQGELENTPEAVEAWAAGLEQRFGGRPIAVCLEQSRGALVYMLTKYPHLVLFPVHPTTAAHYRETFCPSGAKSDPNDTASLLDLLLRHRERLRPLQPDTVETRLLHFLVEERRRTVDEKTRQSNRLTDCLKLYFPQILRWFDDVTTPLVGDLLGRWPSLEQLQRAHPGTLRRFFHEHNCRSQQLMEERITAISQAVPATRDQAVLEAGTMMARGLVALLAALRSNIAAFDKRIAELVQAHPDGAIFASLPGAGPALVPRMIAAFGTRRDRYQNADEMERYSGIAPVKKGSGKTELVHFRFACPKFLRQTFHEFASHSIEQSEWAKAYYEHLRNDEKKDHHPAVRALAFKWIRIIFRCWKDGKPYDEQVYQQSLRRRGSMLGAALASATSVGWKPIAGFQKLSENNA

SEQ ID NO: 150528 - protein, 348 aa, unidentified
MNKPDFFVGIDIASLTFTAAVGQLQEGSWRIVGKPKEFGNHYESFPDFLHWLQEQQLTPHTCVLCMEASGVYNELLAHVLVANHYRLAIQPPLEVKKAFKPVGHKTDPVDSGQISEYAYRFFDKLTFWQPRDEILEQIKVLLATREQFSGQITAHKNARQALLRKKVHTPLAEQAHLEAIQELQGHLKALEQEIQRLIDQNPDFKRLVGLLLTVPGVGLLLAAHVLVLCESAPQLPTPKQLSAFIGICPYQKTSGTSVHAPPTSRHYGPPMIRKLLRLASLSLRTHNPTFRQYFERKVAEGKPKKVALNNIANKLLKIICAVLRSATPFDKNYRSVKPGCLNTALTKS

SEQ ID NO: 150529 - protein, 341 aa, unidentified
MKNKSFIGIDISKNVIDASIFCEGTPIKDFPHAVFNNSRKGFGEMCTWLKKNHVVLSNCLFGMEFTGSYSMELEKFLNARKFQFCMLSTHVVKHHPMGPKDKSDKIDSAKIADFLYRYDGTECVKPYKMPDKTMQRLKALTNERKFLVEQRTCFMNRRQLCTTKEDAQLYDGYIKKFSRDIENIELEEQKLLATDDSLLATYKNLLTIPGIGFVNAINVIVITRNFTAFETARQYASYVGVAPHSHTSGTSVKWRPRPSARCDGQAKADLSMAATVAVQYDAELQSFYNRKLGGKQDSDTKRKALNAVKFKLILRMFAIGKQNRKWEPLDSKSSNEKLAIS

SEQ ID NO: 150530 - protein, 355 aa, unidentified
MDSKKYIGMDVHKESISIAVMNGAGKIVMESVIETKANMILQFMDGLRGDLQVTFEEGTSAAWLYDLLKPHVTKLVVCDPRKNASMREGNQSDKIDARRLAELLRLNHLHPVYHGEHGLRSLKELVRSYLTITKDLVRVMTRVKAVYRSWAIPCSGKQVYAPRYRAAWLGKITEPGVRRRAEFYYQQLDALRTVRQQVRRELLAEGQKHQAWKRLCQIPSIGPIRSAVLLGILQTPHRFRTKRQLWAYSGFGIETQSSADHRSVNGQLQRAKKQSSIRGLNRNCNHDLKNLFKGAAIVASSKPGPLQEFYTTLLTKGSRPEMARLTLARKIATIVLMVWKRGVRFDAQYLKPQTA

SEQ ID NO: 150531 - protein, 344 aa, unidentified
MIWLGLDVHQRFSRMGCFDPASGEVRDLGSVSNEASALEDALEEMPSPRTVVLEAGRSSYHMAGLLESMAEEVWIVDPGEVRRLQHTISKTDRRDAAALAWWAAKGVLKPQWRPDGQTMDLRELTRGKTALTRMSTQVRTMIRMLLARHGHECPHRDLMSERGQLWLEEVELEGHAGKMLAGLREILVVVQSKVDDFERMVERTSKEHPVAQQLRTIPGLGPFLSLALAVEIGDINRFPGPAQLRGYSGLVPAVYQSGDKDARGPLTKAGNKWLRYAAVLAAQRIGQMKEPDPRLKRIFLSVAFRHGRNPGKIAVARRLLDLIYILLKKGQDYRAPKARAAATA

SEQ ID NO: 150532 - protein, 410 aa, unidentified
MLFIGDDWAEGHHDVVVQDDAGKALARRRLPEGADGIAGFHELVASCWGEDSEPDPARVVVVIETGRGPWVKALAAAGYEVCAVNPKQAVRHKETISVSGKKDDFFDASCLADMGRTRRHQIRGLAADSDIAEAVKIAARAHQKLVWERTRHLLRMRSALREYFPAALEAYASLTLSGPDALELLGRAPDPASAAELTVAQITAALKRARRRGDLAQRARDIQAALRAPHLSQPAVIAEAYAASVQAAAAVITALNEQVKIMEARVSELFHRHPDAGIYLSQPGIGDITGARILGEFGDAPGRYATAKARKNYAGTSPLTIASGKSKTVHARYIRHLIDALHAQALSALTASPGARAFYDELRARGASHDDALRRLASRLVGILHGCLKDGRDYDEATAWAHRAGLSQAA

SEQ ID NO: 150533 - protein, 404 aa, unidentified
MWYSGIDWADDHHDVLVIDEKGHKRGSLRVSHTKAGLSKLNTFLEQIIGTASKEEMACIIETTHGLLIAHLLEEGWPVYPVNPRTVDRRRAASGAKTDTIDAYLLAKTGRADLADLHRLIPDGEKVAELKTLTRDQDSLIQMQTRLVNQLTACLKAYYPVALELFGKLHQRSTLLFLHTYPTPQAAMDASAQQIREVLRQARHPHARSVAQEIVERMHQPHLQADAVTTRTKSRLMLVLVNQLLPLIEQIAQYDKEIDTLFLTHEDHELFESLPRAGQRLAPRLLAEIGDERSRYRDASSLQALGGTSPVLFQSGTYSKAHRRLACIKPLRNALHQFAWQTTQSEPWAQAYYQRKRAEGKSHTVAVRALANVWTRIIFAMWLHHRCYEVATFEQAQQQHARRAA

SEQ ID NO: 150534 - protein, 320 aa, unidentified
MMTQNDLVVVGIDVAKDKVDACIRRFQLRQTFPNTAQGHRKLLAWLRKYQVGKAVLEASGGYEREWRNVLHNAGIEVRIVDPKRARNFALSAGRLAKNDPIDAEMIAWFAETFSQAPGQIHDAAREELAALAKARKALIDVKIRLLTQNEHAAPEPARKAHARVLKGLAAEIAELEAAISAKVKATPEFVELAEIIESVPGLAQATSAILIAGMPELGRVSDEVAAALIGLAPYDDDSGKRRGERHIKGGRRWVRNAIYMPCLGAATQNNPVLKAFYQRLLAKGKEPKVALVACMRKLIIILNTMIARRQKWNPGRHAVA

SEQ ID NO: 150535 - protein, 340 aa, unidentified
MDEYIGLDVSLKETAISIRRAGERVWRGKCASDPQLLAALIRKHAPAAKRVVFETGPLSVWFFHALTAEGMPAICIDARHAKAALDMAANKTDANDADGLAHLAEVGFYKEVRVKSFDSMLARTLVAARTRLVRIGTELSNQIRGLMKTFGLIVPAVMGSKFERHVEALLSDNVDLAWIIGPLLEAWHAVRLRAAELGRKLLADARRSDACQLLMSIPGVGVVTATSFITAIEDPTNFKRSRSVGAWVGLTTRRYQSGEIDYDGHISRRGDSHLRGLLYEAATVLLTRSRSECDLRKWGLQLRERLGFKRAAVAVARKLAVIMHSMLTTGEPFRGAPTTA

SEQ ID NO: 150536 - protein, 403 aa, unidentified
MNNVAGIDVSKGKSMVSVLRPFGEVVAKPFSIGHTGSELKELADYLKSLDGETRVVMEHTGRYYEPVARFLHEEGVFVSAVNPKLIKDYGNNTLRKVKTDKADARKIARYGLDNWAELRQHTPMDTIRMQLKTLNRQQSLYAKTKTMMKNNLIALLDQTYPGVNALFDSPVREDGSQKWVDFATAFWHVNCVRAMSLTAFTERYRKWCKRHGYNFSQSKAVEVHTGAQDLIAMLPKDALTKTMVRQAIDALNAVSASLERLKAEMQALAAQLPEYPVVMAMHGVGDSLGPQLMAELGDVARFTHRNAITAFAGVDPGADQSGTHEAKSTRVSKSGPPELRRALFLVMDCLLKTQPQDDPVYRFMDKKRAEGKPYLVYMTAGANKFLRIYYGRVKEYLASLEEN

SEQ ID NO: 150537 - protein, 466 aa, unidentified
MPIDKKQWQNRKERKELARRLRSEDPNLEVVHPHAAGVDVGNGAHYVAVRPDCDSQPVRRFECFTADLHRLAGWLQSCGVQTVALQSTGVYWIPLYDILEESGFEVYLVNARHTKNLPGRKSDVQESQWLLKLHTYGLLNNSFQPTSEIRVLRTYWRQRAEHARGIGTCILRMQKALTQMNLQLANVISDLSGVTGQEIVRAIVAGTRDPRKLAELSDPRIQASKEEIAKSLEGNWRQELLFVLKQEVEMYDTYQRRMVECDQQLQEHLTSFADTVAPQVKAGETQKKTAKQKNKNAPQFHLSGELRRITGVDLTRIDGIDVMVAQTLVSEVGLDMSRWKTEAHFASWLGLCPDNRISGDKVLSRGTRHVVNRAATALRIAATTLLRSQTYLGAQYRRLRSRLGAPKAITAMAHRLARLAYRMLKYGQQYIDRGAEYYEQRNRQQQIEFLRKKAAKLGLQVTAAHP

SEQ ID NO: 150538 - protein, 410 aa, unidentified
MAERFVGIDVGLREHRIAVLDRDGEAVGQSFTIAASKDGVATLLRALDARDAPPAPTLIGLEASGHLWENLEAALVGAGYRVIVLNPLQTRRYRDVVRRKAKTDDIDAHVIAGLLRSGVAQASYVPDEQVQSLRELARLRARLMADRQDYQRQLIAQLDVVLPEHHAVLGDLLTARARGILAQFPTAQHLAQANPRAIRRAAEDAGARGFSLNDATGVRDSARRSLYSGKAAVARAHVVRTLVNQLERLINAIDEVDRAATALLPPSEPGTGPSDAELLQTIPGIGPQTAATLLGELGALTRFTDARALVAYVGFYPVIHESGDRAATPRLSRVGSRIARRSLYLAAVNAVRRSGEWRTIYLRKKAQGKTAKQALVVVAVKLIHALYAMLKHRQPYNPSRLLVAPATIGT

SEQ ID NO: 150539 - protein, 317 aa, unidentified
MPASVFVGIDVSKMQLDVAIRPGRRCSVSNDETGIAHLLEQVKAVHPTLVVLEATGGYEMPVTGALAAAQLPVVVVNPRHVRDFAKATGTLAKTDALDAQTLAHFAEVIHPAQRPLPDEQTQALAALVARRRQLVDMLTAEKNRLRQASTPIRSGLKAHITWLEQAIQDADTDLAEAIRQSPLWREKDELLRSAPGVGPVLTTTMLATVPELGTLSHKQISALVGVAPFSRDSGMLRGKRMIWGGRAQARAVLYMGTIVATRFNPVIRAFYQRLCAAGKAKKVALTACMRKLLVILNVMLKHRRPWSHVVETAAAGA

SEQ ID NO: 150540 - protein, 369 aa, unidentified
MNKKVKYVGLDVHKNSISIAFADEGRDGEIRYYGQIDNSTTQLDKILRKLISQGFAPQCVYEAGPCGYYIYRHLTGNGVACRVVAPSLIPKKSGDRQKNDKRDCKSLAKLHRAGELTAVYVPHPEDEALRDLVRGRRNVQDATRRAKQQLGAFLLRNNVVYSGSTAWSKAHFNWLADLRMPHPAQQIMLQEYIDAIRSGEERVNRLTLQIRQLSEQSKLKSLIEALQAMRGFSFIVAVTLAAEIGDLGRFDRPGQLMAYLGLIPSEHSSGDRIKRGAITKTGNGHVRKTLVEAAQAYRVPARKSRALLKRQEGLPEEIRQISWKAQCRLCSRYQRLTARGKKANVAKMAIARELAAFAWSIAREVPLNA

SEQ ID NO: 150541 - protein, 509 aa, unidentified
MNVNTKNTKNQAQEKNSEKLTRAELRRRQKAEAKMEKSKEKKKITVKSPKTQEQEILLQDAEAIFKNLKSYTWRDLETNGKFSKNDKLSFISDDMLIVGCDVGSETHYIRAIDTRGRELSRKAFAFDNNEEGFQKAKEWSVELAVRNGKDQIVLGLEPTGHYWFVLAAWMVANGVSVVQVNPYAVKQTKELEDNSQQKDDTKDPKLIANLVKDGNYGMPYLPEGVYADLRRLSMFRDQLTEDRIRNINRLHREMKIYFPEYREAFGKLDGAFSIRLLKKAPFPKDILELGEAGIRNIWKEARLRGRGYSKAGEIVRLAKESVGLNDGMEAGKAAVKWFAEKIEELTEQLSDIENRLHQKCREIPYAENILEISGIGENILAGILAEMGDIDRFDDVKEIQKLSGLGLVACSSGKHKGETRISHRGRKRLRYWLFQAAKSAVSHAGEFKMLHAYYTTRADNPLKKMQSLIVIACKILRVIYTILKKGIRYDPEKMLKDIRIPTSRQPVAA

SEQ ID NO: 150542 - protein, 324 aa, unidentified
MIDGILGIDVSKNTLDVSISSCGKVRTKSFANTSDGWHHLLDWLVAQKMRRVHACLESTGRYSLGIACALYEAGHIVSIINPAQVRDFVRTKLGRNKTDGIDASRIREYCELFKPLPWAPPSEAHRRLGELQTIRSGIIAGLTEWKNRKNSGIVDAEAQALADATILHFTSQIGAVDKAIALAIENDSDLRSKRDLLLSISGVGDTLAGIVLAELPGPNVLHSSGEVVAYAGLNPRQHQSGTSVDRATRISKIGNAVLRAALYMPALSAMRYNPAIVALVTRLKSRGRLKPKQIVVAAMRKLLVLCFGVLKTGKPFDPAIAMGC

SEQ ID NO: 150543 - protein, 338 aa, unidentified
MASTFREASDTPIICGIDVSSTKLDARIGRDGPHLQVPSTEEGADALQAFCQQHGATLCVMEATGGYERPAFARLWACGMPTAIANLRSVRKFAEGVGVLEKTDRIDAGVIAWHAETKRMKPTQPASADQQRLTALVTHLRQLTEQKVVLQNQARLVDDADVLASFGLVLGTVRAQIKAVASKVAALIDADPLWAKLDAAFRTIKGVADRTVARLMAELPELGTISGKAIAKLTGLAPLANQSGNHDGPRRTRGGREGPRSILFITAGLAARHEPDFRDFDERLTKQGKPRMVVRIALAHKLLTRLNAKAREVRAEMAEAARKLEQTNPDRNDAAQAA

SEQ ID NO: 150544 - protein, 413 aa, unidentified
MFFCGIDWSDKEFVVVIIETAGKIVRRFTIENNMDGFDSLIEKTRAVSREVGDILLAIETPNLPLVDYLMDNGYTVYAINPKSVDRYRDRYRTSGAKDDFFDAFVLANILRTDREQHRPIAPSNDLARELKILTQDREKFVKTKTKLTNQLRSCLKAYYPEICNLFDDLSAPSALTFLKSFPTWEDLQKKSEKQLIQFLKKRKITHPGMLRKIIKHVQSYPIPIDPVVKRAKSRQMLTLVEQLISLCQRIKEYDLEIEQLLDKHEDKNIFLSLPGAGENLASRMLSQYGDDRSRFQCVTDVRTLSGTAPVTKQSGNYASVQFRFGCRKPFRNTMQLFAFSSLTKCRWALLYYHKHREMGKTHNHALRLLADKWMKIIFAMWLNHCEYEENRFLADKFKHAMNQPNSNKILEYA

SEQ ID NO: 150545 - protein, 353 aa, unidentified
MKEYIALDVHKRYSLMERESQKTGEVREKRIEHRPGAITQALRGADKGTRVAIEATGNWYWIVNEIEAAGLVPQLVHPGKAKDRIGNTNKTDRLDVHGLNMLQRTGTLPVVWIPSAEIRDLRELTRARMVCSHHRTTIKNIIHAILAKHGKVVEASDIFGKKARAQMELLIQELPAKTAWVMHYHLNQLDFIQGQIGLHEKELKAVAMVTPEIELVMTMPGIAVVLGTVIAVEIGDVHRFGGAEQLASYCGTTPRVSSSGGKIRIGRLRNDVNHYLKWAFAEAANSVAVNHKKLPNRYGSQLYRRLREKKGHAKAIGAVAHHLSEAAYYVLSRQQGYLERGASSPAAVRPDRS

SEQ ID NO: 150546 - protein, 416 aa, unidentified
MIGQKEKNEMKHVIALDVSKGKSTVAIYDGHRQCEFEGVLHHTRGDFERLHERMEEMTKQDGQAPDIVFEATGIYSKSIEAFFKEYGYAYCRMNPLEANLQMATMRRNKTDISDAHELAKTHFKMERKTTYIQDDYYEQMRALTRYYDEIDEEIILLKSRMHAILQLSFPELEKLVTPSSALFLNIVQLYPHPTLLQAHSKTIIKNRLKGNTRKKLSLMRAEAKAITLLEAAENSYPAIKPTDIRCDQARDYAARIADLLEKKDALVKQMVELSEGRKEYLVFRSIPGIGDSTACRLIGEIGDIRRFQNAKQLNAYAGIDIMRYQSGNTQYRDRINKRGNKHLRKILYFMVCAMLMAKGKPNHFVDYYYKLKKQPQKKPHKVAIIACINKFLKVTFQLLTHGILYDYESALPAQKS

SEQ ID NO: 150547 - protein, 319 aa, unidentified
MTTVSYTLGLDTSKAWLDVALRPGGQTWREANDEAGFDRIRARLATLGHPTTIRIVIEASGGYERPAHKALTLAGYAVAIVNPQRVRDYARSRGRFAKTDRIDADTIAAFGEANRPRLTPLAEPQRIRLAELLAYRQQILEEINQRSLQAKRFADPQLRQRAELHLDRLRQDRDDITADIRSTLQDTPDFAPLAHILTSFKGVGTILAATLIAYLPELGILNDKQIACLVGLAPFAHDSGNFRGKRSIQGGRDKIRRVLYIAALAAIRYNPVIQAFRLRLALSHKPGKVVVVACMRKIIVILNAMAKSMTPWINPADAS

SEQ ID NO: 150548 - protein, 316 aa, unidentified
MNTRTNQNINIGVDTGKFQLDIYIRPLDIFFSEANDAEGIKKSIAIIKKHKPERVVIEATGRLEMSFILACANAGLPFVIANPIHVKRFAGAIGRRAKTDKLDAQLIAHYAEAIQPKLTSLKPEILRFMSDLVSRRNQLLGMQTMEKNRLQIMPKELSMSIKPVLTVFKKQIKKIEDEIITLIESCPDYQEKNEILQSMPGIGKIASASIISNLPELGYISSKQAGSLVGVAPINRESGRYKGLRKIQGGRSQVRTVLYMAMMSAIQCNPVFKATYERLVRQGKPKKVAIIACVRKMIVILNSMLRDGTKWNEKTV

SEQ ID NO: 150549 - protein, 332 aa, unidentified
MYYVGIDLHKRDLVAAVEDERGPVGKPRRFACRDEAAIVAHLAAHRPFRAVIEASASYRWLHERLSPLGEVVLAHPLRLRASIARPAKTDKLDAALLARLLKMDQIPESYVPPKGYQELRELTRARARLSRAATEAKNQLHHLLTARNIEAPYRSPFGVRGQRWMRALDLGVVGNLQRDELLGRLEHYVAEQAHLDEALAQMANGFPQIEALSDIRGVGLYTALLVVAEIGEPERFTQPGQVASYAGLAARVYQSGEQDYHGHITRQGSPWLRWVLVQVAIKAIGKDRKLANFYERVRKRSSRHIARVAVARKLAEICWIRLRRWQRAQAAA

SEQ ID NO: 150550 - protein, 360 aa, unidentified
MGNERTFVGLDVHARSVTGHALDAVTGEVWQRKLCPDPGEVLRWVSGLPGPVKVGYEAGPTGYGLYRCLNDHGVLCVVAAPSKLHRPHGDRVKTDARDAELLAHLLKLGGIVEVNVPSVEQEAARDLVRAREDARADLMRARHRVSKMLLRQGIVYSAGDTWTKVHDSWLRGQRFDQQSRQLAYDSAYEAMVLTVDRRDRLDRAIDEMAANSSYTPVVRRLGCLRGISTLTGFALAVEIGDWQRFTGATIGAFVGLVPTESSSGQSRSQGSITKTGNTHARRLLVEAAWHHAKPYRVPGKTMRDRWELAPPAARVRGHEGNRRLYQRWQRFNARKKRPAVADVAIARELAGWAWSLALLE

SEQ ID NO: 150551 - protein, 340 aa, unidentified
MFTNFVGIDVSKSKFDLALIKGHDKDHVIQGIFDNTQKGIKTMNKFLEKEHHVQLSETIFCMEFTGVYCRPLTIFFVEQDCHVWIEMPVNIIRSLGLQRGKNDRVDAHRIALYAYKNRDDIKLWKPQRDVILQLRDLLALRERLITSQKALTNPIEELLAMGAKSAAESVRKNCQKTLSAIENEIGQIEKNLDDIIKDDPQLKELFQLATSVPGVGKLTALFMICFTNEFSMYTNPKQLACYCGVAPFEHSSGSSVRGRTRVSHMANKVLKRMLHMGAMSVVSKDPELRDYYQRKVAQGKNKMLVINAVRNKIIHRLCAVIKRGYGYQSEIIFKERLVLS

SEQ ID NO: 150552 - protein, 339 aa, unidentified
MIISPHCVGIDVSKRMLDIFDDAVGRPERIANTLQAITERVAGWRCGNVFVVFEATGVYDRELAEALRQADIRFARINPARARDFARADGRLAKTDAIDARMLAIFARKMMPAVEPAPEPARSALASLAKRRDQLVQIRAQEKNRRSEATDRTTIEGIQRHLDFLNGEIKAIEASIKTLIKAEPDISEQARLMRSAPGIGPVACMQLLAKMPELGCLGSKQVAALAGLAPFNVDSGSYRGKRAIGGGRKRVRDALYMAALNAVRRDLTMKAFYQKLRTVGKPAKLALIAVARKLLTTLNAIAARPQSLRPAATHITVAGSRSGRRCGYYLHAARKSWRP

SEQ ID NO: 150553 - protein, 391 aa, unidentified
MLASCLIDDGLCPAVTPLNVIATLDLRFVAVGCHCRFGARPESNVEDVMGVFAALDVSQEETAICLVGAEGEILAEAKVPTCPDAIADWLAKRAADVERVGMETGPLAVWLWNALTKRRVPIICLDARHANAVLKMMPNKTDRHDARGLAQIVRTGWFKAARIKSHEAYVNRAMLTARDTLVGMRVKLENEIRGLLKTFGVMFGKRVGGFKRRATEIITGELAVAPELIPIFEALMHARSEILARIAALDGKIRAVAKQHGTVRLLMTAPGVGPITAMAVTAAFDDAERFNRSSSAGAYLGLTPRRYESGEISRNGRISKSGDRFARKCLYEAANAILSRKLGGPRLREWAQAIAGRTGPRKAKVALARKLAVTLHAMWRTNTTFREAAMA

SEQ ID NO: 150554 - protein, 352 aa, unidentified
MQTKINTQAKLYIGLDIHKRSWKIHTSTDLFDGKTISCPPDPQALKKYVDKHYPGHQVSIVYEAGCFGYSAHRSFKSFGWCSLVVNPADISKTGNAHYQKTDTIDARLLCRELKDNRLTSIEIPTVEQEQLRCLFRRRIALVQDFRAIKSQIKMQLLYLGIDIPHHFDQQAKWTKAFLKWIETQTCSYPTATSSIQSQLSQYKFIDQQIKDVSNQLRAYCRKHYKKDYFLLRSIPGIGKLVACSILSEIGNLRRFKNFKQLASYVGLCPGIHQSGDNHKNMGLSTRGNRILRSYFVEASWIALRYDPVLQKYWRTHAGKEPKKILIKVARKLLSRTYAVIKTETPYEIGVIK

SEQ ID NO: 150555 - protein, 375 aa, unidentified
MSDHSEAFVAFDTSKLRNAVAIANGGRTGEIRFLGEIENTGAATAKLVRKLSGKYQRLTFCYEAGPTGYGLYWQITGLGHACIVVAPSLIPKRPGDRVKTNRRDALSLVKLLRAGELTAVWVPDQHHEAIRDLTRARGTAALDQRRKRQQLSAFMLRLGLHYPENRHTWTKAHMSWLASQKLEHAEQRLVFEEMMLAMRQAQERIERLEQAIRAAVPDWSLAEVVTALMAMRGMDLVSATTFLAEIGDLSRFRTPRELMAYLGLVPSEDSTGDRVIRGPITKAGNGRARRMLVECAWSYQHPPRVGKDKQEKVAAAPRAVREIAWKAQCRLNRRYRALIKRGKLKTVAITAVAREFAGFIWAVARAANAERAAAK

SEQ ID NO: 150556 - protein, 408 aa, unidentified
MKDSGKRYIGLDVHKHYLIAVGVDDELNVVLPVRRVEFSYLETWMKKTLTKQDKVALEMTTNTWQLYDELCQHAGSVLVVHPPHIALITRSQVMNDKIAASILARLLAKGLLVGVWVPPQHIRELRGLVAQRKKMTGLATQAKNRLHAVLQRHHLLPPAGNPFHVSQQEWWLALPLGTLEKVNVLSDLETLRFAQDQQVRLTSIMEEIANQQEQVTRLLQLPGFGVVTAVTVWAAIGDVQRFADPQHLVGYAGLGTKVHDSGMTSRSGRITKAGRRDLRVVLTEAAQVAANSHPHWKAELARLQPRLGRNKAIVAIARKLLVAVWYILAQHKTDRFAQPEAIAQKLLKFAYQLGKENRPAGQSAAQFVRQRLDALQLGQELTTIAWGSKKPIPLPPSTNKVSDVPHTK

SEQ ID NO: 150557 - protein, 313 aa, unidentified
MIITLRCIGIDVSKRHLDIFDEGIGVSERVANAPHAITKLVARWRCDVLVVFEATGVYDLGLREALRAADIRFARINPARARDFARASGQLAKTDPIDARMLAAFARAMRPAPEQVSTPARNALARLAKRRDQLVHMRAQEKNRRSEAGDRAMVERIGRLIEVLDREIAEIEADISALIKAEPEISHDAQLIRSLPGVGPVACMQLIAQMPEIGHVGPKQAAALAGLAPFNVDSGAYRGKRKIGGGRKRVRNALYMAALNAVRRADRFKAFYARLRQAGKPAKLALIAVARKLLTILNAMMRDRKAYIPDQQT

SEQ ID NO: 150558 - protein, 370 aa, unidentified
MGNASTLHVGLDVHKESIAVAYATEDGATAPVPLGAIGTRQCDIDALVRKLQSKSARLVFVYEAGPCGYWLYRYLTRKGLTCFVVAPSLIPRKPGDRVKTDTRDAVTLARLARSGDLTPVYVPAVPDEALRDLARAREDALHDLNAARFRLKALLLRNDVRYAGRANWGAEHLRWLARFVFPTPAQQIVFQEYVRTVTERTELLQRLEAELLEQAKTWRLSPVVEALQALRGVQFTVAITTIAELGDLTRFDTPRQLMSYLGLTPSEYSSGERRRLGGITKAGNRHARRVLIEAAKAYRHRAKVSEQIHARQEHLPTVIRDIAWRAQVRLCGRYRKLLARGKHPNTVAAAIARELAAFMWAIAKARPVPA

SEQ ID NO: 150559 - protein, 351 aa, unidentified
MKKVVKQVVAFDVAQNELVVTLGRVYDDVSQELVASKTFANRQGGFKALLLWIKRFFDAELQTLYVMEATGVYHESLAYFLDDQGFWVSIVLPNKISSYMRTLQVKTITDKTASQAICSFGMDRKLPRWKRPVDTYKKLRQLTRERHQIVDQRTVALNQMHAQKAQAEPCPSSLQRTKKLIEFLSRQEKQIIVEITELVKQGGEVKRAVGLISSITGVGELTAATVLGETNGFDLIKSKKQLTSYAGLDVVEKQSGTSVKGKAKISKRGNKYLRRAMHLPALTAIGHDERFKALFARVVAKHGIKMKAVVAVQRKLLEMTYTIFKTGMSYDKQYLQKQQNTQAEQIIKAIN

SEQ ID NO: 150560 - protein, 403 aa, unidentified
MNNVVGIDVSKGKSMVSVLRPFGEVVAKPFSIGHTGSELKKLADYLKSLDGETRVVMEHTGRYYEPVARFLHDEGVFVSAVNPKLIKDYGNNTLRKVKTDKADSRKIARYGIDNWAELRQHTPMDTIRMQLKTLNRQQSLYSKTKTMMKNNLIALLDQTYPGVNTLFDSPVREDGSQKWVDFATTFWHVDCVRNMSLTAFAERYRKWCKRHGYNFSQSKAVEVHAGAQDLIAMLPRDALTKTMVRQAIDALNAISASLERLKAEMQALAAQLPEYPVVMTMHGVGDSLGPQLMAELGDVTRFTHRNAITAFAGVDPGADQSGTHEAKSTRVSKSGPPELRRALFLVMDCLLKTQPQDDPVYRFMDKKRAEGKPYLVYMTAGANKFLRIYYGRVKEYLASLEGN

SEQ ID NO: 150561 - protein, 315 aa, unidentified
MNRDPVYVGMDVSKATIDVCVSDGELWQVPNDDQSMEDLCARIRGLQPALVVLEATGGYELRAAGALATAGIPVAVVNPRQVRSYARSVGQLAKTDRIDARILMRFAATVRPEPRPLPDDATRELEALITRRRQLVEISTAEQNRLGTAPPVTGKEIKAHITWLRRRLAKVDEDIAGLVWRSPLFRAKDDLLQSVPGIGDATSRTLIALLPELGTLTGKQIAALVGVAPFNQDSGTLRGRRRAWGGRARVRTALYMAALVGTRKNPILKALYTRLRGAGKPAKVALVACMRKLLVIVNAMVRDGRPWTLDHVTPA

SEQ ID NO: 150562 - protein, 346 aa, unidentified
MRYSTTVGVDLAKNVIQISVVSGRDKELSNRSLTRKKFAEFLGKQKPSLIAFESCATAHHWARAAQRHGHEARIIPAKAVAPFRQGHKTDSNDALAVAEAARRPNIKDAPIKTVEQQGLQAILRARDRLIQECIAQSNHMRGILLEFGIAIPQGFAALLRTLPEVLEDGDNELPDFYRPTLHRIYHRMLELREDIDAMTKEVSELVKNHPVCSRLTDIEGIGPIGAMSLYATLGSGDAFSKGREASAYVGLTPRQYSSGGKANIVGLSKYVGNRKLRSVLIQGALAYVYRMKEPRTLKDRWLKELIERAGPRRAAVALANKNVRTAWALIAQGTDYQRRPQLEKAA

SEQ ID NO: 150563 - protein, 337 aa, unidentified
MSSIHILGIDLGKHCFHAVAHSHSGKETLRRKYNRSQLLQFLVKLESTTIAFEACGGAHWLARKCVEFGHQVRLIPPQYVKPYVKGNKNDFIDASAIAEAASRPSMRFVAIKTEDAQVIAATHRVRDGYIKERTACMSRIGAILLEFGLSFPKGHAKMKVLFQWLADQNQPLPQSLINELTSIHDHYSYLNEKVKTQDKKLHCISENNENARLLKTVPGIGDLVATLCIADVSSANNFSNGRDMAAWLGLVPRQFSTGGKTKLLGMSKRGNKHLRTLFVHGARAVLSRLETTGKVFGEWLINLRATKPFNVAVVALANKLARIAWAVLYHRQAFKAV

SEQ ID NO: 150564 - protein, 340 aa, unidentified
MVDVSIIGLDLAKTVFQVHGSDTDGLPLFNKRLSRSSVLKFFSEKPPCLVAMEACASAHYWGREIGKLGHEVKLIPPIYVKPFVKRQKNDAADAEAISEAASRPTMRFVAVKGEDQQAACMVFKTRDLFVRQKTQLANALRGHLAEFGVIAPKGIVHLKRLAVVIEEDTGLLPASVLEYAGMILAQISALQEKIDRLEKRVQEHARGNDITARLMTIPGIGPITASALCAFAPPAETFSKGRDFSAWLGLTPKQHSSGGKERLGRTSKMGQRDLRRLLITGAMAVVRWAVRRGPEEGSWLARMLERKPRMLVAVALANRMARIAWALMANGGSYKEPVAV

SEQ ID NO: 150565 - protein, 323 aa, unidentified
MTVYLGIDIASKKFDAAELCDGVYRCKAFENTPAGFTALSKWLQAGNIPDIHVCLEATGNYGTALATFLYKKNLKVSIVNPARIKGFAASELTRTKTDKADSRLIARFCKAMQPDQWKPVAAPVRKLQALVRRIDALNGMLRMECNRRENADIDTQDSVERMINHLKMELEAVRRQIKDHISNDPELKRQDDLLQSIPGIGSISSSLVLSFMASKEFRKAREVTAFLGLNPRHHQSGSSVRGKTRMSKMGDARLRCALSMPALVALKHNPDIRIFGQRLLTGGKPKMLVVGAVMRKLIHIIFGVLKSGTAFSSRVEVKATVNQ

SEQ ID NO: 150566 - protein, 310 aa, unidentified
MTLHQTVIGCDVSKSRLDLFDNDSRQFSSINNHQSAIAQWADSLEQRPVLVVFEATGGFDRMLLRQLDAHNIRYARVNPARARDFARASGVLAKTDRLDAKVLARMGTQLGLQPDAIPSPQRLEIAELSSRRGQLVESRKQEKTRAHLEADDHIKRSLERHIAWLNGEIARFDQAIAAKIKACEQIRQQVALLTSIPGIGAVTATILVALLPELGTRSRRTIAALAGLAPINHDSGRFRGQRRIRGGRRRVRDALYMAALSSSRSCQRFKAFYQERLKTNPKAKPALIALARKILTIANSVIRDQKPFTA

SEQ ID NO: 150567 - protein, 319 aa, unidentified
MAQNDLVVAGIDVAKDKVDVCIRSLSLKRTFASTAEDRRKLASWLRRNKVGKAVMEASGGYEREWAKALRDAGIEVRIVDPKGVRSFARSAGRLAKNDTIDAEMIAWFAETFDEARGQAYDATREQLHQMVHARQALKDMQSKLTSQGEHAVPAAVQRSHAEISKTIAVELVKIEDEITALIEVTPYFAELAEIIESVPGLGRTTAAALIADMPELGQANNKIVASLLGVAPYDDDSGRRRGERHIKGGRRRTRNIFYMACLGAATRHNPMLKAFYDRLVAKGKLKKVALTACMRKLISILNIMIERRQKWDAKRYSVS

SEQ ID NO: 150568 - protein, 342 aa, unidentified
MSVYVGIDVHRKRSQVAVIDQCGEVVTNRNVPNGVEPILKVIGGLPLGTPAAFEAAFGTSWLVELLEDYGFTPHLVHPSRCKAIASARLKNDKVDAAILAQLLRADLLPEAWIAPPPVRALRALLRHRVALVRLRTLLRNRIHAIVADHGHDRPGGGYWTGPGRAWLAALDLPVVSRELVEDDLALIDALQERVDRLDWEIHQRARSDPRVKVLTQLPGVGPFTALVILAEVGDISRFGSARKLASWAGLTPTVRGSDRVAHYGHISKEGSVWLRWVLCEAAQTAKRNPQFAATFQAIAKRRGKKIATTAVARKLLTRAWHLLTDAGTATAPPPAAPQTAAR

SEQ ID NO: 150569 - protein, 457 aa, unidentified
MDKDVFLGIDVSKGYADFIPLDIKGDPIEKCFQLTDNKEGRKQLSNLIKRWLKETKGSIYCGVESTGGYENNWYYLLKGLQSQYKVFVSRLNPKVVKSTGDAKLRRTITDRVSAENIALYISKFKEDVDYGLRHKYKEEYKVGRDILTGIRMLIKQRTQLLNQLEKWLYDSFPEVLVFCKNGTPFWSLRLLDNYPSATAVSRSKGGILKIKGISAKKADKLKLLAKQNSRDVNPGKAHLIATTAKEILHKCTLIDSQEKYLINLYKDNADVQLLTSIPGVGLKSAVIFILEIDGIDRFDDVKKIASYFGVHPTYKESGDGKWGNHMSKRGRGTMRAALYMCAKTGVRCNDPLKEIYARCRANGMKYNQAIGAAMHKLLRIIFGVMKSQKPFDAEVDRKNQINAKQKQKLNKEKSKIKQKENKKSMRRYQSESLDGPISGRKAVKMKKQMASQIPNLE

SEQ ID NO: 150570 - protein, 343 aa, unidentified
MEHFAGLDVSVKDTSVCIVDDTGKIVREVKVASEPDALLPVLTNPTYHFKRIGLEAGPLSQWLFSALAEAGLPVICVETRHMRAVLKAQINKTDRNDARGMALMMRAGLYRPVHVKTLRSQKLRMLLTHRKLLQSKAIAIDNDLRGTLRNFGLKVGIVGTVKFEARIKELVENQPDLAVLVEPLLIVRRTLREQIAILHRRLLALVRDDEVCRRLMSIPGVGPVVALTYRATVDVPSRFRTSKAVGASFGLTPAKHQSGEINRTGAISKCGDEMMRVMLYEAAHIMLTRTTKWSWLKAWAMKIARHRGIKKATVALARRLAVIMHRIWVDGTEFRWTRETAAA

SEQ ID NO: 150571 - protein, 430 aa, unidentified
MKSNTQNAKIEAITEKTLVLGIDVGSETHYARAFDYRGIEYSKKPFKFSNTEAGFVTFKAWVLDIKEKHGKDKVIPGMEPTGHYWFNLGKFLHDNEMKPVLVNPHHVKKSKELDDNHPTKNDRKDPKVIAGLVREGRYMIPYLPDGVYADLRTASNIRFQLQAELTRIQNRISRWFNIYFPEYKTVYGKPDAKSGMLILKAAPLPEDILTLGIDGVNQIWRDAKLRAVGKARAKTLIEAAEHSVGSKEGAVSARMEIRMLLEDYESRNTRLQEVMVLIEELVRKIPMAEKLLEIKGVGIRTVSGFLAEVGDISRFNNPKELQKLAGLALVENSSGKHKGETTISRRGRKRLRYLLFEAAMSLVAKNPEFRELHNYYTTRRRNPLKKMQSLMAIAAKLLRVFYAILTKGVGYDPKKMVNDIRRPAAYAQAA

SEQ ID NO: 150572 - protein, 428 aa, unidentified
MNMSSKSAQFAALIGIDWASQRHALCLYDCATGKRESSILEHTPEAIAQWARGLQERFKGRKIALCLEQSKGPLIYALLEYPFFVLYPINPATAARYRQAFKTSRAKDDPSDAQVCLELVLHHREKLKPWLANDAQTRELSCLLQHRRAAVDLRTLLTNMLRDALKSYYPQALELAGQDLFAPLGCQFLLKWPSLQELQKARKESVRKFYYMHNCRRMDVIEKRLDAIAQMTPLCRDRALLEPAMVQVRMLARQLLQLGGALKEYHSKIEQLFAQHSDALIWESFPGAGPTLAPRLACAFGTQRSRYQSAVAIQQYSGTAPVTEKSGKNQHWVHRRWARPHFTHQSFFEYASQSVLHCQWAKLYLKEQMARGKAYPTAIRALAFKWQRIMFVCWRDRVPYEETIYLQSLQRRGSHLARKLNQQPSKAA

SEQ ID NO: 150573 - protein, 342 aa, unidentified
MIVLGADMHKRSHTLAAVAAGTGELLGDETIAVGERGFAAALDWARGLGDDRVWALEDCRHVSGAFERFLLVHGERVVRVATRLMAGERRAGRDRGKSDRIDAIAVARAALREGVERLPVAELAGVELDIRLLVDHRERLVRMRTALYNDLLWHLHDLWPEQSFPGCALLSKKWSTTVGRRLARAEQTARVRIARDELRHLRELSQTVDALEAQIAELVAQAAPQLLAETGVGPLTAGKLIGEIAGAQRFTSDAKLARAGGIAPIPVSSGNTNRHRLDRGRNRQINTAIHRVAITRARCHRRVSRILQSAAAAWWLSTAFGPAARTAAIQLPDRVTSRWPTA

SEQ ID NO: 150574 - protein, 354 aa, unidentified
MSNKSNSPVATIGIDIGKNAFHVVGLDRRGAIVLRQRWSRGQVQARLANMPPCLIGMEACVGAHHLSRGLHLQGHDARLMPAKYVRPYSKGQKNDFRDAEAIAEAVQRPTMKFVATKTAEQLDLQALHRVRERLVSQRTGIINQIRAFLLERGIAVRQGLRFLRTELPIILATRSDLLSPRMLRVIEELMADWRRLDERIEGLSEEIEAVARQDPACERLMTVPGIGPIISSAMVAAIGNGAVFTKGRDFGAWLGLVPKQISTGDRTILGPISRRGNRYLRALFVQAARVVLVRTKDSDRYGLKAWIDAAKKRLHHNVLAIALANKLARIAWAVLNKERAFECVSTRATSSQPA

SEQ ID NO: 150575 - protein, 338 aa, unidentified
MNNSTVIGIDLAKSVFQVGVMTNGKLTSNKQVKRARLHSMMANHPPSIIAMEACYSSHYWAREFQALGHKVKLIPAQHVKPFTRGNKTDANDAVAIIEASGRPNLRCVPIKTTHQQDIQSLHRIRERLIGNRTGLTNQTRGLLAEYGIVARKGKKGFMLAVQTGLNDDKLSEIVRTELHFALDELEQTSEHIAQIEARLRAYIDQNEDCQILHSMPGIGVINATALVCKYGNGSQFSKASSLPVSLGLTPKLSSSGTRFQMMGISKRGDPYLRKQLIHGARALLMICDKRPDDALCRWASRIKKRRGDNIAVVAVANRLARLAWVLLQKREMYRASPV

SEQ ID NO: 150576 - protein, 363 aa, unidentified
MAMKKPSKHLIAEVPRSVAKVGMTIGIDLGDVWSHYCTLNEDGEVVDRGRFRTTPSGVEKWFTDVPRARVAMETGTHSIWVSEQLRELGHEVIVANVRELRAISHSNRKSDTVDAEKIARYARVDPEILHPISHRTVAQQEALTLIRARNLIVRLRTAAVNSVRGLAKPCGYRLPASSTLCFAKRCMAVLPPGLAQALGPVLEQIAAMTVKIQQYDRTIKRLTETEYPETQALLQVYGVGQLTALTYVLTLGSKERFQRSRDVGCYLGLRPRRSQSGDRDPQLGITKAGNIYLRSLLVECANHVLGPRGRDSTLRQWGLHLASRGGKQSHNRAIVAVARKLAVLLHRIWVTQEPYIPFYAVAA

SEQ ID NO: 150577 - protein, 342 aa, unidentified
MQITTIGLDIAKNVFQVHGIDATEKVVVRKQLRRSQVLAFFKALPPCLVGMEACATAHYWARELTKLGHQVRLMPAKDVKAYVKRNKNDAADAEAICEAVRRPTMRFVQVKSAEQQGQLMLHRTRDLLMRQRTQVINALRAHMAELGIVSAQGREGIKELLKIIASEQDARLPVDAHTSLVVLAAGLQAVQTMIGSIEKRIMAQHRASEASQRLESIPGIGVIGATAIAATVPDPKVFRSGRDLAAWIGIVPRQDSTGGKQKLGPISKQGDRYLRRILVVGAHAVLKQARRQPEKYPRLTLLLARKPFKVVAVALANKMARIAWALLAKGGTYRAPALAAAV

SEQ ID NO: 150578 - protein, 309 aa, unidentified
MEIVVGIDVSKERLDVAVLPQGEVFAVSNDHAGIEELVARLKAIGVDAIGLEATGGYEMLAVAGLWAAGLTVLVVNPAQVRAYAHAIGRRAKTDPIDAAVIAAFVLATKPEIRPLRDAETQALSELVARRRQIVQMTVAEENRLRMALAKQAQKSIKRLLVALRRELESLDADLDSHIRKSPVWRVREELLTSVPGVGATTARTLLAELPELGSLDRRQIASLAGLAPWTRQSGKWKGKSFIGGGRGKVRAVLFMAALAAARYNPALKAFRDRLVAAGKPKIVATVATMRKLLTILNAMIRDGRPWQNA

SEQ ID NO: 150579 - protein, 346 aa, unidentified
MEIHTIGIDLGKTVFHLVGLNAVGETVMRKKCSRKQLLHFTANLHVGLIGMEACCGAHFLGRALREQGHDVRLMPAQYVKPYVKTNKNDYIDAEAIAEAVGRPKMRFVPIKSDAQLEMQSLHRVRESWVGRRTSVINQIRGMLLERGITIRKGRRHAEAALPHILEDVDANLSGPIRMLLAQLQQELRQLQSQIDAIDVGIVQASVEQEACQRLMAIPGIGPVTATAIVSAIGNGADFKKGRGFSAWLGLIPGQYSTGGKQRLLGISKRGNSYLRKLLVNGARAVLQSREKQSSGLRTWLGKLVSRAHSSVVTVALANKLARMAWAVLAKGETYRPPLLAAEAVAA

SEQ ID NO: 150580 - protein, 348 aa, unidentified
MVVIGVDSHKRTHTVVAVDEAGRKLAERTAATTADGHLDLLSWSRTWPERTWALEDCRNLTRRLEADLLRAGEPVQRVPTKLMAGARRSAREPGKSDPIDALSVARAALREPDLPVARLDGVERELRLLVDYRDVLISDRTGHQSRLRWFLVELGIPEPPARRLTVPVVLAGVDLGLVGRTEPCARIARDLVARISELTSAIDTLARQIGELTEVLAPSLLALFGCGSLTAAKLVAETAGISRFRSKAAFAAHTGTAPIPVWSGNLVRHRLNRGGNRQLNAGLHRIAITQLRCPSLGQTYVAKRIAAGDTKTEAIRALRRRLSDEVFRRLQADEAARAAAESVALAAA

SEQ ID NO: 150581 - protein, 404 aa, unidentified
MQDATARFGSVDWATRGHAACVVDAAGQIVDQFTVEHTALGLATLVRHFQQQQVRRVAIERPDGPVVEALLAADLEVVVVSSRAVKALRTRYGLAGNKADRSDAYVLADCLRTDGHRWPALQTDTLQTLALRAAVRARKDLVATRVATANQLRAHLQVVFPAAVGVFAEIDSAIALRFLERFPSQDKATWLSDRRLAAWLQANAYCGRRPATELLQRLRTAAPGVRGPAADALAVVTLSLVRVLRTLVAEIAELETHIREQLALHPDGPIFQSLPRAGTVRAAALLAEIGDCRARFPSSETLAALAGAVPSTRASGQHHVVTFRWACDKKLREALVDFAQDTVRASPWAEQLYRRHRQQRKTHPHAARILTRAWISVLWRCWQDRQPYDPARHRALQRVIAPGG

SEQ ID NO: 150582 - protein, 409 aa, unidentified
MDQLIERCCGLDVHRDTVAACVRVPGPNGKRQQEVRTFRTTAAELLALRDWLEAHRVTHVAMESTGVYWKPVFYVLEEAFTCLLVNATHIKQVPGRKTDVKDSVWIAQCLECGLLRGSFVPPAPIRELRDLTRHRRVLIQERTRAANRLHKLLQDAGIKLASVATNILGVSGRAMLEALVHGTTDPEVLADLARGRLRKKLPALRQALAGRFRPHHAFLVSQLLAHVDYLEEAISMVSEEVEGRLAPFTQHLMQLDTIPGIDKRTAEVLIAELGVDMSCFPSDRHLASWAALCPGNNESAGKHRSGKTRRGNRWLRTALVEAAWAAIRVKDSALGARYRRVMRHRGHKKAVVAVAHAMLRAVYHLLAEATVYREPGADYYDRRHAERVRRRAIQLLERQGYRVVLEPAA

SEQ ID NO: 150583 - protein, 361 aa, unidentified
MRIIGCDLHARQQTLAMLDTETGEVVNLTLMHEGNAVRQFYSQLPRPVLVGIEATGSMHWFLNLMEELGIECRVGHPATIRAAEPRKQKHDRRDADLILKLLAEERFPTIWLPTKELLDLRALLLHRHQWVRIRTRIQNALQAIALANGLRRGPSLWSYDGQAKIAFLPLLPHASYRRSMLQEMYRKMDEEIENLTQQVAEQAEQRSGARLLMTHPGVGPVTALATDVFLGDPKRFLDGKALASYVGLIPREYSSGARQRLGGVTKQGSPLLRFLWCEAGAHAVRRDPELQRFYRRKLVQRGLGKARVAVARKLGIRLWIMLRDEIDYQEFCRRGQKPQSGAACAGVLEVGNGANHHRPID

SEQ ID NO: 150584 - protein, 343 aa, unidentified
MQAVTTIGLDIAKSIFQVHGVDAEGNVIIRRQLKRRYVLAFFQKLPPCLVGIEACASSHHWSRELRALGHRVRLMPPAYVKPYVKRQKNDATDAEAICEAVGRPNMRFVETKTTEQQGCLMLHRTRHLFIRQQTAVINAIRAHLAEFGIVAPVGRNGVDQLLGVVADANDKRLPSVARACVAALGAQLQTLKAQILQFDRLIRAWHRSSEASKRLDEIPGVGPALATALVASVADPKAFRSGRDFSAWIGLVPKQNSSGGKERLGSISKRGDRYLRSLFTAGALAVIRYAKIHGTKHRPWLAALLARRPTKVAAIALANKIARMAWAMMARGERYKEPAALAA

SEQ ID NO: 150585 - protein, 311 aa, unidentified
MTQGSTVGVDIARDTFDLFISPENRFLHLENTPDGHQQLIDNLTSLNVTLVVMEATSRYHNLLAATLELAGIPVAVVNPRQVKNFARALGTLFKTDPNDARVICEFGRRMEPEVRPAPDEQTQRLAMMVSRRRQLVDNRTMEQNRHGTCDDVFIRAGIKRHIDWLNGEIKDADDDIDRQIKVMPLWREKVKLLEEVKGIGKTTLAVLLSMLPELGKLSRRKISALVGVCPYARDSGKMKGKRCIWGGRSAVRAAMYMAAMSAVRYNPTIRAFFERLRANGKPYKVAMTACVRKLVTILNAMVRDNTKWATD

SEQ ID NO: 150586 - protein, 451 aa, unidentified
MLGLGMQHIRCPNKRRTLTMKFTQSNKQNQRISRISETTLVIGTDIAKHNHVARAFNYRGIELGKRCLFQNDENGLLNLLAWAETIKQEHGLTDVLLGVEPTGHYWFPLFHFLKQRGVEVVLVNPHHVRKSKELDDNSPTKNDIKDAKVVAKLGIDGRYTQPQLPEGVYADLRVLMNQRDRLCGDLNRVKGRIHNWLDRFFPEYRQVFKDWEGKASLITLQHFPLPQDVVGAGETTVMATWKKNGVQRAVGPKRAGLLYRKAQKSIGLTEGATAARHELAMYLEQYAMLCRQIEQLMEHVAALVEQIPGASHMMSIPCIGLVTVAGFLAEVGDLSGYDHSQQIVRHAGLSLRENSSGLHKGKTTISKRGRCRLRALLYRAALTLVAKNPEFRALHLYFTTRRDNPLKKKQSMIALCIKLIRVLFELGRKQKNYDSSKVLGPHREAQLQAAA

SEQ ID NO: 150587 - protein, 317 aa, unidentified
MKNTCSPKPLNRINAGVDVSKATLDFAVDRNLFQISNTATEIRKKLSELSHKYGEVLRVSCESTGRYGHTLIAICLELGIQICQLNPSEVREFAKSQKLLAKTDRIDAKIIAQFSSYSNPRPLGADWKGRQEAACIHSRMRALVAIVAAQKASLDHFPDKSVHREILSTIRTLDLKIARYEKRLLEIVAENAASQELYNTLIKEPGVGPRTALALLVHLPELGSLDRSEAAALAGIAPMNRDSGKFRGKRYIQGGRKLLRCALYSAAVVAARFNPLFKPFYQRLRESGKPAKVAYIAVARKLLIRLNTLAKNRPCEI

SEQ ID NO: 150588 - protein, 342 aa, unidentified
MGEVVTVGLDIAKSVFQVHGVDAEGQVVVQRRLTRAKLVPFFEKLPRCRVGIEACATAHHWGRRLTELGHEVKLMPPSYVKPYVKRQKNDAADAEAICEAVTRPSMRFVEVKSPEQQSELVIHRTRMTLMRHRIELSNTIRAHMAEFGLVAPIGRRGLQGLIDIVRDATDERVPASARICLRLLADQLDLINRHALETDRMILASARATEVGRRLMAVPGVGPVLASAMVASVPDAHAFKSGRNLAAWIGLVPRQNSSGGKERLGGITKQGNRYLRQLLVVGALAVIRYAERHGTRRPWLVQLMARRTTKIAAVALANKTARMIWAIMTSGEAYREPELRAA

SEQ ID NO: 150589 - protein, 341 aa, unidentified
MEKTVVIGIDFSKKTLDVSCFKVSNSKNSYYQQFINSEQGCLGMISWVKGHFNDTQEWLICGEYTGIYSMTAAMVFNDNGLSFWLENPNQIKLSSGVCRQKSDKVDSMQIALYASRFMDRVKLYRPKSTVLLKVRELVGFKDRLTKVKTQLGVAAKELKTVRKTWKEADYINDSSEVIIDHVNVQIADVERKMIQLLENDPELKQLYKLINSVVGVGMQTAIYLIVHTWGFNAFDTPRQLACYCGIVPFSKRSGTSLKGRPHVSHIANKKLKSLLHMCALNAVRYDPQLKLYYQRKVEEGKHKMNVLNNVKNKLIHRIYAVISTGQEYDKNYYLRNTSVAA

SEQ ID NO: 150590 - protein, 469 aa, unidentified
MTTMTQPGSCVTGGVDTHKDVHVAAALDALGRLLGTESFPTTRAGYRQLLGWLRAFGEVDAVGVEGTGAWGAGLHRFLTANGVRVVEVMRPNRQRRRRYGKSDVADAISAARAVQAGEAVGTPKTATGTVEAIRLLRIARRSAMKARTQAGNQIHAVIDTSPEDLRHRYHGHSSAQVVAAAARFHRRFPSTPLDAAKLTLRVLARRWQHLDAELAELDAHLDELTATVAPTLRAMNGVGPQVATALLAAAGDNPDRLRSASSFAALCGASPVDASSGRQQHHRLNRGGDRQGNWALHVIIISRLRWHQPTKAYMAKRRAQGRSEKRSSAASNATSPAKSTAPSPPTSANNTIQRDHRESPLDIQRSFGRPALPNDAGPGSVRDRPSRRGPADAAGVEQARPRRRPQNDAPVLSRGGRGVDRTEIGHSWFEGRLLVGHGPRGWCGVAVDASFVEQPACRRWPIRGGQAVT

SEQ ID NO: 150591 - protein, 345 aa, unidentified
MKQYAGIDVSLEYSSVCVVDADGRIVRESKVLSEPDALIAWFAEHGVAMERIGLEAGPLSQWLHAGMTKAGLAVELIETRHVRTAFKTMPVKTDKKDARGIAQLMRLGWFRPVHCKSLPAQEVRALLTARKLIQGKLHDIEMSIRGILRGFGLKVGPTTQRTYAARIRDLIEGHPTLEAIAASLLKVRDALANEFAGFERKLRAMARQDDNARRLMTTPGVGVLVALTFASAVDAPERFRSSRAVGPHFGLTPKKYQSGETDYSGRISKIGDVGVRTALYEAANVILTRPVKGSDLKSWALAVARRAGPRKARVALARKLAVVLHHMLRDGTNFIPHKAQAAMAA

SEQ ID NO: 150592 - protein, 436 aa, unidentified
MLLFLLIKKVVILMMKLKYSICCGLDVHKNVIVATIVITNKDGISEYIQKSFSTINSDIQKFHNWLIENNCYHVCMESTGKYWIPIFNYLENDIDVCLTHPKYVKAIKGKKTDKKDSKWIADLYKFDLVRCSFIPPKDFRQLRELARYRFKLVCMKSSEKNRIQNCMTVSNVGIASVLSDPFGKTAAEILSYLLEHTTDSMDEKAVRKLIKKGAKAKSDEIIEAINGYNIESDQAKKLELARAHLDYLGEMITQTEVELYVRIKPYYEFVELVSSMPGMTGLSSTIVLAETGVDMNIFDDAKHLCSWCGLSPANNESAGKKKSVRIAKAGDYLKPMMVQCALAAIKSKKQPYFAIKYGRIKKRRGHKKAIIAIARMMMVCIYHMVLEKKPFTPTDYKELMDPQNHVERVVLNESNALAFLAAQGYDTSKLIKCNDN

SEQ ID NO: 150593 - protein, 346 aa, unidentified
MTIVETRAITGGVDTHADMHVAAALDPIGGLLGVHEFPATAGGYARLLGWLGGFGTVALVGIEGTGSYGAGLARHITAAGVRVVEVDRSDRQDRRRQGKSDPLDAVSAARAAQSGRARGAPKGRDGAVEAIRALMVAKRSAMGERTQTINQARALILTGPDDLRARFAKHTAAALVTGVASLRPRPGDVPGYATRVALRELGRRAVFLDGQLERLDELIVPLVTARAPGLLALFGIGPNTAALLLIAAGDHPGRLHSEAAWAHLCAAAPIPASSGKVTRHRLNPGGDRQANHALWRIVFTRMGSDPATRAYVERRTKEGKSKAEIIRCLKRYVARQVYPHLRADAG

SEQ ID NO: 150594 - protein, 405 aa, unidentified
MFPVGAAEPWGAAIPSAGYFFFFFPFYCHMTWGCQAGVETANLTTVMKHYKITNTETYESIKLGIDAHAKWYYVARQLDGATPQPVQKMDFEGLLHFVARQKRLAREVHTCYEAGAFGYHLHHQLAALGVTNYVVQPQDWDERGKGVKNDRIDAQALCQRLDRYVRGNHKAFSVVRVPTAEEERERAISRQRQQLVRERQRLQAMGRSLLAMHGIHVSGKWWQGKTWSEIRSEAPEWVIERLEVFSRLIAPLEAESAKLTSQIEAAAADQKIPKGVGPLTFEVLRREVGDWSRFTNRRQVSSYTGLCPREHSSGGKRRSGSVSKSGNPRVRAMLVEMVWRMTRWQSGYHGLQKWLPVLADPARAGAARKKAVVAIARQLAVDLWRVFTGQTTAENVGLVYLPDAA

SEQ ID NO: 150595 - protein, 411 aa, unidentified
MENIFPCCAGLDIHKKSVEACVRRLEPTGQMHHQTRHWGTMTRDLLAMADWMAAQGVTHVAMESTGVYWKPIYNILESRFTVLLVNARHLKQVPGRKSDVRDCQWIAQLLQHGLLKGSFIPPRTQRELRDLTRHRTQLVEEKTRTVNRLHKVLEDANIKLASVATDILGVSGRAMLEALMEGQEDPVKLADLAQRQLRGKIPELEKALEGHLTEHHRFLLRLLWKELAQQEELIAELDRKIEEQTRPFANEIERLDAVPGVDRRVAEVVLAEVGSDVKPFPTHSHMASWAGICPGNEESAGKRRRQRITPGNRWLKRTLVQAAWAASHTKNTYLASQYRRLAGRRGKKRALVAVGHSMLVIFYHMLKERTTYKNLGADFFDRLEPERLTRYYVKRLKDLGHKVTLEPGVAA

SEQ ID NO: 150596 - protein, 311 aa, unidentified
MTEHTTVGIDIAKETFDVFISPDGIFLHLDNTPQGHQLLLDALSSRTVTRIVMEATGRYHNLLAATLELAGLPVAVVNPAQVKHFARALGTLFKTDPNDARIICEFGRRMTPDIRPAPDEQTQRLAMMVSRRRQLVDNRTMEQNRYGACTDELIRMGIKRHIDWLNAEIKDTDDDIDQQIKVMPLWQEKVKLLEEVKGIGRTTLAVLLSMLPELGQLNRRKISALVGVCPYAHDSGKMKGKRCIWGGRSAVRAALYMAAMSAVRYNPTIQAFFEKLRSKGKAFKVAMTACVRKLVTILNAMVRDNKKWAAA

SEQ ID NO: 150597 - protein, 339 aa, unidentified
MNIHSIGIDLGKTTFHLVALDEHGRTVIKKKFSRPQLLAYTANLPIALVGLEACSGAHFVGGALREQGHDVRLIPAQFVKPFLKSNKNDFLDAEAIAEAVARQNMRFVPIKTDDQLDLQALHRVRERLVQRRTALINPIRGFLLERGITFAKGPANLRNQMVSTLEDAEQNLTPRLRRLLDHLWQEWKQLNGNIEQVSDEIDTIASEDAACRRLREIPGVGPLVSTATVAAIGNGAAFHKGREFAAWRGLIPRQHSTGGKPHLLGVSKRGSAYLRRMFIHGARSVLLRVKYDTGRLGAWAHQLELRAPRNKVIVALANKLARIAWAVLSSGNEYRAQAA

SEQ ID NO: 150598 - protein, 427 aa, unidentified
MKKASVTHEAFESPAPIAPSVLVGIDWADKEHAFAIRTPDGKLHLGSFKHSPAAIREWIEAWNNRYPNLAIEICIEASRGSLINALREFPYVKIYPVNPKALANYRGAFAHGGGKNDPVDARLILKFIEQNREHLRPLQQDSPETRELYALTIHRRQLVEERVALANRIGTLWKQYFPAILELKPARTYSEFVIKLALKYPTLEDVQKAGKTKLRKFFYSIGTKEKMEHRLDLLMEAKPLTTDPTLLRTCARQCQAIGLQIDVLNQVIKGYNSEIKSLVRKHKDYGFVSTLPGASDNTHARIIAALGDDRNRYENAESLQAAAGIAPITTQSGKSRYVNARWACTKFLKQTFHEYAGLSVAKCTWAKRYYEQLQAKGKSKQMAKRALAYKWLRIIYRCWKTGQPYNEAHYMERLRKTGSKLGVASEA

SEQ ID NO: 150599 - protein, 438 aa, unidentified
MSNKVIFNLDDLFISVGIDVGADFSWMSIALPNQQFVGKPYKILHNSIDSLTTAVSKIKEAEELYSLESRIFLESTGIYHYPLFCYLRDKGFNCSVINPIITKNSTNINIRKVHNDRFDSKKAALVGLKPDLKVSLIPSDLALNCRNLCREYYDLMDNRSAYVNKLQGELRMAFPQYLGIFSKVTINTSLTLLETYTSPSAFLEADKQEIIDIIKSTARFGLTYAQNKYNAIIQAATDANQFGYIIDSNIKRIRLYISFIRKYDEEINNILESLHELVDANEDADFVKQIHLIETFKGAGFLSAVSIMGEIGDFSAFSKPKQLFAYFGLDPAVKQSGKFEGTKVRMSKRGSAIARRVIHTLTLQSISISRNGEAKNPVLREYYLKKCDSKPKLVAMGAVSHKVCNMIFAILRDNKPFEIITPQEHIKQYNASKCDMAA

SEQ ID NO: 150600 - protein, 460 aa, unidentified
MNRKRSKSRVDRTLPMMHPNAAAIDVGATIHMAAVRADRVPEAVRCFGTFTTDLHRLVDWFTECGVETVVMESTSVYWIPIFELLDARGFSVFLVNARDAKHVPGRKTDVSDAQWLQRLHSYGLLRASFRPKGQIAELRAYVRQRERLLEYAASHIQHMQKALTEMNLQLHHVVADITGSTGLRIIRAILAGERDPEVLACLRHYSCHSSAETIAKALTGSYRTEHLFALEQALALYDAYHEKASACDVRIEAVLKELSIHRGRDIGSVPPASRRRHRTDQANALAFDVRAALFALLGKDITRIDGLGPYLSLKLIAECGDDLSSWPSAKHFTSWLGLAPSNKVSGGKMLSSRTRRSGGRAAALLRLAAVTVGRTDTALGAFYRRLSSRIGKAKAVTATARKVAVLFYNAVRHGMEYVDPGASSYETRYRMRVVNNLHRRAKAFGFVLQPLEPKADAVVS

SEQ ID NO: 150601 - protein, 348 aa, unidentified
MALTIVKTRAITGGVDTHADVHVAAALDPVGGLLGVQEFPVTPAGYALLLDWLAGFGTVCLVGIEGTGSYGAGLARHVAAAGVRVVEVDRSDRQDRRRQGKSDPLDAVSAARAAQSGRAAGAPKGRDGSVEAIRALMVAQRGARTDRIQAINQARSLIVTGPDDLRARFTGHTVAGLVAELASLRPRPGSTVGYATRIALRELGRRAEFLDTQLKRLDELIVPLVTAQAPSLLALYGIGPHTAALLLIAAGDHPERLRSEAAWAHMCAAAPIPASSGKTVRHRLNPGGNRQAGHALWRIVFTRMGSHPATRAYVERRTAEGKSKKEIIRCLKRYVAREACPCLRPPAG

SEQ ID NO: 150602 - protein, 347 aa, unidentified
MTLYIGVDFHPHQQTVSYCNNEEGEVHQTSLIHNVEQVHRFYRQLPKAVVGIEASCTAAWFEQMLFDLGHELRVGNPTAIRARARSRHKSDKRDADLILDLLLKDEFPTLWRRSVQGQSVLEQLRFRHQLVKHRTQICNRLQALAHAAGLPKKGIQTKRARVALMEARLSETQSFQRDQFFELLDDLTERIKHVEQWLEEKAAGDTKVQLLLTHKGIGLLSALATVHTLGDVSRFPSSKEAVAYTGLDPLEQSSAGKVRFGSISKAGSAVLRHLLGQAMHVAVRYDGELRSFYKRLASRRSKSIAKVAATRKLLIRLFIMLRDGIDYAEFKRRGATVGMPVLSHGLQ

SEQ ID NO: 150603 - protein, 341 aa, unidentified
MYSIGLDVSKASISIHVPLNSLDLEIENNVKALKSFYTKLKKLYKKDLDKLVFAYEPTGSYSATLTKFCSMKNIKAFIINPKQSSNFAKALGHRSKSDKIDAIMLSRAISVARKNEIRVPVVNATAETIKELMSYYMFTLKQRVAINNHHEALKAKDGNAYALKDLIKRHKEMKEKETEILNKIKNIINEDDDISQAYSNIKTIPGIGDIAGIVLIHLFIRYPKANQKQITSLTGLDPVVKDSGTSVKSKPKISKSGSRLYRGVLFMATMVSINYNEQMKVFYNRLKDNGKHSTVAQIAVMRKLIVIAHSLYKNNTIYNAEFYNKACGNRQEKSTSIEIVA

SEQ ID NO: 150604 - protein, 358 aa, unidentified
MQIIGCDLHARQQTVAMLDTDSGELVEKTLEHDGEELREFYSGLSRPVVVGIEATGAMQWFLEWMEELGIECRVGDPAKIRAAEPRKQKNDRRDAQLLLKLLSENRFPTIWMPSTEQRDLRTLLRHRHQWVRMRARLQHTLQSMALNHGLRRGHSLWNQAGQQALRALPLAPHASERRKALMTLYPSLQESIDELDRQISQQAQNHPAARRLMTHPGVGPITALATEVFLGDPLRFTDGKAVASYIGMIPREHSSGGRQRLGAMSKQGNALLRYLWCEAAMHAVGRDPELKRFYRRKLVQKGLGKARVAAARKLGIRLWIMMRDQIDYQEFCRRGETRQESGSVFAGMPGITSGPKKS

SEQ ID NO: 150605 - protein, 340 aa, unidentified
MKKILFIGIDFSKSKFDASLLKSMSDEEVVSGSFENNRGGYVLFLKWVSDHTRIKKEDWLFCGEHTGLYSRDLTEFLSKKNLTVWLENPYQIKCSCGIKRAKTDKIDALEIARYAYRFQDKCTPYQPVDKAIESLSLLLSYRGRLIKEKVLLEVSAKETRRVISRDTTSRFVFENSMRNIERIKKEIKAVEEKMHQILMDSPLKENYLLTVSVKGIGLVTAVALIVHTNNFSTFNTARQLACYCGVVPFEKSSGTSLNRGKHISHLANRELKTLLTLCARCAIEHDKELNVYYHKKLSEGKEYKVIINNVRNKLIHRIYAVVTHKMPYMENYLNPFRKCA

SEQ ID NO: 150606 - protein, 402 aa, unidentified
MNCVGIDVSKGKSMIAVMRPFGEVVVSPFEVRHTANELSELAGLLKSLDGETRVVMESTGNYHAPVAWLLHGAGFYVSVVNAMLVHDYGNNSLRRGKTDKKDAVKLANYGLDHWLTLPRYIPEEDTRLMLKICYRQYQQYSKVQTMLKNNLISLLDTTFPDANRLFTSPPRADGSEKWVDFVATFWHCECVCGLSKKAFTAKYQKWCRKHGYNFSQDKALDIYASACGRFGVMPKTNTAKLLVEQAISQLQTTSAALAALKQEMQSLAASLPEYPVVMGMFGVGPTLGPQLLAEIGDVRRFHSKKALVAFAGIDAPPYQSGQIDVRSRSISKRGSASLRRTLFLVMSVILQCAPIDEPVYQFMDKKRSEGKPYRVYMMASANKFLRIYYASVKAYLESLEHD

SEQ ID NO: 150607 - protein, 333 aa, unidentified
MPLYGGIDLHANNSVVVLLNEQDHVVYYQRLNNHLPTLLEQLTPYRDDLEGVVVESTYNWYWLVDGLMEADYRVHLANPSAIQQYSGLKYTNDHSDARWLAHLLRLGLLPEGHIYPKAERALRDILRKRSHLVRQQTANILSVQNILMRNTGVRFNAQRMRALSPPDLMRLLPEPAQVLAVRSGLAVLHTLGEQITTLEKTVSTSLKHTPAYEQLLTVELETGDIGRFATVGHYASYCRCVPSTKVSNGKRKGQGNVKNGNKYLRWAYMEAAQFAMRYSPKVQQFYQRKQAKTQGVLARSAVAHKLARACFYIMRDLVPFEVTKAFGSGLAHR

SEQ ID NO: 150608 - protein, 330 aa, unidentified
MKKREFVGIDLSKEKIDVRLQLARQENVFDNKLSGFKKMLKWITKSLDQASDLLFCFEHTGMYAFPLLMFLEKEKLEYVQVSGLQVKRSLGIQRGKNDRVDAKRLAEYAYLHREELRPHKLQSDILLKLKSLLALRSRIVRQRAGYKASVKEYKSYMALKETDLIIHSQKRIINALTLQIEAIEKEIKQLIASDEKILRQFILASSVKGIGLICACYMIVLTNCFTDFKTWRKFACYAGSAPFEHQSGTSIKGKTKISHYANKQMKTLLTNAVKSAIRHDKELGMYYKKRIAEGKHKKVVVNIIRNKLISRVFATVKRGTPYVDLVKYAA

SEQ ID NO: 150609 - protein, 362 aa, unidentified
MAQVRSWVGLDVHRASVVAATMDRDTGELRVRRLPGETREVVAFCVALPGPTRVAYEAGPTGFGLARALVAAGVQCVIAAPGKIERPSSDRVKTDQRDAERLLRLLMIDGLHVVRVPSSEEEALRDLVRAREDIRGDLMRARHRMSKLLLRHDVRFDGTAAAWTTHHRRWLGAVDLGDRGAQITLLDYLGAIDALLIRRDTLEHTIDELVPDSPWADTIARLRCLRGIDTLSAVGLCAEIGDWQRFPKAGHVMSYLGLVPSEDSTGQTRRQGSITKTGSGHGRRLLVEAAWHYRRAPAKGQALKRRQAGQPAHVIAISWQAQQRLHRTWRRLDTERGKRRTIVAVAVARELAGFCWAAANAD

SEQ ID NO: 150610 - protein, 470 aa, unidentified
MEERPVTPNRRPHRTKASPGPSLLDRINPNAAGIDCGADTHYVAVASDRDPMPVRAFQAFTADLHRLADWLTVCRVTTVAMESTGVYWIPLYEILEARGLEVILVNARHVKNVPGRKTDVVDCQWLQELHSVGLLRGSFRPTAAIAALRAYLRHRETLVQSATTHIQRMQKALVQMNLQLPIVISDITGVTGLRILHAIVAGQTDPHVLAQYRDRRCRASKAEITAALTGHYRPEHVFVLQQNLALFEVYQQQLAACDLAIEAHVLTLAAETPAPGGPMPAARTRKKPRNNEPRFEIRTPLHHLTGVDLTQIDAIGPYSALRLLADIGTDMTRWPTEKHFTSWLTLAPQNKISGGRLLSAKTQPSANRAATILRMAAMNLGRTDTALGAFYRRLAYRVGKAKAITATARKLAILVYRTLKHGLRYQDPGAAAYDAQHRLHVLRRLRQRAASFGFSLLNRETGELLDAPVS

SEQ ID NO: 150611 - protein, 343 aa, unidentified
MDHFVGLDVSVKETSVCIVDEVGKIVREVKVASEPEALLAVLKKPAYRFKRIGLEAGPLSQWLFGALAEAELPVVCVETRHMQVVLKAQLNKTDRNDARSMAQMIRVGLYRPVHVKTLRSQKLRMLLTHRKLLQSKAIAIENDLRGTLRNFGLKVGIAGTVKFEARIRELVENLPDLAALVEPLLIVRRVLHEQISVLHRRLLAIVRDDAVCRRLMTIPGVGPVVALTYRATIDVPARFKNSKAVGAVFGLTPSKYQSGEINRTGAISKCGDEMMRVMLYEAAQVMLTRTNKWSWLKAWAMKIARQRGMKKAIVALARRLAVIMHRVWVDGTEFRWTRKVVAA

SEQ ID NO: 150612 - protein, 421 aa, unidentified
MAYRVSVIDVHKRMLAVVIADVSVEGEYTFLRRRFGTTGSALQALAEWLVVEQVDEVVMESTAQYWRPVWEVLEKSWMPKRQAEAESGRLHLAQAQSNRGPRGRKRDYPDAERLVKRLMAQELTLSFVPEPEQRLWRTVMRRKNQLTRNKVQLRNRLECLLEEAHLKLSSLVSDLLGLSARRMMQAIADGETEPTRLAALADRRLRATSEELRDALGASAALNPVYRTLLQMTLEELRLLEEQSLQLDREMAKLLGEHRTPVQRLAEVPGLGVDSAQQIIAEVGVSAATFPSAKHLASWVGVCPGAHESAGVSYSHRSPQGNRPMRRILCQAANAAVKTKGSVFQLLYRRLVVRLGHAQAIWAVAHRLCRLIWKILHQGVDYEERGPEVTRERSQRRIAQMIRDLRKLGYHVEPSPQGASA

SEQ ID NO: 150613 - protein, 394 aa, unidentified
MGKMYVGIDIAKDRFSACGIEEGGRSFFELTFTMDGAGFAALLKTIEANGGTSGNVIAAMESTACYHINLYSFLSAKGIEAVIINPLLIANYAKLSLRRTKTDKKDAKTIAQFILAHRDSVTQLAISQDMQDMRDMARERESLCHQISAAKVEIQRVLQTTFPELAAMTNPITKVMLHFIQRFPSARLVSIAKPSAIEKTLKEKPCSCRLRFTSKELIEAARTSIATVSPAKELILSGKIETLVHLQKRRDELTKALTKYCESTIVEDLRIVTSISGINNIMATALLAEIGQISNYLSHKHLIAFAGIDPTVYQSGKYEGASRISKRGNRHLRRVIWLMTISVIHHNSVFKNYFLKRRNEGQPFKKAVFATAHKLMRVIFAMLSKKTSFVAECV

SEQ ID NO: 150614 - protein, 352 aa, unidentified
MAGVMIGVDPHKASHTAVAISGAEEPLGELRVRASAVQAERLLEWAAAWPERSWAVEGAGGLGHLLAQQLLSAGERVLDVQPKLGARVRLLATGNVNKNDPNDARSVAVAALRSPAVREARPDDHAAVLKVWSKRRRDLGSSRTQVVCRLHAVLCELVPGGVAKKIIAAHAARLLGSITPPDAVAAARWELAAALVEDLRRIDGQMLETRKKLDTAVKASGTSLTGLFGVGPVIAATVIGEVRDVSRFKDRDRFAAYNGTAPIEVASGKRKVNRLSRRGNRRVNHAIHMAAVTQVRQKHSEGRAYYDKKLTEGKTHREALRSLKRQVSDAVFTRLRVDAQRAQAQVRDPGGQ

SEQ ID NO: 150615 - protein, 356 aa, unidentified
MLYSGIDLHRRLIVVCTVDNNGTIIARSRMKTDPALVSEYFRQWPDQHRAVVECTTGWYWLADLLRSLGVELILAHAKYLKAISYAKVKTDAVDALTLAQLLRMGYIPEAHQLPPEYRAMRDLLRQRMVVDHNRTTIIRRVTSILAQFNITTLPMSPHQSGFADFVSQCQIPEEYRIPLLMYHQQCLQAAEHRKQLEKYFKAHLRPLPSVQRLLSIPGIGDITGSIIAMETGDIHRFADAKHYCSYCRLVPGAKDSAGKHSHRSGSKDGNRYLKFAFTESAVKAMQFYPEIKHFASRLERRATKAIARTVVAKELAKISYYVLSRQEEFKTFKGIEINKLRNWPRARKPVCLTGGL

SEQ ID NO: 150616 - protein, 355 aa, unidentified
MSQEKYIGMDVHQATVSVAVMDSGGKLIMECILETKAGTIVEFIKGLHGTLSLTFEEGTCAAWLHDLLKPHVSRLVVCDPRKNALLKDGSKSDRIDARKLAELLRGNQLTPVYHGDHGLRTLKELGRSYLTITGDLTRVMSRIKALYRSWAIPCSGTTVYAARHRSEWLSKIPQPGVRLRAERFYQQLDLLRPLHQAARCDFVVESHKHPAVKLLRQIPFIGPIRSALLVALLQTPHRFRTKRQLWAYSGFAVETHDSGEYRYVRGKLLRNRERISVRGLNDNYNHDLKNLFKSTAISASTRPGPLRDFYVALLAKGMRPTMARLTLTRKIAAITLTMWKKGVDFDAKQLDQQAV

SEQ ID NO: 150617 - protein, 353 aa, unidentified
MNKMKTQDREIKRVYIGLEDSKATYRVCARYRGLEANVASMPADYSHFKRYLEQHFPGYQITVLYEAGFKGFELHDQLQADGIHCVVTPPSKVTEAKVNKVKTDSRDARRLAKILETGDYVACHVPDRGRREDREISRSLEQVAKDIRRTKNRIRGFLKFHGLERHDSAHHWTDREYQALRQLELSHSLAFSLSVKLNELDHLLEARQRLYSELKRLFRLNRYQEPAQAKMSCPGIGWLTAIRLTLEWGDLARFPDGKHLASFSGLTCSEYSTGETIHRGRITGQSAEFVRGWLIEAAWRASRKDPVLFDKFQRVWRNSGSKKKAIVAVARKLVVRIRAIEVGQGRYQLGLVA

SEQ ID NO: 150618 - protein, 415 aa, unidentified
MLAQTSKRSYCPADFTLFMGMDVDKRSIDLTCADWRQIIRSVHIPNDAGGLIRYVRKHFPDQRVLFAYEAGPTGFGLYDGLTAEGFPCVICPPSMVPRVPGQRVKTNRLDSKKITAALRAGELKSIHVPSPTYRHLRHLTKIRDLATRQIAGYKCRIKALLLLEGIPFPEAAPKSHYWSRSLIARLHQLPCSGAVRFRLDRLLDALEFQGRQYLKITREIRIFCRQDPELSRCLSYLTSIPGIGQIVAPSLLARIGSWQNLQEHRVDELAGLLGLVPTEHSTGDRVHRGSITHGGDGRLRSKLIQSAWTAIRQDPELREFYRSVYRRHPQHLAARKAIVAVARKLTTRIFAMLKEQRPYVVRPVIHSRPLLPGEIGPRERLDATQKKEDGNLPSFDFETETLPGPPPRWGASKRV

SEQ ID NO: 150619 - protein, 340 aa, unidentified
MKLSVIGIDVGKTVLHVHGADAQGKPVLRKTFSRGGLVEWLAQQVPCLIGMEACGGAHHLARVLTDCGHTVRLIHPGFVKAYVKSNKNDFRDAEAIAEAVTRPTMRFVAIKTIAQQELQALHRLRSGAVTQRTVIINQLRGLLLEFGLTVLRGPTALRRRLPEILETADGGLQALGRELLAELQREWVHLDERIAALEQRLKQQTQTLEPCRRLRSIPGIGVLGASAFVAAFGGGCQFASGRDCAAALGLVPRQHSTGGRSQLGSISKRGDAYLRALFIHGARAVLRYADRHDDPRSRWVWALKERRGVPVAAVALANKMARTAWAVLTRGTTYQVPVAA

SEQ ID NO: 150620 - protein, 365 aa, unidentified
MNLNTATKAGQIIGTMNGLQVIGLDIAKNVFQLHSVDMSTGEIINVQIKRAKVLEYFVNKPPCLIAIEACGGAHHWAREFTALGHSVRLLHANIVRPFVAGNKTDATDARAIWQVVQQPGVKFVGIKTTEQQATLTLHRQREMMMKMCTMQTNALRGLLYEFGATFAQGRQALFKDVERALEGLADQLPQMVRDSLREQVARIKAVIEDIKTIEQRLKVQLRQDRQMQRIFQIPGVGLLTATAAIATMGEASAFKSGREFCAWLGLVPSQTGTGGKVRLGNITKRGDTYLRTLIIHGARSVLTHTKEPGPWLEAIKGRRPASVVIVAQAAKMARTIWAVTAKEQDYKRDFQSVRPVVAAKASVQA

SEQ ID NO: 150621 - protein, 357 aa, unidentified
MVVTDNESTPQTLEEDREMSRFIGVDLHKNMFVVSFYEEQSGKHKLWKYRLTEIGSFKRRLKKTDILGVESTGNTRYFVDQIRDCVEQVRVINPSQFKVISHSVKKTDDNDAKVIAEFLSKDMVPEVRMKDAKTAQVSSLANTRDKLVKLRTALKNKIHNILSAHGIILKKEVLASKKALKEILDQPVNSVALVELKVIVEQIESLNEGISKLDKELEEQGKKLDGHENITSIKGIGDKSGSILLSVIGDIDDFENEKKLAAYFGIVPRVSNSNEKEHQGRITKRGSKLGRTTLVQCTLVAIRYSPYLNGFYQRIKARKGSGKAIIATAKKLLGIIYLTLKNKWVFEDFPNFVLKAG

SEQ ID NO: 150622 - protein, 404 aa, unidentified
MVSVGIDVSKEKSMVCILKPYGEVVMSPYEVNHKKSEIAKLIGIIQSLTGEVKVVMEATGAYHLPILYQLKQAGLFSSVINPLAMKKYAAIALRKGKTDKIDSARIANYGIDNWFHLVDYQPLEITYEELRMLGRQYSHYINLRIDSKLALTSILDRTMPGIKTILSGKRSENPTKDKLSDFVAEYWHYDNIIRMSIEKFIDNYCRWAKKKGYHASIAKAQSIYVLAQAGIPTLSSKAASTKMITLEAVKVLKEINRTLESILTQMQIIARTLPEFGIVRAMNGVGDVLAPRLIAEIGDVRRFHSGSALIAYAGIDSPPFESGNFIGTKRRISKRGSALLRKTGYEVMKCLKTSKPIDDAAVYQFMLKKESEGKSKKVAKMAGLNKFLRIYYARVKEVYAIETQ

SEQ ID NO: 150623 - protein, 392 aa, unidentified
MYIVGIDIGKNHHEASIVSPKGKQIGRSLRFATTHKGADSLMSFIFKNIGNSPCVFGMEATGHYWYPIYSFLKAKGYTIYVINPIQSDSLRKMYIRQTKNDSIDSFLIAEVIRFGQFGTTSMADENILAMRQLCRYRDSVISSRTEIKLRIGTIMEQIFPEYEKQFSSLWVSTSMGILEKYLTPENIENTPIDELFEIIKDKSHNRLTRAKAISIKEAAADTFGIKIAQDAFSFQLKQLIDRMNFLDKQIEALDCQILEYYEKFDCYLHTIPGIGIIGAATILAEIGDISRFKNSSSLIAFAGIDPTVRQSGEFNSTHNHMSKRGSPYLRHAIFLAATTCSFHNSPLNAYYKKKRDQGKHHLTATGAVARKLTTVIYAVLRDSKPYEPKKFC

SEQ ID NO: 150624 - protein, 344 aa, unidentified
MDHFGGLDVSVKEASVCIVDDAGRIVREVKVGSEPEALLKVLGSPAYRFKQIGLEAGPLSQWLFSALAEAGLPVVCVETRHMRAVLKAQINKTDRNDARGIAQMMRVGLYRPVHVKTLRSQKLRMLLTHRKLLQSKAIAIDNDLRGTLRNFGLKVGMVGAVRFEARIRALVENQSDLAALIEPLLIVRRTLREQVVILHRRLLAIVRDDEVCRRLMTIPGVGPVVSLTYRATVDVPARFRKSKSVGAVFGLTSSKYQSGEVDWSGKISRCGDEMMRVMLYEAAQSMMHSKKWSWLKAWAMQIARRRGMKKATVALARRLAVIMHRIWVDGTEFRWTREQAVAAA

SEQ ID NO: 150625 - protein, 457 aa, unidentified
MSHTKRSRRRREMSPVHPDAAAIDVGATMHVAAVGPGRNAEPVRTFKTFTEDLHRRADRFTHCSVRTVVMESTGVYWIPVYEILEQRGFEVMLVNARDVRHVPGRKTDVSDAAWLQRLHEYGLLRGSFRPQGEIAALRAYLRQRERQLDDAASHIQHMQKALTQMNLQLHHVVADITGVTGMRIIRAIVAGERDPDRLAAYRDRRCRASAETVRQALIGNDREEHLFALAQAVELYDVYQAKVAACDTRMEVVLERLRATSAKPAKPLPAARHNTRQPNAPAFAVREALWAVLGIDLTQIHGLGPYLALKLVGACGTDLSAWLSAKHFTSWLCLAPGNKISGGKVLSSRTRRSSSRVAALLRLAAVTVGRTETALGAFHRRLSARIGKAKAVTATARKIAVLFYNALRHGMDYTDPGASFYEERYRRRVLGNLQRRAKSLGYVLQETAPAPTTNCVS

SEQ ID NO: 150626 - protein, 342 aa, unidentified
MQITTIGLDIAKHVFQIHGIDAAEKVIVRKRLRRGQVLAFFKALPSCLIGMEACATAHYWARELTKLGHKVRLMPAKDVKAYVKRNKNDSADAEAICEAVRRPTMRFVQVKSPEQQGQLMQHRTRDLLMRQRTQVINALRAHLAELGIVAAKGDKGVKELLTILADEKDTRLPIDARASVIVLAAQLQALQTLIGSIEKRIKAQHRSNQASKRLETIPGIGVIGATAIAATVADPTVFRSGRDFAAWIGLVPRQDSTGGKHKLGPISKQGDRYVRRILVVGAHSVLRRAKENPEKYPWLTQLLARRPFKVVAVALANKMARMAWALLAHGGTYRAPELAAAA

SEQ ID NO: 150627 - protein, 369 aa, unidentified
MSNGMRWVAPEVRAAQTTGCTVLDGSSAEGPGAIVIGLDQHRAQITAEWIDTTSGEVGRARIAPAHREGVRRFLRRFAGLRVEAALEATTGWRFVAEELRAIGAAVHLAEPAETSARRGNKKRAKTDRADARHLRELLMAGRLPESWIAPDHLLDLRARVRLRHALVNQRGESQQRIHSVLYHHGHPQRRDLLTREHRAWVEQAALPATAREQITVALALIDALDLQLAPVDRELRAYARRQAGCRALMTHYGIGALIAVVILAELGDARRFSSSREAVRYAGLDITVHQSDQRRAPGHLSRQGPPALRWALFEAAQHARRTTSPDRAYYTQAAERLGGNRACLAVARKLLKRSYHTLRELGEQALTPA

SEQ ID NO: 150628 - protein, 310 aa, unidentified
MEKVIEYPQVVETGCGLDVHKDIIVGTISRGNQSFETREFGADTSSLTSLRDWCKQAGVTHVAMESTGIYWKPVFNILEEYFEILLVNARHVKNVPGHKTDKKDSAWLSKLLLSGLLKGSFIPPQEIRELRDLVRYKKKLTGQISSEKNRIIKVLEDCNIKLSSVLSNVEGPVGSRIVDSIISGECNVDVLMRFYHGKIKAGKEAFRKALTGRITPHHIRMLQFHKKRIKETETFIEDIDQEIDKAAAAYKIEIDLLQTIDGIGKESAIAVISEIGVDMSKFPNEHHLASWAGVSPGNNESGGKKKAPKP

SEQ ID NO: 150629 - protein, 351 aa, unidentified
MPMLADTVELVIGVDTHKDTHTAAVVTAATGAVVAQATVPATPAGYRQLLRLADRQDGRRVWAIEGTGGYGAGLTRFLHGQAERVVELDRPKRAVRRHGAKSDPIDATRAAREALGRDRLAQPRSAGPRAALQARLTVRRSAVQAATDAQRQLHALVTAAPEALRGRLRGLTTHQLVTACGRLRQRADWDTEITATVASLRILAHRVQVLEREIAEHTRAITTLVRAWRPDLLRHCGIGPIVAATVLCAWSHAGRCHTDAAFAMLGGAAPIPASSGQTVRVRLNRSGDRHLNQALHLIVLTRLRYDPATRAYAQRRRAQGKTNREIKRCLVRYVARQLYRLLETQPALDPT

SEQ ID NO: 150630 - protein, 406 aa, unidentified
MADIFALDVSMGKSYCVWYRGKHCLKEFSLVHTRAGFNALRDMIKKAQKPIIYFEATGIYSRVIEHFCETNGLRFCRLNPLELHLKSESLRRVKTDQKDAHRIALTVQENAFRLTVPWKKDYLQLHELSRFYNQLNADWNYRLNHLHTALEQVFPELKQLFVNRTSKLALNIVELFPHPALVRPYSRVKLKNILMASTDKRISKMKAYKYADRLIDLAQKSYPTVSGDAIQVDEVRYYARQLIALTRKKEEVIKRMESIAQRLPEYILYCSFPGIGKQTAAQLMGELGDISRFDNANQLNAFVGIDIRRYQSGTYLGQDHINKRGNPIARKLLYFTVGNMIRQQHANSNHIVDYYYRLKEKRPHPKLNKVAMVACMNKTLKCLLSMIKHHEKYHYRYTDSMVPVKA

SEQ ID NO: 150631 - protein, 350 aa, unidentified
MLYVGGDLSRKRLDWQALWPDGSLCRAGAAPPDRDGLVGLARQLRQLDEELVVVLESMTGARFVHDVLESEGLEVKIADARRAKVAAGLLGQVGAKTDRLDARLLGELARRDLVPEIWLPPVEVCGTRERSRFRMHLVRHRTMLKNRIHQTLITHGITVGEADLFGRGGRERLQQLQLPEPWQTSVRLSLELIDHLDEQIDEQERQLRREGADHPYVPLLMTIPGVGWILAYAIASEIGDINRFLSPRKLIGYTGLCPRVIQSGESDRRGPLTKNGPKWLRWALIEASTVACRHPLYAEAYQQTKQRAGKQRGAKIAQISLARKLAEASWYMLTRNQPFAPAGATACLAP

SEQ ID NO: 150632 - protein, 291 aa, unidentified
MTLYGAIDLHSTNNVTVLIDEQDKIVYEKRLPNDLELILKELAVYQKRLEGIVVESTYNWYWLVDGLMAEAYRVHLANTAAVQQYEGLKYTDDHSDARWLAHLLRLGVLPEGHIYPRAERPVRDLLRKRSQLVRHRTTNLLSIQNLLTRNTGSSMKANRVKGLDVQQVDELLADRDLALAVKANVAVMSSGAEQIKILEDRILELVELRPQFSFLKTVPGIGEILALTIMLETGDIGRFPSVGNYASYCRCVGSQKISNGKKKGKGNTKNGNKYLAWAFIEAANFAIRPNS

SEQ ID NO: 150633 - protein, 303 aa, unidentified
MAQNDRVVVGIDVAKDKVDACIRALSLRQTFPSTAQGRRKLISWLRKHKVTVAVMEASGGYERDWAKALRGAGIEVRIVDPKRVRNFARSAGRLAKNDAIDAEMIGWFAETFGEAKGQAYDAAREKLVQIVHARQGLLELQTSLQNRGEHAAPEVVQKMQGRLLKKIALELAGLEAAIAAMIKATAHFAELAEIIESVPGLGGITAAGLIAAMPELGQVSDQAISALLGVAPYDDDSGKRRGERQIKGGRRKVRNLFYMACLGAATRTIPCSRPSIVACWPKERRRRSRLSPACASSSSSSTP

SEQ ID NO: 150634 - protein, 424 aa, unidentified
MEEKELEKPIRAWIGMDWADEKHDVSLYEVGSGKEEALVIRQTPEALQEWLGQLRSRYEGGYVAVVLEQGRGGLLNALMGCEFLVLYIINPKSLSSFREAFYGSGATSDPVDAKLMRDMVRQNTGRFRAWRPDDVMTRSLRLLTEGRRNLVNQSTALTNQLTALLKGYYPQALAWIGILDSAWGCDFLDQWPTLQSLQASSRRQILRFYEKHPRASLDLDEQLKQIQNARALTQDEAVLESSALMVQALVSQLRPLLASIAAFDRKIAMIFHKHPDRPIFESFPGAGAALAPRLTAAFGTDRDRFQAAKEIQELAGIAPVTEKSGKKSFVHWRYACPKFLRQTFQEFADHSRRWCKWAKAQYELLRQRGKSHNAAVRVLAYKWIRILFRCWKDRQPYQDEFYTKALLKHGSPLSSLLAKSVENA

SEQ ID NO: 150635 - protein, 367 aa, unidentified
MKKHTIKSNALSSADVSACSTVAVDLAKNVFQIAGEDALGQVIYEERIKSREAFVAFLQKLPASVTVLMETGPGAQAWAQLLQAQGNQARILPAQHVANHRSGAKNDRNDVLAILRSGRDVNIASVPVKSNAQLAMQALHRVRQGYVKRRTALGNQIRGLLLEQGIAMAQGAVALSRNVPRILEDATQPLPDMLRELVDELLGEWSQLGERIDVLTGRLEAAAREDETAKRLMTVRGIGPVIATALLAKQTEPERFANARMFAAYFGTVPEQNSSGQKVRLGKICKRGDGYIRSLSIQGAHAVLRQVRPDSEHPDDRRLRRWLSQHGQKGAAVRLANRNLRIVWVLLQNDQTYRRQPAGCQEATMNH

SEQ ID NO: 150636 - protein, 313 aa, unidentified
MSTPNYAGIDVSKDKLDVYVTGQKSVRTYQMSPQGLEGLAGYLLGHGVCLAALEATGALERPVVRHLMEKGVPTSVVNPRRIRHHALGAGIIAKTDALDAKVIEDFARHRNPEVRPLLSSQQEHLKDMAARRRQLMKMRTAELNRQSRSTDKFVRETIAAMVEALDQQIAKLEQRADEIIAASQECREKDMLLRSVPSVGQKTARVLLSEMPELGRIDSRQAASLAGLAPYNHQSGQNNGRGRPQGGRGMVRSALYMAALSATRFNPDIKAFYARLREAGKPAMVAITACMRKLLVILNAVLARGTAWTPQRP

SEQ ID NO: 150637 - protein, 317 aa, unidentified
MEAPLIFVGIDVSKAQLDVAIRPSAQSLSVTNDRAGIKSLIKHLKKLRPQLVVLEATGGLERQVLSALIAGEIPVVMANPRHIRDFAKSIGQLAKTDRIDASVIAHYAEAVRPKPRPLPDEASLELRALSARRRQVLDMIVAEKNRLATASKVVKKRITAHIAYLEQELNDADQDLDRFIEKNAAWKENQQILCSTPSIGPVSSRTLLVELPELGALDRKKISALVGVAPFPRDSATLKGRRTIWGGRASVRSALFMATVVATRFNPVIRDFYKRLKAKGKPSKVCLVACMHKLLTILNAMIKNKIRWSENFTRQTT

SEQ ID NO: 150638 - protein, 264 aa, unidentified
MQEYIAFDSHKRYTWVEHEQVKTGKLRRYRLAHAPGAIRQALRGAKPGTAVALEATANWYWIVDEIEQAGLTPRLVHPRKAKLMMGQINKTDQLDAHGLNTLQRNGTLPTVWVPPRRLRELTRTRVVWVAQRTRWKNRLTATIALEIGAIGRFASAERLASYAGTTPRVHASGDRVRYGRTRPDVNRYLKWAFAEAANSVAVNHARCPERHVSQLYSRLRVRKGHGKAVGAVARHLAEAAFHVLSRQQPYQDPTTAQPGRTREV

SEQ ID NO: 150639 - protein, 425 aa, unidentified
MTPEPNPEFAAFIGIDWADAKHDICLQAAGSRQREFAVLPHRPDAIDEWAAALRQRFHGQAVAVCLEIARGPLVYALQKHDFFVLFPVNPATLAKYRQAFQPSHAKADPADAQIALEILLCHRDKLKALQPQSVGIRTLERLLEERREFVDEQTRITNRLTSALKEYFPLANAWFDEKASALFCDFLSHWPSLKQLQRARRTTLLTFFREHHCYQPRLIEERLAALQRAAPLTDDAAVIKPKALMVEGLVDQLRVTLKAIARFDAEIEAVAPTLPDYALFQALPGAGPNLAPRLLVAFGERRERFASAADVQMFVGVAPVTESSGKQHWVHWRLQCPTFLRQTFVEWAAQTITRSFWAGAYYRQQRAKGCAHQTAVRALAFKWIRILFRCWQLRTPYDESAYLNALQRRGSPLLASLALPSPATH

SEQ ID NO: 150640 - protein, 340 aa, unidentified
MVHVGIDLDKRSSQIAVLTEDGEVVQQRLANEVAGLERFFGQLPPHTPIAIEASGTWWWLVDLLERLGHAPILSNPKQTKAIAAARLKNDRVDAQRLALLLRGDLLPTVWIPSADLREARELVRHRIQLVWLRGVIRNRLQAMLARRNLHPTSGKSWLTQRGQRELQRLPLAETPHRIREDCAGLLPTLDAQIRRLDAELVARWGPDPRVQRLMTIPGIGPFIAIVLVLELGDIQRFAHAKQVASYVGLTPRVRASAGRVRAGHISKEGNRLLRWVLVLAATQAIRRPGPLRTWFHAVKKRRGKKVARVALARRLAEIVFHVWKQECDYFTVVRRGVVRG

SEQ ID NO: 150641 - protein, 340 aa, unidentified
MHITTIGIDLAKSVFQLHGIDEEGSIVFRKKLRRGAVLDFLRDLPPCLIGMEACATSHFWTREISALGHEVRMIPPAYVKPYVKRQKNDAADAEAICEAVTRPSMRFVPVKSAERQGVLVLHRARDLLMRQRTMVLNAIRGHMAEFGVITAQGPRKVMDLIARLRHDEDTGIPEIARLAVLALAAQLEALAGEIHILERRLMAWHRADEASQRLETIPGVGIITATALAASVPDPSVFRSGRQFAAFLGLVPRQNSSGGKERLGRISKMGDGYLRKLLVLGATSVIRRAGTNDTMTGAWVRSLLERKPVRVATVAMANKTARIAWAVLARGETYRTPVAA

SEQ ID NO: 150642 - protein, 435 aa, unidentified
MSFTSPASIDPVWAAFAAIDWASQKHSWSLLPAEGGSIESGQLDNTPEAVELWAAELRRRFPQAPIAVALEQKRGSVVYMISKYQHLVLYPVPPSMSAAYRRAFCPSGAKTDPGDANLLLDLLVHHRQQLSPIATDTAETRLLRFLVEQRRQLVQQKVGLIQQLTDSLQQYFPQIRTWFGSLDTVLVTALLHRWPTLSDLQHAHPGTLRRFFVDHACRNDDLIQQRIQAIYAALSATTDPVVIEAGTRKTAAIGSLLAAAREQIHALDKRIAAVVADHSDAELFASFPGAGAATVPRLIAAFGTDRNAWTSAAALQCFSGIAPVHKSSGNSTVVVMRHACPKFLRQTFHEFAGQSIRFSEWAKAYYRHRREDQKVSHHTAVRSLAFRWIRILYRGWKDRQLYDERLFLEAQGRRNTPRTGWNTAAGFHKPATPNS

SEQ ID NO: 150643 - protein, 462 aa, unidentified
MMNIQEQREMVEKANRILSEMKSFTWRDLETQGKFSKNDKLSFISDDMLILGCDIGSETHYVRAIDTRGRELSKKALAFENDAEGFQKARDWAVQLAAANDKKQIVLGLEPTGHYWFCLAAWMISNGISVVQVNPYAVKQTKELEDNSQQKDDRKDPKLIANLVKDGNYGMPYLPEKVYAELRRLSMFREQLMEDRNRHMNRLHREMKIYFPEYKDAFGKIDGAFCIAVLKEAPFPEDILRLGAEGLRDIWHKAKLRGRGYSRAEEIVKYAETSIGLEEGTAAGKEAVRWFAEKITELDEELAEIENKLEGKCGEIPHAENVLEIPGIGGKILAGILAEMGDISRFDDAKELQKLSGLGLVSCSSGKHKGETRISHRGRKRLRYWLFQAARSAVAHGEEYKWIHAHYTTRAGNPLQKMQSLIVIACKILRVIYTMQKTGKRYDPEKLQKDIRYPENVQTAAA

SEQ ID NO: 150644 - protein, 412 aa, unidentified
MEGETVIAGVDTHKDVHVLCLLDGLGRKIWSGSFGADPEGYDRLAEAIGDPGSCAVVGVEGTASYGAGLTRRLAELGYNVVEVLRPKRDKARPGEGKSDPLDAERAARKAASGRGCSVPKSQDGWVEAVRQLYVARRLAVATSTSCVACAKSMLTTAPGALRERFRGRERPKDLMPLLARGRKAGDALEESVLASLRSVAAVWKEARSQVESLDARIRALLEANAPALLGIEGCGTTTAAALVVAAGDNPGRLKGEAAFSMMCGASPIPASSGKTERHRLNRGGNRQANWALYEIAIKRMAYDERTRRYVARRTSEGKSRREAVRCLKRYIAREVYRVLMDPNPDGAAPEGPELAKMRKAMRVTQKQAAAGLGMSAASLGHLEHGRRRSTKLERRYYELLCELKGALPQTAY

SEQ ID NO: 150645 - protein, 334 aa, unidentified
MVCAAIDIHKHVFQAAVFDSSSGEVVEERFSADRESLSRWAEQWRGRVEAVAIEATTGWRWVWRELIECGFEVRLAEPVQARGLLGRRRSAKTDRLDARWLARLLAREMLPESWIPPEEIQQLRDRTRLRKALAEDRRRWAQRLHAYLLHEGWPCSRSRLLSAEGLRWAASLRLSEHARLQVDSLLAVMAALEAQVADVDAELRRFARGDERCQALQAIYGVGPILACHLLAEIGEASRFRRAEQITRLAGLDPVVEESGEKRRRGHLAKAGSPHLRWALVEAAVHAHRATAPDLKLYRATRDRRDSTIARLTVARKIGKRAYHALRELERAAA

SEQ ID NO: 150646 - protein, 309 aa, unidentified
MNTQNKNIVAIDIAKSSLQIQTEKKAFCVTNDSTGLKRLHLLIKKLDHPYVVCEASGGYERLLVRTLHQWAVPVSVVNPAMVRAFAKSEGIKAKTDPIDARILLKFGQTKELRQTPCPDPHIEELAALMDRRTQLSDSLAREKNRLDKEPIYTRKWIEQTIEFISQQIQELELRIEEILTMNERLSKRVTRMTELKGVGKTTACTILAYLPDLETMTRGQLVSLVGLAPYNKESGKTKSKAHIHGGRAKIRKCLFMAAQSAAQHNEVIHQYVSNLMKAGQPKKSALVAAMRKILICLRSLLKNPNFSLA

SEQ ID NO: 150647 - protein, 339 aa, unidentified
MKTITIGLDIAKNIFHAVHMTSHGKILKKKKLNRTAVLSYFAQIELSCIVMESCGSSNYWARELVNLGHTVKLIAPQHVVAYRRKNKNDYNDAEAIAEASQRDSMTFVPIKTREQQDAQIVLRIRERLIRQRTQLSNQARGMLLEQGISINRGWSAFRKVLPEVLEDANNNLTAISRELFNDLYEEFKALCERIERVEQRIKSFTETNDVCQQAQTVVGIGPITAIALYAAIGQGKHFQNGRHFAAWCGLVPRQHSTGGNQTMLGISKKGNIQLRTLLIAGARSALSRMDKKEDKLSQWAIKLKATKSFNIAYVALANKLARIVWSVIFNDKAYELKGA

SEQ ID NO: 150648 - protein, 467 aa, unidentified
MASDEDSCGRISLMPLSSPRSLTRTLSRTEECSPPVSVKHAEESFRFSSVHPRYFLLEDTMDVIVERCCGLDVHKASVSACLRCGNESEVRTFGTTTGALLELSDWLSEGGCTHVAMEATGVYWKPVYNILECSFDVILVNAQHIKAVPGRKTDVKDSEWIAKLLQHGLLKASFVPSVEFRELRDLTRSRTKLIQMRTAVANRISKVLEDANIKLGSVASKILSKSCRLMLESIIAGNTDSESLAEMSLRRMRSKIPELIEALNGRVTDHHRFMLERLLNEVDYLDSEIEMFNRRIDEKMVRFRPELERMDTANGVDIRVAQCVLAEIGPDMSQFPSDNHLCSWASMCPGNNQSGGKNKSGKMRKGNNWLRSVLVQAAWAAVRKRGTYLSAMYSRIARRRGKKRAIIAVAREILVSIYHILKDGCTYNELGADYYDRLNPDYLKKQMVRRLTSMGYTVTLEPLEPAA

SEQ ID NO: 150649 - protein, 346 aa, unidentified
MKKIFIGIDFSKEKFDATLIKAEGLKECAPSMHEVYDNKTSGFRRLVRWVKTQSEGLPIDTWLFCGENTGAYSIGLSNYLYASGYDMCLECAYKIKHSAGILRVKNDKADSKAIAEYAMRNYDKVRLHKPQSSSLTCLREVFLYRHSLVRQKVALTVRRDEKRLTQEKSDARAFMSFTSKHLITEINKAIDKCDQKIKETIAADGELREIFDIITSMPGIGVQNATCLMVYTDNFQKFDMNSRKIACYYGIAPFGRQSGTSVNSRPKVSPFANRMIKSLLSQAALAAIKSDINIQNYYQRLIERGKHPLLIHNNIKNKMLHALVAMVRDRIKYNPDYVYQTNKSVA

SEQ ID NO: 150650 - protein, 344 aa, unidentified
MGTYYIGADVHSNNTELTIEKNRTVVRRLSLPTRIPAIVEALAGFQGRKEMAIEESTMAGWLYRNLVDKVDKLVVSDPRRNKLIACDGDKDDKIDSAKLAMLLRGGYLRPVYHSLDADRLNLKHWVQLYHDRMAHSTRCINQIRARCRMEGVKVPRGVLRDEEKRRAWLDGLESAHLAKMLSVLWAGYTATGQQCRAARRQVAGLARQHPIVDKWQEVSGIGVIRAVTLFAYVDTPYRFSRKNRLWKYCGVGLERTASGKDRHGRPKPGRLKLNGRANRRLKNVVLGAATSAIHQKSNVFKDYYERLLKDGVSKSNARHAVARKMLTVMWGMWKNDSRFDAGRC

SEQ ID NO: 150651 - protein, 255 aa, unidentified
MIDQDGQVLANRNVPNGAEPILKVIGGLPLGTPAAFEACYGTSWLVELLEDYGFAPHLVHPSRCKAIASARLKNDKVDAAILGQLLRADLLPEAWIAPPPVRAVRALLRHRVYLVRLRTRLRNRIHAIVADYGYDRPAGGYWTGPGRAWLASLQLPAVFRELVEDYLGLIDALQQRIDRLDWEIRQRARSDPRVTVLTQLPGVGPFTALVILAEVGDVSRFASARQLASWAGLTPTVRGSDRVAHYGHISKQGSV

SEQ ID NO: 150652 - protein, 370 aa, unidentified
METKTKEIDLINFLYVGVDVHKDQHTAVATNCFGQSLLEKEINNSEEEFAGLVGEIKVLAEARKLKPVFGLEDTSAYGQRLATYLYRNFPVKVVSPVLVVRERKKLTHPEKSDAQDALGVAKALISEIGTLPNFSISKTSEIAKGLKDLVVDREFLVKEQTRIKNQLHRLLHASYNSAYREKFKNPFAVRALEYWSKHPVPTDLSNSILLKSQIKRKVRRLKNIKKEVIEIEEEMKILLDQMNQKLETLNGCGTVSACAVLAEIKDIDRFDSPNALAQYGGFCPRNKSSGKRIRHIKTKSGNRKLNMAVHRIVLSQLGIHGNKYSKEYFQKKITEGKNKSQAICCLKRKILNIIFMMLKHKTAYDYAAKC

SEQ ID NO: 150653 - protein, 310 aa, unidentified
MDAVFVGIDVSKDRLDVHVLPSGEAFAVARNGEGLAALNERLSGLPAATVAVEATGGFETVVAGSLASAMLPVVVVNPAQVRAFAQALGKRAKTDPIDAAVIARFIEATRPEIRALPDEQTQILADLVARRRQIVQMIVAERQREKRATVKRIQRSIGRLITALEKELSELDHELDETIKGSPAWRHNEDLLQSVPGVGPIIARTMLAEMPELGKLDRRQIAALAGLAPWTRQSGKWKGKSFIGGGRTSVRTVLFLGALAAARHNPVLKAFRQRLIDAGKPKIVAAIAVARKLLTILNAIVRDQKPWRQA

SEQ ID NO: 150654 - protein, 404 aa, unidentified
MPTYFVGIDVSKFKHTCCIISEHGEIVKKSFDFSNSKEGFDSLIEIFKSIDQSESLFQIVMEATGHYHECLFRYLVANNYLVQIKNPVVITRFKQSEYLDKAKTDNLDALLIAQYASKHPFSPSMLKSYNIERIRRISRAKYFLYQDKERTINHLHRYLDESFPELIPFLRKRGDIKRYQGRNFFDSKTTLWFLENFPSAKKFSNARSETAEKLRRMSKGAFSLIKFNELRKIAKESIGVAYQETEEIIIQLVQELKSVQERNDKLDELLIPLIDETAPNLLTVPGIGYRLAGLLISEIGDASQFPSADKIIKFSGLDVRVYESGTVKKHGAIRKRGSPLLRYALFQAAEKARIHCPEIAEFYSKKKNEGKHPICALTHTARKILRIVWALLKTGQNYSQSISD

SEQ ID NO: 150655 - protein, 317 aa, unidentified
MQELQVFVGVDVAKAELVVARHGQTGSRTIPNQAQAISAWLRELPDGACLAMESTGRHHQMLASLAQAAGLQVFVLNARDVHFYAKALGARAKTDRLDAHVIARYAAEQHTRLHRWIAPCPALQQVRSLLGQRWAVVSKRTALRQSLQGCDGAITLEVQALEAGFAALLKAIDARIVALLGQDGGVRQRQRLLQSIVGVGPQSSALLASVLAQVQFASADALVAYSGLDPRACDSGSSRGRRRLSKRGQPALRHQMYMAAMSACHTSTFKSLYQALRARGLKTTEALVVLARKLLRIAFAVWRSGQPFDPTRFAAAA

SEQ ID NO: 150656 - protein, 398 aa, unidentified
MTESSDYESVQVFIGVDVGKDTHHAVAINRSGKRLFDKALPNDENKLRSLISDLKQHGQILLVVDQPATIGALPVAVARSEGVLVGYLPGLAMRRIADLHAGEAKTDARDAAIIAEAARTLPHALRTLKLADEQIAELSMLCGFDDDLAAQTTQASNRLRGLLTQIHPALERVLGPRLEHPAVLDLLQRYPSPEKLASLGEKKLAAQLCKLAPRLGKRLAADIAQALAEQTVVVPGTNAAAVVLPRLALQLITLCKQRDEVALEVEQRVLAHPLYPVLTSMPGVGVRTAARLLTEVACRAFASAAHLAAYAGLAPVTRRSGSSIRGEHPSRRGNKALKRALFLLAFAALRDPLSRAYYTRKMSQGKRHNQALIALARRRCDVLFAMMRDGTFYTPQGS

SEQ ID NO: 150657 - protein, 343 aa, unidentified
MYFIGLDVHKKTISYCVKDAAGRVHQEGKIGSTRRELDGWIRTMPQPRTIAMEATIFTGWIYDHLLPHAERLKVAHPLMLRAIAASKKKNDRIDAGKIADCVRCDFLPECHMASTEIRDRRRTLRYRNLVIKQMVQMKNRISGLLMETGVSYNKQRLHKVGYFAELMTTNKEVHESIRPLLKLSRDMISRSQKLDYALVSSLQRDPVLKERLRRLRTVPGVGPITALTWALEIGDYTRFPSIKQAISYCGLCGDEKSSAEKVMRMPISKQRNKHIQRVLIEAAKLAPSESPELALTHARELEKGNRNRATLAVARKMVCYMLAVERRQQDFVPAEEFSRSIAV

SEQ ID NO: 150658 - protein, 343 aa, unidentified
MECYVGLDVSLKQTSICVVDRTGSVVREGVVDSNPEAISAFVRSKAPNTVRIGLETGPTSTWLWTELKRLGLPVICIDARHAKAVLKMQINKSDRNDAIGIARIMQTGWFKEVHVKDIDSHSVRALLASRALLVKIKRDLENHVRGLLKNLGLVIGRAKFNVFAVRAEELIEGRPELIAAIRPLLEARNAVEQQVSELDRKVMKLARHDALVRRFMTAPGVGPITALAFKATIDDPARFARSRSVGAYVGLTSRRHASGEVDWTGRISKCGDAMLRSYLFEAAGVLLTRVPKWSAVKAWGVRLAKRNGLRKAKVAVARKLAVILHRMWIEGTEFNWSKMEIAA

SEQ ID NO: 150659 - protein, 391 aa, unidentified
MSGTSDRVVIGMDPHKRSATIEVMAGDETVVGGGRFDTGRDGYAAMRKYAKRWPRRVWAIEGCQGIGRHIANRLLADGEQVVDVPPKLSARARVFATGQGRKTDATDAHSIALVGTRMTGLRPVVNDEQLALLRILVDRRRSLGEDHTRMVSQLHQLLLELITGGAKKSLSAAQAKALLATVRPRDAVGKARRRVAAELNADLERVYRRSKEADKELKELVASTGTTLMDLHGIGPSGAARLLVEVGDITRFPNRAHFASWNGTAPIDASSGEQVRHRLSRAGNRQINRVLHIMATVQLRNPTEGRAYFDRKKAGGKTSMEAMRALKRRLSDIVYRCMISDAVATAAGPGGHRGTTTDSSVTDSHPPAGSSEKSLPGPAETQDRTLLPAMS

SEQ ID NO: 150660 - protein, 357 aa, unidentified
MKKRLKQSLGIDVSKLNLSLSLGFLRENLIKEFESHCDVSNDLSGYKELLKWIKKSVDSTVDLLVVMEATGVYHQGIAHYLHANGYAVCVMQSGRVKRYSQSLDQRSKTDALDSKMLSMLGLERSIRLWKPPSEELQQLKGLSRERSSLLKDRVTENNRQGAISSSVYSNAKAVKRHKNRLKLLNAQIAIIEHEMQELISENEELEKKIGFLTSIPGVSFISAATVIGETLGFASIVNAKQLTSYAGYDVVLRESGNFKGKTRISKKGNSHIRAVLHMPSMTCVRCNPTLKQFYNRLKPKKAKPLVALTAVQRKLLILMYTLWKNEEVYDAEFETKKQQKHKALAARDNKLIAQLVS

SEQ ID NO: 150661 - protein, 340 aa, unidentified
MGIRAVLGIDLAKSSFQLHGVDEKGNRVLKKKLNRSHLTSFIAKLPPCLIGLEACGGAHHWVRVFREFGHTVKMIAPQFVKPYVKSNKNDAVDAEAICEAVQRPNMRFVPSKSIEQQDIQCVHRVRSLLVGRRTAQANQIRGLLMEYGIIIPQGINQLRKAIPEILEDAENTLSPYFRELLRELYEEVVHFDERIATVELKLKVISEQNEDCKRLLTIPGVGLLTATALIAAIGDITVFKSGRELAAWLGLVPRQHSTGGKQTLLGISKRGDTYLRTLLIHGGRAVVRVAHKHQDKRNQWVGEIKQRRGENISNVAVANKNARIAWALLTKKQNYCAIGA

SEQ ID NO: 150662 - protein, 426 aa, unidentified
MNCKQNERINQVEETSLVVGIDIGSASHYARAFDWRGIELARIFKFSNSGEGFERLGSWMQHLCEKNGKTKIIVGIEPTGHYWFNLSQYFREHGIKLVMVNPYAVKQTKELDDNDPSKNDGKDPKVIAKLVLDGRYSVPYIPTGAFADLRILSSDRLRIVKEMGQIKNRFARWFAIYFPEYTEVFGSYESKSSMLLLKTASTPKSILALGVEGICRIWKDAKIRAVGEKRATTLYETAKKSIGQDEGTEAAEIDMALLLEDYEAKAKQLASVMAALESTCRKIPGAEKLLAIKGIGIISVAGFLAEVGDLRRFESPKQIQKLAGLSLRENSSGKHKGQTTISRRGRDKLRQVLFNAMIPLLATNEEFRSLHQYFTTRTVNPLKKKQSAIALCNKLIRVFYAIMVHGVEYDGKKMLSDIHRNVPSLA

SEQ ID NO: 150663 - protein, 342 aa, unidentified
MQIAILGIDLGKNSCSVVGLDVAGRVVLRRRLRRDGVIKLAAGMSGCVVAMEACCCAHHLGRLLRDHGHQVRLMSPEYVRPYVKAQKNDDRDAEAIAEAATRPTMRFVELKSEAQLDMQSLHRARDRLVGERTALINQLRAVLLERGIVVPQGRRKLERYVNALLAEGEIRLSPRTGLLVEDMRAEWRELDRRISAFDDEFVAQARTDETARLLTSIPGIGPLNATALTAAVGNAQTFRRGRDLAAWLGLVPKQVTTGGKPKLLGISKRGNGYLRKMLIHGARAALPTLSKGETPLGAWLRGLLARAHVNTVVVALAAKLARIAWAVIRSGERFDMKAATAS

SEQ ID NO: 150664 - protein, 351 aa, unidentified
MDRYIGLDAHASSCTVAVLGPSGRKLQCQVLETNAKALIDFLETIPKNRRLIFEEGTHSAWLYEVLAPHAQETVVVGIRKIRGPKSDERDAVALAESLRIGNVHTRVYKKRGEFAALGHMARAYQTLVTDAVRTQNRIKSLLRSRGLTASGKRVYSLSDRDRWLSELPNQARSQANLLYCQYDALQELRKRAEKEMLEEARKHSVYRVIKTCPGLGKIRTAQLMPIVVTPYRFANKRQFWSYCGLGIVMRSSSDWARTQDGTWVKVPIQKTRGLNRNFNRSSKHIFKGAATTIIMRSRPDDPLYQHYQQLLDDGTKPNLAKLTISRQIASIVLSLWRSQEVYDPRRLVRTT

SEQ ID NO: 150665 - protein, 456 aa, unidentified
MEKEIETQAFEIVHPNAAGIDVSSEDYFVAVPIDRDEQPVRRFGCFTESLLEIVDWLFKCRITSVAMESTGVYWVQLFMVLQDHGFEVFLVNAQQIKNVSGKKSDVSDCQWIQQLHTCGLLANSYQPDNITKELRTYVRQRKKLTESASKEVLRMQKSMTLMNIKLDRVISDIMGKSGRNIIQAILSGERNPEALVHLTDSRLKASKEELIKSLEADWRKEHLFTLQQSFEIHEFYQAKIIECDKQIEQALALYPRAEIINKDQDSFNPYKKKQKQKTDFTFDPDKQLKEILGIDVTRIPGFSSVTAITILSETGKDLKKSFPSKKQFLSWLNLVPNNRKTAGKIISSKVKKKKNKTGQSFRLAANALKNSKCPFGDYFRKVKSRDGHGRAIIATASKLAGIYYTLVTTKQEFNISVYMQSYKINIQKKLVKLNKKIIDLQNQLLYVPENQVYATT

SEQ ID NO: 150666 - protein, 431 aa, unidentified
MSKYYNSPVIGVDVAADFSVATILAPDGSTLKKAFKFKHDAKGFLFFLETIKKIEETYDRPSPVFMESTGIYHLNLFYFLINNNVQTFVINPLITNCNKNKEIRKVKNDKSDSYSIATMGKFENIKTCNMLDVNIFELRMLCREYYNLVDERGNIKKQLASVLRLSFPGYQNIFSDTCGKSSMAVLRAYPSPQTIMDANPDDITCLLRKVSKRGLTWSANICKKLIDVAQDALKICFLSTDAASKCFRLMNLYDLYTLQIDSVESQVYAFTQSDRVSSKLKNCIRLLDSIPGIALMSAITLIAEIGDIDLFSKPKQLVAYFGIDPSVNQSGKFNGTKNKMSKRGSKIGRKVLYAIALASVRNKPNGVPNNLVLQQYYQENLKGKAKKVALVAIMHKLLKYIFSVLKKQSEFVIRDPKIHKQMFLEHKLLVA

SEQ ID NO: 150667 - protein, 372 aa, unidentified
MKQNILHVGLDVDDTQYHGSAFNKDTGEVIDFKCRPTLKGLLQQLDRMARHFSGCTIKLCYEASYVGYCLQRDLISNGVHCDIVSPSSIPSPRGKAIKTDRIDAGYLAQFYANGLLTIVQPPDAEQEQDRDLLRSRQKLLQQQTQLRKHLQSVLRRNGLHYKAETGNKSHWTKHHYCWLARTIDGLSGSLKVNLELLLRQLKGLNEILAEYGQQVEVLASTPRYQQAVQSLTCYKGIKNIFALTMITEIGDVKRFPHPRQLVSWIGMDIREYSSGGKHNRFGITKHGNRYIRTAFVEANQRGYRTTKIGQDLKARRKDTAPELINIADRCLRRLSKKGNHLLLAGKHPNKVKVACAREMVGFVWESLNKVAA

SEQ ID NO: 150668 - protein, 387 aa, unidentified
MTHFVGIDIAKYEHVASVYNSITGELVIDSLHFDNNDKGFKSLLSSVSKLDDLVFGFESTAHYHQNLFNFLSSKKYKCFLLNPIQTSRFRGLSIRNAKNDNIDSHSIAQFLMFSYRELIEQEFSHNDLKELCSQRDALLTQSSALKIQLLSYLDRVFPELESIVGKSSIHSKAIRAILVKYSTAQAISKVRIDHLINLAKTASGNKFNEDKIHKIKDAAKSSVGFHSSALALKIKQSIESLEHLKRQINEINHEISNHPLVTGAPLHKIKGMNSIEIAYIISAINNISRFDSVKKIVAYAGLDPIIRQSGTFCATRTRMSKRGNRLLRYALIWAANNVRKHNKEMEQYYLKKRSEGKNHYNALGHCAVKLIRYIYFVMKHPEFDFVN

SEQ ID NO: 150669 - protein, 388 aa, unidentified
MSPFFDASKSLTALDQDSTLVAVIEMSQTKWLIAATVPGFERNPLKKLDADPDSVLRLLRRWRSEAIQAGREVRRIVVAYEAGRDGFWLARWLQARAVEAYVIHPSSVAVSREHRRAKTDRLDTELLMRAFLGWLRGEKRHCSMAAIPTINEEEARRPNRERDNLVRERTRIVNRIKAILARFGIRAFKPNLRKAAEKLEALHTAEGMPLPERSRAELRRNLGRLHLLREQIHEIEQERLRQLSVVPDTEKGPLAMVRLLSRIIGVGIETADMLVNEILSRGLRDRRAVARYAGLTGAPDESGQRRREKGLARAGNARVRYGMILLAWRFLQFQKDSALAHWFCARTADGRGGTRKTMIVALARKLLIAFWRLVTTGEIPTGVALRPL

SEQ ID NO: 150670 - protein, 340 aa, unidentified
MQVTTIGLDLAKNIFQAHGIASDGTVAFNRALRRGQVLPFFAKLAPCLVGMEACGTSHYWARELSKLGHEVRLMPPMYVKPYVKRGKTDAADAAAICEAVTRPTMRFVAIKSPDQQALLSQHRARQLMIGQRTQLSNMIRGLIGEFGCIVAKGLNHITAFAEALRSGEGPSLLATAQDVIVSLCEQLLALHQRIRMLEKKIFAASRKDARVRLLETIPGIGPVTASAIVATVGTPDQFRTGREFAAWLGLTPLNRSSGGKERLGRISKMGDRYLRRLLVAGMTSRVRAARARPDRVEPWLASLLERKPVRLATVAMANKAARIVWAVLTRNEPYKQPVAA

SEQ ID NO: 150671 - protein, 377 aa, unidentified
MLYLAIDQHARQLTVNSRNEAGDVILRRQVSTKPDQVRKFFAEFRERAAVEGGYMAILEVCGFNDWLLAMLKEFGCAEIVLVQNEHRLKNKTDHRDADHSGAALWMNRLRILRGERLHDLRRIEPPSPADAAARQLTTMRQRLGVQRTRARNRIAGLLKKHNLQHDCPVKLLQTKTARAWLAKLELPAIDRLEMDQLLTRWKLFDEQIAEVVEQINQRKQTHSGAALVSTVPGLGGYGGLAIAARIGDINRFSTPASLTNFFGLTPSCRNSGESGQRLGSITKRGSTIVRFLLGQAVMHVLRRDPDLRAWYLGVKKRRGSKIARVAVMRRIAVAIWHMLKFNEPYRSGGSPARREAGKRSRGQREATASAVAARGAT

SEQ ID NO: 150672 - protein, 417 aa, unidentified
MSYKIAGIDVHKRVLMVVVIDASTPEEKPERRRFTTMPSDLHRLSIWLREHRVEEAVMESTAQYWRTVWLELEPYLRLQLAQAFSNRAPRGRKHDFKDAERLVRRLIADELILSFVPGEEQRTWRNLTRMKTQLNRDRVRLQNQMECLLEEMRIKLSMVVSDLLGASGVRILRALAQGESDSKKLALLGDNQLKCSEEQLVDALTGRPQPMHREMLRLQLERLQLIDRQIKELNGLIAQAMKPHQEAVIRLAEVPGLGVDSAQLVIAEVGVQASTFPSAAELTSWVGTCPGKDESAEDNHSSRSAKGNKYLRRVLNQSAHAAVKKKGSHFQAVFRRLLPRLGYKSAIWAIAHRLCRLIWKILHEGVRYIERGSESDPKLREHRARTLARALRKLGYDVAITPINPSTAQKAMQTYGV

SEQ ID NO: 150673 - protein, 331 aa, unidentified
MNTSQLIVVGVDVSKSFLDIAWGSKDPKPVRFNNDAQGMQKALKRIRRKKPHLIVLEATGGLEKPFMALLQSEGWNVARIQPTRIRQFARSSGTFAKNDRIDARIIAAYGEAFDPRPTPKPSPQQERLAALVRRRTELVEMRVSEGNRLSTAHPSVRDSISQHIEVLKEQIEKVEQEIEALVAADEEFGEQVAIMESMPGVGRVTAVSLAALVPELGKLSGKQISALVGLAPYSRDSGRKHGRRHIYGGRADARGALYMAALSAIRFNPVLKEFYQRLKAKGKPFKVIIVAVMRKMLVVLNAMLAHKRVWRIPERKSEAVPAQVSAPLPVA

SEQ ID NO: 150674 - protein, 330 aa, unidentified
MENIALDVHKHYTWARVENREGQQLYASRLAHSRGNIKNFIERWTPGSPVAVETVGNWYWVVDEVEAGGGKPQLVNARLAKLMIGNVNKSDKLDAKGLNMLQRTGTLPTVWIAPSGVRDARELPRTRMVFSRQRTQLKNRVHSTLSKYGYVVDEVSDAFGKRGRQIIEELSNKLPPHTKQALDHVLDQLDEVMENLKAIETDMIQVFAPCPQTSWLQSLPGVGQILAVVIWTEIGSIERFNRAEQLASYSGLVAREHSSGGKFHYGAIRRDVNVYLKWAFVEAANSAILNRERCDYQHIGRLYQRIKPRRGHNRAKVAVGRHLAKPVFGC

SEQ ID NO: 150675 - protein, 371 aa, unidentified
MVKIAKYVGLDVHKDTIAIASCTGGPLTEAKDEGTVPHDLPRLLRKLLSLAPAEHLRVVYEAGPTGFGLCRELRAHGIACMIVAPNRVPQLPGPRIKTDKRDARYLAWQLRMGSLSGIAIPDEELEALRDLIRTREDLLHARRRTRQQLAGLLLRHGMPWRGKHSWGIQHVDWIRGLRLASEAQELAKKHYLQAIAYFDERIDELTADVERLTPELQGVHGRLYRWLQAMRGVSTIVAATLVCELGDLRRFKTASRLMSYVGMVPREHSSGPRVWRGSITKAGNPHVRRVLIEACWSGRLRPTRSKALLRRQTGVDPAVIDIAWHSQKRLHDRYRRMRARGKPQNVTIVALAREMLGFIWSIGQHVEQQPA

SEQ ID NO: 150676 - protein, 360 aa, unidentified
MKKISKQSQVVKAAKPERSVGLDLGDRFIHYCLLDQEGEVMEEGRMANSETALRKHFADEAVMRVAMEAGTHSPWVSRLLKRLGHQVLVANPRKIRAITGSESKNDRNDAEQLARFAAFDPKLLSPIEHRSEQRQQDLNLIHARATLVRARTMIVNVVRGLVKSAGDRLPNCSTESFAERTKAAIPASLREVSMPLLKQIGLLTAQIDLMDKQIDKLGKKYPEISILRSTPGVGPLVAACYVLTLDNPNVLGDNRQAGAFLGLRPRQSQSGDSDPQKRIARTGNTYLRSLLVQSAQYVLGRFGPDSALRRWGLKLAGSGGKRGKKRAIVAVARKLAVILHSMWRSRIVFQAFPQSATGVA

SEQ ID NO: 150677 - protein, 417 aa, unidentified
MKCFVGLDISSTKLDVCIMLSDTSTPVTASLSNDLSGATEIKNHILDLNHTYHFERIVIGMEATSLYSFHPAMFFHEDRQLKELHVEIMVEQPNKIKKYRDAFEENKNDTIDAFYIADYFRIERFSPSFLKEEKYMALQHLTRTRLQIIEQLTRTKQHFIENIYYKCNTLAYQFKKEELSTNLWSSTMMTLMTDEMTLDELANMPLQELDDWLQKLGKGHFKDSEKLAQTIQAAIRGSYRLSKLQQDSVNVILGLLAREIRNLEKMIKEIDKAIEDMVETIPEYQCLTSIPGVGKVYAAGIIAEIGQIERFKDHPQVAKFAGLNWREKQSGNSNSQHTSLVNRGNRYLRYYLVEAANSVRRYDDEYKDFYKKKYHEVPKHQHKRAILLTARKFVRLVDVLLRNHQLYTPQRRIMEDN

SEQ ID NO: 150678 - protein, 417 aa, unidentified
MQVVRPICCGADIHKDIIVATIATSNQNGIAEYIQRKFCTQNYDLINLKSWLKEHNCFEFAMESTGKYWIPIFNVLEDEIKVYVVHPKYTKSIKGKKTDKKDSKWIAELFRHGILTFSFIPPREIRELREISRYRIKLVAMRTSERNRYQNAMTVSNIGLASILSDPFGKSSKAIMEEVLKSSSLSEGKIRSLLNKSAKKKAKEVFASLEGSRIEPDQRLKMTVSSEHMNQIDSHIDTLELDLVQRCLPYANLINLLIDIPGISYISAIAVIAEIGIDMSVFKSSKQLTCWAGLAPANNESANKKKSVRISRAGTYLKPLLVQCALSAIKSTSNPYYRIKYNIIKKRRGHKKAIVAIARMILVNIYAILSTGEVYNPCDFKEVTSPKPAKKEMTIENALFFLQAQGIDTSALVLNVS

SEQ ID NO: 150679 - protein, 317 aa, unidentified
MANDSYFVGVDVAKDTLDVAFVRGEEETTSQLSNTPAGWAALVATCKERSVERIVLEATGRYERRVVAELMAAGLPIVVINPRQTRDFARATGRLAKTDRLDARGLARFAEAIRPPVRPLPDEKAAELQEKLARHRQLVQMRTAEGNRLDQVQSSPVRKSIQAILKVIDQQLEAIDQDIDQRIEESPAWREKDRLLQSVPGIGPHTARTLLSSLPELGQCSRQQIAFLVGVAPLNRDSGKMRGARTIYGGRGHVRQALYMATLVATRYNPLIRQHYQHLLEVGKKKKVALVACMRKLLCILNAMLRDQKPWNSALCP

SEQ ID NO: 150680 - protein, 448 aa, unidentified
MSHGNGVSRGDRNRNARLARLRELVPTTNAIVGIDLADDKQMIVVTDHDSRVLARKTFRCKAWAMGTALDWARPHAVKAGFAGVTVACEPTGHRWRILGQLAAERGMPFVCVQPSISSWSRRAEDLTFDKTDDKDAVLIARLTAQLRCYAPEPVDETWGRLRHLGARRDQLIVDLVKQKQQIRDLLECVWPAALTVAAQPLKSRTWPATLAVILGRDGGDLARTRRLGLDRLQAQVDREIGRWGGQRVCRRIVTGLYQALTDTAGVLAHRRGALERVDLLLDDWQHTRRKLADIEQRMLTVLDELALTDLVTSIPGLSAVGAAAILAQTGDLTRFTSARAVVKHAGLAPREKLSGTFTGRAKLTGQGRPGLRLAAWRTVWGAQAHNPVYAARYTHLTTREHNRLTATQAQTVIAAAILRQLYAVVTTGRAWDPVIATHGTRPRHTAAA

SEQ ID NO: 150681 - protein, 315 aa, unidentified
MEQPATTPSFIGIDVSKDRLDVHVRPSGQAFAIARDSKDLEPLVSDLRALAPALIVLEATDGFELTVAAALAGAGLPLAVVNPRQIRDFARATGRLAKTDALDAQIIALFAERIRPDPRPLADVDSQTLAELVARRRQVIEMIGMESNRLHQARDLRVQRTIKATLKTLEAQLAQLDREISDTVKGSPAWRAADDLLTSVPGVGNITSFTLIADLPELGQLDRRRIAALVGVAPINRDSGQMRGRRTIAGGRTDVRNALYMAALSAIRWNPVISEHYQSLVERGRPKKVALVACMRRLLGILNAIIRTKTPWQCA

SEQ ID NO: 150682 - protein, 340 aa, unidentified
MPSMQIGVDLAKSVFEVAVSTTPGRVQERRRLSRAALTSFFAAHPPAEVLLEACGSAHHWGRELQRFGHTVRLLPASDVARYRDGNKTDRADAKALLEAARNERISRVPVKSVEQQAIVALHRLRQGYLQTRTARINAVRGHLREFGCLIPQGALQVLPQARAALEQETVPALLRPALRCVLEEIAALEAQAEAVRSELTRLADHMPDAQVLLTVPGVGVLTATALVAFVGDIHRFRSGRDFAAYLGLTPREASSGYVRRLGAITKRGNTYVRMLLIHGARSALRAGTVTRHPDDLRVWARALAARKGHNVAAVALANKLARVCWRVWYDQRPFERREPQ

SEQ ID NO: 150683 - protein, 384 aa, unidentified
MQKPNDLNQSRIVLKQDSTLIAVIEMSLRSWLVAGIVPGVERQPLKKLAVDESALLKLLNRWREEAEKAGRRIERITVAFEAGRDGFWLARWLRARGIEAHVIHASSVAVSREHRRAKTDRLDTELLKRALLGWLRSERDHCKMVAIPTTKDEDAKRPSRERQSLVGEQTRIVNRMKAALIRLGIRGFNPKLKKAAGRLEDLRTPEGEPIPPNTLAELHRDMQRRRLVSDQIRQIEEARLERMEQAPGDGPHAMVRLIARVIGVGIETADMLVHEVLSRKLRDRRAVARYAGLTGAPDESGSKRREKGLAKAGNARVRGGMIQLAWRFLLFQKDSALAQWYRTRTEGGRNRKTIIVALARKLLIALWRLVTTGEVPAGVVLRAA

SEQ ID NO: 150684 - protein, 371 aa, unidentified
MDESSKTLYVGLDVHKDSIAVAYAPEDRGAEVLSLGAIGTRQCDIDKLIRKLQAKGATLVFVYEAGPCGYGLYRYLTGKGLACHVVAPSLIPRKPGDRVKTDRRDAITLARLMRSGDLSSIYVPGIEDEALRDLSRGRDDAMQDLKRSKRRLKSFLLRQDIRYEGRASWNAAHLRWLSEVVCPTPPQQIVFQEYVRAVSEQQERRQRVECELHEAVKGWRLYPVVEAIQALRGVELTGAVILMTELGDITRFETPRQLMSYLGLTPSEYSSGARRHQGGITKAGNRHARRALVEGAWAYRYPAKVSRHLQLRLEKLPAEVQAISWKAQVRLCRRYRQLTARGKHVNQVVVAIAREMAAFAWAIARLVPLAS

SEQ ID NO: 150685 - protein, 394 aa, unidentified
MILVGIDIGKLSHMFCVMDSSTGEFLVNPISFKNNKQGFDSFMDSINSFSKTDVLIGMEDTGHYHFNLLKFLLDSGYAVALINPITTDMTRKMQLGATKDDDLDARLICDVLASNQRRKGYRISKIDSFDLYEQKRLTREHHDLKEQLNVYTNKLQKCIDIVFPEFNSLFRSKYGSVYMNVLKTFGSADSIAHADIRNIRKCFEANRKGRRISLTPEELKEAARNSIGFPSKAEVIELRHLIDIIELINVQISEVDKKIEEFSVQNNSPILTIPGISHFSGTSILAELGDLRNYSKASQVIKFAGVSPSKYKSSQYEAQHTAITKKGSRYLRKTLYQVILPVIRYNPVFNAFYRHKLSQGKGHRCAQGHCVRKLLRIIYHLVTTDQSFDPKLLR

SEQ ID NO: 150686 - protein, 371 aa, unidentified
MEESSKSLYVGLDVHKESIAVAYAPEERGTEVVSLGAIGTRQCDIDKLIRKLQAKGAPLVFVYEAGPCGYWLYRYLTRQGLSCHVVAPSLIPRKPGDRVKTDRRDAVLLARLMRSGDLTAIYVPTVEDEAIRDLSRGREDALRDLKATKYRLKAFLLRQDIRYEGRANWNAAHLRWLSAVVCPTPVQQIVFQEYVRAVTEQHERVQRLETELHEHVKTWRLYPVVEAIQALRGVELTGAVILVAELGDLTRFDTPRQLMSYLGLTPSEYSSGERRRQGGITKAGNTHARRALVEGAWAYRYPAKVSRHLQLRLEKLPAEVQAIGWKAQVRLCKRYRQLIARGKHANQVVVAIAREMAAFAWAIARIVPLAP

SEQ ID NO: 150687 - protein, 406 aa, unidentified
MNMNAVGIDVSKRKSTVAILRPGGKVVTKPFDVPHLSADFQSLKKLIRDLDGETRIVMECTGRYYEPVARELSQAGFFVSAVNPQIIHDFQGQDNPLRKIKTDKADSVKIARYTLDSWANLKQYNLMDELRSQLKTMNRQFDFYMKHKTAMKNNLIGLIDQTYPGANTYFDSPAREDGSQKWVDFIDTYWHVDCVRKMSLSAFTDHYQKWCNRKKYNFSKQKAEEIYGKAKELIPVLPKDSFTKRIIKQAIDQLNTASQTVEQLRSLMNETASRLPEYPVVMAMKGVGSSLGPQLIAEIGDVTRFTHKGAITAFAGVDPGVNDSGDYSQKSVHASKHGSPVLRKTLFQIMDVLIKTKPDDAVYLFMDKKRAQGKPYYVYMTAGANKFLRIYYGRVKEYLSTLPAPD

SEQ ID NO: 150688 - protein, 323 aa, unidentified
MNTAPIVYVGVDVAKASLRFDAGDGYSKNVGNQPAAIKRELARLRKSVPAGSALQVCFEATGCYTRKLKHACVEASVAASTLNAYKVKQYARAMSVSAKTDPIDARMIRLYSEHRKPGPDAPMTEGQEEMKELAGLRALYQKQEGMLRGALESAGSACAVKSVKASLASVERQISRLEARLEELRDADAKRAAVCAELAKIAGVGDLTALLVTSLVPELGTLSRRRSASLAGLAPHPEDSGTIHAPRHIKGGRFHVRRTLYMAALSASQFNAVLKVVYERKIKEGKPFKVAIVCIMRKLFVHMDRVAAKVLKDLAATPPLATA

SEQ ID NO: 150689 - protein, 340 aa, unidentified
MSCYLGVDLHRNCFTVCTLKEDGQSELRKWSIHALGEFAQTVQATDAVAVEATGNTRYFCQSLKDRGCRLVVVNPQQFQVISRSVKKTDTHDAKTLAQFLARDLLPEVRQKDALLAEIASLLQTRDKLVKLRTTLKNKINNLLAGRGILIRRESLSSDKGLEQVLQASVIGLERVELEVLIGQIRHLNGSIQKLEAAIKKQGPKLPGYQNLKSIKGLGDIGSSTLLSTIGDINDFASEGKLAAYFGIVPRVTNSNATARSGRITKRGNKLGRTTLVQCALIAMRYSPYLAHYYARIKAARGTGKAIIALARKFLGIIYRTLKNGWVFEDFPRFVIAPAEG

SEQ ID NO: 150690 - protein, 470 aa, unidentified
MSSAIGIDPDSTGLVCALVDSQSPRVTTKGFLVTEEGLKDFLCWVRQHGEALVVLEGSHGQSRPIEKALRDAAIVFYSFKPADADKFRKAVLGQNKDNERDAESVARYALALESQGRLERHKKMWFPDMDLQLLTRRWGSLSEQITAEVNRLWKLLRYASADLYLALGGKNPHSDCGEHKALKNQGILTLLISVPDIGLWKTLSEEQIFQAMGGDNYKGRRQLIQELRRVMPSFPSLSHPMATLLKASALQIQRLREEQQDLKRALEDLSPARADIQKLLGIRGIGVTTAATMSAELIDIRRFSREDSLACYSGLGMNEHSTGQTLRMVPTHQFNRRLKDAFMTAALNFVLYNPDSHLAGYHKNLIKRGMSRLQANKRVARALVRVIYRLLVGVATTNTGTQAEEDLKRGESEVASGTSRSGRSHKSNTSLSAPKRSKAKRPTEVKATESVITPVTKARRPRRKTLKKIA

SEQ ID NO: 150691 - protein, 356 aa, unidentified
MNYVGVDLHKNRFTAYHTVNGQYRNYGTNDIGIASFIEECKRTDGTGAIVVGVESTGNTRYFKRQLEEAGIQVKVINTMRFKVVTESVKKTDKHDAQTIAEFLEKDMLPEAWICSDYSEMLRRLLHVRRQLVKAIVTTKNQVHSILTAYGYADARATLQSKRGRHAVLDTLASTEIGLVVHLLMEMIDSLHEKVKQIEGKIEELVKGDKAIELLQTMPGCGRIIAWMIRAYTDDIRRFMSAKHYAAFVGVVPYVHNSNATIRHGNITKHGPEPLRTAFVQLVMGMRRIKQVQDYRLMKRYKALQETKGSGKAIIATARKLTHIVWHMLTYNEPFDASLQMVIGYENNRSMQEKQLA

SEQ ID NO: 150692 - protein, 322 aa, unidentified
MSQPNPLCVGIDVSKATLDIAASSDVAQFTVSNDSDGFNAIITGLRRHSVALVLMEATGGLEVAVACSLQAEGFEVAVVNPRQARDFARAMGYLAKTDRIDARVLTQMAEVINRHPERKRFIRALPDAERQALAAMVVRRRQLIAMLVAERNRLHPSHPQNKKSINTIIKALEDELARLEKEMDSHIRNHFKEIAERLSSIKGVGTMTVSAMLAEIPELGTLSRREISALIGVAPVNRDSGTMRGRRTIFGGRAGVRSALYMAALVATRFNPVIKTFYVRLLAAGKAKKVALVACMRKLLTILNAMLRKNEEWDESYHHVAP

SEQ ID NO: 150693 - protein, 416 aa, unidentified
MLKIVYPICCGLDVHKSSVFACIAATDENGVTTYRNRKFSTFTSELRELAEWLAANNCKDVCMESTGKYWIPVWNILEATCNLVIAHPKYVKAIRGKKTDKKDAKWIADIFKHDLVSGSFIPPADIRQLRDLTRYYRKLVGFNTGEKNRAQNCLTVSNIKLDDVFSDVFGKSATAITNHLLEHPGEDFDVAPYVDVRCKTPIPKIQEAIDGSIGTEQAEKMKIIRSHMDSLALCKAELESVVLGLAQKYLPQLELVLSVPGIRDPFTAISIISEIGIDMSVFPTAKHLCSWAGLTPQNNESAGKKKTTRISHAGTYIKPLLVQCALAVSKSEKHPEIRNRYLALMKRRGHKKAVITIARMLLTAIFHILKKNEPYNAELYRRADTPPAHRELSVDEAVYILQRQGYLITVPHTVTK

SEQ ID NO: 150694 - protein, 368 aa, unidentified
MSTLRFVGLDVHKDTIVIAVANEGQSEAVTLATIPHDVTKLVKQVSKLVDDKKHLRVCYEAGPTGFGLSRRLKAAGINCVVIAPSLVPQQVGIRVKTDRRDARRLAHFLRSGDLVEVWVPDEKTEALRDLERSRDDAKNAERVARHQLDKFLLRNERVYRDGRSWTQKHSDWLKQQKMGDPCKQCVMDDYVKAVDDATERVKRLSKDIELFVRGTALEPLIRAFMAFRGIKTLSAVVIAAEIGDLRRFTTARQFMAFLGLVPSEHSSGKSIKRGALTRTGNVHVRRILIEAVQHYRHRPTLSAALRERQEGISPEVISISWEAQKRLCKRLNYLIEQKKPRNKVIVALARELAGFIWAVGQVSKPLAA

SEQ ID NO: 150695 - protein, 341 aa, unidentified
MEYFAAIDVSLELSSVCVVDGTGKIVREGKVASEPEALAAWFTGSGLEFTRIGLEAGPLSQWLHAGLTAAGLPAILIETRHVKAALKAMTVKTDRNDARGMAQLMRMGWFRPVHVKTLPAQEVRALLTARKLLQGKLHDIELGIRGLLRGFGLKVGQVSKGRYEARIRELATGHPVLEPVTAAMLQARASLRAEYGKLHRLLLRIVREDTVCRRFMTVPGVGAIVAVTYKTAIDDPARFRKSKDLGPYFGLTPSKYQSGEVDWTGRISKVGDVMVRTALFEAANVMLSRVTRFSALKAWALRIAKLRGVKRAKVALARKLAVVLHRMWVDAADFRWRKAAA

SEQ ID NO: 150696 - protein, 367 aa, unidentified
MLYPKIYQKGGRMKFYVKQHKYYCGIDLHARTMYVCIIDKEGAIVKQKNIESAPGEFLSIIESYREDLVVSAECMFAWYWLSDLCRKENIPFILGHALYMKAIHGGKAKNDRIDSHKIAALLRGGMIPMAYVYPPEMRATRDLLRRRNHLMRKRAELLAHIQNTNHQYNLSPFHKAIAYKGNREGVAERFSDECVRKSIEVNLSLIDHYDQLLRKLEYYIDKKAKVHDPEALFRLRSVPGIGHTLALIILYEIHDIGRFPRVQDFVSYSRLVKSAKESAGKRYGTSGAKIGNAHLKWAFSEAAVLSLKQSPEIKKYKAKLVKKHGKAKALTILAHKIGRAVYYILKRKEVFNIDRFLNKQLIQTGRA

SEQ ID NO: 150697 - protein, 424 aa, unidentified
MKVTYQTCCGVDVHKSFLVATIVKTTGGIEPSYQKKRFSTFNNSILEFKQWLLDNHCHDVCMESTGKYWVPVFNLLEDKINVVIANPKWVKAVKGNKDDTKDSKWIGDLFRLGLVKGSYIPCKKVRILREYTRYRYKLVSCRSSEKNRYQNALTVCNVALDSIVSDIFGKSSTSIIDYLLEQSGTSINHEEIASKLLRSLKSKEDAVIESVEGYQMTDAQKYRMRLVRAHMDYITAEINDVDKMIENMISSNPDFENAVQFLCTIPSVKRDSAITIISETGTDMSQFSSSKRLCCWAGLTPGSNESAGKKKSVRITRAGVYLKPALVQCAHAAVKSDKSPYYKKKYESLVKRRGKKRAIIAIARMILTAIYQMLSTGEQWNPSDLYKIDMPVALVEKQKAKAIKQAKKLLQREGLLPPDEPLAS

SEQ ID NO: 150698 - protein, 302 aa, unidentified
MIIIRADYHPGFQQIAFVDTDSGEFQERRLQHREEAEKFYRDLAAQEMQVRVGMEASGQARWFERLLSELHFELWIGDAAEIRTMRVRKQKTDRQDAQLILQLLLEDRFPKIWVPSWENRDLRQLLWHRHRMVQARTRIMNQLQSVALNEGLRWKKRLWREHGRQQLEAFRLAPWASRRRRDLLELMDRLNPTIAELTQAIEREVEKCPHAKRLMTHPGVGALTALAFVLIIGQAERFACGKQVASYLGLVPLEDSSGNRRRLGHITKQGSSMMRFLLVEAVQVTVRSVPEWRSKYLHLMMR

SEQ ID NO: 150699 - protein, 328 aa, unidentified
MTMNPAPRVFNHIVAFDVAKESLAIHVLPGDERQAIANKPKAIRKLLIAQIRRNAKLGLGPLLVVCEATGGYERHLLEICAELGIAAHKAHGSRVRNFAKYLGLIAKTDPIDARVLALFGLKTENLRLHTPLTPALTALIDLRARRDQVQAMLLAETGRLEHVRYAGVTRSLKEHIASLRKSLAALEAQIAAHIQANEALARKAALMRTLKGIGPGTVAALLAYMPELGALSRTQAASLAGVAPFDERSGKLSLPSHIEAGRAAVRRALYMAALTATRHNPIMKSFAERLKRNGKCAKVVITAVMRKLIVTLNAILRSEKPWRHAQTA

SEQ ID NO: 150700 - protein, 334 aa, unidentified
MLYLGVDHHMKTSHLTVTDESGQILKRKGIATRQDELLKALEEFEGEPIKAVLEASYSWGKMFDWLGEVADDVILAHPQKVRAIADARIKTDAIDSETLAHLLRADLIPEAYACSAERRAVNRVLRQRMFLVRVQTMFKNRIHATVNQHDLSRPKVSDLFGAQGMSWLSSIDLPYPDNLILSEDLRFLSEVRARISATEGLIRDLSRGDQAVKLLKSIPGIGDFFSVLIRYEVGDITRFRSPDKFASYTGLIPSTYSSGEKTFRGKLTKRGNKYLRWAFIEAVRPAVMTSPELRAYHDRIRRRKSAGDARVATARKLACITWYVWTEQRLYEIR

SEQ ID NO: 150701 - protein, 416 aa, unidentified
MNAAGIDVSSRKSTVAVLRPFGEVVRLPFDVAHSTEGLASLAEQLKALDGETRVVLEHTGRYYEPVAKALHEAGLYVSAVNPLLIKEYGANSLRRVKTDKADALKIARYALDNWTDLRDYTPMDTIRYDLKTLNRQFQLASKQRTACSNNLIALLEQSFPDIRKCFDSPVRSDGTQKWVDFAHTFWHVDCVRKQSYNAFSERYRKWCKRHGYFFKQNNAEEVYALAKNAVVLVPKSKVTKVLVQEAANQLTSTSRSVETYRTEMERLASLLPEYPVVMKMYGVGKSFGPQLMAEIGDVRRFERKQALVAFAGIDPMPNQSGDKNVRSNRSSKRGSPYLRKTLFNVMGIYLKCAPLDEPVFQFLDRKRSEGKPFYVYMTAASNKFLRRYYAQVRDYLAALDDLPPVDMDSTGLNTSD

SEQ ID NO: 150702 - protein, 386 aa, unidentified
MVIIGVDPHKRLHVASVVEPATNGQVAVLQVEASLAGYRRLLKWGGGFGERRWAVENARGLGRHLAQWLLARGEVVVDVPSTATARVRELSRGGRRKNDVIDAAAAASVAALQGEANPVLAEDLSTVLALLDERRNNLSTQRTRLVNQLHAMFRDLVPGGAPTDLTATIASGLLTRVRPAGPVEAARKQLARDLVAEIRDADQRLKALTVQIADTVAATGSRLTEVDGVGPVVAARLLARTRRASRFPTAAAFASYAGVAPVEVSSAERVRHRLPRGGDRQLNFALHIVALTQVRMRSSSGRAYYDTKIAAGKTHNEAMRCLKRRLADHLWRLMIHDQGSQAAGPGGHQGATLQSSAAGSTPTASSSEKSLPEPATPDSTTGRSAA

SEQ ID NO: 150703 - protein, 361 aa, unidentified
MTATRKTVVRPSSSALRLDRGEVVHVGVDAHKASYHVAVLGDRRGLIASWTQPARPDLLVERLRPIGKQIARIVYEAGPTGFGLVRTLRAAGLNAEVIAPSKIPTMPGPEAKSDRLDCRKLAVFAQKGLLQPVRVPGEQEEADRQVVRLREQLTRKLRVAQQQIKAFLLQHGIAEPIGLAHWTAASVDALRQLTLGPELRFCLDVMLDERQHALEQVARATRRLEALAKADRHRETVATLRTVPGVGPITAMTFRVELHEPGRFDDGGQVARMIGLAPQVLQSGPTRREGRLLKSGNARLRTVLIEAAWRWVAGDEAAKQKYRRLVASTGNGKKAIVAMARRLAILLWRLSQSGEPYRAAA

SEQ ID NO: 150704 - protein, 341 aa, unidentified
MATAAIGVDTHKDTLAACLVDGLGIARDEQAFRNDPPGHAAFAAWVRELETPVRVGIEGSASFGSALARHLVAAGFDVVEVPPQLSRRERTRIRRPGKSDPGDAFAIARVTVAEADLPPVRLADRTRDLQLLAAARDAVVVAQTQARNRLHAHLVVLVPGYTATAARLVSGPELAAARRLLRGHHGVEADLARAEFDEVVRLGGRAAILERRLRLLVGDDPLLAIPGCGHLSAAVIRGETGDVTRFRSHDAFAMFAGIAPVPASSGKTRRVRFNRRGNRRVNRAVWTIATWQAKFDPRARTYLARKRAEGKRSKEAMRCLKRHLVRHVFAALVAGYQRAAN

SEQ ID NO: 150705 - protein, 388 aa, unidentified
MNKIIYIGMDVHSTNFTLCSFEPRYGFEADKIFGQTQIKEDIFNSTVKYINKLKSMRPDVDVVCGYEAWCLGYNLHRKLKAKEIESVILAPTTMAVSRNCSKKKNDYRDAITIAKCLASSAYKAVYIPDDKDEDVRDFIRMRDDHKTALKQIKQQLNAFCLRHGHHYDKTKWTGLHLNWLRKLELSKLQRETVEEYLVTYETLTSKITALDIRIEDIASEERYAEKVNKLKCIKGIKTHTALSFVCEIGDFNRFKSADKFAGFIGLVPGECSSGNTERMLGITKAGNRHLRRLVVEISNTYRRGTVGRKSAALKERQKDMPKDVVAYADKAINRCQRKYQRMMFKGKNSNQAVAAVARELCCFIFGMMTGHYSRTAQAEVSVYRSELD

SEQ ID NO: 150706 - protein, 311 aa, unidentified
MEEVTIVGVDLAKNAFHVHGARADGHPVFRRKLSRLRFHRFMMDLPRCLVVMEACGGAHHWAREMIRLGHEAKLIAPRYVKPFVKRHKNDANDAEAIVEAATRPTMRFVEVKSEAQQERAIVFRAREQLVNQRSELVNTLHAHLYEFGYIAPYGIHHMGRIEEIIADETTDIPTAVREICRGLIEQIADLTVRTDKLKKHIDAMSREAETTRRLQTMPGVGPILSLAIEAFAPPMESFRRGRDFAAWLGLVPLQKSTGGKQRLGKMSKMGQRDTRRLLIIGAMSVVYGATRKRPPERSWLARMGVVAELSL

SEQ ID NO: 150707 - protein, 464 aa, unidentified
MTPQQGTKFRTSDDLAITHRHAAGIDVHSAVHFVAVQPEDVPAGFIPSDAKLPEGVRKFGANTGDLEALAAWLKDCGVTTVAMESTGVYWIPLYELLASQGFTVILVDPRQTKHAPGRPKSDVLDCQWIARLHRYGLLTASFRPADDIVQWRGFQRQREMVIRYAAQHVQHLQKALEEMNVKLTEVVSDVVGVTGMKIIKDIVRGERDPLKLAQHRDKRCNATEAEIASALYGNWRKEHLFALKQALKMYEFYQKQMRECDHEIEACLRAFADKSAGAKLPARPAKRKPYRHEPKFGARALLFRMAGVDLTVIEGISETTALVILSEIGTDLSAFPSEKHFVSWLGLCPQHRGSAGKIFSRRVRRGANRGARAMRMAAQGSHHAKNALGAFYRRIQARCGGPKAVTATARKIAERVYRLLKYGQAYVAKSAEAYEEAYRLRTVKAMARKAESLGYKMVPVSMPA

SEQ ID NO: 150708 - protein, 485 aa, unidentified
MAVRMWPADVGRTWFCETVHKIDAGSLAFGCSRLRREREYQSLCSFQGSAGGMRAGVVTDLGGSMQVIYERCAAVDVGKDVIVIAVRLPGGGPDGRDTVKRTFTTFYGVLGEAARWLVSLGVTHVAMEATGIYSMPVYHALVEHGDFEKVLVCNAGHVKNVPGRKTDFSDAEWLVHLLECGLLAGSFIPPAEIKAARDVLRYRTKVAQQRVSEIARLGNVLQDAGIKIDSVASSIATKSGRAMIEALIDGERRGPVLAQLAKGTMRAKIADLSMALEGRFGDHHALMCRLHLDHIDHLEAMLARLDAQIEAMMTPFQGWRDLLTTAPGIGPLSAAAVISEIGVTVTEFFPDDAHLASWTGLCPGNHQSAGKRRSGKPRPGNTHLQTLLVECAWAAVRHDGYLKSLFHRHVMKNGGYRSSTAKKKAIVVVAHAMIVIIWHVMVTGKPYHELGAGYFASLQDPERETRRLIARLQALGHTVTLDPAA

SEQ ID NO: 150709 - protein, 370 aa, unidentified
MLYLAIDQHSKQITVCIRNTEGDTILSRQVSTRPEKIQAFFEQLIHMDPEFMAILEVCGFNDWLIAELGRWKCQEIVLIHPEKPSKKKTDRRDARKLADLLWLNRERLAASQPVHGLRRVYIVTQQERENRQLTALRKNLGQGRTRTLNKIHRIVNRHNLMWEYPTKTFQTQRGRRWLTTLELPEIDRLEMDVLLREWDIWEQQIAEVEEKIVERASASDPGDVFTATQILMTAPGVSHYSGLTLASRIGPVERFPRPRSLANYFGLTPGCRNSGNSQGRLGSITKEGSKIARFILGQLVLHFLKQDPKMRSWYRRIKMRRGSKIARVAVMRRITTIFWHMLTYQEAYSIGGPPPRLRGQQHPPARSDAA

SEQ ID NO: 150710 - protein, 337 aa, unidentified
MQFKFFIGIDVSKDTLDFSVVSNGNEITCFQIKNQAKTIQAAVKKLREIPHFTLSKALFCIEHTGIYGNHCVLELHTVKANLWVEKAIEIIRSSGLQRGKNDKVDAKRIALFAYRNSDKARLWVAPRAVIVKLRKLLTIRDRLISMKGQLSTPIKESKRFDALEIYSEVKDACQSTIKAIEKDFKKVEKRILEIIKADESLMHLFEIVTSVVGIGKVIACEIIITTNEFKNISDSKKYACYSGVVPFEHSSGSSVRGRNRVSHFANKNVKRLLHMAALAVTRIKGDLQFYWLRKLKEGKHKMVILNAIRNKLIQRVFAVVNRGTKYERNYTNNLISP

SEQ ID NO: 150711 - protein, 436 aa, unidentified
MRGCRCSMIMGFTKPIEHFNLQRKKVITMNTLYVGIDVSSKSNVVYLMLPNGDKHSNFSVANSHEGSTLLVKKIYSALTSHSLDTVLIGLEATSVYGVNLVYFLREDATLAPFNRKIHVLNPKQVKKFHDTYNDLPKNDYVDSFVIADCLRFGRINKEVYMGDYRYKALQNLTRARFFAVQNLVKEKQRFMNVLFKKYSTMTQEKVFSDDFSTTALAVYDEFESAEALANMDLHELTDFIIEKGKNRFPDPDAVAKAIQKAARSSYRLPKTVNDSVNQVLSISITSMKALESQIKEFDKAIKALMELLPNVLISIPGIGPVYSAGIMAEIGDINRFDNQASLAKYAGLAWKQHQSGGFEAEVTRLIPSGNRFLKYYLCEAAFSLVRCDKKYSDFYHLKYKEVNRCQHKRALALTARKFVRLVFRLLKDNRLYCPAK

SEQ ID NO: 150712 - protein, 343 aa, unidentified
MDHFAGLDVSVKKTSVCIVDDTGKIVREVKVASEPEALLAVLKNPAYQFKRIGLEAGPLSQWLYSALAEAGLPVICVETRHMRAVLKAQINKTDRNDARGMAQMMRVGLYRPVHVKTLRSQKLRMLLTHRQLLLSKAIALENDLRGTLRNFGLKVGMVGKVKFEARIRELVETLPDLAVLVEPMLIVRRVLREQIVILHRRLLAVVRDDEVCQRLMTTPGVGPVVSLTYRATVDIPARFRKSKSVGAVFGLTCAKYQSGEVDWDGRISRCGDEMMRTMLYEAAQAMLRSKKWSWLKAWAMQIARRRGIKKAIVALARRLAVILHRIWVDGTEFRWTREQAVAA

SEQ ID NO: 150713 - protein, 392 aa, unidentified
MLFVGIDVSKSKHSCYIIDFEGTIYEDDLQISNNIHGFKMLSETINSICKIHDLQNVKIGLESTGHYSTNITNYLHSKRFKVILFNPMITNSKRKSNTLRKTKTDKSDAKVIAMMLFTDNSKSYSPISYQIIELKSLTRFRHRIVSQRSKLKQSFTRLVTIVFPELSDFVWSLHQKSIQNLLLKFPTANDIANCHLTKLTNLLIRHSQGKYRKDKAIELKQLASKSIGSSNRATAFEIQTTINLIHVLDKEIKDIDQKIKTIVDEINTPLITIPGISYTLAAIIIAEIGDIHRFTNPSKLLAYSGLDPSVYQSGQYNAAHTRMVKRGSKYLRWAIIQAVKTVAMRDKTFKDYLNKKLAEGKHYFVALSHAGKKLIRVIFYLLKNNTSFVPQN

SEQ ID NO: 150714 - protein, 440 aa, unidentified
MKEKKSMAFPIIYPNAAGIDISSKEHYVAVNPGSSEEPIKAFGSYTEDLKAIAMWLKECKVDTVAMEATGIYWVSLFLILEKAGFDVVLVTAKHVKNVRGKKTDVSDAEWIRQLHSCGLLSASFQPDDFTRKLRTYMRHRKNLIEMAATHIRMMHKALEQMNIKLQHVIADITGKSGQEIIQAIILGERNPVKLSAFCDGRIRSNKKEAIIKSLEGVWKEEHIFELEQSFMLYHVYHEKIRECDQQIEKHLREKSGINKKGEERIKVRSNKNNLNFDAKEILQSITGTDLSEIFGITETNAVELISEVGINMEKWPTVKHFTSWLNLAPNNKISGGKLLSSRIPKKKNHAGQIFKMAAFAVQRSDNWLAKFFQRIKSKRGTQKAVVATARKIAVIFYKLLREKIEFNPVPIEIYMDGFKQYQIKKLKRHALTLGYQLVDV

SEQ ID NO: 150715 - protein, 314 aa, unidentified
MAQFITAAGIDVSKAWLDVALWPDDAALLHIERSEAGCFDRLAAWLREHGVSRVGLEASGGYETEVMDALQARGFEVIRYNAYRIRMFAKANGRLAKNDRADAGILAHAAGVLPVKHARARQPQLDPLVELLNYRRRLQDWIGDCTNQLEHLRDKVLRRQTTARRAKLHREVTAIDKQLAATLAASGASRELVQRLRNVPGVGPVLSAALVALLPELGTLSRRKVASLVGVAPFDNDSGNRRGERHIQGGRARLRRILYMATLSATQHNPVIAAFAKRLAGKEPKVIITACMRKLLVILNAMVRDAKDWSPKTA

SEQ ID NO: 150716 - protein, 471 aa, unidentified
MPRRKSPSLPPDPATAALLQTLNPHAAGIDVGATELWVCVPPSAVGAPAAPSVLAVLPPYVRRFGAFTADLHAIAAWLRQCQVTTVAMESTGVYWIPLYDLLESAGFQVLLVDPRQAQRAPNRPKTDVHDCQWIQRLHSLGLLTAAFRPEEPIRVWRAYQRHRTTLIEDAGRHLQRIAKALEQMNVKLPEVVSDITGVTGMGIVRAIVRGERDPKALARLRDHRCKASAAVIARALQGTWQPEHLFALQQSLALYDYYHEQIQDCDRVIEAHLQELALPEVPPLAPTRRVRRRRDNEVTFDARQRLHHMAGVDLTAIERIEESTALVVLSEIGTDMSRWPREKHFGSWLGLAPNPKKSGGKVQSSATRPGVNRAAQALRLAAKNLQRSKSALGAFFRRIAARRGLAKAMTATAYKLARIVYALLKHGTAYVAQGLAAYETAYRERVVRQVKRKAAELGLVVVEPDTVGQPV

SEQ ID NO: 150717 - protein, 342 aa, unidentified
MKSATTIGIDLAKNSFSLYGVDDKGKTVLSRTLTRAGVVRFFANLPSCLVGMEACASSDYWARTIESLGHEVRRIHPQYVKAYLLGAKNDTNDAAAICEAVQRPNMRFVPHKSPEQIDIQCIHRTRQGYIKSRTALVNQARGLLAEYGIIIRQGISAIRNQLPLIIADEENALSGLMRRNIASLYESICFFDSQILEQDKLLKTVAKENEACQQLMQVPGIGIMTATILLTVAGVASNFKNGREFAAFLGLVPRQNSTGGKTRLLSISKRGDCYIRTLFIHGARSAITRILAGQTPKYRPNPWVIELIARRGRNKACVAMANKTARIAWSMLAQGTEYRHAA

SEQ ID NO: 150718 - protein, 351 aa, unidentified
MPSLAEFADVVIGVDTHVDTHSAAVVDARTGAVLEELTVATTPAGYQELVDLANAHSPARVWAIEGTGSHGAGLTRYLRRGPEVIVELDRPERATRRHGAKSDPLDAVRAAREAMARPVLGTPREGDGDRQALSVLLAARRSAVDGARVAQQQLFSLIIAAPEVLRDKFRGATSAQRLRVAARLRVAAAWDTHTTTTASVLKTLARRAQALTAEANTLEKEIRRIVKAWRADLLNQFGVGPIVAATVLCAWSHPGRVRSEAAFAMLAGVAPIPANSGQVTTRYRLNRYGDRQLNRALHTIVLNRQRHQEPTKAYTAKRTAEGKNPREIRRCLKRYIIRDLYRLLENPPLPR

SEQ ID NO: 150719 - protein, 356 aa, unidentified
MNKAKKLDFTGHIIYCALDVHKKSWRVVNRDKDFELESYSQDPCTDNLYKHLNSRYPGAKYKVAYEAGFCGFDIQRSLSKYQDVDCIVVNAADVPTSDKEKKRKTDKIDARKISRELVKGELEGIYIPDPLMEHARSLVRQRTRLVRDQTRCKNRIWHLLMFSGLKLDADRPKQYWSKRFIESLRALPVTNDGLKQALEIAVDEYLGVRELLKKAIKYIRQLSVQDLFVTVQKLLQSIPGMGLINSMVVHTEIMDMTRFKTLDPLCSEVGLVPDTEDSGDTKKEKGITHRCNHYLRPAIVESSWTIIRKDPAMMMKYKKYCQRMPENKAIIKIAKHLLSRIRYVWLQQKEYVIGVV

SEQ ID NO: 150720 - protein, 351 aa, unidentified
MKTQIKTTSKLWIGIDFHKKTWRVHFRSDTFSDNPFSMVPDPDALLKKVVRGYKGYTVEVVYECGCFGYWAHRKFESYGWNSVVVNPCDIPRVSKQKFTKTDSIDARNLSKLLKAGLLNSVTIPDIKREQLRSLFRRRVHLVMYTRSIKSRLKAQLLYYGIIIPDDLDNAAWTKAFKAWVKKIKWQHETGKLMMLSNLKQVEYQHYETNDISNHLRKYCRDNYKKEYDLLQSVPGIGPLTAICFISEVGNIKRFKNFKQLSCLVGMMPTTYQSSDTNKTQGLTPRALRIMRSYLVEAAWQAVRIDPVLREYYKKHTGKKPNDIIVKVARKLLSRMYGVLRTETKYEIGLVK

SEQ ID NO: 150721 - protein, 356 aa, unidentified
MHPLTPVRSGHVVIGVDTHKHLHVAAALDTIGGVTAHLTVPNEQAGFAALAAWATEQGHIVAFGIEGTGSYGQALASYLRRHGCRVVEVNRPDRRMRRLKGKSDAVDAENAARAVLAGFATAEPKSADGTAEAIRRLKIAADTAVKARSAAMITIKTLLVHADENLRTACEELGHKALCAKLARLRQGEPVDPDTAARVALRSLARRWLDLDTEATAMQAQIDTLVEQAAPQLLTPFGIGTDTAAEVLIAFGDNPERIRSEAAFAKLAGVCPIPAGSGKTDGRHRLYRGGNRQLNAALYRVVLTRMRFHEPTRAYVERRTTEGKSKKEIIRCLKRYLAREIFHLLNPTPNTPQPSS

SEQ ID NO: 150722 - protein, 348 aa, unidentified
MKADVLKHALGIDVAKATLAVCLGTLRQDLEKEFISIAEVANTSAGFQKITDWLTKLGVNKEKLVVVLEATGVYHEALAVYLHQKGFAISVMQSGRVKRYAQSLDQRSKTDALDSRMLAMLGCERKLTRWSPPDKTLRQLKALSRERSSLLKQKNGEKNRLHAVETAAYSNKKEVKRYTRRLKMLEEQLLEVEQEMRELVATDEELAQKMDYLESIPGVSFLSAATVVGETCGFNEISSAKQLTSYAGYDVVLKESGNFRGSTKISKKGNKHIRSMLHMPSMTAIRVNPTLKVFYQRLRPKKAKPIVALVAVQRKLLLLMYSLYQKNQYYNPEFEQKNSKNLSPCCIG

SEQ ID NO: 150723 - protein, 355 aa, unidentified
MTSTKYIGLDVHKESISIAVMNSIGKFVMESVIETQESTILQFIDGLRGDVHITFEEGTWAAWLYDLLKPHVTEVLVCNPRKAALLKDGSKGDRIDARKLTELLYMNKLATVYHGEHGLRTMKELARSYLTITKDLTRVMNRLKALYRSWGIPCAGNEVYDPRHRAEWLGKISEAGVRRRAEHYYQQLDVLRLLRQEVRRDLLVEAKKHKPWNLLRQIPGIGPIRAALLIALLQTPHRFRTKRQLWTYSGLGLETHDSAQYRVLEGQLQRSKKPVTLRGLNKNHNHDLKAIFKGAALRASSAAGPLRDFYEALLAKGRKPTMAHLTLARKIAAITLIVWKKEVRFDANYLKQQAA

SEQ ID NO: 150724 - protein, 353 aa, unidentified
MKRIVKQAVGIDVAQDELVVCMGRMHEDLTLELYSHKTFSNTAKGFELLTTWVSKLSNADVELNYVMEATGVYHESLAYYLSDRGDHLSIVLPNKISNYSRTLDVKTVTDKTASEAITRFGLERKLDNWEPPKGVYRSLRQLTRERDQVVVTRTIAKNQLHAEEAEAYPNKKSIARTKKLIAFLDKQEQEIKEELAQMIKEDEEVKRIVVLLCSLPGIGLLTAATILGETNGFDLIRNKRQLASYAGLDVKEKQSGTSVKGKPRISKKGNRYLRKAMHLPALTAIRHDERFKAIFARIVSKHGIKMKAAVVIQRKLLEMAYTLYKKQEKYNHEYLTKSEGKIAIEMQDLSIKN

SEQ ID NO: 150725 - protein, 348 aa, unidentified
MSTYYIGADVHSNSTEIAIDKRGKIVARYSVPTSIPAIANVLDSFQGKKHFAIEEGPMSGWLYRNLSNKVDDFISSDPRRNKLIASDGDKDDKIDAAKLASLLRGGFLRSIHQSDDAGRAELKHWVSLYHDRVRDAVRSINKIRGRCRMHGVKISRAALRNPGSRADWLLETNNRALATQLNMLWIGYDATARQVKLAKRQLALLGKKYEIIQFFGQLPGVGLIRATTLFAYLDTPWRFKKKNKLWKYCGVGLQRTTSGTDKKGKPKPARLKLPWAVNRTLKNAVLGATLSAINQKNNAFKEFYERMVQNGMITSNARHAVARKMLTAMWAMWKTNSPFDESLVFLSN

SEQ ID NO: 150726 - protein, 341 aa, unidentified
MGEITIIGLDIAKSVFQAHGADAAGSVVFRKKLGRGRLLAFFAGQPRCVVAMEACAGAHHWARELEALGHTVKLIPPAYVKPFVKRQKNDEADAEAICEAAQRPTMRFVPVKSREQQASGVVFRARDLLVRQRTQIMNGLRGHLAEFGYVAPKGVMYVERLVAEVEDPQSQLPPAARVSLQVMVRMLDALETEIASLDAEIARRSKEDPVARRLMTIPGVGPITASALVALAPGAEAFRCGRDFSAWLGLTPVQRSSGGKQKLGQITKAGERTLRRLLVIGASAVIKQALIRGAPPGSWLAQMLARKPRMLVAVALANKTARIIWALLAKGGVYRAPVLAA

SEQ ID NO: 150727 - protein, 402 aa, unidentified
MNAVGIDVSKGKSMVAIMRPFGEIVSTPFEIKHTASDIRSLVELINSVEGESRIVMEHTGRYYEVLAHQLSEANLFVSAINPKLIKDFDNDSLRKVKSDKADAVKIARYALDKWQNLKQYNVMDELRNQLKTMNRQFGFYMKHKTAMKNNLIGILDQTYPGVNTYFDSPARSDGSQKWVDFASTYWHVDCVRKMSLNAFIDHYQNWCKRKKYNFSQSKAEEIYGKAKELVPVLPKDAITKLIIKQAVDQLNSASTTVESLRTLMNETASKLPEYPVVMAMKGVGTSLGPQLMAEIGNVSRFTHKSAITAFAGVDPGVNESGTYEQKSVPTSKRGSADLRKTLFQVMDVLIKTHPQDDPVYQFLDKKRAQGKPYYVYMTAGANKFLRIYYGRVKEYLASLPES

SEQ ID NO: 150728 - protein, 317 aa, unidentified
MTQPSITTAGIDTSKAKLDIAVHGRTERWQLANTLSGWRRLAANLAEIGVARVGIEPTGGYERGVVEVLRAAGFTVLVLQPIQVKAFARVHLRRAKNDALDAVLIAACAAAMDPPRIAPDPRMSDLAGYLTFLEQIEEDIARFKTRLEHIDEPGLRRIVNSDIARLKARRVAQIRDIANRLRGHHDLAVRLDLVLSIPGIGERTALALIIRMPELGQISREEASALAGLAPFDDDSGKHKGQRHIAGGRGRLRRSLYAAALPAAFRWNKALISLYARLIACGKVHKAALIACARKLLIYANTVVQRGTPWIEKAAAL

SEQ ID NO: 150729 - protein, 427 aa, unidentified
METDLSRVERFRQFKQEIRGNERYLIVGIDVAKDRHHAFLGTANGRTVLRRLAVENNRSGFEHLSAHVQFQMKKHGLDEVVVGVEPTSVYHKPLAEYLIERDFLVVYVTNAAIKQNRQLLDGRWDKNDTKDAANVADLVTQGKCHYYDFPNEVLRDVRALLGVRRRLKRQLHSARMRIRNNLVAQYFPELDTFWNKAEQENLAIVRWSLDPETIRRLSFKEFFHRVTSRLKGARQHERLRGIWEAASSSIGCRVGKTLEVETRILVEEVKRTREQIAEVEKSIKARLTGLTHYELLLSIPGFGPYICAVVLAAVGNPHRFENRSQLLRLAGLDLSANRSGKRSSTAVPVISKRGKADLRYALYQAALVASSFNHHVMAYYRNLLTGREREPGIRTKMRVKLAAKLLIIAWTLMKNKEPFNPDRLKTD

SEQ ID NO: 150730 - protein, 352 aa, unidentified
MTMLAEQVDGVIGVDTHRDTLAAAAVSPIGAVVSSTDAPANARGYRRLLDFARQHVPGRRCWALEGIGSYGAGLAAFLNQAGERVVEVCRPKRPAVRGGRKTDMIDAIRAAKEALVSEHLIQPRLRGEREALRVLLASTAAINQLKSLIVSAPDDLRVELRKLKRPVLIARCAQLRDRPAQDIEHRMTVRALRSTAQRIQALQAEAKELEGEMLLLVREVAPELLDLLGVGPITATQILVSWSHPGRFRSEAAFASFAGVSPIPASSGLTNRHRLNRSGDRQLNRALHTISLIRMRLDPTTKAYVARRVAEGKTSRDAQRCLKRTICRQLFKILEHSNRETGTNSENLVQAA

SEQ ID NO: 150731 - protein, 385 aa, unidentified
MMKLDRTDAPATDEYATVYVAIELSKAKWKLGILLPGRGKLSRYTIDGGDLAGLRSRLADARAKAGRDGKPVRILSCYEAGFDGHWLHRWLSQEGVINHEIDPSSIEVSRRARRAKTDRIDLEKMMRAFLAHLRGEPRALSVVHVPSEEEEDRKRRTRERERLLKERTAHTNRIKGLLHAQGVRDAMPMKRGFLAGLSSLRTGDGRALAARLVEEIVREHERLCLVNKQLRELEAKSVAEVRRAAPGSAEAKIVQLIDLRGIGLASSQQLVNEVFYRSFANRRQVGSCFGLTGTPYDSGESRRDQGISKAGNRRARALAIELAWLWVRHQPNSDLTRWFSARVGELKGRIRRINIVALARKLMVALWRYLTTGVVPAGAVLRPGV

SEQ ID NO: 150732 - protein, 394 aa, unidentified
MNFFVGLDVSKEKFDACGIRDKGEKVFTIACSMNREGFEELIVRLPKDKESFLLGIESTASYHIPLFTYLITRDYRVVVINPLLINNFSKRSLRKTKTDKKDALTIAQFLLRERETLSVQTPDHLITELKDLARRREKLTDHVTSLKADMKRILAVTFPELEYVTGVFTKSTLRLLSEYPSARAMRDAGHACVEDVFITRSRGNKPHATIEVLMNAAASSVGVASSAKELTLKQEASLLMHVEEQMKETTKLLMSFLNEKMKEDIDILCSMKGIGKNTAVNFLVELGGAVEIYENDKKLIAASGLDPSTHESGKYAGKSRISKRGNRHLRRVIWLMATKAIIHNALFKAYFEKRKKHGLPYKKAVLATAHKLIRIMFTMLSRKTYFVEGGIKYS

SEQ ID NO: 150733 - protein, 354 aa, unidentified
MATYYIGADVDSKMTELAIEKNEKIVRRYRVPTSIPALREVLSSIDGKKHLTFEEGPMAGWLYRNLKDSVHELIVCDPRRNKLIACDGDKDDSIDSGKLAELLRGGYLRAVHQSEDMGRVILKQWVSLYHDKVREAVRQINKIRGRCRMYGIRIPRRALRDQVIRCQWMTKLKERALAEQLSVLWIGFDTAAKQVRMSKRQLIRHSKAYEIICYWSEMPGIALIRATTLLAYLDTPWRFSNEKKLWKYCGVGLQRTASGTDRRGRPNRGKLKLAWAVNRRLKAVVIGAAMSAINQKQNIFAFEYERMIRNGLTASNARHAVARKLLSVLWAMWKTTSRFNESLVCYSPATVTAN

SEQ ID NO: 150734 - protein, 388 aa, unidentified
MNRIIKIGMDVHSTNYTLCAMEPTIGAEDRIFGQVQVAPDYKEVICFIESLKMKLGFFDHYSIECGYEAGCLGYTLYHQLMGAGIKCVILAPTTMLTPQGQRIKTDKRDAHLIAQCLCYGGYHPVYIPTGEDDAVKEYLRMRDDHKLALKKLKQQINAFVLRHGNLYAGTKWTIKHVTWLKKLELDPMYRETLDEYMVSYEEQEAKIERYDQRIEEIAAEARYKKNAEKLGCFLGISTHTALSLIVETGDFKRFAKGNTYAAFLGLVPGERSSSKNVNRLGISKAGNTHLRCLLIEAAKGICKGVIGHKSKKLRSRQSAQPANVIAYADKANTRLRSKYYKMIRHGKKKNVAVAAVARELSCFIWGMMTGNISITSGTGTSVPAVSQG

SEQ ID NO: 150735 - protein, 465 aa, unidentified
MRTDKMLWRNRKLKKELARRLQSENPGLEVVHPHAAGIDVGNSAHYVAVRPDRDSQPVRRFECFTADLHRLANWLQDCGVKTVALQSTGVYWIPLYDILEERGFEVYLVNARHTKNLPGRKSDVQESQWLLKLHTYGLLNNSFQPPSKIRILRTYWRQRLQHVTGAATCVQRMQKALTQMNIQLANVISDLSGVTGQLIVRAIIGGERDPWKLAELSHPRIQASRGEIAKSLEGNWRPELIFVLQQEMEMYNTYQRRVAECDQELQKHLGAFADTVPPPVKEELPPRKKKKQNKNNPHFHLAEELQRISGVDLTRIDGVDVMVAQTVISEVGLDMSRWKTEAHFASWLGLCPDNRISGDKVLARGTRHVLNRAATALRLGASTLLRSQTYLGAQYRRLRTKLGAPKAITAMAHRLARLVYRMLKYGQQYIDKGAEYYEQRNRQQQIEFLRKKAAQLGLQVTPAHV

SEQ ID NO: 150736 - protein, 309 aa, unidentified
MKEEVVYLGVDIAKSHLDVAIGTEKRRLPNDCTGHRQLIKRIKQIEAQVQVICEPSGGYERSLVRALLGAQLKVSLVPANRVRQFARAAGILAKTDSIDAEVLCAFGEAMRPQTIGATELEREHLRELESQRRHLTHLLVMEQNRGARVSDASVRRLNRSLINQIKKQIERLDLLIKNHIQQSQELSSKAAKLTAITGVGERTAALLLAQMPELGQLNRREVAALVGVAPFNRDSGRMRGKRTIYGGRRFVRHGLYMAALVAARHNPILRTFYQRLRAAGKPAKLALTATMRKLLIVLNSALKPDLTYA

SEQ ID NO: 150737 - protein, 391 aa, unidentified
MSTYFVGIDISKYKHDCCIINAADQSIVAKFTIQNDKDGFNELLTSLQSLSTPDDIKIGFESTAHYALNLELFLEKAHHSFMEVNPVLISEYKKSTSLRRTKTDSVDCESIARWLMTVEYKPHSKGFYHAYSLKSLTRLRDRLIRQRSFYLVKITNVLDHTFPEFKPFFQEHFSKTALYLLENYGSAEKMAHMNSASYDNLRRISRGKFTPQKFIELKALAANTVGVNNSIFDTELTCLLTLYKEAAKQVSILEAQITELIEEVHPHYMSIPGIGPISAAVIYAEYGDISNFSSPAQMLAFAGLEPGISESGTESHKGRMVKRGSSQLRYTLMNCALPLIRFDMTFATYYAKKRSEGKPHRVAISHVTKKLVRVIFALERQNTDFVATALR

SEQ ID NO: 150738 - protein, 364 aa, unidentified
MLIIGCDYHPSGQQVFGIDTESGEVFADRWIAHTGKEVDEFYSALPAGTVVGVESSGNMLWFERRLAQYGHRLRLGDAAQIRTKETRKQKHDRRDAELIARLLVEGTFPDLQWVPTLAERDQRQLLMHRHKLVRMRAQVKNQLQHIAMNQGEQKKRQLWSKAGRELLEKLALDPWTGRRRDDLLRWLDLLDRDCEGLEMAVKQAAEARADARLLMTHPGIGPVISLGFVLTIGTVERFERSRQLVSYLGLNPAEDSSGERRRLGGISKQGSSFMRMLLIQGAQTAVRGDEALNRQYRRLASKKHRAVAKVMVARKLAVRMFWMLKTQKTHAELVRMRGSSSHPGVGKTELLSERPASPRIQPQG

SEQ ID NO: 150739 - protein, 313 aa, unidentified
MGIDPHKKTHTAVAVDWTTGAQVAELTVKARAKGYERLLWWARSLDPERTFAVEDCRHVSGGLQRFLLARGERMMPVPPKAGARRGARTRGKSDPIDARAVAQAALRHPELPEAHLGGVERDVRLLLDHREDLVAERTSMQNRLRWHLHDLDPEFEVPTGALDRYVWLSRTEEHLQAMDQTIQVRIALEEVGRIRELTREAHRLERDLTTLVRLVAPELMVIRGCAALTAAKLLGETGGVRRFRSEAAFAMHVGTGPLEVSSGERQRHRLNRSGNRQLNAALHRIAVTQKRIHPPAQVFLERKRQEARASERP

SEQ ID NO: 150740 - protein, 343 aa, unidentified
MQAVTTIGLDIAKSVFQIHGVDAAGNMVVRRRLKRRYVLSFFQKLPPCLVGIEACASSHHWSRELGALGHTVRLMPAAYVKPYVKRQKNDAADAEAICEAVTRANMRFVATKTVEQQSCLLLHRTRHLFIRQQTAVINAIRAHLAEFGIVAAVGRNGVEQLLDVVADTSDNRLPDVARACVAALGVQLRMIKARILEFDRLIMAWHRSNAASKRLDEIPGVGPALATALVASVADPKAFRSGRNFSAWIGLVPKQHSSGGKDKLGSISKQGDRYLRSLFTAGALAVIRYAKIHGTKHRPWLTALLARRPTKVAAIALANKIARMAWAMMARGDCYKEPVALAV

SEQ ID NO: 150741 - protein, 312 aa, unidentified
MDKKVYVGIDVSKDRLDVAVRPSGKRWEAANDEEGVTELAKRVKGLGPALVVLEATGGLETLVVSALVERALPVAVVNPRQVRDFAKAVGRLAKTDALDAEVLAPFAEAVRPEVRPLKRKEVEELSALLRRRRQVVDMLTAEKNRLSREPSREIRKEIKKHIAWLQKRLDETDKTISKGIQNSPIWRAKDELLRSVPGVGPVLSAVLLAGVPELGGLDRRRIASLVGVAPLNNESGLYRGRRRVWGGRADVRSILYMATLAAVRCNPVIREFHERLRGSGKAPKLALTACMRKLLTILNAMVRDSNPWVCVS

SEQ ID NO: 150742 - protein, 420 aa, unidentified
MPNIEIGVDSMVKENFIYVGIDLHKETHTAVMIDCYNQKLGEITFPNRPAAFPKLVTKVKKCNTDGKEVVYGLENAYGYGRALAVWLIDKGYLVKDVNTAISHRQAKHRGAMYRKSDSDDAKAIALATLNMLDKLPDACPNDAYWSLGQLVHRRDNIMKQRTRLVNQLHEQLCIAYPSYKQFFNDISRPTALYFWEHYPSRKYLKGKSVEDLRAELVPVSHNRCSTKNCEKILDAVASDKVKNNAYQDARDMVTLSIVSDLQHYDSQLAEVDKMLEQMYKMLGCTLTTIPGVNVITAVKILAEIGDIKRFSNANKLAQFAGIAPLHLSSSGKGKDVATKQGNRRLQATIYFLAIQMVQVSSKGTPRNSVVRAYYEKRKAEGKTSQQALICISRRLISIIYGMLKHGTEYRMPVVESAGEK

SEQ ID NO: 150743 - protein, 414 aa, unidentified
MDTIFTNVAGLDVHQKTVVACVRRSQPQGGFVEEVRTFGTMTNDLLDLSDWLEKVGITHVAMESTGVLWKPIWNILDGRFELLLVNPRELKQVPGRKSDVNDAQWIAHLLQCGLLRSSFVPSRPQRELRDLTRQRTQLVREQTRIANRLHKTLEDANIKLGAVASDILGKSGRNMLNAIVAGERDPKKLAELAEKRLRGKIPELRQALRGHLTEHHVFLLQTLLEHLDFLDQQITVFSQRIAVCLAPFLSPEQMKRLDAIPGLNRRTIENVVAEIGTDMSRFPDADHLSSWAGMCPGNEESAGKRIRHRTTHGNGWLRSALTEAAWAASHTKRSYLGVQYRRLAARRGRKRALTAVGHTLLVILYQMLKAEVSYKDLGPDFFDKLKPEQYRRYLVKRLESLGFTVEIKPKDSAA

SEQ ID NO: 150744 - protein, 454 aa, unidentified
MAKKREKRECRAVVLEPDAAGIDIGAEEIYVAVPPDRDEESVRMFSSFTCDLHALADWLVQCRIRTVAMESTGVYWIPLFQILEARGLEVYLVNARYLKSVPGRKSDVSDCQWIQYLHSVGLLRASFRPSMDICAVRSLWRHRGSLLQMASEHILHMQKSLSQMNLQIHHVLSDITGASGQAILDAILAGERNPVQLAQLCNCRVKSPREKVAKALEGDYRPEHVFTLKQSLDGYRYYQRLIAELDREIQHLLQTLPSAVETVQEMPRRTKHSAFQRQGNDPGFDLRGQLYRIAGVDLTDIPGVSAVTAQVILTEVGPNLRRFRNASAFASWLGLCPENRVSGGKVLSCKTRKVKSRAALALRLGANSLCRAKGYFGEFFRRMRAKLGTAQAITATAHKIARVLYHVLLTKEPYAETVFHQSDEHARRRAEMRLRKHAALLGFQIVPTPARSTT

SEQ ID NO: 150745 - protein, 429 aa, unidentified
MGRLKIVYPICCGMDVHRDFVVACIASTDPKGVTQYQTRRFSTFTGGLRDCAAWLAENKCKDVCMESTGKYWFPVHNVLEKSCHVVVTHPKFVKAIKGKKTDKKDAMWIADLFKHDVVSGSFIPPERIRQLRDLCRYLQKLTWITTGEKNRAQNCLTVSNLKLDSVFSNVFGKSASAIIDFMLEHPGKTFDVTPFIHKNCKHSIEEIQAAVDGVFSPWQAEKLKVIREHMGDLGKCKEMIEKIIYQLAEPYARQIELILTVPGISDPMTAIRIIAEIGTDMTQFESSKHLCSWAGLTPQNNESAGKKKTTRIGKAGQYIKPLLIECSIGATNPRSEKYPEMVHKYQQLRKRRGAKKARVAIARRLLTAIYQMLLKDEPYKPFIAPAQENIPEKRLIKADDALAMLRRKGYILVGPDGVVVEGDVFPAPV

SEQ ID NO: 150746 - protein, 347 aa, unidentified
MERVAGLDVGVKQSALCVVVRDAQSIRTLSRHRTATTPSSIGDWLVSQGIARVGLEAGAQSSWLAQALEERGLQVTVMESRRQKAFGAYNKVKTDERDARLIGEALASGLYTKVHVRSAWSQEVRTLLGARLQLKRQAHQSRQFVRGHLRAVGIELPRGTGQAWLTEAEERVARRGGTLGLALQAMLAGCRALADQIKVLDKEIRRVARQDEACRRMMTAPGAGLLSSLALRASLDDATRFRRSAEVGPYLGLTPSRYQSGKVDRVGGITKQGDGLVRAYLYEAAVSLLERQKRDCPLRRWGLDNQARLGKRRTRVAVARKLALLMHRLWVSGETFDWNRGGTPTSC

SEQ ID NO: 150747 - protein, 325 aa, unidentified
MQGKEASEQETRKCSAGIDVSKSWLDAHIRPAKESLRVANTAEGIRRLKRWLLRHKVTLVVVEATGKWHRDVYRSLSASQIAVAVVDPYRVRMFAKAHGIFAKTDRLDAEVLAMFAEMMAPSCRAPMPQALEALQELVTARDSAVAEHISLKNQLSTAEGSFLRRQLTKRIAQLAAHIKAIEKECMTQIKADEGLVRRFDILTSIPGVGGVVATTLIACLCELGSLTNKQIGALAGLAPVADDSGERQGARVIWGGRAAVRRMLYLAALSAAQHSSDMKAFYSRLLANGKAHKAALIAVARKIVLLANTLIAQNRAWLPIAPKNA

SEQ ID NO: 150748 - protein, 329 aa, unidentified
MKLLDPTTTAQVFAGVDVSKDRLDVCLRWSEPERHNEEEAFVVAYDESGIDALVSRLLEESTVLVILEATGGFERTVVGALAAVGLALVVVNPRQVRDFARATGRLAKTDRIDAAILARFAEAVRPAPKPLPDREIRALQAIVARRRQLLGMIAAENNRLTSAAKPVAKRIAAHLRWLQKELSRTERDLEAAIESSPALGENEALLRSVPGVGPVLARTLLAGVPELGTLTHKRVAALVGVAPLNRDSGTLRGRRSVWGGRAEVRGALYMGALVAARRNPVVKEFYERLLAAGKPKKVALVACMRKLLSILNAVLKHRTPWRSPHYLST

SEQ ID NO: 150749 - protein, 346 aa, unidentified
MSYSTTVGVDLAKNVIQISVVSGRGKELSNRSLTRHKFAEFLGKQKPALVAFEACATSHYWARAAQRHGHEARIIPAKFVAPFRQGHKTASNDALAVAEAARRPSIKEAPMKTVEQQGLQAIHRSRQLLIQESTALSNHLRGLLMEFGVVIPQGFASLLRAVPEVLEDGENELPDMYRPTLHRMYTRLLELREHIEAMTSEVEVLVKQHPICSRLTALEGIGPIGALLLYATLGSGSVFSSSREFAAYLGLAPRQYSSGGKTNIVGLSKKIGNSRLRSILILGARAYTYRLKEPKSSKDRWLKDVIERNGHSRAAIALANKNVRTAWAMVTQGTEYQRRGQQKVAA

SEQ ID NO: 150750 - protein, 351 aa, unidentified
MLIIGVDYHPSFQQIAFFDQETGECGERRLNHSDGEAEKFYRDLKSRGVSTRVGMEATGYSRWFERLLTELGIEVWIGNAGEIKAKRVRKQKTDRQDAQLLLKLLLEDRFPRIWVPSPENRDLRQLLWHRHRLVQMRTRIMNQLQALAMNEGKRWKKKLFSEQGRAQLEKFPLSPWASRRRQDLLELLDRLDPKIAELTAAIEQEARKWPEVLRLMTHPGVGPLTALAFVLIIGTPERFHRGKQIGSYLGLIPSEDSSAGHQRLGHISKQGNSLLRFLLVEAAQAAARCNSDWRRRYVHLAMRRENSIAKVAMGRRLALRLYWMWRNGGEYSQSLEFGSYAGQLGTGHGVK

SEQ ID NO: 150751 - protein, 342 aa, unidentified
MNEVITIGVDLAKNVFQIHGVDASGATVIGKQLRRRQVLRFFEKQPPSLVGMEACATSHHWARKIAALGHEVRQMPAGYVKPYVKRNKNDAADAEAICEAVTRPSMRFVAIKSPEQQSVLVLHRSRALLVRQRTMVANAIRAHMAEFGIVARVGLPQVTALLAIIADETDTRLPPLARTSLERLARQFLSLHEEILAAEKHIHAWHRSNAASRRLETVPGIGAITASALTATVTDPALFKSGRELAAWIGLVPRQRSTGGKERLGRISKQGDPYLRWLLVAGAMAVIQQAKRRGTTHPWLARMIIGKPTKVAAVALANKMARIAWALLQHGSTYQRPRGRVA

SEQ ID NO: 150752 - protein, 347 aa, unidentified
MNVYIGFDISLQLTHICVVDDEGNLVREGVARSEIADLDGWLCKHGQEWTIQRIVFETGQLSAHLYHGLRPSRPVVCIDARHAHGTLKAQRIKNDRNDARGLAQIARTRWYRAVHVKSEECQALRALVGGRKELVMLRLSLENHIRGRLKGLGIKLGTVTTAAFSTKVVTAIDGKNPLYRQAVLTLLQARDDMLAQQRVLDKQCVTIARSDPICRRLTTVPGVGSITALTFRAEIDDPLRFRKSRDVGVHLGLTPKRYASGETDRSGGISKCGNRALRTLLFEASVTMLTRSGRWSRLKAWAVRLAQRTSFKAACVALARKLAIVMHRMWVDGTDFAYGEPPALQAA

SEQ ID NO: 150753 - protein, 346 aa, unidentified
MVIIGCDFHPSWEQIAWLDTETGETREQKLVHGNGETERFYETLSPPVLIGLEATGNCHWLLDRLREMGHEVWVGDAAAIRASYVRRQKTDRRDAAHILKLLVEGRFPRLWVPEREQRDLRQLLIHRHKLVEIRSRVKNGLQHLALNQGMQRKRRLWSAAGQQALQELPLQPWASRRRADLLRLLASLEERIAPLDRAVEQAAQQNAEARLLMKQPGVGPITALAFVLTIGEVSRFQRSKQVASYLGLIPCEHSSAGHQRLGAISKQGNRFVRMLLVEAAQSAIRYDPEFRREYQHRCHTKPKNVAKVAVARKLAVRLYWMLRTHQTAPESVAIESSPRVPLVGAS

SEQ ID NO: 150754 - protein, 319 aa, unidentified
MTTSPPVFVGIDVSKNTLDVAVDSIPSPRSFPNSDDGFLQLIAWLAPLSPVAIVLEATGGYQQACRLALLDAKLPAVVVNPRQVRDFAKATGRLEKTDKIDAKVLAQFARCMDLQHTPIVDKELLEIEAMLARRRQLVEMITAEKNRLQQASSKKIRKNIQATIDFLKKQLDDVNGDLEKKIAASPEWNGRVEILDSVPGIGRIVAMTLVASIPELGKLNRKEIAKLAGVAPLCSDSGKMRGKRTTWGGRAEVRTVLYMATMSAIRCHDGIKKFYTRLVEAGKPKMVALVACMRKLLVQVNAMVRSNQRWSPELAEAAT

SEQ ID NO: 150755 - protein, 370 aa, unidentified
MKKNSTVRQSPKRAAARQAGPITIGLDLGDKTSRYCVLAANGELLSEGSVATTRKGMTQKFAGMGRCRVAMEVGTHSPWLSRWLSSLGFETIVANARQVQLISASSRKTDRMDAQLLARLARVDPQLLRPVRHRSEQAQADLMTIRIRAALVEARTSLVNAARGFAKAQGDRLPACDADSMGVEKMEALTAEMRASLRPLLEQVESLTEKIQESDAKIEQIARTQYPETELLRQVSGVGTLIALTFVLTVEDRDRFQKSRDVGCYVGLRPKQSESGQSHPQLRITKEGDRYLRQLLVQGAHCILSRRGPDTDLKRWGLQLASRGGQNAKKRAIVAVARKLAVLLHKLWTTGEVYEPLRNSQAARPSKQAA

SEQ ID NO: 150756 - protein, 425 aa, unidentified
MNYKQNEKINQVKESTLVVGIDIGSTTQYARAFDWRSIELGKVFTFSNSREGFEAFKAWMRHLQDKYRKSDVIVGIEPTGHYWFDLGAYLEDEGILLVMVNPYAVKQTKELDDNSQSKNDRKDPKVIAKLVTEGRYSAPYTPDGVYADLRIMVANRKRLIREMTQIKNRFARWFAIYFFEYTDVFGDYEAQSSMLLLKKVCTPEAIVELGAEKINQIWRDAKLRAVGMKRATTLCETAKRSIGLKKGSSAARYEMKLLLEDYEYKKAQLDAVMEEIEKLCRKIPESEQMLAIKGIGVITVAGFLAEVGDVRRFESPRQIQKLAGLSLRENSSGKHKGQTTISKRGRSNLRAVLFNAAIPLIAKNPEFKSLHEYYTTRANNPLKKKQSVIAISCKLIRVFYAILANGVTYDAQKMLSDIHRQPQAA

SEQ ID NO: 150757 - protein, 407 aa, unidentified
MKIIRAKRSASHTVDCAGDRAEPHAEASRGASSAKRRQTMHESITAYVGLDVHKETIAVAVAGNDRDAPHFVGTVRPDAKQVRKALSCYGLPSALQVVYEAGPCGYALARQLLADGFDCKVVAASRITRSPTERIKTDRRDALTLARLARSGDLVQVRIPDERDEAVRDLSRARQDAVRAGLKARQQLKAFLLRHGRPLRGSKPWSAAGELYLSKIRFEHPAQNIAFADYRQAVLDTRARIERLTEALRAQCELWRMQPLVSALACLRGVDFLNAVILVAEIGDFARFAHPKELMGYLGLVPSEYSTGERHHRGDITKTGNAHARRALVEAAWNYRFPARLSPAITRRQEGQSKHVRDIAWKAQLRLGHRYRKLQARKLHQNKIIVAVARELAGFLWDIARHVPVAA

SEQ ID NO: 150758 - protein, 385 aa, unidentified
MIYIGIDISKYKHDCFIATETSVSFSFENNSSGFKELLEHFKPFNKSEMIIGLEATGHYGDNLKSFLSSHGFSFMEINPLLVKKFSDSKSLRKLKTDKKDAKLISEYMMTVDYKAYHHQSYHISALKSLTRERSKLISFRTAQYNMITKTLDIIFPEFNPFMKEQGYSDTSLYILSYFKSPDKIAKMTDLHYDKIRKKSMGKFSYPKFMKLKELAKETIGTSQDYHLDRLSTSISYVEKLNTDIKVIESRITELMKKYPTYFGSIKGIGTLTEAIILAEYGNISLYDSPSQMVSYAGLDSTIKQSGTMSTTGKLVKRGSKYLRSALINITLILMVNNPLFYAYYHKKKQEGKHHRVAQVNLAKKLIRVIHHLETTKTYFDSSLLK

SEQ ID NO: 150759 - protein, 360 aa, unidentified
MCRVGKPVSSLLSFLTSQINIMTIQSKKIVQETKSLFAGIDVGAEELILLVRKNGTSYKPQKFANAPADRARLAKKLAGLPGIIVCLEATGVYHFDLSIALHDAGVALMVVNPKSSHNFAKVLMKNSKTDAVDAETLAQYAERMDFVAWARPSDEKISLRSFARRIDALTRQKAAAKNNSHALNASGETPKAVLRDVELSISQLEKRIACLSKEALALIGKHPDLERVFLLLTGIKGIAQTSAIALMGELLLLPKGLSHREWVKSAGLDPRAFDSGKSVHKKTRISKAGNRHIRSALYMPALSAKQHDPYVKAYFQHLVGNGKLPLQALCAVMRKLLHAIHGMLKHDKPFDNTRFYAIPA

SEQ ID NO: 150760 - protein, 449 aa, unidentified
MHGAHIGGQRAAAFFKLVADLDPRRVLLVGIDVAKATWFVVVSDLTGVVVADGVRLVADRAGLAELERVIAELRWQLAAELVVVGIEAAGHQHQSLTAHLADRDGLHVRLLNPGAVAAIRKQQGNRRRKTDWLDAAAVCELLARGEGTLVHLDASMAASLRPLWSGRKDLVDTRSRLRQQAGALVDCLWPGFSAADKQAGVSPVLCDLFKTKAGRVIAGLLAEGWTPARFTAAPTTQLQAIFAARGCRLTRPLASRLRARAAGALPAHPAATAGKAAALAGMLGVLDGIDAEVERLEAQMAPLLAATEGAKLTQIRGVGVVTASGFVAFVGRTDRWAEWSKVWRAAGLDPARSQSGAKDARLGISREGSAWGRRALLDLAAAVCRQPGRWGDGFRARTTQGRKPAKVALAATGNSIGRTCFALMRSGADYDPAWETKRTRSSKVGDQAA

SEQ ID NO: 150761 - protein, 385 aa, unidentified
MMTMTRTEESTAVATPVAPTLLLAFELGERSWKLGFTTGLGQQPRIRQIPARATDRVVEELARAKARFRLPADAPVMSCYEAGREGFWLHRWLVAHAVNNQVIDSSSIEVNRRARRAKTDRLDLGGLLSLLARDQQGDRRWRVVRVPSVDEEDARQLHRTRETVQQDRNRLINRLKGLMTTQGLTLPVDANFPTQLETAQLWDGRPIPPGLKARLHRAWAQLECLNRTLEELDAERGALTADPQTTMGRYVSALPTLRGIGPVGTWTLATEIFGWRQIKNRRQLGALVGLVPAPYQSGESAHDQGITRAGNKHVRRLMVQLAWSWVRYQPDSALTEWYQGKFGRGSRRLRRIGIVALARKLLIALWHYVEHGEIPEGAIVKSQAA

SEQ ID NO: 150762 - protein, 416 aa, unidentified
MDEEHRNWFVGVDWASQTHHVVLTDAKGGKVAERGFDHGGEGLAEMATWICKHAGGAEPAAIGIAIEVPHGPVVEGLMERGFPVHAINPKQLDRFRDRFSPAGAKDDSRDAEVPASALRTDPRCLRRLEPLDPTVVELREWSRIAEDLRHDRNRLGNRVRELLWRYYPQMLELTDDVAAPWFLDLWALVPTPAKAARVRESSVERLLKKHRIRRFSASDALARLRATPLAVAPGTVDAATAHLATATERLRLVNRQIGQADDHIDRLTARLAEPAGNEPGQVSEQHDATILGSLPGVGRIVLATLLAEAYEALRRRDYQALRCLSGVAPITRRSGKSLVVIMRQAVDVRLRNAVYHWARVATQHDKTSRAKYAALRARGHNHARALRSVADRLLAVACAMLEARSIFDPDRAPKAA

SEQ ID NO: 150763 - protein, 354 aa, unidentified
MQQPERAAEVIIGLDTHKDTHTAVALNALGARLGTTTIPVSREGYRQIEAWACSFGSVRAFGIECTGSYGAGLSRALQASGHRVLDINRADRSARRRHGKDDPLDAEAAARAVLSGQATTLAKSGTSSVEMIRHLKLARDSAVKARAQAMQMLKGLIVSAPAELREQLEGIRGKVTLVRHLAALRPGPMTSTTASAKVGLRALARRWLSLSKEIEGHDRDLDALAAAHTPELITAPGIATGTAAEMLILVGDNPERIRSEAAFAKMCGACPVPASSGKTSRHRLNRGGNRQANAALHRVIVTRMRCHQPTIDYVRRRTAEGKTKAEIMRCLKRYVAREVFTHLCKPRQPVSETA

SEQ ID NO: 150764 - protein, 362 aa, unidentified
MTSIATSPAPVPAAVVGVVVGVDTHQDEHCAAVLDLRGAHLATCTVMASPTGYAQLCSWATRFGPVTAWGVEGTGSYGAGLARHLAGAGHTVLEVNRADRQARHQHGKSDPLDAVQTARAVLAGTTAGIPKTNDGVVEMIRNIKRVKDSATKAKTAAINQLHAALVTAPDQLRQQLRNLEGARLLRACARLRPGPVTDPTAATKYALRTLARRAQGLQAEVDAADRQLDILTDQAAPTLRAAYGVGPDSAAELLVADGDNPDRLASEASFAALCGVAPVPASSGKTNGRFRLSRGGNRRANAALYRVVLCRLRYDPETRAYMDRRTKEGMSKKEIIRCLKRYLARTLYQAVLTDYTPITAIT

SEQ ID NO: 150765 - protein, 320 aa, unidentified
MDGKRVIGVDIGKHWLDVAREGAAEVERHSNEAAAIATLVQTFDAARDVVVFERCGGYERALEAALAAAEVAWAVVHSAAVKAFRQVQGIKAKTDTIDARLLRGFGRDRLNAGKLRLGRTEDVVLDALVARQRQLKATLHAEQCRRETAAIAAVRASIERMIAQLEVELAAVAAELATHERNDPRLAFKKAVLCERKGVAEATARALLAELPELGRLDRKQITALGGLAPRVHQSGHTQWRRGLAPGRTCIKVILFNPARTAMRWDPEIRAFANRLRARGKPGKVIMVAVMRKLLVRLNAAVRDALSQEESATLATLVAA

SEQ ID NO: 150766 - protein, 345 aa, unidentified
MEHFVGLDVSQEMTHLCVIDGQGKTVWQGRCLSTPEAIAGTIKSKAPDVVRIGLESGPLSTWHWHGLKAMGLPVVCLDARHAQATMSGQVNKTDKNDAYGLAQIVKAGWYREVGVKSLDSHAVRSMLGARAQLVGMRVEVTNQIRGILKTFGIVLSRRTGEPFERLVNEACSDGESMLNHTVRSLLCVYSGLKEQIRHMDRELIDCARKSVVCRQLMTIPGVGVLTALAFVTAIDDPAKFAKSRSVGAYFGLTPRCYQSGEIDQNRGISKCGDSLVRTYLFEAAGTLLTRVEKWSALKVWGLRLAKRNGLKKAKIAVARKLAVIMHRMWVDGAVFRWSADTAEAA

SEQ ID NO: 150767 - protein, 432 aa, unidentified
MNESIPAASLEGVAAYIGIDWADQKHDVVLRSAAEPNNVEHRVIEQKPGALMEWIGQLQRRFGGQGQILVCLEQSRGALIYHLMGYEFLELYPVNPLQLARYRETFSPGGAKDDQPDAGLLCELLYCHRDRLRAWKADSELTRKLAFFNEGRREAVDQRTRLSNAIKSQLKVYFPLALELLNQDTSTALAADLLLRWPSLETLQKQIPHQLRKFFYAHHCRGESRMLERLQLVQQARALTQDSGVIEPAAFRVQMLARQLKNLLPDIARYDQKIAELFAAHPDRFLFENLPGAGRVLAPRLLSALGSDLNRWESAQEIATLYGVAPVRRASGKKSGKKGEKKASVHFRQACPKFLRQSFHEFAGCSIRYCCWARALYEAQRAQGKGHHAALRAVAFKWIRILFACWKQRIPYDPQRYLQALQQRASPYANAC

SEQ ID NO: 150768 - protein, 660 aa, unidentified
MRLCVGDDWAEDHHDIEVMDEAGRVLARKRLPEGVAGIGQLHELIGRFVPADGDAEVRVGIETDRGPWVTALLAAGYTVFPVNPLQASRYRSRYGVSGAKSDGGDAHMLADVVRTDAHQLRPAADGSAAAGAVKVLARTHKTLIWERTAVVLRLRAQLLEYFPAAVAAFEDLDAPDALELLGKAPDPARAAKLTRAQVSAVLKRSGRYKITQRTDAILAALRSPQLGQPPVLTAAYAATVRSLTAVIATLNEQVASLQGQVEAHFGRHPDAEIYRSQPGLGAITGARVLGEFGDDPDRYASAKARRNYAGTSPITRASGKRKIVGGRRYLPIRAAEVLVWRYPGWERRWERVPLESALGRSRPLARARRVTWAGCIPAGCRLPNTFLGIKGSPAQIRPSPLVVKFFRIFPDEAPLGLGEILPVLGCHASLHLLRHGLEVALDVGEIFQVGECQAGLRLLHRGLRRVVVRPVAGRGGCALAGGQRQGGGRERGQGDGEAAGVVDGVHDGPSGEVGSAKVARGRGSCAGAGAQGGDQAADRGRVCGRGMPWLVGARAAGPAGGAGQRVTAGLAVPVGGQSFGQLVAAEGVHCGLLGWPSSGVVPRMRVRPGSADRVIAPDRGRSVLRFPRAVLSPGRRAGRPVQPPRRPGPGRRRRACGRCW

SEQ ID NO: 150769 - protein, 343 aa, unidentified
MSTRGYYYIGLDVHKKSVSFCVMEPDGTVVKEGRVVATRGALTAWAESLPGRWYGGMEATLFSGWVYDHLQGYALRLAVGDPGRLKAITAAKKKSDALDARMLANLLRCHLFPECFMAPSTVRELRRVLRYRNKMVRESTRMKNHISGLLMETGMEYNKKQLHGRRYFARLLEQLELPPSVLNLLRMTRAGLDFFQSRQGYLLAALARDSRLQERMERLREIAGVGQVTALTWMLEIWDPNRFRNRRQAVSYCGLCSAQRESAGKMQRGPLSKKRNGHLQTILIEAAKLAPRYDATLAAVYDRTLASTGRRNLATLAVARKLVGYLLAVDRRWHAEQKRKVAA

SEQ ID NO: 150770 - protein, 404 aa, unidentified
MYNAVGIDVSKGKSTIAVLQPGGTVIRKPFDVSHTSQNLNELADYLGSLEGPSKIVMECTGRYHEPMLKVLYEAGLFVSVVNPHLIKNFGNNSLRKVKSDPADARKIARYTLDNWAELRQYSDMDDTRTQLKTLNSQFSFFMKQKVAAKANLIALLDNTYPGVNKLFDSPTREDGSEKWVDYAYSFWHVDCVRKIGLKTFTERYKAFCKKHHYIFQQDKPEKLFNASKELVAVFPKEKTYKLLIQQSIQQLNLASGHVERLRQEMNALASTLPEYNTVMGIYGVGKTYGPLLIAEIGNVSRFTHREALTAFAGVDPGVDESGQHKSKSNRASKVGSARLRKTLFQIMTTLLQNAPEDDPVYRFLDKKRAQGKPYYVYMTAGANKFLRIYYGKVKECLRNLEQAE

SEQ ID NO: 150771 - protein, 339 aa, unidentified
MTIVMGLDQHRAQITAEWIDTETGEVSRSRVAPAHRESVRRFLSRFAGRELEVALEATTGWRFVVEELRRVGARVHLAEPAETSALRGNKKRAKNDRADARHLRELLMAGRLPESWIPPDHLLDLRATVRLRHALVHERGEWQQRMQAVLYHHGLPKRVDLLTRENRDWVGQLPLPVAGREQIATGLHVIDAVDVRLAPLDKQLCSYARRQQGAKALIAAHYGIGALTSVTILAELGDVRRFSSSREAVRYGGMDITVHASDQRRAPGHLSRQGPPALRWALYEAAQAASRQGSPDHAYFLQAAERLGRNRACLALARKLLKRSYHTLKDLGEEAIQPA

SEQ ID NO: 150772 - protein, 433 aa, unidentified
MAIVGGLDIHRRQITYDYLDSDTGEARRGRIQPAGRAELRAWLARFVGKQADFAFEGTTGWRFVAEEVTGAGFGAHLAEPADTRALRGPKRRAKTDRADARHLRDLLLAGTLPESWIPPAHLADLRTRVRLRKALLDERTAWRQRIHAVLFHHGLPERPGLLSAEGRAWLARVELPGAARDAVDLALRMIDRLDAELDPLDAQLLRFARRQPGCRALMRRYGVGALTAAAILAELGDARRFASSRRAVRFTGLDVTVAESDGKRTGAGSAAKAHRCCAGRSTRRPYAPPARAPPTMPIGWRSRTGGAPSAPPCRWPVSSPARPTTPCGSSATRPCGRCRCSRWREHGGTNTRGPTDQLMWCGWLPNAPVATLPSWAALIERAAAPAAAGNPITHHVAGPRSEHPDKAGRPRAALPAPDHPPATADRAEMMPVT

SEQ ID NO: 150773 - protein, 388 aa, unidentified
MNRIIKIGMDVHSKNYTLCAMEPTIGAEDRIFGEVQIAPDYREIICFIESLKTKLGLGNNYSIECGYEAGCLGYTLYHQLTGAGIKCVILAPTTMLTQQGQRIKTDKRDARLIAHCLCYGGYHPVYIPTGEDDAVKEYLRMRDDHKLALKKLKQQINAFVLRHGHPYTGTKWTGKHITWLKKLELNPMYRETLNEYMASYEEQEAKIERYDKRIEEIAAEARYQENVKKLVCFLGIRTHTALSLIVETGDFKRFAKGNTYAAFLGLAPGEHSSSESVNRLGISKAGNTHLRCLLIEAAKSICKGAVGHKSKELRSRQSGQSAEVITYADKANTRLRSKYYKMIRHGKKKNVAATAVARELACFIWGMMTDNISTTSAAGPSNPAVSQG

SEQ ID NO: 150774 - protein, 427 aa, unidentified
MRFIALDVHRDFCEVAIKDESGLRLAGKVKTALAELQLFAQSLAPDDQVALEASEPALQIARILEPHVGAVVIANTRKLRAIAESKVKTDKVDAKTLCELLAAGFLPAVWAPDEFTRALRRRLQRRAKLVRARTRAKNECHAVLARNLKGKSPMSDVFGKKGRRWLAALELPVDESETVECCLREVDFLDSEIALIERELAVQALSSEEIRRLMTVPGVSLVAAATFVAVVGEAKRFSSAKKLVSYVGLDPRVRQSGEAPARHGRISKQGSPEARHMLCEAAWVLIRTPGPLRAFYERVRARRGAQIALVATARKLSVLFWYLLTREEDYAFERPTLTRRKLLGLELKAKDGRRSWPSGHSVGTKQDREREREFAEQVETAYRRLVADWQPRAPKSGAGATRGRAFSSHLLGEETAARQGTAPEPAL

SEQ ID NO: 150775 - protein, 321 aa, unidentified
MIYIGIDVSKDSFVVAYSPDKNRKTKTFKNTTRGIHEFIGTISKDDHHCVMEATGNYSALLVYLLSEAGITTSLENPLKVKNFARAMLSTVKTDEIDARLIALYGEKMQPAPYKLRCDAILTLRQKRTVIRQLKKQLIATRNLKGSMEVLPFFDAKCKKSIEKTIVFLEKQIRDLEEDLASLAKSEYKKQMDLLTSVKGIGITLAAALIIATGGFTYFDNAKQLTRHLGLSPTYQQSGTSVNFKGHINRNGDSSLRSQLYVAAFSSIRYNTECRACYDRLRSKGKPGKVAIIAVANKLIRQAFAVVTQEKPYVDGYISSKK

SEQ ID NO: 150776 - protein, 399 aa, unidentified
MYDTSGIGVFLGLDVGKGEHHAHGLTPAGKKVFDKRLPNTEPRLRAVFDKLTEKFGTVLVIVDQPADIGALPLTVARHCGCQVAYLPGLAMRRAAEMYEGEAKTDARDAFVIADVARTNPRTLRQITVADETQAELTMLVGFDDDLAGESTRTSNRLRGLLAQIHPSLERVLGPRIQHEAVLELLGRLGSPEQLRKAGTSQIAKVLKPKAPRMAERLAAEITEALAEQTVVVPGTKASAIIVPSLARQLAEILEQRRMLKGQLEALLEAHPLSRLLTSMPGIGVRIAATLLVTVGDGSTFPDADHLASYAGLSPVTKSSGSSIKGEHAPRRGNRQLKRAMFLSAFAALHDPASRAYYDRHRAAGKTHTQALLRLARRRITVLFAMLRDSAFYQPGTATA

SEQ ID NO: 150777 - protein, 316 aa, unidentified
MSEQDQWIGIDVAKAWLDVATPQDAAVRRFANDPDGIAALVTALTTQPPQMTVLEATGGHETAVTAALAAAGLAVAVVNPRQVRDFARATGQLAKTDALDARILALFAQRMEPAVRPLPEPTAQELAALLARRRQLLEMRTAERNRRPALAPRLRTRLDEHLTWLSQQIADLDRELDQTLRESPVWQAKEARLRTIPGIGPVVARTLLGELPELGTLDRQQVAALAGVAPLNQDSGQRTGTRRIWGGRAPVRAALYMAVVSAIRCNPVIRPFYARLIAAGKPVKLAMVACMRKLLVFANAVLRDDVDWSPHALQTA

SEQ ID NO: 150778 - protein, 344 aa, unidentified
MHYCGLDVSAKSTHVYIEDEEGRRVRRTIVTTTPEGIRGALARYQDGRLTVALEAGNQTAWIHDELRELGCKVHIVHPLKVKWIAESKKKTDRVDAQLLAHLLRIGGLPEPVHMPSRRSRELRALLGARRQLVQMRTKLMNVARGLLRQQRVQIRAKGLRTEQGWRELKNLPLSAAVREVVDAYAATVAATTAALKALDGELTRRAGVDARVARLQTIPGVGQVSAQTLVASVDRIERFANAKKLVAYSGLVPSVRASGDRVVYGRITKQGRSEIRAVWVQAAHAALAVKDGRARPLQRWCERVAHRRGKKTALVALARKLLTIAFHLLRDRTTYDPGHLRCAA

SEQ ID NO: 150779 - protein, 408 aa, unidentified
MQVLYPRCAGLDVHKDVVVARVRCVCEPQHDEVRSFATTTASLLELNEWLTSHGVSHVAMEATGVYWKPVWHLLEEQFELVLANAQHIRNVPGRKTDVNDATWIADLLAHGLIRSSFVPPAPIQELRDLTRTRKQLVREISQHSSRIQKILEDANLKLGSVLSNVLGKSGRAILRALIAGETNPETLADLAEGVARKKRAELIEALHGRIRDHHRGLLKVHLELVAALEQALADIDATVGKTLAPIRDSARLLTTLPGVSDLTAQVMVAEIGVDMSRFPTSGHLISWAGLCPRNDESAGKRRSTRVRKSANWLKTTLVTAAWAAVRVKESYLRAQFLRIKSRRGAKKAILAVAASMLTAAFFMLRDGVDYHDLGPDHFDRRDRTKTIRRLVRRLHDLGCDVLVTTEAA

SEQ ID NO: 150780 - protein, 350 aa, unidentified
MAIIGCDLHSRYQQIAMLEFSDGEIVTRRLEHENGEARQFYAGLPKPSLVGIEATGYTQWFERMIAELGHELWVGHPAEIRARAVRRQKTDTRDAEHLLDLLLANRFPRIWVPTPQERDLRQLLRHRDRLVRMRTSVKNQLQFLAMSQGVCRRGKLWSRRGRAELEGLELGAWASRRRGELLELLDQLDPKIAELDQAVVKAAAHRPEAVRLMAQRGVGPVTALAFVLTEGPVERFPNSRKLVSYLGLNPSEGSSGGHQRLGHISKQGNEMLRWLLVEAAQSAALCDAELRRRYQHLKFRRGGSVAKVALARRLAVRLYWALRRARSLTSPVRTPGSPARSVVEATPSSF

SEQ ID NO: 150781 - protein, 274 aa, unidentified
MEYIALDAHKQYTWARVELPDGTVVQEKRIPYERGAIRRFLASCEPGSPVAVETIGSWYWIVDEVEEAGFLPQLVHAHKAKLMLGQVSKTDRLDARGLIRLQRTGTLPTVWIPSRELCDLRDLPRTRMLLVRQRTQLKNRIHATCAKYALVIPCTDVFGKRGRETLLQKLQELPPQTAFTTMCLLNQIDALNEQIARIESRMGDLFEVTEEVSLLMTIPGVGFILAVVIFTEAGDPGRFGRTEQFASYSGMVPRVHESGGRRRYGPLRSDVTTT

SEQ ID NO: 150782 - protein, 356 aa, unidentified
MNKRSKLNFSGQPIYIGLDVHKKSWSVSIFTKQGEYKSFSQTPKTETLMKYLQHHFPDGEYLSVYEAGYCGFWIHDQLREKGIQNIVANPADIPTQDKERRNKRDRVDCRKLARGLRSGDIKGIYTPPRWKLEDRSLIRTRLSMGRKQGRCKNQIKSMLLFYGVDIPEQREMGHWSRRFIRWIEGIRMQRASGDVALKIHVEELCHLRQIIAKLNRAILALSRTEEYQGWVSLLRTVPGISTLTAMIVLLELGEINRFPSLDQLCTYVGLIPDIQGSGEKEHVGGMTQRGHSYLRWLLVEASWVAVRKDPAMMEAFNEYCKRMKKSKAIIRIARKLLNRIRYVLKNQAEYVPSVIE

SEQ ID NO: 150783 - protein, 339 aa, unidentified
MSLYCGIDLHSNNHVITIIDENDNRLFERRMPNKLETTLNCLSEYQDDVAGIAVESTYNWYWLVDGLMDAGYSLHLVNTSAVKQYEGMKFTNDEHDAFHLAHLMRLGILPTGYIYPKEQRAIRDLLRKRGFLVRHRTAHTLSAQSMHSRMTGRQANCNVIQGDHAESIYLPGLDDANRRLEMKANLRMIQALHHQIVEIEKTVLNQMKLSPEYIGLKQVPGIGNILALTIALETGDISRFPKAGNYASYCRAVKSCRESNRKKKGEGNRKNGNKYLGWAYVEAVNHMVRFSNDGNRFFQRKLAQKNRAVAVKATANKLAKACFYIMRDKIAYDAKLLFR

SEQ ID NO: 150784 - protein, 343 aa, unidentified
MSKVTQSVSYGTSNGPLWTLENFVTFVGVDLHKHTVTLAAVDPRQDLIGHLTISTKCTDKIQEFLAGLPRPVWMAVEADGFIEWFLDRYGPVVDLLSIADATELALRRGKRRKNDLNDAKDIAERLARGECPLGWIADPETARLRKLGRHWHQLSRTLTRVKHCMRSILNAANLPGPSTLDGALTQRWLLGFGHVLKTVPGIDEIWACVIAAEIGDFDRFPNAETLEFWAGLTPDNELSAGKARSGNITKAGSRVLRWALGKAALVLCRSDRAQEKIRRRLIRTTGKKAKANVAMARRLLHILFAMHRDQKTYTVREPAKHEVRANRVRAKKRRRDAAGKEAA

SEQ ID NO: 150785 - protein, 390 aa, unidentified
MDVTTNKCCGIDVHQKKITVTTLIGDPAEKPKKLTQTFGTTTPDLKICGQWLADQAIEMVLMESTGQYWRPVWQILETFGFKMILCNPRIIKNIPGKKTDQLDSEWIAELARFGLVAASFIPPRPIQELRESTRTRKSLTQAGTQTKNQIHNILQRSNIKLTSFISDVFQGSGLKLLNLLINGEVITTESVSKCMHRKLKASPQELVAALDGSLSANDRILLDIQLNLLKHNQLAIQRLESNIEEQLKQFQELYLRLQEIPGVSQHIATIIIAEVGPDVSPFPNAAHLASWTGICPGNYESAGISKSGHVRSGNIYLKTALVTAALGAKKQTDSGLKDFFFRLRSRMGAQKALVALAHKLIRIIYAMLSNNCSFRDYKRDQQMKHLLASN

SEQ ID NO: 150786 - protein, 436 aa, unidentified
MDSIAAGPSKPSDAAGEPFRSLTHFGGFDWAMDEHQFAVVSPDGSVLLNLRFTNDAEGWAQLRARIAAYPRLGVAIETSCGPAVERLLESGVIVYPLNPKVAERFRDRKSPAGVKNDPLDAWCFADALRTDGQGWRALRPLDPLTAELRIYCRDEIALIEQRTAMILQLRAALHEYYPTALAAFDDWTHAGTWDFVLSFATPDALVKAGKRKWEKFLHAHKLYRPQTAQKRLDLFAKATEFASPSQAVTNAKSLLAITLARQLRTLQAQLDEYRNRIMQLFSNHPDRDCFGSLPGAGAKIAPRLLSELGNDRARFDSHEALQAYAGTAPVTQQSGKRSLARMRRACNKTLRATVHLWADLSRPLCAWAQAYYQQKKNQGMGHAAALRCLGQRWLKILWKMWHSGKPYDEALHTRNQVSHGSWVIGLMTPPLTPTTQ

SEQ ID NO: 150787 - protein, 398 aa, unidentified
MMVIGVDTHKREHALCAVDEGTGRVRGSREIKADEAGHQAAVRWARGLDSERVWAIEDCRHVSRRLEQALLAAGERVIRVAPRMMGASRRSQRERGKSDEIDAQSVARAVVKDGVECFPAAYLDERAMGIRLLFDHREDLVRERTRMQNRLRWHLLELCPELEAKLKRGALSELRALERLDRRLRQLAPCVRLRIAREELGHIRALTRQADQLERELLELIRAYRPALLDEQGCGALTAALLIGRTAGAQRFRSDACFGRQSGTAPIPCSSGQQTQHRLDRGGDRQLNRALHTIAITRAQRDPATKEYLARKQADGKTKKGALRCLKRYLARRFHRLLSEPPLPGQRAITGKQVDAPVCDASRDMSRAVEPRAIAERPAPKPETRRINAAPNPMICIA

SEQ ID NO: 150788 - protein, 401 aa, unidentified
MKRLSGGIDVGSESHHITILDEEDNVLYNQKIAHQLSEFAESIKLFKQIEKQEGGKLSFALEGKNGYSAPLDRILLDQGFTLYNVDNFKLKRFREAFAGEWRDDERDALMLSKMLKLKEHINSPREKVFIKIEKPSLVTESLKLLSRHQQTLIDERVRLTNRLGKKLLEVCPQILKLGKLKNKKIIAVLAKYPDFSKYKRITLKSLLKIRGIGKKGAFFLLKRLNNIEYMPGLTDIYQTIIFSYAQRILELQKEIENLDKKLDEIGEESKEVKHLKTIPGVATKLASRLIGEIGNINRFPAEKQLAVYCGVACVDDNSGKVTKAKAVYKANKICKQTLITMAGCSIRSIHQCKAYYLKKRTEGKSHNHTLRCLARQLIKVIYKMLTEDRDYIIRKELKKVA

SEQ ID NO: 150789 - protein, 400 aa, unidentified
MISIDGVGVFLGLDVGKQTHHGHGLTPAGKKVFDKQLPNSEPKLRAVFDKLTAKFGTVLLVVDQPASIGALPLTVARDAGCEVAYLPGLAMRRIADLYPGEAKTDAKDATVIADAARTMPHTLRTLDLTDEVTAELTMLVGFDQDLAGEANRTSNRIRGLLTQFHPSLERVLGPRLDHPAITWLLERYGSPQALRKAGRRKLVEVVRPRAPRMAERLIDDIFTALDEQTVIVPGTGTLDVIVPSLAKSLAAVHEQRRALEARIEALLEAHPLSRVLTSMPGIGVRTAAVLLTTVGDGSSFPTAGHLASYAGLAPATRQSGTSIQGEHAPRGGNRQLKRAMFLSAFAALHDPASRTYYDRCRARGKTHTQALLRLARHRISVLFAMLRDGTFYEPRNPRTA

SEQ ID NO: 150790 - protein, 504 aa, unidentified
MGYRDSQTLFEGGIEVSTTSRKLKFTPFPQRFFDPVVPLLKDYCFLLSTPENIHLGYYGSPIIHGDTIHHQAICSVEKQEELILQKEYRVFKESPKGDEGGSMFYLGIDVAKKSSRYLVLDSEGKRIISFSLENLKERFQNLLSRLQEAKIATKDILAGLEATGWFWENLYQFLQEKGFKVVLLNPYYVNKFREALAKKAKTDDIDALVIANLLRTGEYMNSVVPEEKIQVLREYTNLRYEFLRTRKDYQRKVISLLGVVFPEYERTALKNPFGVAPLQILKEFPTAKDLALAKPRHIEKIVRSIQGNNFDLKEIQSLIDWAKNSIYSGRAKEARGVSLKMLLGQVQALNSNIQEIDKSIEDILSPGTDDSFPGENLLSIPGVGKKTIAAVLSYLGVDGSSFCSAKKVTGYVGFFPRLYQSGETKRENRISHRGPKVLRWALYMSAVSCLIHNKEMRVIYQRKISQGKSAKQALIVVAKKLLEVMLAMLKSGKTYNPIQVYANT

SEQ ID NO: 150791 - protein, 356 aa, unidentified
MSYDVKYIGMDVHKEAIVIAVQNESGKLVMESVIETKASSILQFLHGLRGELHVTWEEGTWAAWLYDLLQPHVQHIVVCNPRRNALLKEGSKSDKVDAQKLADLLRTGMLRPVYHGENGLRTLRELGRSYQTISKDLTRVMNRLKALYRGWGIPCAGTQVYAARAREEWLNKLPQAGLRRRAELLYQQLDGLQDLRREVRPEFLAESRKHKAAKLLRQIPCIGPVRAARLIGLMQTPHRFRSKRQLWTYSGLGIETHDSAQYRFVSGQVQRSKKPQQVRGLNRNHNHEMKEIFKSAATRASCSRGPFHDFYAGLLAKGMKPEMARLTLARKIAAITLTLWKKEERFDVKQLKTQAA

SEQ ID NO: 150792 - protein, 346 aa, unidentified
MTNHNVLAIDLAKNVFQVCKFSRETNKVIYNKELSRKKLKELLIREKISLVAMEACASAHYWARYAKEHGHEVKVINARAVKGFLVKQKTDKNDAHAIAIAATMVHIKSVGILTPEEQGLQSLERARELAKAHRTALSNQIRGLLSEFGIVFAKGFASLNKELPFLLEDAENNLPYNFRQTLHQLWEMFHCYDENLKVLEKQVEQEVKQHSMCKKLMKLEGVGPIAALGLSIRLGAADTYNNGREAAANMGLTPKQHSSGGKENIGHISKNSADKRLRSVLFQGALSVINSIENRPAKTNKELWLKALIIRRGKKVAAIAFANKTVRTAYALIKNKTEYAPVELIA

SEQ ID NO: 150793 - protein, 374 aa, unidentified
MKEFSKYVGLDTHKETIAVAVADALGGKVRYYGEIANTPEAIQKLVKQLCPDGEVISFCYEAGPCGYEIYRQISQLGHYCSVVAPSLIPTKPGERVKTDRRDSEKLSRLDRAGELTPVWVPDQDQEAMRDLTRAREDMKGLERITKQRLNAFLLRYGRIYESGKSRWTQAHFRWMEGLKFDVTVQQIVFQEYVDAVKQAEARVAGLEKEMEKALEYWVLAPVVEALMALRGIKLITAMTVMAELGDITRFDSPRQLMSFLGLVPSEASSGLTRRRGGITKTGNGHVRRVLVESGWCYRFPARKTAHLQRRAEKCSSEVQAIAWKAQKRLCGRYTHLLERGKLKVQVCTAVARELVGFIWAIACEVMGKHVVSAR

SEQ ID NO: 150794 - protein, 322 aa, unidentified
MLIIGCDFHTRYQQIAMLDETTGELVERRLEHDSGEAHRFYGDLPKPVRVGVEATGPLHWFERLLAELGHELWMGDSGRIRASEVRKQKTDQRDARLILELMLANRFPRIWVPTVTERDLRQLLWHRHKMVRMRTMLGNQLHFLAMSQGLCRKKKLFTRRGRTELSGLPLGPWSSRRRAELLHLLDQLDPAIDELDRAVTQEAERREDAALLMTHPGIGPVNALAFVLTIGPVARFERSKQIASYLGLNPSEHSSGGKRRLGAISKQGNTMVRWLLYVLDAAKWSRLRTAGSHASQPGRHPGEREFIAGLIGQLAPPTGRGV

SEQ ID NO: 150795 - protein, 346 aa, unidentified
MIIIGCDFHPSWEQVAWLDTETGETAERRLVHAAGEAGPFYRQWPAPTLIGMESTGNCQWLIDLLTELGHEVWIGEAAQIRATMVRQQKTDRRDAAHLLELLVEGRFPRIWVPSSGERDQRQLLIHRYKLVTLRARVKNELQHLALNQGVQKKRKLWSEAGQKLLRELPLKPWASRRREDLLKVLSMLDGQIKPLDEAAKEAAEKSEMARLLMTQPGVGPITSLAFVLTIGDVKRFARGKQVASYLGLIPREYSSGGRQRLGSISKQGNRFLRMLLVEAAQGAVRYDPGFRQEYLHRCHQKAKGVAKVAAARKLAIRLYWMLRTHTPYPEVVRIESSPRVPLVGRS

SEQ ID NO: 150796 - protein, 416 aa, unidentified
MSHKIAGIDVHKKVLMVVVIDATAPEEKPERRRFATMPSDLRCLANWLRGLDVKEAVMESTAQYWRSVWLEMEPHMLLHLAQAFSNRAPRGRKYDFRDAERLVRRLIADELILSFVPNGEQRIWRNLTRSRTQLVRDRVRLQSQMECLLEEMRIKLSSVVSDFLGASGLRILHALAKGETDPRQLAALRDERLKCTEEQLVDALTGSSQPMHREMLALQLEHLQLIDRQMEKLSCMIAAAMKPHQHAVKRLAEVPGFGVDSAQQMISEVGVEASTFASAAELTSWVGTCPGKDESAGENHNSRSAKGNRYLRRVLNQAAHAAVRKDGSHFQTVFRRLLPRLGYQSAIWAIAHRLCRMVWKILHEGVHYFEQGSEPDPAARKRRAKDLARALRRLGYDVVISPLNPVIQDGMQVLEN

SEQ ID NO: 150797 - protein, 450 aa, unidentified
MVKSTNQPTQNPLAILNVHAAGIDIGSILMMVSYTDPTGQQKLLESTGFSEDLIKLAKTLKSECITDVAMEGTGVYWMSVYEVLEQEGLKVTLTNPRHFKNVAAQKTDVKDCQWLHQLHTHGLLRSSHIAPELYRELKTYIHERNILQKIKSDTLNRIHKILTQMNIKVQHVISDIEGAAGMKLLRGIASGITDPEKLLSLVNTSKLKASTDELLRSLQGLHKKQYTVVLQNQLEVFDFLKGKMNSYELLIEDVLKTMMPVDENGTVPEIEKKKGYTRKNEYTVNLKAYLERILGVNVTAVDGLKEISVLEIMSVTGTDMNKWRTPEHFTSWLNLSPRPKISGGKLLGHEKRFTNNKATQAFRLAAQTMWQNKGPLGQLYKKLAVRKGSKKAIKAVARKLAVIFYKMVKEKCPYDKARLERNIDQQRARKLAMLMREASKYGYDLQPVMV

SEQ ID NO: 150798 - protein, 312 aa, unidentified
MTHLICGVDVSATTLDARIGREGAHRRFAVSADGLTELIGFCRAHQVSLVVMEATGGYERQPAGHLWAAGLPTAIVNPRAVRDFAKAMGVLEKTDRLDCGIIAWYAETRRIQPTPPASATQARLTALVLRLRQLTDLRTQQGNQRRLVTEPDALASFEPLLALVASQQRQLEALIAQAISADPLWARLDAAFRSIKGVADRTVARLMAEMPEIGSLSNKAVAKLAGLAPIARDSGQHSGKRRVRGGREGVRSILFVIAEVVRRYDPDFAAFHQRLVSAGKPKKLIRIALARKLLVRLNAKARDVRQTNAFPA

SEQ ID NO: 150799 - protein, 383 aa, unidentified
MKKTEETLQEKDTTKEQILHLSFELSNTKWKLASSDGKKVRIKGIDARNLEQLQEEFAAAKKRFKLKDDVRIVSCYEAGRDGFWLHRYLLSYGIDNIVVDSSSIEVNRRRRRTKTDRIDARKLLSMLMRYHGGERKMWSVVRVPSVEAEDGRNLNRELEVLKKERTMHRNRIRGLLIREGLEVRNPSGKKFLDELDSLCTWDGKQLSEDFKTRIVREYERLRMVEEQMGILRKERETRVESADTLSMRKVAQLRTLYGIGVTSSWDFVMEMFSWREFRNRKEVGAFLGLTPTPYDSGGSQREQGISKTGRGRLRALSIQISWGWLRFQPQSKLSRWYMERFANGGKRMRRIGIVAVARKLLIDLWRYLEYGVVPEGARVRTMG

SEQ ID NO: 150800 - protein, 315 aa, unidentified
MVTSYQNFIGIDIGKFKNVVAIHKQKNAVEFDNNASGWQQLFQEFSDILPNALVTLENTGKYELGLSHFLTDKNIAVHRANTRKVKSFILSHGALAKSDRSDARALAQYGFERHRTISLFVPTSTEQSTLAALCQRRDDITQMRTQEKCRLEAPENDHIKESCQKTIEFFDSQINELNDTIQKIIDESRELQQRQKILKTVPGIGKKLSQDFLCLMPELGYLNRKEVASLAGVAPHPKESGKAVGYRRITGGRSNVRSKLFTAAMAATRSKSILGAFYSKLVESGKKKMVAITALMRKIIVIANTRLKEAINLHT

SEQ ID NO: 150801 - protein, 344 aa, unidentified
MEHYAGLDVSLELTSVCIVDAQGHIVRETKVPSDPEDLVRYFQSLKFPIARVGLEAGPLSQWIHAGLVAAGFEAVLLETRHVKAALSAMTVKTDRRDARGIAQLLRLGWYRSVHAKSASAQEVRALLTARKLIQGKLLDIESGIRGVLRGFGLKVGPISRGRFEARILDLVDGNAMLETVIGSMLSARTALQQEFTRLHRALLTLVRDDPVCRQLMSVPGVGAIVAITFKSGVDDPTRFRRSRDVGPHFGLTPRKYQSGELNVTGRITKVGDRMVRTALYEAASVMLTRTVRFSSLKAWGMAVAKRRGTRKARVALARKLGVILHRMWVDGTTFRWSNEEAAIV

SEQ ID NO: 150802 - protein, 408 aa, unidentified
MLFVGDDWAEDHHDVEVQDEHGRAMRTARLSEGVDGMARFHELVARFLPEDAKPSDVLVCIETDRGPWVRALIAAGYQVYGVNPKQAARHRELLSLSGAKSDKADAHTLADMVRTRRHQLRQVAADSDIAEAVKVVARAHQTLIWERTRHMLRLRAALRDYFPAALAAYQVLTLTGADALELLAKAPTPAAAAKLTIGQISAVLNKARRRDIPAKAAAIQRALRTEHLGQADIVAGAYAATVRATVAVLQTLNTEIRTLEGQVEAHFGQHPDAEVYLSQPGIGVILGARVLAEFGDAAGRYASAKSRKNYAGTAPITRQSGKSKTVHARFIHNDRLVDALHMQASAAVLHDPGSRAYYDELRARDIGHNAALRQVGNRLVGILHGCLKTTTVYDKNTAWSHRELTAAA

SEQ ID NO: 150803 - protein, 320 aa, unidentified
MMAQNDLVVVGIDVAKDKVDACIRRFTLRQTFPNTAQGHRKLVAWLRKYQVGKAVMEASGGYEREWRNVLHNAGIEVRIVDPRRVRSFAQSAGRLAKNDPIDAEMIAWFAETFSQAPGQIPDAAREELATLAKARKALVDVKIRLQAQDEHAAPEPARKAYARVLKSLAAEIDKLEAAISAKVKATPEFVERAEIIESVPGLAQATSAILIAGMPELGQVSDEVAAALIGVAPYDDDSGKRRGERYIKGGRRWVRNAIYMPCLGAATQYNPVLKAFYQRLLAKGKEPKVALVACMRKLIIILNTMLARRQKWNPGRHAMA

SEQ ID NO: 150804 - protein, 462 aa, unidentified
MKLYLGGDVSKGYADWVILSEKKQAVLDNFQLDDTYAGHCKLYAMLEAYFVKHRELEIYAAVESTGGYENNWFSTLKSYQKVFNLKVARVNPAGVNFNRRAGLKRNVTDAISALSIAEYLINHPDNIKYDQDDLWKSLCRHWNFVEMQKQQRVQTINQLETILYSANPTLMRYKKDNLPNWLLELIIQCPTAEILAKARPEKLAKIPYLSLARATTLVAEAKQSIASATDKNAEILVSQIARQIKSFDQNIKSQMQLIERDLTCPEIELLKSFKGIDTISAIGLLLEIETIERFPTVKGFSCYYGLHPKFKQSGDKIIGVRMSKQGSKNMRKILFNIAKGAITYNPLIRDVYEKKLSHGMKKLAAIGVCMHKILRIIYGMLKNKQAYNPLIDKQNSERSKDKQQEKQQQENANIEKSRRYQEFDVKAPISRKQTKKRREHDLSQCEITSQNTGSTCSSETKL

SEQ ID NO: 150805 - protein, 389 aa, unidentified
MPTVADRPEAQTAIQTNLAAIFISLELSRSIWLITSLSPGGGEKMSKHSVPAGDIAALLARFSELKQKALARTGKSFPIVTIQEAGLDGFWLHRVLQSEGIESHVVDPASIATSRRRRRAKTDRIDGEALLRALLAFKRGEPRVCAMVRVPTPEEEDRRRLCRERKVLIAERVKHVNRVKGLLFSQGVSGYEPLRRDRRQRLDELTTGDGRPLPTHLKTQISRELDRLELLLDQIKAAEAERDALLAAQQAATPAPAGRMLLDLKGIGPEFAANLWLEGLFRHFDNRRQLASYAGLAPTPWQSGSVDREQGVSKAGNPRLRTTLIQLAWLWLRHQPQSALAQWFKERVSRNGGRLKKTTIVALARKLLVALWKYVTAGVVIEGAVMKAA

SEQ ID NO: 150806 - protein, 480 aa, unidentified
MRDWDMTIPRTYLAAPVAHPVERRSSDRFLPYGPSPRTAARRSKTMVRYVGLDVHPKEVEACILDGTGRVALRARVACTREALGAFARRQLARQDRVVLEATCNTWSVASLLRPYVADVVVSNPYKTRLIAHAKVKTDKVDAYVLAQLLKSGFLATVWAPPDDVLKRRRLVSRRSGLVSDRTVVKNRIHAILHQRLITAPFSDVFGVGGLEWLKKVPLDPEGREAVDSDLRLLETLDQEIEPMDEALAKEAYGDPRVKLLMTMPGVDVGVAMALLAAWGDISRFPEPDKAAAYLGLVPRVQGSGDKCYYGPITKEGRSHARWMLVQAAQKMDANPGPLGHFFRKLLRKKNRSVAVVATARKMAAIAWQMLTHNEPYRYALPVQTQMKLSRLRVVATGEKRPSGRPKGTKLPNFGSGIRTKTIPSLSEVYEKEGLPPTREFEKLTAAEQRGMQKMGVEVFARDIRKPHTVIITKEKAQKEP

SEQ ID NO: 150807 - protein, 443 aa, unidentified
MINPDAAGIDIGHREHWCAVPVERSAKPVQRFGTFTEDLEKLADWLKECGIKTVAMESTGVYWIPAFQILERRGFEVRLVNARQVKNVSGRKTDVLDCQWLQRLHSYGLLNASFRPADEMCVLRSYLRYRDELVCARSVQCQHMQKALQQMNVQLHQVLSDITGLSGLRIIEAILAGERDAEKLANLADRRVHASKATIQRALKGDYRSEHMFLLKVAFELHGTYEKKIHECDEQVIAEMAKLPARVDPKQKPLAPRKPGRAPIRDMVAGKDLREELYRWTGVDLTAIEGIGVLSAQVILSEIGTDMSRWRTEKHFTSWLGLCPDNRISGGKILSSHTRHVINPVADVLRIAATTLERNKSALGAFYRRMKGRLGPASAITATAHKLARLIYRLLKHGDAYVRQGIEVYEQKYRERLIHNLKKTAASFGFQLTETKELAQGVS

SEQ ID NO: 150808 - protein, 376 aa, unidentified
MNEFNQVYVGLDVHQATIAVAVARPGRGEPDYHGTIENRDSALRKLLKQLSRQGEALSFCYEAGPCGYGLYRELTALGHGCVVVAPSLIPRKAGERLKTDRRDALMLARLHRAGELTAVWVPDQEQEAIRDLTRAREDMKSLELKCRQRLGAFLLRHGHVYAGKSRWTQAHFHWLASVKLDSPVQQIVLQEYLDTVKSMQRRVADLEAQMREALAGWSLGTVAQALMALRGVSLITAMTVLAELGDLSRFDSPRELMAYLGLVPSEHSSGGSRRQGRITRTGNGHVRRVLVEAGWNYRFPARKTRVIEARAAKTSAVVQAIAWHAQMRLCGRYRALLAAGKLKQQVTTAIARELAGFIWAIACAVAGKAHGSKAVA

SEQ ID NO: 150809 - protein, 430 aa, unidentified
MEEVTDEPLYRDRVCGIDIGKAQMVATIRVPSEKDPARRAAETRSFGTTKREVLALADWLRCWQVPAVVMEATGDYWKGPFYRLEAEGFECVLADARQIKNLPGRPKRDSSDSAWIAVCFERGSITSCFVPTEEFRLIRLHTRYRRDLTGDRTRDKNRVEKLLESAAIKISAVLADVHGMTGRDIMQQLIAGQRDPKALAQLARRRARAKIPQLEQALEGADFFTEAHAGLLKAMLERIERADEEIARLSQVIEQLLSPYEEQLQQAESMPGWARRAAQDVIAETGVDMSRFPTPGHLASWAGRTPLDHQSGARRGKARRKHGNRYIGAVTGETAVAAGRTDTREGARHRRLARKRGKGKACVATGNTQMRVFHVLLSNPGMRYTDLGPDWYADERQAARRLTRLVGALDAMGYEVTLCRKPEPQDSPAA

SEQ ID NO: 150810 - protein, 485 aa, unidentified
MQRRLVGIDLGIASAHTVRVRDEAGREVCRRRCEPTVDSLSMIESAALAGAAPGTRLEVVIEPTGPAWLPIAVFFTARGHLVFRVSSAKAADLRRFLSRHAKSNGIDADTLARLPLIDPDGLRPLELPDAAAAALDRRVRACDRLTMAASEHKVRIKDLVRQVMPCTPLTGDLGKADLAVLERYADPRALLRLGRARLTALIVKASHNHQGAARAEQWLVAAQAAVDLYGDHPAVAFTDLAAEIATEVRLLRAITTELAAHAAERETCYRWVDPMQLARSLPGLAEVGGPAMTAVIGDAARFPTAAHFKSYLGLAPRASETGDTDRKGQPMSKAGSRLARATLIRAADWARKQDPQLARIYHQQMVERGAEHLKASCVVAARLAERLWTVMRRRMPYVICDVDGTPVTPQQAKQIIAQQWTVTEEIRRRRRSTKRRAGKAPHQALTGHDQKDARSVRTRRPSPPESSATPSRTVKQPALLTTDPR

SEQ ID NO: 150811 - protein, 388 aa, unidentified
MKTYFIQPTMTAAILTSTALAGKPASAAALALVAKLPPRQPLPRGVVDPNKPLLKLGLDVHLEFIMAVAQKDHANPPAPRKFTNDQLVAQVRQWIAEGLQVFCVAESCGFGFGLHRRLVEAGAQSFLITPIALNGARKTDKLDARALCLRLSRWLDGNRDELAPIRIPSQAEQRRRETTRRREFLASEIRRLANRGHGQVAEYCHAKLSHRWWGPRNWNKLATLEPWVLGLLADLRTLILAFEAQVRALELEIKARVQDQPRPKALGELTLVTLDGEVCDWGRFYNRKQIGSYTGCCPGEHSSGGHRRVGAIDRLGNGRVRALLVEAVWRFLRWQPGWKAAQRMKVKLADGASMRKKTVIALARQLAIDLWRWRTGRATMEELGWIAA

SEQ ID NO: 150812 - protein, 310 aa, unidentified
MDRIIVGIDVSKDRLDVVVRPSGETFVVGRNAVGLEKLVARLRALSPHIVALEATGGFETVVAAALGSAGLPVAVVNPAQVRAFAKALGQRAKTDPIDAGVVAHFAEATNLEPRPLPDEQTRLLADLVGRRRQIVAMIGAERQREQRLTAPRISKSIARLIKALEKELASLDADIDDAVKGSPAWRAKEELLTSVPSVGPVIARTLVAELPELGQLGHKQITALVGLAPFTRQSGKWRGKSFIGGGRTAVRAALFMGAMVAKKHNPILKAFFDRLVAAGKPKMVALIAVARKLLIILNAIVRDNRPWQTA

SEQ ID NO: 150813 - protein, 455 aa, unidentified
MAKRRRKKTGKVKVLHVLQPNASGIDVGATAIYVAVPPDRDAEPVRHFDTFTEDLHKAAKWLKTCGVQSIAMESTGVYWIPVLQIFESYGFEVVLVNARHVKNVPGRKTDVQDCQWLQYLHSVGLLAGSFRPTEDVCAVRSLLRHRDNLIKMASSHVQHMQKALTQMNVQIHNVISDITGVTGLAIIDSILAGERDPQKLAALKDRRIKADQSTIAKSLEGDFRSEHVFTLKQALQVYRYYHQMITECDREIESLVNDFDSRINPDETPPPPSRSRKRKPKGNEPNFDLRTHLYRILGTDLTLIDGIDVTTAQVFFAEIGPDLSKFKSPGNFCSWLCLSPNNKITGGKVISSRTRPGKNRFAQALRMAAQGLWNSRSFLGLYFRKMRARHDSAKAITATAHKLARIIYHLVKNGKQFDQAVFAQQEELHHKRLERRLRSQAKTLGFLLVPCTQGA

SEQ ID NO: 150814 - protein, 338 aa, unidentified
MTIVMGLDQHRAQITAEWIDTSTGEVSRQRVAPAHRAGVRRFAERFRDQELEVALEATTGWRFVVEEFTAVGARVHLAEPAETAARRGTKKRAKSDRADARHLRELLMVGRLPESWIPPEHLLDLRARVRLRHTLVDARREWQQRIQAVLYHHGVPPRSWLLGAEARAWLTGLELPPAAREQIAIALALIDAHDAQLVPLDQELREYAKRQPACRALMRHYGIGPLTSITILAELGDARRFSSSREAVRYAGLDITVHQSDARRAPGRLSRQGPAALRWALFEAAQCARRPGSPDHHYYLQTAERLGGNRACLAVARKLLKRSYHTLRELGEEALQPA

SEQ ID NO: 150815 - protein, 360 aa, unidentified
MTKVKQLDFTGTTIFCGLDVHKVSWRVNVRDSELELKDFTQPADAGLLHRHLTKNYPGAKYKAGYEAGFCGFGIQRQLSALGIECVLLNAADIPKADKDRRQKNDKRDARSISQELCSKRNLQGIYVPTPAWEHARTLVRNRQQQISDSTRCKCRIWHFLHFSGLPAPSKEEAGQYWSRKFVKKLEDMDCNGSNSLKAALQIKLLDYLHKRDLLLQSTRAIRSMYRQPSYWPFMKLILSIPGIGEINAAIILFELQDIHRFKTFDNLCSYVGLVPDTDDSGESKRNKGLTHRRNTNLREALIESSWILITKDPAMLLKYKDYCKHMHKNKAIIRIARHLLARINYVLRKQTEYVSGLLQG

SEQ ID NO: 150816 - protein, 338 aa, unidentified
MKLYGGIDLHSNNSVVAVTDEHDQVVYRKRLPNDMDTILSVLEPYREFIQGLVVESTYNWYWLVDGLMDAGYRLHLANTAAIKQYEGLKYSDDDTDACWLAKLLRLGLLPEGYIYPKEQRPIRDLLRKRSQLVRQRTANVLSVQNLLARNRGKSISANEINRLEFDQIEQMLENEPLVLAVASTVMVVRSQQEMIGLIEKVLGRHHKRSAALKRLLTVNGIGEVLGLTILLETGDIRRFEGVGNYVSYCRCVDSKRISNGKQKGKGNRKNGNKYLSWAFVEAANFAVRYEPRIKRYYQRKRSRSNGIVAIKTVAHKLARACYFILRDGATFDVERAFG

SEQ ID NO: 150817 - protein, 435 aa, unidentified
MEEVTDEPLYRDRVCGIDIGKAGLVATIRVPSDRDPARRAAETRSFGTTRREVLALADWLRSWQVPAVVMEATSDYWKGPFYRLEAEGFECVLADAKQVKNLPGRPKRDPADSRWLAACFERGAVTACFVATPEFRIIRLHTRYRRDLTEERTREKQRAEKLLESAAIKISSVLTDLHGVTGRDIMDHLIAGERNPKVLAQLARAAARRKISQLEEALEGAEFFTPAHAALLAKVLARIDRLSAGIEDLSQVIEQLLAPYEEQLQQAESMPGWARRAAQDAVAETGVDMTRFRTGPHLVSWGGRAPQDHQSGTRKGRAKAKKGNRYLGAVLGETAVAAGRTQTREGVRHRRLARRRGATKACVATGNTQLKVYHKLLSNPGMRYQDLGPDYYERQRDVRRQVAHHVGKLGALGFEVTLCRTPEPSPDETGPIQAA

SEQ ID NO: 150818 - protein, 334 aa, unidentified
MELIKQVFGIDISMDSFVCRVGIITTDQQTEISSFKEFSNNNPGIKQFYKFASSQLIEGVTQYFLMEATGVYYEALAYFLKSKGAHVIVVLPNKAKHFAKTLTIKSKTDPIDAHMLTQMGLEKRLSEWEPPSEQMKELKLLTREHLALKELKTDAKNRVHAKAHSFKPGRDTIRRLGREIKLYEALIKEVELSIRSLLQSDLQMWVKIQNILRVNGVGLMTIAKVLAETNAFALIRNGKQLASYAGLDVVFNESGKHQGKTRISRKGNSHLRQSVYMPAISAIKSNPRMKSFYERMLEKGKPKKVGVIAVARKLLLLIYFLWTNETEYDPAYAA

SEQ ID NO: 150819 - protein, 321 aa, unidentified
MNSTQQPLNIGADIAKDEIVVACAEQSFTPRKIANRRSALLAWLNKLPQGSRIAMESTGSHHERLAELAHKLGLTVYVLNAKDVRHYAKGVGLRGKTDRIDAQLIARYLAKEHAQLHPFVPPSAQQRELERLLRRRTKLVRIRAAVKQSLNGMRGFAVEVRGLLARLDALIKRIDIKMRASIEACPHRQEACARLQRIPGVGPLVGGGLLNTLQRIPFGSAAAFVAFCGWDPRPYDSGRKSGRRRLSKRGPSLLRYLLYNAAMAASRTKAWRPLYQRSLAKGLSRTEALVILARHIARTAWSIYTHKTLFDAQRISQQVLT

SEQ ID NO: 150820 - protein, 299 aa, unidentified
MSQPDLQCIGIDVAKATLDVAATDEIIPFTVSNDTEGFKIITDKISGLNISLILMEATGGLETQVAAYLQSEGFEVVIINPRQARDFARAMGHLAKTDRLDAALLAQLARVIDSHPDRNRYIRLMPDATRKALTALVVRRRQLNQMLVAERNRLYPSHPDSRDSISRVMQALEAELALVTRMMNRQVRQHFREQACLLTSVKGVAEITAANLLAELPELGTLNRREISALVGVAPVNRDSGKMRGRRTIFGGRAGVRCTLYMAVITAIQFNPAIRAFYVRLVEAGKAKRWRWLPVCVSC

SEQ ID NO: 150821 - protein, 419 aa, unidentified
MTILDSTPAAVLVAIDVAKMRNEVLIEAPGHKRRRRLLVLNTRAEYDHLIEVLQAYGRPVVCAFEATGNYHRPIAWRLAEAGFEVRLVSSLALARTREALHNSWDKNDPKDAQVILHMLRIQATQLYHDPLRAGINDVQELSKTHEAIARAKTEIQHRILTHYLPLYFPEIDRFRGNSRSDWFFAFLHAFPTPASVTALTKEEFVAAAWDVVGRKVSKTQILMDIYETARSSIGLPLPLDAPAIRMFRMVIDEARSLIRQRNEIEAQADELLRHSQDYQLLRQIPGIGPINALTIIAEAGDLRRFGHHRQFLKFCGLDLSTQQSGQYRGQTRLSKFGNARLRRTLWIAGQVAIRQRENGFRHKFERYIARDRDNPDLRRKAMTAITAKMARVVHAVVKGGSDYRPFVEGRVPGGRTSVS

SEQ ID NO: 150822 - protein, 455 aa, unidentified
MYLPDWKWIPIRKGLLLMSNKVIFNLDELFISVGIDVGADFSWMSIALPNQQFVGKPYKILHNSIDSLTTAVSKIKEAEELYSLESRIFLESTGIYHYPLFCYLRDKGFNCSVINPIITKNSTNINIRKVHNDRFDSKKAALVGLKSDLKVSLMPSDLALNCRNLCREYYDLMDNRSAYVNKLQGELRMAFPQYLGIFSKVTINTSLTLLETYTSPSAFLEADKQEIIDIIKSTARFGLTYAQNKYNAIIQAATDANQFGYIIDSNIKRIRLYISFIRKYDEEINSILESLHELVDANEDADFVKQIHLIETFKGAGFLSAVSIMGEIGDFSAFSKPKQLFAYFGLDPAVKQSGKFEGTKVQMSKRGSAIARRVIHILTLQSISISRNGEAKNPVLREYYLKKCDSKPKLVAMGAVSHKVCNMIFAILRDNKPFKIIAPQEHIKQYNAAKCDIAA

SEQ ID NO: 150823 - protein, 343 aa, unidentified
MAIVCVGIDLAKNVFALHGVDEAGKPALVRPTVPRAKLVEAIAALPPCLVAMEACSGAHHWAREFQKLGHAVKLIAPKFVIPYRLSGKRGKNDAADAAAICEAAQRPSMRFVPIKNVEQQGQMCLHRVRQGFVEQRTALINRIRGLLSEFGIVLALKAATVRREALLHLEDLPGWANLAVGDCLSEVSRLDERIRDYDRHLAQPARQNESARRLMQLSGIGETTATALIAAIGNGHDFQCGRQFAAWLGLTPGQYSSGGKTRLGRITKAGDAYLRSLLVLGARAVLASAKNKADPISRWAMSLQERRGYWRAVVAMAAKNARLAWAVLRKGEGFTPPGAPSPA

SEQ ID NO: 150824 - protein, 412 aa, unidentified
MELLHRRCCGLDVHKETVVACLRLVSDGKVTTEVRTFQTTTAELLRLSEWLATNDCTHVAMEATGVYWKPVWHILDDGEFELVLANAAHVKNVPGRKTDVNDAMWLAELLAHGLIRASFVPDTQTQEMRNLLRTRKQLVREQSSHVLRVQKTLEDANIKLDSVLSDVMGKSGRAMIEALIVGETNPVKLAGLADRRVKASPEELREAVRGRVTKHHRFLLRLHLNQIDALDAAMATLDAQVEANLGPFRTAVDLIMSVPGIKNLGAQAIVSEIGIDMSRFPSDAHLISWAGICPRNDESAGKRRSNRLRKGAPWLKTTLVQCAWAAVKKKNSYLQAQFYRIKARRGPNKAIMAVAASILTAIYHMLKDGTMYQDLGRDHFDRRSTDQQKKSLIKRLADLGYAVEIKPLAAPA

SEQ ID NO: 150825 - protein, 347 aa, unidentified
MLHAGLDLSRRKVDVCLLSEAGEHLDQLTAAPDADALRGLARRIAEAYREPVCAVVESMTGARLVHDTLEQEGWNVEIADAQRVKGLAPLACKTDKIDSQVLAVLSHRDLVPAIWLPDPRVREERELARFRLHLVKHKSALKNRIHSTLINFGKPCPVTDLFGVEGRRLLERLRVPEPWRGNVTASVELIDDLERQIDEINTRLKDGHADHPYIPLLMSAPGIGWVLAFTIAAEIGEIERFPSPEKLTGYTGLCPRVNQSGDKDRRGPLTKHGPTYLRWAMLEATMHALKHPVYSKRYQRNKKRLGKQRGAKVAQIDIARRLTHAIWHMLSRKQQFAPRGAAFRLAA

SEQ ID NO: 150826 - protein, 345 aa, unidentified
MEHFAGLDVSVKDTSVCIVDETGEIVREVKVASEPEALLAVLKSPTYHFKRLGLEAGPLSQWLFSALAEADLPVICVETRHMRAVLKAQINKTDRNDARGIAQMMRVGLYRPVHVKTLRSQKLRMLLTHRKLLQSKAIAIDNDLRATLRNFGLKVGLVGAVRFEARIRELVEDLPDLAALVEPLLIVRQALREQFGILHRRLLAAVRNDEVCRRLMTVPGVGPVVALTYRATVDVPVRFRKSKSVGAVFGLTPARDQSGERDCMGTISRCGDEMMRTALYEGAQVMLTHSAKWSWLKAWAMQIARRRGMKKAIVALARRLAVIMHRIWVDGTDFRWTREELAKAA

SEQ ID NO: 150827 - protein, 402 aa, unidentified
MRCIGLDVHRDFCEVAIYENGEVRSVGRIASSPEQLQLFAQSLCREDHVALETTGNALSIARILEPHVGGVLVADTRHVRAMTHAKVKNDRFDARMLAKLLAAGMLPGTWVCDEPTRVLRRRISRRTQLVRGRTRARNQIHAIAIRNLCGRAPASDTFGKKGRAWLATLKLPADERETLDACLREADFLTREIALIDRELARYALGCPEIRRLMTIPGVSMITAATLIATIGHIQRFPSARHLVGYVGLDPRSRQSGVSPIHHGHISKQGASTARHVLCEAAHATMLAPGPLRAFGQRVRARRGSKIATVAVARKLTCPTWHMLTRRQDYHYERPALTFRKLRRLELTAGAPKRSNPAARNAPATPDIPAQWAAERAHAQTIEDRYRAAVADWQPQRPAAPT

SEQ ID NO: 150828 - protein, 324 aa, unidentified
MYLGLDVSKNTLDCCLNKDGFFYACKISNNEKGFEKLKAWLDGHGCDETLHCCCEATGNYYEAAAEYLAEHYKMSVENPRKIKAYAVSELKRSKNDKQDAKTIAEFCEEKSRKLKTWKPKNQTEKELQSITRYIARLKQQKASETVKRQTASDNIKDLIDETIDYLGRKIKEAEGRLKTYINQNPELKQKANNLTTIPGIGIQTAAIIMAALSGNNDFKTAKQFTAYLGLDPAEYKSGTSVKGKDRISKVGDCITRAALFSPALVAYRIGTFPRLVANMRQNGKHIMQILAAIMRKLAVVAYTLHKTNTTFEKQRHTRIQQKAA

SEQ ID NO: 150829 - protein, 320 aa, unidentified
MMAQDDLVVVGIDVAKDKVDSCIRALALRQTFANTAQSHRKLVGWLRKHQVNKAVMEASGGYERVWARVLREAGIEVRIVDPKRVRSFAQSAGRLAKNDAIDAEMIAWFAETFSQAPGQTHDAAREELQTLVKARLGLIDFRMRLVSQSEHAAVGLVQKAHARILKSLASEIAKLEAAISAKIKSTPDFAERAEIIESVPGLAETSSANLVAGMPELGQVSDEIAAALIGVAPYDDDSGKRRGERHIKGGRRWVRNAIYMPCVGAATQNNPVLKTYYQRLIAKGKEPKVALMACMRKLIIILNTMIARRQKWDPSRYALN

SEQ ID NO: 150830 - protein, 428 aa, unidentified
MNKTETERMEEYAALIGLDWASEKHDVWLWEAATGRSRHRVVEHTPEALAEWLGEIQAQYPGRRLAICLEQSRGALIYALMGHAFLDLYPINPVTLAKYREAFAPSRAKDDPGDARLLAEVLQLHIDKLSVWKPDDEQTRLLGFLNEERRKTVDLRTKLVLRLQAALKLYFPQALEWAGVDLYTPLACDWLLKWPTLESIQHARPQTIRAFYYAHNGRRPNLVEGAIVAIATAKPLTQDAAVIEANHLTVQMLARQLRLLHDSIAGYDKRIALLFRQHPDAFLFESLPGAGATIAPRLLSAFGSDRARYATPQEIQTYSGVAPVIERSGKSCWTHWRWNCPKFLRQTFHEFAKSSILYSDWARAYYDLQKSRGKGHNAAIRALAFKWIRIIHRCWQTRIPYDEGLYLQALERRGSPLIALITAPAREA

SEQ ID NO: 150831 - protein, 337 aa, unidentified
MKLYCGIDLHSNNHYLMLIDDHDKRILEKRLPNDLSQTLKTLKPYREKVTANAVESTFNWYWLVDGLMDAGYCLKLVNTAKARQYEGLKHTDDRYDAFWLAQQMRLGILPTGYIYPKAERAVPDLLRVRRRLVRQRTTHVLSTQCALWRHTGIKPSAKMIVGEKQTPWPRLPNASDELGVEAHRAAINVLSIQIERIERTVLKALKPRADYKALLTVSGIGEVIAWTILLESGDLKRFKDVGHFASYARCVDSKRISNEKKKGEGNAKNGNPYLAWAFFEAAHFAIQFLPAARRFYENKVVQRSPILAMKALSHKLARACYYFMRDRISFDPERLFG

SEQ ID NO: 150832 - protein, 324 aa, unidentified
MEVIGIDIAKRKFDLAWLSGKTGKIRNKAFENSAIGYQALCDWLIDQGIAASECRVVMEATSQYYEALAHAMFDAGYLVSVVNPLQIKAFGQSEMRRQKTDRADAELIARFGAQSQKLVLWQPPAVEVRELQRLVARLEAVQGMHVQEQNRRHEAAGLALESVDRMLLTLKEEEALLKQKIRDHIDRHPGLRNEKELLCSITGVGERVSSYFLAWLRVDRFENVRQMVAFVGLSPEHNQSGDSVRGKSHLCKLGHGRLRKILYFPAMSAIRFNPAAKAFYERLRAAGKSGKVAVVAVMRKLMHWMVAVLKSGTRFDPQLALAKT

SEQ ID NO: 150833 - protein, 370 aa, unidentified
MKNSITYVAMDTHKKDHKIALHYPGNEEIVEFAVKNTVRDIKKMVKKIDKHAPGKVEFCYEAGVCGFTLKRRIEALGCKCSVIAPSLIPIKPGERIKTDRRDARKLLGLFISGMLTEVVAPNQKQEAGRELTRLRETAKENLKRIRHQILKFLTRHGYVYTDGYHWTQKHLLWLRGLEFTEPMLTDVFDNYFTEMQHCIGRLGGLDKEVETLARSQPYKDVVGFLRCFHGIDTLTAITIITEIFDFGRFASARNFMSYLGLTPSESSSGDKHRKGPITKAGNKRVRRLLNEASWHYRHRFSPSAPLKKRRRGQPQWVIDIADTAGHRLSKRYRHLVRNGKMPCKANIAVARELAGFIWAVLNEYETTKAA

SEQ ID NO: 150834 - protein, 354 aa, unidentified
MSTLTTPYRTYDLFVALDVDKNSYAVTVNDAHNIERSKKMPANPESFYNYIQKTYPDKRALFAYEAGPTGYGLHDYLASKEQRCLVISPNAIPKASNDKVKTNRLDSKRLSELVKAGVVDSIRVPDESFRDLRHLVNTRQDYVKKQIAAKQRIESLLLFQGLHNCVGEHKRWSRHHLKILEELSCSPAVRERLNALLDDLNYARTKLLYFHKVIKEFCAGHPHIQKNIDYIRSIPGIGFVTSTYVLSRIGDPSHLKNVRELGAFAGVVPTEHSTGETIHKGHITHMGNETMRHLLVEAAWIAIRKDPELGFFYNRIKNRHPHSGGAQIAIVAVARKLTHRIHKVLKEQRMYVVL

SEQ ID NO: 150835 - protein, 367 aa, unidentified
MDEVSTIGIDIAKHVFQLHGVDGAGEVVLCRRLRRGQVMRFFAALPPCIVGIEACGTAYFWAREIARCGHDVRLMPPSYVKPYVKRNKHDAADAEAVCEAVRRPSMRFVPIRTAEQQAALVAHTVRDLLVRQRTMLVNALRGHLAEFGIVAPRGLHKADELAAVVADENDGRIPASARKALRILVAEFAALDLRITRLETEIVAQAKTDAVARRLATIPGIGPIIASRLSAMVPDPAIFRSGRDFAAWIGLVPRQSSTGGKPRLGGISKRGNGSLRRLLVGGAMAAMFRAKVLQNDPWLCQLRARKPVMVAAVALANKIARTIWAVMRRNAVWRPAALRSSSRPHQSGAVLAAVKTMPPAAVAFGQS

SEQ ID NO: 150836 - protein, 353 aa, unidentified
MSKAKYVGLDVHKATIVIVVLNAVGQVVMQTIIATETQVIREFFQGLSGSVSVALEEGTQSAWLYALLRPLVTEVVVCNPRYNKLIETGNKGDLIDAEKLAHLLRLGGLKAVYKGHPEQRQLKDLARAYQNLVSDATRVMNRIKAIYRGRGINCDGHHIYKPEQRQAWLEKLTEAGARFRAGLLFEQLEKLQALRRAAKQELLTQGKREPEYRLLCGLPGIGPLRAAVLLAFVGTPHRFRTKRQFWPYCGLAVITRSSADHEFINGTLSQRRRRVATRGLNPMHVPELKQVFKDAALTAARREPCQSWYQARIEKGMRPEMARLSLARRLAAVTLTLWQRQEPFDAGKFSTLI

SEQ ID NO: 150837 - protein, 372 aa, unidentified
MNYNTVYVGMDVHKESFSLCAYTIEAEKASHYQRTEADYKKVLNYLEFLRTIYGDDANFICGYEAGCFGYTLYHQLTANNVKCIILAPTTMLEQRSKKRIKTDRRDAEIIAKCLAQHNYSPVHIPTAKDEETKEFLRMRDDHKLALKKVKQQILAFCLRHNYRYDGKSHWTAAHLKWLKALTPEALYKEILDEYLLTYQTLSDKIERLDKRIEELATQDEYKEAVKKLCCFIGVKTHTALSVLVEVGDFKRFASAQHFASYLGLVPGEDSSGDDQNRLGITKAGNRHVRLLLTEASQCYARGQVGFKSKELKSRQSGNTPAVIAYADKANARLRRRYYKMVLNKYKKHNVAKTAIARELACFMWGMMTDNIA

SEQ ID NO: 150838 - protein, 349 aa, unidentified
MISIGMDVHVRNSFLHAVDQDGATLWRGRCANRLGDLAEALGRFEGESVRLSLESTTNSRAIHRLVSSTAAAMGLELSAQVLDARKLRIIAESVTKNDKFDAAVLAELTRVDLRLPACYLPDDEEFTLREHLRARHDLVTLRTRVKNRVHAVLHRRGILVPSKMTLFSKNGQAFLADVDLDDAGRAILDRYLATIKQLEVVIAESTAALRDLSRQPRWSKPVALLTSMPGMGLITALMILAELGDLNRFGNRSAVANYAGLVPVLRSSNTTHHSGHITKRGSKHLRGVLIEAAWMAAPRVPRYQAMFERVAARRGRKIAVVAVARRMLEDAWTMLKKDEAFRMTQSVAG

SEQ ID NO: 150839 - protein, 391 aa, unidentified
MIYVGIDVSKDKHDCFITNSDGEVLFKAFTIPNNRDGFEELYQKIESVTDDLTKVKVGLEATGHYSYNILGYLLDKGLTTFVINPLHTSLYRKSLSLRKTKTDKVDSHTIATMLMSDVNLKSYSDTSYHNEQLKSLTRYRFDKVKERAKLKQSISRLVTILFPELEKLIPTLHMASIYALLFELSSASDIASVHLTRLTNLLSTSSRGRYGRETAMLFKETARTSIGSNMPAKSLELKHTIRLIRELDSEINEIESEIKSIMDEINSPILSIPGINYRMGAMIIAEIGDFSRFNSPDKILAYAGLSPSTYQSGQLESSYSHMEKRGSRYLRYALFNAAKFVCHWDPTFAAYLAKKRSEGKHYSVAVSHAVKKLVRVIYQLEKTRQPYIKAT

SEQ ID NO: 150840 - protein, 346 aa, unidentified
MENDTLVAVDIAKEVFEVGISDRPGRVARRRRLARREFLEFFAQQPQATVVMEACGSAHFWARRIEELGHVVVLLPPQYVRPYVVRNKTDRTDVDGLLEAFRNEQIRPVPIKTVTQQVLGTLHRLRSGWLADRTRAINSLRGLLRELGFFIPEGRKHVLPDAWEIIQDPKRGLPDALKPSLSSLCQEILSHSTRIEEIEAQLEALAKQVPVVARLRSVPGIGLLTATALYAFIGDAARFPSGRHMASFLGLTPREYSSGLRRRLGRISKRGDTYLRMLLIHGARSILWHAKRMKNRDRLRAWALRLERKLGHNKAAVALANKLVRITWAVWTHDRSFEPVPELQAA

SEQ ID NO: 150841 - protein, 347 aa, unidentified
MEQITRIGMDTSKSVFQLHGVNAAEQPVLVKKLSRKEMIRFFEKLPPTVIAIEACGGSHHWARLLGSFGHEVKLIAPQLAKPYVKRGKNDAADAEALCEAMSRPTMRFVPMKTADEQAALMLVGMRQRLIRNRTQLANAIRGFATEFGLTAAKGMCRIEALLDRIAADETLPALARQLFATHACEYAQLEAEIVKVDDKLMAWHRADECSRRLAQIPGVGPIGASLLMMKTPDPKQFASGRDFAAWIGLTPRDHSTAGRARQGVITRAGDEALRSTLVVGAMALVANVKRGRGQSASPWLLALLERKRPKLVAIAMANKIARIAWKLMVTGETYRKNAGSPELACAA

SEQ ID NO: 150842 - protein, 413 aa, unidentified
MVSARQNHYNIFGGSQLISIGIDVSAGKSTICILKPYGEVLKSPFEITHTQKDLASFVELLSSFNDETKVVMEATGYYHYPILNYLILNGFFVCVVNAIVMNKYSNISLRKGKTDKKDSIKIANYGLDFWFKLLPYKPKSDIYEEMKLLSRQYYQIVSIKVKCKITLLNLLDKAMPGITTLISNNSKTPEKCKLNDFVKRFWHFDNISKVSEKQFILTYNKWAKKEGYQQSESKASKIYAQAKAGIPIIPSNRASTKILIQEAVRMLGEIEHSSTIILLQMEELAKQIKEYPTVLSMNGVGRKLSLLLIAEIGDIHRFHNAKSLIAYAGIDSPPRQSGTFSAKRRRISKRGSKYLRNVGYEVMTAININKKLGCPIYEFMTKKKNEGKASNVAKIAGLNKFLRIYYAKVKEVI

SEQ ID NO: 150843 - protein, 380 aa, unidentified
MSQAYIGLDVHKRTISIAVAFLGNDEPVSYGKCSSDINCFLKILRRLMKKYSFEKKDIKLCYEAGPCGFVLARHLLRLGFDTVVIAPSLIPRQSGDKFKTDKRDARKLARHFRSGNLTTVHIPDESDEVIRDLCRARTDAVDDCRRSRQRLLSFLLRNGHHYTGKSNWTEAHMRYLRELVLQDSSQKVILEEYLQTIDSNMQRVVDLEENMRTLQAGWTRSKFAEALQGFRGFQLVASMIITSELGDLTRFDHPRKLMSYLGLVPTEDSSGDRRRQGAITKCGNSHARWILVEVAECYRYDPKISRALSYRQGGLSKAVKELSWRAQKRLNHRYVRLAMRRLHKNKIKVAIARELAAFIWELGQILRKESCVPDSQWYAA

SEQ ID NO: 150844 - protein, 309 aa, unidentified
MDAPHVGIDVSKDRLDVHVRPTGEAFAVARDGEGLAALVARLTPLAPRLVAVEATGGFEMTAAAAIAGAGLPLAVVNPAQVRHYAQALGQRAKTDKIDAEMIARFAEATRPEPRPLPDAATQALAELVTRRRQLITMMVAERPRALRLPQRLKRSCERVVRVLEKELAALDQDIDTTVRGSPAWRAKEDLLASVIGIGDITARTLIADLPELGTLDRRAIAALVGVAPFIRQSGQWKGKSFIVGGRPTVRAALFVATMAAVRHNPIIRAFRQRLLAKGKPKMVVMVACMRKLLTILNAILRDQRPWQPA

SEQ ID NO: 150845 - protein, 402 aa, unidentified
MNAVGIDVSKGKSMVAIMRPFGEIVSTPFEIKHTTSDINSLVELINSIEGESRIVMEHTGRYYEVLAHQLSEANLFVSAINPKLIKDFDNDSLRKVKSDKADAVKIARYALDKWQNLKQYSVMDELRNQLKTMNRQFGFYMKHKTAMKNNFIGILDQTYPGVNTYFDSPARSDGSQKWVDFASTYWHVDCVRKMSQNAFIDHYQNWCKRKKYNFSQSKAEEIYGKAKELVPVLPKDDITKLIIKQAVDQLNSASATVESLRTLMNETASKLPEYPIVMAMKGVGVSLGPQLMAEIGDVSRFTHKGAITAFAGVDPGVNESGRYEQKSVPTSKRGSSDLRKTLFQIMDVLIKTHPQDDPVYQFIDKKRAQGKPYYVYMTAGANKFLRIYYGRVKEYLSSLPES

SEQ ID NO: 150846 - protein, 342 aa, unidentified
MGKVSIIGVDLAKNVFQVHGAAADGSVLFRKKLSRPQFARFMADQPPCLVAMEACASAHHWAREMARHGHEVRLIAPHYVKPFLKRQKNDAADAEAIVEAALRPTMRFVEPKSSDQQARAVAFRTREQLVKQRTEAVNALRSHLHEFGHVAPEGIGYLPRLAKVVDDPGTDVPELARDICRMLLEQIVLLTDRINALKARIAALSNEAEVSRQLQTMPGVGPITALAVETFAPPMEQFRRGRDFAAWLGLVPRQHSSGGKQKLGKTSKMGQRDIRRLLVIGATAVIRWASRRGAPKGSWLARMLERKPVPVVATALANKMARGIWAMLTRGESYRGPVLIGA

SEQ ID NO: 150847 - protein, 403 aa, unidentified
MYVLALDVSMGKSYVVIYHENTCLFEQEILHDKTHFNALLQEIYALPERPQIVFEATGVYSRVIETFCQKNHFAYCLLNPLEAKRQLNIDLRSVKTDKRDAHRLAQTHSQFLRKQKQSQTEVYKQTRDFARFYQQIERDIKRTRMNLHTALQLTFPELETLFTNRLSKLALNLVELFPHPDYLAHLSQTKVKNVLKKNTDKKISDQKALAKAQTLLSLAQNSYPAESGQSISVQKVVYYAQQLKQLLVTKEQLAKQLVDIAKQTIEFDFYQSIPGIGELSAGLIIGELGDIRRFSSHKQLNAFVGVDTRRYQSGKYTAKEHMNKHGNPKARKNLYFIMMNMIRQQAAGPNHLVDYYYKLKTQPSPKKHKVALVACINKLLKCLHSMVRHSSPYDYSYTASNDQ

SEQ ID NO: 150848 - protein, 416 aa, unidentified
MTSPLFIGIDVSSKSNVVCCLTRNEIKRPISRFTITNNRPGIHELQDRITKLVKKHDYDQILFGLEHTGHYSTHVAMYLHRHLNFGVPEKNVYVFNPSLIKEFKKATYLDAPKNDKVDAWFIAARLRAGNLPHPFNWSEPQMALQRLTRTRYHLMQDLTRESNFLMTNLYLKFSDYTITGPFRNQKLGATSLAVMEEFQSAEQLVGMPLDELINFLIIHGKNRFDDPEAVARALKKAARSSYRLPDSMADSINLAMASSIRVIRVVQEQLKVLKKAIRDHLDTMPQTLDTVPGIGPIFASGILAEVNIDDFDKQPQLAKYAGLAWNQNQSGDFTAKRTRLILSGNRYLRYYLIEAANSVRVHDPVFAEYYAKKVAEPKQFAEKRALALTARKLVRLVFYLLKNNQIYTPERGATKK

SEQ ID NO: 150849 - protein, 350 aa, unidentified
MNYAQINQRYLCGIDLHANSMYLKILDREGQVLYKRNMPNNFALFKQILTPFLPDIAVGVESTFNYYWLYDGCVESGIPFYLGHAAYMKAIAGNKQKNDPLDAETIAHLMRSNLFPQAYPYPAEMRAVRDLLRRRHRLVRHRSEAYTHVQLLLRQQGICDFRGRDVKSVSGKQQILKSISDPDVYYLVNSDLLLIEQLDKLLSEKEKHIKERAYHHNGTDYSLLKSVTGVGDMLALSILYETHDINRFPRAQNYSSYCRVIRVQRTSAGKNKYGRNQKMGNPYLKWTYGQILIHARQSSAQINAYYQKLEAKRCAKLARGIISHKFAVAVYHMLKKKEAFNEDRFLKVAS

SEQ ID NO: 150850 - protein, 340 aa, unidentified
MQTITIGLDLAKNVFQVHGVDAAGQVTTRRKLRRAELLRFFEALAPCTVGVEACATAHHWAREISALGHEVRLMPASYVKAYVRRQKNDAADAEAICEAVRRPTMRFVPVKSAERQSVLVLHRTRELLVRQRTMLINAIRGHCAEFGMIVAQGARRVAELLDEVRRNEGAALPDLARSALLMLADQLGALAGQINRLDRRLLAWHRQNQTSQRLATIPGVGVITATALAASIPDPHLFRSGREFSAFLGLVPRQNSSGGKDKLGRISKMGDGYLRKLLVVGATSVIRRARTGSSASAGWITALLARRPARVVTVAMANKTARIVWAILARGGVYRPPVMA

SEQ ID NO: 150851 - protein, 342 aa, unidentified
MPVTIGIDPHKSTHTAVAVDRDEHQIARLTLPADRHQTDRLLAWAEPLDTDRVWAIESAAGLGRLLAQQLVAAGEHVIDVPPTLTARVRLLGSTKASKNDPNDALATAIAGLRHCGLRNVAPDGDTAILRLLADRHHDLTGLRTQAACRLHVMLRELSAGGAGLRISAAQGTEFLKRIDATDRVSIERKRLAAEHLADIRRLDIDIAAIKIRIADAVTASTTTLTELHGVGPVIAAIILGHVHDISRFRTRAQFASYNGTAPIEASSAAKQRHRLNPRGNRCLNHAIHIIAVTQVAHDTPGRAYYLRRQAEGKTRKEALRALKRRVSDAVWRQLQIDTRTRR

SEQ ID NO: 150852 - protein, 349 aa, unidentified
MKIIGCDFHPSYQQIVMWDKATGEMLERALSHERKEEVRAFYAGLQGPVRVGIEASGQSQWFERLLSELGHEVWIGDAAKIRASCERKQKTDRRDAELLVKLLDEDRFPRIWVPTPAERDARQLLLHRHKLVRMRTQVKNQLQALALNQGVQRKWKLWSEAGRKQLEALPLLPWASRRRAELLVLLDQLEASIGELDGAAAEQANTRPAVRRLMTHPGVGPITALAFVLTMGPAQRFRRGKQVASYLGLIPTEHSSGGRGQRLGHISKQGNPFLRGLLVEAAQSAVRHEPEMRREYQRLAQRKCRALAKVAMARKLAVRLYWMLRADLDYARLIQGSHAGQPESFRGRV

SEQ ID NO: 150853 - protein, 415 aa, unidentified
MDVLYPRCAGLDVHKDNVVAGVRLVEDGRVRTEVRTFATTTPGLLALSAWLAECGCTHVAMEATGVYWRPVWHVLSDGDFVLILANAAHVKNVPGRKTDVADALWLADLLAHGLIRPSFVPEAPTQELRALLRTRKQLVREQASHVQRIQKTLEDANLKLGSVLSQVMGVSGRAILQALIDGQSDPDALLTLVQRGVKAPPEKLRAALTGRITDRHRFLLRLHLRQFDALAAAMAEIDEEVNRDLDPFRQAVRLLRTIPGVSDLTAQVIVSEIGVDMGRFPTAGHLISWAGLCPRNDESAGKRRSTRLRKGATWLKTTLVQCAWAASRKKASYLQAQFQRLRHRRGPKKAICAVAASILTAVYHMLRDGTFYQDLGAEHFRRTSPESQANRLARQIAKLGFTCVLTPAVAGPVSV

SEQ ID NO: 150854 - protein, 346 aa, unidentified
MIIVGCDFHPSWQQVAIFDSLTGEIVESKLVNGNGEAERLYRSLPVPSLIGMESCGNSQWFIELVEQLGHTIWIGDAAQIRASYVRKQKTDRRDAAHILKLLMEGRFPRLWAPDAEVRDLRQLLIHRHKLVEIRTRVKNGLQHLALNRGLQRKSRLWSEAGQKALRELPLKGWAACRREDLQRLRTVLDEQIGQLDEAVKYAADGNQQAQLLMTQPGVGPITSLAFVLTIGDVARFKRGKQVASYLGLIPREHSSGGKQHLGAISKQGNRLARTLLVEAAQSANRLDEGFRKQYQHRCHSKPKGVAKVAAARRLAVRLYWMLRSNMPYPEIVRIEGSSRFPMAGES

SEQ ID NO: 150855 - protein, 366 aa, unidentified
MKKTSTVRVNGNMIFKGHKVTIGLDLGDRWSNYCVLDEAGEILLEQKVATTPEAMKQIFEKIPRGLIAMETGTHSPWVSRLLREPGHEVLVAHAQKVELISKSKRKDDRHDARTLARLARIDPELLGPVRHRSAKAQIHLTVIRARAELVSARTALVNAARGLAKSYGERLHKCGTEQVSRKLAAELSAELREVLEPLLKEIESLNERIKEYDARMEKIARESYPQVELLKQVKGVGTQIALTYLLTLDDPHRFPKSREVGCFLGLRPGRRDSGQSQPQMHISKEGDPYLRTMLVQGAHYILGPFGEDSDLRRWGRRLAERGGKNAKKRAVVAVARKLAVLLHRLWVSGEVYEPLRNSHQATRAVA

SEQ ID NO: 150856 - protein, 372 aa, unidentified
MNTIAYIGMDVHTTNYTLCAISENSNNFYGRVTVPPEFKELERYFKNLHEKKGITHFICGYEAGCLGYSLYYALTEHQWKGFSVECLVIAPTSLPMPKGGRIKTDTRDALMLAQTMFNGTCSYVYIPDQSDEAVKEFIRMRDDTQQQLVQTKLRINAMCLRQGYDYKEPSRWTQKHLEWLKKLQFKEKLFRETLDEYLFTLNQQTESVARYDRRIEELAQAKRYNERVRMLCCLKGIGVHTALSLLVEVGDFNRFPAAKNFSHYLGLVPGENSSSTSTHRLGITKSGNNHLRWLLVEAANCYSRGNGLKTKAMKAKQEGCPKEIIAYADRAALRLRKKYVRIQLRSKACIAKVAIARELACFVWGMMTGHTA

SEQ ID NO: 150857 - protein, 397 aa, unidentified
MYIVGIDIAKRKHEAAVIDGEGAVIIKPFSFTNNCSGYNRLLAMLAKAKLPLDEVSFAMEATGHYWLALFTRLQKEGFRVQVINPVQTNSIRSFYIRQAKTDPRDALLIAEVIRFGHFSESTLHPENIYELRELCRGRHAIVSMQADVKRKVVALLDQVFPEYETAFTNMFSDTSMAILQTCPTPKELSEMPLEELCHLIEVSSHKRFRMAKAQELQELARNSFGFAMAGDVFSTMIRLYAKHLVFLKQQVQEMDRKIAEIMDTLDTPITTITGIGPTLGAYILSEIGDISRFSSAAKLAAYAGIDPTMRQSGEYNGVRNRMSKRGSPYLRHAIWLAASSAVLHDPALKLYFQKKRDEGKPYMASVGHACRKMVSIIYAVMRDNKAYTPCIPNEISA

SEQ ID NO: 150858 - protein, 389 aa, unidentified
MIAVMRPFGEVVVSPFEVRHTANELSELAGLLKSLDGETRVVMESTGNYHAPVAWLLHDAGLYVSVVNAMLVHDYGNNSLRRAKTDKKDAVKLANYGLDHWLTLPRYIPEEDTRLMLKICYRQYQQYSKVQTMLKNNLISLLDTTFPDANRLFTSPPRADGSEKWVDFVATFWHCECVCGRSEKAFTTQYQKWCRKHGYNFSEDKALDIYASACRHFGVIPKTDTAKLLVEQAISQLQTTSSALAALKQEMQSLAASLPEYPVVMGMFGVGPTLGPQLLAEIGDVRRFHSKKALVAFAGIDAPPYQSGQIDVRSRSISKRGSASLRRTLFLVMSVILQCAPIDEPVYQFMDKKRSEGKPYRVYMMASANKFLRIYYASVKAYLESLEHD

SEQ ID NO: 150859 - protein, 416 aa, unidentified
MKIYPITRPIQRYIALDIHKEYVLAGGMSARQEWLLPARRIEISKFGEWAKRNLCESDAVVIETTTNVWDIYDIVQPLVGHAVVAHAGAVRQIAEARVKTDKEDVKRLIRLLIADILPEVWVPPQPVRELRGLLSYRQRLVKTGVVFRNRLQSLLHSHNLVLPEEGLVSQEWWARQEKISLLEKLQIGQEIALLAEIEKHKAEVDQELGKQSLGETWGRDAVRLLQLPGIGVVIAMTLLSAIGDIHRFASADKLVGYSGLGAGVHDSGQEHIEKRITKSGRKELRWAMVEAAWRAVRSSPYWKEQYEKFLKRMRRPNQAIVVVARKLLVAVWHVLTKEETDVRASEEDLAYKMLVLSWDLDENVRQGLTYKQFAKYALMKLGVETDITRFVRKDVPRRLAPREEVLTRMAELGIAL

SEQ ID NO: 150860 - protein, 386 aa, unidentified
MQKLNDLSRSLSPLQPDGTLIAVIEMSLSSWLVAGIVPGVERQPLKKLAVDENGLLKLLNRWREEAEKAGHRIERIAVAFEAGRDGFWLARWLRARDIDAHVIHTSSVAVSREHRRAKTDRLDTELLKRSFLGWLRGERDHCKMVAIPTIKDEDAKRPNREHESLVGEQSRIVNRMKAALIRLGIRGFNPKLKKAAERLDGLRTPEGEPIPPNTLAELRRDMVRRRLVSDQIRQIEDVRLERLKQAPSDGPHAMVRLLARVIGVGVETADMLVQEVLSRSMRDRRAVARYAGLTGSPDESGRKRREKGLTRSGNARVRRGMIQLAWRFLMFQKDSALAQWFRARTESARGTRKTMIVALARKLLIALWRLVREGVVPDGVVLRPAS

SEQ ID NO: 150861 - protein, 372 aa, unidentified
MKRLAATNVVAKAPQNKNAVKCRKWRPAVEHIGIDVHKRQSQLYIVTEKGEVIEKRILTERGRFSEVLGGRPQAKILLEASTESEWVARCLEELGHEVVVADPNFAPMYGMRSRRVKTDKRDAQALADACMTGTYRKAHRTSEIRRQLKAELAVREALVRQRAKHIALVGALVRQQGLRIATGSADAFLTRLEKIGLTERMRSVVAPLVAVMRKLNEQIQLLDAELEKLASEDEQVARLCTMPGVGPVTAAALVAAIDDAKRFAGPHQVEAYLGLVPSEMSSGEKRRKGHITKAGNPRMRSLLVGVAFSMMRLRKATTATLWEWAMRIEVRRGRKVAAVALARKLAGILYAMMRDGTTFKPCVRKEGMSSAA

SEQ ID NO: 150862 - protein, 424 aa, unidentified
MKPHPDVEFAAFAGIDWADAKHDICLQAANSEDREFVVLAHRSAAIEAWAGALRQRFGGQPVAVCLELAKGPLVYALQKYDFLVLFPIHPATLAKYREAFAPSHAKADPTDAQLALELLLRYRAKLKALTPQSVPMRMLLRLVEQRRRLVGDQTRISNRLTDALKQYFPDVLAWFPDKDTLLFCDFLSRWSTLKQLKNARRATLLSFFHEHHVRSQARIEERLRAIKAATTLTDDLAVISPNQLLVLTLVEQLRVTLQAIERFDAEIATVSESLPDYSLFRALPGAGASLAPRLLAAFGEQRERYQSAAEIQRYTGIAPVTESSGKKRWVHWRLQCPTFVRQTFVEWAGATIPRSFWAAAYYRQQRDKGCSHQAAVRALAFKWIRILYRCWQSRTPYDEATYLNALSRRGSPLLASITTTAKNT

SEQ ID NO: 150863 - protein, 422 aa, unidentified
MKSAISNTLPETPPGDLTAGIDWASEDHAVCIIDAHGREVARAVVEHTSAGLRELTRLLARHGAEEVAIERPDGPVVDALLHGEITVVVISPNRVKNLRGRYGSAGNKDDRFDAFVLADTLRTDRARLRPLVPDAPDTVALRRACRTRKDLVGHRVAAANQLRAHLKAVLPGAVGLFSEIDSAISLAFLTRFDTQDRIDWLTPTRLGRWLASVGYSGRTDPAKLHARLTDAPRGLTGPHALIEAGSTHALIAVLRTLAEQIKTLQTQISNQLDAHADAHIFTSLPRSGRVRAAQLLAEIGDCRARFPTPQSLACLAGVAPSTRQSGKIRAVGFRWACDKQLRDAVTDFAADSRHVNPWAADLYNRARARGHDHPHAVRILARAWLHIIWHLWQGHTAYDPAQHNALQRLLNNPTHQPLAQAG

SEQ ID NO: 150864 - protein, 418 aa, unidentified
MLKIVFPICCGIDVHKKFVVATVGTTNKSGVTDYQTRQFSTFTQSLLQLLDWLKAHSCVHVCMESTGKYWHPVFNILEDYCDVVVANPKYVKGIRGKKTDKKDSIWLCDLHKHGLVPSSFIPPLPIRQIRDLMRYRFKLINVKSSEKNRIQNSLTVSNIMISSVVSDTFGVSSMRIINHILDNPDDMDFEVSSMLHGRMQDKAETITKSINGNLTKPQADKMRVCLHHLENIEKHITDIERVVLGLAQPYLPQIEIILSLPSIKDVFTAIAIIGEIGSDMAVFNSSKHLCSWAGVTPQNNESAGKKKSVRISRAGVYIKPLLVQCANAAIKSKKCPYFKNRYDQIKKRRGHKKAIIAIAHTLLKCIYHMLDKGETFNFELYKIDSKPKQTYASQITEEMAIRYLQTLGYQIPDMPNTT

SEQ ID NO: 150865 - protein, 271 aa, unidentified
MTVMIGVDPHKGSHTAVAVDAGERSLAELRVRSGPKQLERLLQWAEQFPERTWAVENATGLGYLLAQQLVAAGQRVLDVQPKLAARVRLLATESTNKNDPHDALSVAIAALRSPAPKEVGVEDHAAVMKLWARRHQNLSSTRTQVACRLHAVLCDVVPGGVPDEIYAGKAAELLAGVEPDGAVAAARVELAAELVEDLRRVDRQLAQSRKRLAQVVAASGTTTINIFGVGPVVAATVVGVTGDIARFPTSDRFAAVNRNAPIEVSSGGPKV

SEQ ID NO: 150866 - protein, 359 aa, unidentified
MQRSMFTGKLNEKTREIKDLFIGIDVHKRKWVVTVRTYDLELTTFTISSPSAEKLERYLKRNYADMKYHLVYEAGFSGYSLYDYFHERGIDIIVTPPNRIHRDGSRVKTDTIDSRKLAVLLSRRMLRRVCVPSPKIREYRSIFQMYDRLTSQMRSVRNRIRSLLDFLGHPLANARWSKRLLDQLWEIEFTTWKLTRIFRKLLERYEFLQRQSREMEEVIREIADDEELGDIIWTLRKIKGFGLITAIRLTVFLFSDPSRFPTAGSLVHYLGLTPSEHSSGGKERKGGTGYTGDRRLRSFIIELSWRLVRRDVTLLEKFESVYSRTGSKSKAIVAVARKLMVRIYTVIQRREEYVTGLVA

SEQ ID NO: 150867 - protein, 380 aa, unidentified
MSKIRFVGLDVHAETIAVAVAEAGGEVRSLGTIPNKPESVRKLVGKLAPAATLKCCYEAGPTGYVLYWQLTQLGVACEVIAPSLVPSKAGDRVKTDRRDAEKLARCYRAGELTAVWVPDAAHEALRDLVRAREAAKKDQLRHRHRLGKFLLRHGKRPADAGQAWTQKYVNWIRIHASFEEAALNATVAHYLEEIDHIAERIAKLEVAIDEAVKQAAPEIRAVIEALQALRGIAQTTAATVVSELGSLSRFQNPRQLMGYSGLVPREHSSGNKTQRGAITKSGNAHLRRVLVEAAWTYQHRPNVQGRVLRRQKALALSDEAKKIAWKAQQRLHKRFTVLAARGKNHNQIVTALARELLGFLWAIAVDAEAHCKPAKPAKAA

SEQ ID NO: 150868 - protein, 317 aa, unidentified
MQTFLNIGVDVAKDAVVVACDAQSFPVHSITNQRASLLAWLKSLPAGSRIGLESTGGYHELLADLAYMQGHTVFLLNPLDTRHYAKAMGNRAKTDRVDAELIARLIAQEHMRLRPYTPPTANQRRLDRLIRRRAKIVRIKSTLKLTMNNLNGFTAELKAVLLKLDALIAGIDAAMSTIAACSPQHEEAQQRLQTIVGVGPVVSMALTNTLERLPFHNADAFVAFTGFDPRANDSGHKVGRRRLSKRGPGELRRLLFNAAMSAAKTKVWKPIYEHYRTQGWSTTAALVIIARKIARTAWSIHHYRSTFIPERITKCLT

SEQ ID NO: 150869 - protein, 402 aa, unidentified
MNAVGIDVSKGKSMVAIMRPFGEIVSTPFEIKHTTSDINSLVELINSVEGESRIVMEHTGRYYEVLAHQLSAANLFVSAINPKLIKDFDNDSLRKVKSDKADAVKIARYALDKWQNLKQYSVMDELRNQLKTMNRQFSFYMKHKTAMKNNLIGILDQTYLGVNTCFDSHARSDGSQKWVDFVSTYWHVDCVRKMSINAFIDHYQNWCKRKKYNFSRSKAEEIYGKAKELVPVLPKDDITKLIIKQAVDQLNSASATVESLRTLMNETASQLPEYPVVMTMKGVGISLGPQLMAEIGDVSRFTHKGAITAFAGVDPGVNESGSYEQKSVPTTKRGSSDLRKTLFQVMDVLIKTHPQDDPVYQFIDKKRAQGKPYYVYMTAGANKFLRIYYGRVKEYLSSLPES

SEQ ID NO: 150870 - protein, 371 aa, unidentified
MSRKHTAKEFDKSNKWLVIGVDLAKYDNTIVGITEDGEVQIIERISTEDLLELASEIQQTTFAMEPCNGANILSLNLQAKGHEVKMISGAAVKDWVKVHLAGQKTDRNDALALAHLSRDTMLKPIRTKTVTEMRMQSIYAARKQLVKCRTSILVSLKGISQAWGILFSAQRRNLKKMRESLEDKVELLSQPVVDALIQMIDSVARLDKEIEALESVMKDQLSQDERAQRIQSTLGIGFVGTHRLLSTCGDPNRFKGPKSFAAYYGLVPNNKSTGHNYRVGKCSCHGDAEMRSCLYQAAAVLYMQNVKHLLPECALKQWIDKKVSQKMMWGKMIIALAAKLARILWALLKYDAYFNLSKAGLSRSMLAQQTN

SEQ ID NO: 150871 - protein, 359 aa, unidentified
MQTQRKELNFEGQSVFIGIDAHLKSWNVSIFTQNLHHKTFNQPPKAELLSSYLKLNFPNAIYHSVYEAGFSGLHAHYELTNLGIHNIVINPADVPTSDKERRRKTDKVDSNKLARSLRNNELQGIYTPSQDILEDRTFVRIRSSIVRDQSRLKNRLKSMLYYYGIEFPQEFQKSCTHWSKRFMAWLKTVQLRHQSGNQALAMLIKEAELLRSLLLEVSKELKVLSETEKYAKNMELIRSVPGIGLVTGMLFLSEIDIIARFENNDKFAGMIGIVPDCHSSGDNEQIGEITPRRHVHLRSGLIESSWIAVRIDPALNKAYSDYCKRMEPNKAIVRIARKLSNRIYFVLKNERKYETRIVK

SEQ ID NO: 150872 - protein, 323 aa, unidentified
MQLTIGADVAKSSFDIALPLENGNYRTRRKICNTPAGWEQLLAWHKKYAPEAAVGMEATGIYHEGLANALFAAGVRVYVVNPTQIKAYGRSELLRTKTDHTDAKLIARFFQARTKALPAYVPLPPSQRTLRSLVRRLDDLNGMQRMELNRLESADAMVRDGMLAVIDTLGQQIRTVKGAITRHINSHPDLRQRRDLLTTIPGIGSATSATLMACLGDLSQYDDVGQIVAHAGLNPAQRQSGAHQGKARISRVGDARLRAKLYMPAVTGKKHNPILAAFAERLAKCGKPGKVIICALMRKMLHLVWGVLRSGKPFDPSHHKALA

SEQ ID NO: 150873 - protein, 344 aa, unidentified
MIYLGMDVSSKSFVGYAINEKKKVVFEGEVEPTRLGLRRLIGKLGKETKLVVFEAGNQLKWIALTLKKMEGVEVHVVHPNEIKWISESSGKTDKIDAKKLAYLARGDMLPRKVHIVEGKIRELRELISARDTLQSKRIALINSLRGYMKQEGCRLPVKFFQRVDWAGTLSKLKVGQIQKVIIENFMKAIESLEAAEGELTERIVEIKDERIELVETIPGVGKLTSRVLVSAIDNADRFDNKKSVAKYGAVTPRVYQSGGITHLGRISRDGRHEVRRVLLQCAHTITRMKSYEAYPLKAFFERIKKRRGKKIAIVAVARKLLTIAYGVLKSKVAYNPARLAVRAV

SEQ ID NO: 150874 - protein, 397 aa, unidentified
MYIVGIDIAKRKHEAAVIDGEGAVIIKPFSFTNNCSGYNRLLAMLTKAKLPLDEVSFAMEATGHYWLALFTRLQKEGFRVQVINPVQTNSIRSFYIRQAKTDPRDALLIAEVIRFGHFSESTLHPENIYELRELCRGRHAIVSMQADVKRKVVALLDQVFPEYETAFTNLFSDTSMAILQTCPTPKELSEMPLEELCHLIEVSSHKRFRMAKAQELQALARNSFGFAMAGDVFSTMIRLYAKHLDFLKQQVREMDLKIAEIMDTLDTPITTITGIGPTLGAYILSEIGDISRFSSAAKLAAYAGIDPTMRQSGEYNGVRNRMSKRGSPYLRHAIWLAASSAVLHDPALKLYFQKKRDEGKPYMASVGHACRKMVSIIYAVMRDNKAYTPCIPNEISA

SEQ ID NO: 150875 - protein, 328 aa, unidentified
MCTLGIDVSKNKIDLCLLTAGPGGKKKHKVLTNEPAVARKVIDWLNAQKCVPESVTVVLEATGIYHENLAYGLHEAGVSVCMANPCRVREFAHGMDILNKNDAVDAFVLACYGELKSPAVWVPPSPEVRKLRALLRQRDALREDVQRTVNRLEKANSTSTPQEVIRSLERTKSWLNEELARIEKLITDHTDNDPGLKADLDLLKSIKGVKDQVGREMLALLKDGMFKSASQVAAYLGLTPVEKTSGGSVRGRPHMSKTGPSGVRAKLYVAALTASRGNKQAKAIYERLVAKGKAKKAALGAVMRKLVHLCFGVLKTRLPWDENYVATA

SEQ ID NO: 150876 - protein, 511 aa, unidentified
MDVIVERCAGLDVHRDSVVATVRVPGTGKSRRRRAQQTRTFGTTIAQLEQLADWLAGFAVSLVGMEATGVYWKPVFWVLERRFECWLINAEHLHNVPGRKSDVIDSRWLCELLELGLVRPSFVPPPEIRRLRDLTRLRSTQAEERTRAIQRLEKVLQDAGIKLTSVASKTYSVSARAMLEALLGGVSGPARLAELAKGRLRAKIPQLTEALANRFDTTHHGVLVAGLLAHIDALDQAVATLDARIASATDAELIDLLSTIPGVKRHIAEVLIAECGLDMSVFGSAQRLVSWAAICPDTNQSGHRRRPGKTRHGNPWLRTALTQAAHAAARSKNTYLASHYRQIRGRRGDAKATGATHHDILIAYYHIVSDRVPDRELGPDWLARRHSPEHRTRRLVKQLEALGHTVTLEAAAQSTDPGTTTTARRACGPTARAWSQPPPNPAGIHTTGDRRFESVRGLPNSSCLAAVSVFRGGDDWRFRRPPSVHQRPPLDRGGADALEQRPAAHRRERSH

SEQ ID NO: 150877 - protein, 315 aa, unidentified
MERLPAAPSFVGIDVSKDRLDVHVRPSGQTLTAARDSTGLQQLVGSLRKLAPALIVLEATGGFEITVAAALASAGLPLAVVNPRQIRDFARATGRLAKTDALDAQVIALFAERIRPEPRPLADADSQNLAELIARRRQVVEMIGMETNRLYQVRNARVQRMLRTTVNALTAQLAELDRDIDDTIKRSPVWRAADNLLTSVPGIGDVTAHTLIADLPELGQLDRRRLAALVGVAPINRDSGQMRGKRTIAGGRSDVRNALYMATLSAIRWNPIISQHYKSLVERGRPKKVALVACMRRLLGILNAIMRTNTPWQCA

SEQ ID NO: 150878 - protein, 412 aa, unidentified
MDVLVPRGCGLDVHRDFVEACAIVGPKKTDVVRQRFSTFADGLVALRGWLAELGCTHVAMESTSVYWRPVYDALEGQVELIVCNAQHVKNVPGRKTDVTDAHWLAMLLRHGLLASSFVPPRPLRELRELTRYQTKLRYTQTATINRAHKTLQIGGIKLSSVASQPFGVSGRRMMDALIEGTSGPAQIARLAIGTLRRKIPQLERAVAQPLSEHRKSLLTMQLRDVDRIEASLAQIELMIEDRLAPYSAFIERVARMPGCGRKAAAVLLSEIGPDMTPWHNDPRKLAAWAGVAPGNKQSAGKRARMRTRDGNPYVKTILVEIAQAAVRTQGSRFQALYGRVKPRLGAKRALVKIARHWLQAFFFMMLRGEAYREPDVAALDQKATQTQARHLIKKLAALGLEVSITAASPATA

SEQ ID NO: 150879 - protein, 355 aa, unidentified
MDSTKYIGMDVHKESISIAVRNAAGKVVMECVIETKASMILEFIDGLRGDVLVTFEEGTWAAWLYDLLKPHVTRLVVCDPRRNALLQEGNQNDRVDARKLAELLQNNQLRPVYHGDHGLRTLKELVRSYLTITKDLSRTMTRVKAIYRSWAIPCTGKQVYSSRHRAEWLGKIVEPGVRRRAEFYYQQLDALRSLRQEVRRELLAESKKHKAWKRLCQIPSIGPIRAAVLLGILQTPHRFRTKRQLWTYSGLGIEVYSSADHHVVKGQLERKKKHVEIRGLNDNGNHDLKNLFKGAAVVASTKPGPFEEFYAALLAKGTRPEMARLTLARKIATIVLIVWKRGVCFDANHLKPQTA

SEQ ID NO: 150880 - protein, 419 aa, unidentified
MSQSNIDKPSMQDPAGTLHAGVDLALEKNVVVVVNEKAERLDHFSFPQDRGGYDYLLRRLEGLRQKHQAAKVVVAMEPTNYFWKLLARELEEKQQSYHLVNAYTVKKHREGDQLDRSKDDRRDAGQIAELSRNGKTTQTQLQKGAYEYLRQYATLYHQLMQSIRREKTILWGLVGQVFPEMARAFKDLEGENYQALLMTCPAATTIRQLSLDGFLTQVRAAYSGKRLCVSKLKRVYQLADRSIGVTEGIQAIQLAIQVHLTQLQVFETQLEQVTGAMTARLFSLPEALYLLSCPCLKPTSAALFLAEVGDPQRYQKAAQWVKLAGIQPTPKASGKKQRSRTPMSHQGRPRLRTLLYFSCLRMVQYDTRFAQLYAYLQRRKDNPLTKMQALGVLMNKLLHIWWALIHNQTFYNPSFGQSS

SEQ ID NO: 150881 - protein, 356 aa, unidentified
MSYDVKYIGMDVHKEAIVIAILNESGKLVMESVIETKASSILQFLHGLRGELHVTWEEGTWAAWLYDLLQPQVQHIVVCNPRRNALLKEGSKSDKVDAHKLADLLRTGMLRPVYHGENGLRTLRELGRSYQTISKDLTRVMNRLKALYRGWGIPCAGSQVYAARSREEWLSKIPQAGVRRRAELLYQQLDGLQILRRNVRPEFLAESRKHKAAKLLRQIPCIGPIRAARLIALMQTPHRFRSKRQLWTYSGLGIETHDSAQFRFVSGQLQRAKKPQQIRGLNRNHNHEMKEIFKSAATRASCGRGPLHDFYAALLAKGMKPEMARLTLARKIAAITLTLWKKEERFDAEQLKTQAA

SEQ ID NO: 150882 - protein, 324 aa, unidentified
MSKGKLDVAVLDERDKIKSHVFANDSKGHAALITWLEQRGCGAQLAQVCLEATGCYSESIATALVDAGWQVSVVNPARVKGFAQSELMRNKTDRADAALLARFGQALHPEPWIAPPVEVRQLRALVDRLQSLKEMHQQEVNRLEGATNRSGTRESIESHLQWLQQSIQQLERQINDHIDGHPGLRDDAKLISSIPGVGKATAAKVIAYLGDVRRFKNAKALAAFIGVTPRLKLSGSSVRGRSMISRSGHAEMRRSLYMPALVALKHNPIIKTFGVRLRATGLAPKAVVAASMHKLVHLIYGILKSGTPFTANFLVASLDIQDGI

SEQ ID NO: 150883 - protein, 338 aa, unidentified
MKLYGGIDLHSNNQLLALLDEQDKLVYQRRLPNDLEVVLAELMPYQSALEGLVVESTFNGYWLVDGLMDAGYQVHLANTAAIKQYEGLKHTDDPYDARWLAHLLRLGILPEGYIYPRQERPLRDLARKRSQLVRQRTTQVLSMQNLAVRNTGSKPTGNRIKQWTEEDVDELLEHPELALAVKTNLRVRHCLDEQIEVLEGRILEQAKLRPAFKPLLSVYGIGRILALTVMLEAGDISRFEKVGNFASYCRCVDSKKLSNGKRKGSGNTKNGNKYLAWAFVEAANFAVRYYPQVKRYYQRKRAKTNGAVAIKAVAHKLARACYYVVRDQVSFDVNKAFA

SEQ ID NO: 150884 - protein, 348 aa, unidentified
MIWIGVDAHKRLHEAVALSESGVMGSRRIRNDPPQWAALLDWARQWPERVWAVEGAGYLGRGLAQFLVEHGEEVHEVSGKWTARRRRGMRRPGKSDRLDAHSVATLLREERTTLPRVYAEDDELASVQLWSRLEQEFSEDRTRILNRLHNLLLLCDPGYTAGLPALTTKAGIAAARTYTAPGTRAVAREREQAVRASAEQVALLDAQIAALRRKLGRASRSSFRALRAIEGVGPQIACTIVAELGAPRPGFGDEQLAALAGVAPLEASSAGATRHRLNRGGNRRLNLALHRIVLTQARMYEPARVYLARRRAEGRTAREARRALKRLICRRIIQAWRACFEQPLAPAA

SEQ ID NO: 150885 - protein, 355 aa, unidentified
MSQEKYIGMDVHQATISVAVMDASGKLIMECLLETKAATIVEFIQGLQGTLALTFEEGTSAAWLHDLLKPHVSRLVVCDPRKAALLKEGNKSDRMDARKLAEMLRTNQLKPVYHGEHGIRALKELGRSYLTITKDVTRSMNRIKALYRSWAIPCAGTSVYAPRHRAEWLAKIEQPGVRVRAEHLYQQLDSLQPLRLQARGELLRESYQHPAVKLLRQIPSIGPIRAALLVALLQTPQRFRTKRQLWAYSGFAVETHDSGEYRCVRGKLQRNRERITVRGLNDNHNKDVKNLFKSAAISASTRPGPLQDFYVALVAKGIRPTMARLTLARKIATITLTMWKKGVGFDPQNLHRQAA

SEQ ID NO: 150886 - protein, 345 aa, unidentified
MEIRTIGIDLGKTVFHLVGVNARGEVVIRKKCSRLQLLRFTSNLRECLIGMEACGGSHFLGRALREQGHDVRLIPAQYVKPYVKTNKNDYIDAEAIAEAVTRPSMRFVPIKTDDQLDLQSLHRVRERWVVRRTAVINQIRGMLLERGITVAKGRRRIEAALPGILEDPDNKLSGALRVLLTQLRLEMQYLHGQIEESDKLITRIAGELEPCRRLVAIPGIGPVIATATIAAIGNGSAFKKGRGFAAWLGVVPGEHSTGGKQTLIDTSRRGNKYLRKLFVQGAHTVLQNRSRQVPGLSTWLDRLTSRKRIQVTAVALANKMARMVWAVLFKGEAYRPPSLPQAIAV

SEQ ID NO: 150887 - protein, 331 aa, unidentified
MDHCAIDVGGKKSQICVRDSGGTIQFEGAWETLALGDHLRQLPHSRVILETAAESFRIADQARAAGHEVRVVPATLVRTLGVGARRTKTDKRDARALSEVSTRIDLPSVHIPSARSREWKTMAGVHDALVSCRTKLINNVRGWLRGQARKPRSGVAETFAERVRRLGELPVYITSELKMIDALSEEIAASAKRFASVTNSDPVCKRLMTVPGVGPSTALRFVAALDVVTRFASAHKVEAYLGLSPGEKSSSERQLRLGITKAGSASVRWVLIQAAWILKTCCRAPAARKLQLWAAEVEKRRGKGVATVALARKLAGILFALWRDGTEFESR

SEQ ID NO: 150888 - protein, 394 aa, unidentified
MKLVGIDVGKNSHHFCVMDKETGEFNVAPSSFSNNKEGFDFLINSLKPYSKKSILIGMEDTGHYHVALLKFLLSNGYTVALINPKTTDLTRKMEGGITKNDKLDTIIICDVLDTPERKKQYRITKVDRFDLYEQRQLTRHHHNLKEELNVYCNRLQKSIDLVFPEFNTLFSSKYGIVYMNLLKTFGSAEAIASTDIRTIRKFFEIKGKGNRISLTPEKLKECAKNSIGISSEVETIQIKHLVSQITLIKEQIAEIDKKIEEFSIPNNSPILSIPGISHFSGTSILAELGDIGNYSKPSQIIKFAGVAPYHYESSQYNAQHTGITKKGSKYLRKTLYQIILPVINNNPVFKKYYLLKISQGKGHRCAQGHCIRKLLRIIYHLLETGQSFDPALLR

SEQ ID NO: 150889 - protein, 348 aa, unidentified
MTITRAFSKLHLWIRALGSYKSDGLSTEEAERFYHDLVAQGMKVRVGIEASGHARWFERLLAELNFELLIGDAAEIRAKRVRKQKTDRQDAQHILRLLLEGRFPQIWVPNWENRDLRQLLWHRHRMVQARTRIMNQLQAVALNEGLRCKKRLWRERGREQLEAFRLAPWASRRRRDLLELLDRLTPTIAELTEAIEQEAEKCSEAQRLMTHPGVGALTALAFVLIMGRAERFQCGKQIACYLGLVPLEDSSGDRRRLGHITKQGNSLLRFLLVEAAQVTVRSDQEWRSKYFHLALRRGRKIAKVAMARRLAIRLYWMWRKGWDYEQLKKFGSHAGQPGNRHGVQLNAE

SEQ ID NO: 150890 - protein, 409 aa, unidentified
MRYYVGVDWADQTHAVWVVEERGTKITARTVPHTAAGFSEWGRELDEWRAQGIERWAAIERPDGRVVDFLLDHGVVVYPVNPKALDRARDRFRQSGAKSDPFDARVLADFLRTDHPHLQALQPSSDVAQELKLLTEDCQRHIRQQTRLVNQLTTTLKAYYPRALEVAELTTALAREFLHAYPTPEALTALTERQWQRWARGRRLSEARIGALWHVLQQPQLPVPAHVVRAKARLMQSLVEQLTPVVTAVAEYRKAIDDFFACMPAAQWARTLPIGKRGITAPTLWARLGDAPGRWESFRHLQAQAGTVPVTKRSGKQRSVHFRFACDKSLRHVVDQVAFLSLLSSDWARAYYDQQRARGHAHHQALRALGAKWLKIIFAMWHRQVPYDEQYHLATMARQQLRQRQPQIA

SEQ ID NO: 150891 - protein, 379 aa, unidentified
MKSNSDTPARLYIGLDVHKDKTTVAIAELGPDGEVRIHGEVRTTQHALEAVLRRIAKAHQCTVQALEVCYEAGGCGMWIARRLQQLKIRCTVVAPSLIPSKPGEKVKTNKRDAVKLARNLRAGELTAVHIPDEIDEALRDLCRGRVDAVDDLRRTKTRLLALLRRLGFNYRGKSHWTEDHKRYLRELTLPLAAHRFVMEECIIQIDEHLERVSRFEERMTELLEDWNKKSIVEALMAFKGFQLIAAMMIVSEIGDFVRFNHPRQLMAYLGLTPGEYSTGDKHKRGSITKCGNSHARWILVECAVHYRPEPRISTRLSKRQEGQPRWVTELSWKTQNRLHTKFATLARRKKQYNKTKVAVARELAGFIWELGFRMQSTAK

SEQ ID NO: 150892 - protein, 331 aa, unidentified
MFPVGIDVSKNTLDLCMLYDGIKGRIKTRNIQNNRHSVENILRWLRLQHCSPEDVHVVMEATGVYHERLATELHDAGFQVSLANPHRSREFARGMGIMTKTDKVDAYMLACYAFLKKPHRWEPPAPEIRYLGALLRRRDVLLGDALREENRLEKYLSTDTPADIISSCRRMAQLLREEVSNIERQIKVHIKASTALRRDYTLLTSIKSVGPQLGMHMLVVLRSHNFVSAEQAAAFLGVVPIEKRSGTSVRSRPRMSKIGPPQLRAKLYMSALCGKIYNKRMRNIYDEMCLRGKPKMVAIGALMRKLVHWCYGVLKTGTIFNDEGLKPVLST

SEQ ID NO: 150893 - protein, 370 aa, unidentified
MLDTTTFIGLDVHARSIKAVSLDVMTGEVRCATFGYDAGAVAEWVRSVDPRARCVYESGVTGFDLQKRLSGLGVDCVVGAVSKMIKPSADRRRKNDRNDAEFLARMLSVGNVVEVWVPDDECEAARDLTRALEDARDDLSRAKQRLSKFLLRHGLAFDERTPTGRRKGNWTRAHWSWIESIRFAEGADNDVLAYYVDAVRRAAEEKARLEGLVEAEARKPRWRRRVDSLRRLKGVDTATAADLVFEAGEFSRFRNARSFAAWVGLTPSEHSSGESDRRGAITKAGNKHLRKALVEAAWHYLTCSGRPKDLAKGQAPDRVARRHAAKGVRRLAERREALLARGVHNNKANVATARELACWVWAVGLMAEEA

SEQ ID NO: 150894 - protein, 430 aa, unidentified
MNCIDDIRLEQFRQLKQEIRGSEKYLIVGIDTAKEKHNAFFGTALGKTLVKNLVFDNSLEGFQKLLAYVERIKVQYSLTAVVFGIEPTGSYHKPLAEHLIKCGFMVVLVGGAAIKNNRQLLDGRWDKHDGKDAANIADLIAQGKCLFYEYPLMTLRNVRALIALKRRLTKREHGISACIRNNLLAQYFPELDRHFRSSETLAVVRECLDPSAVAGMEYDTFCRTVAPGRMTLAKERRLGTIWRTAVNSIGCTMGEAASFEAQVMVDSLRQLRQTIKLVEEKLEDACMEFPEYTYLLSIPGFGPDISAKVLGAIGDPHRFTSAKQVLKMAGLDLSASRSGKTSNNATPVISKKGKADLRYALYQAALIASHKNRDFIVYFTNKLKGRAQEKGINIKMRIKLAAKLLVIAWTLMKKKEVFDPARLNMEDTQA

SEQ ID NO: 150895 - protein, 372 aa, unidentified
MNYNTVYVGMDVHKESFSLCAYTIEAEKASHYQRTEADYKKVLNYLEFLRTIYGDDANFICGYEAGCFGYTLYHQLTANNVKCIILAPTTMLEQRSKKRIKTDRRDAEIIAKCLAQHNYSPVHIPTAKDEETKEFLRMRDDHKLALKKVKQQILAFCLRHNYRYDGKSHWTAAHLKWLKALTPEALYKEILDEYLLTYQTLSDKIERLDKRIEELATQDEYKEAVKKLCCFIGVKTHTALSVLVEVGDFKRFASAQHFASYLGLVPGEDSSGDDQNRLGITKAGNRHVRLVLTEASQCYARGQVGFKSKELKSRQSGNTPAVIAYADKANERLRRRYYKMVLNKYKKHNVAKTAIARELACFMWGMMTDNIA

SEQ ID NO: 150896 - protein, 346 aa, unidentified
MMIIGCDYHPSWQQICWVDTATGETGEQKLEHASGEAARFYRQLRAPALIGMESTGNCQWFVEMATETGHDVWIGDAAKIRASDSRQQKHDRRDAALILRLLLEGRFPRIWIPSGEEKDLRQLLIHRYKLVRIHAQVKNELQHLAMNQGVTKKRKLWSKTGEKVLRELPLKPWASQKRKDLFRIREMLNAQIDVLDQAVVEVAEKNEKARLLMTQPGVGPITSMAFVLTMGDVHRFQRGKQVASYLGLIPREYSSGGHQRFGSISKQGNRFMRMLLVEAAQCAVRCDPGMRSEYLHRCHRKAKGVAKVAAARKLAIRLYWMLRTNTGYPGVARVESSSRVPLVSAS

SEQ ID NO: 150897 - protein, 345 aa, unidentified
MSVMIGIDPHKATHTAVAIDTTETVLDEIRVRASKVQVQRLTGWAERFEERCWAVESAGGLGYLVAQQLVAAGETVVDVPAVLASRVRVLGSGRSQKNDPNDARAVAVAALRSDRMRLVTVDDHSRVLRLLVKRHRDQAQLRAKHCARLHAMVLELRPGGIGGQISVFKANRLLAGVAATDEVTRHRVLVATELVADIARLDEVLKASKARIATAVAASGTSLCDIVGVGPIVAATILAYTGSVARFPTPASFAAYNGTAPVEVSSGGRTRHRLNQRGNRILNHAIHIAAVVQTRCPGEGHVYFARKLGEGKTHKEAIRALKRRISNRIYRHLNADADTSTAPAN

SEQ ID NO: 150898 - protein, 454 aa, unidentified
MSKVRKAATAKTNVQLPTLNPHAAGIDVGATQLQVAVPSDADPQPVRTFTTFTDDLLKLRDWLKACGVQTVSMESTGVYWIALYQILEAAGIEVCLVNARHCKNLPGRKTDVSDCQWLQYLHSVGLLRASFRPPEQICVVRSFLRQRANLVRYASQQVMQLHKALTQMNVQIHNVISDIVGVTGLAILDAVLAGERDGQKLARLKDHRIKASGDVIARSLVGDWRTEHLFALRQALATWRHYQILLAECDAETERALAGFESRVDASANPPPPSTLRHKKPHANEPRFEARTELYRITGVELTQVPGLQVSTALVLFGELGPDFVQRFPTAKCFASWLGLCPDNRITGGRVISVKTRDVKSRAAEALRLAAQSLWQSKTYLGDCFRRWKARLGTPKAITAMAHKLARILWHLLKYREAYDPKVWAAAEDKMRAKKLKRLHQNATVLGYKLVTAA

SEQ ID NO: 150899 - protein, 343 aa, unidentified
MQSISTIGLDIAKSVFQVHGVDAAGQVVIRRQLKRRFVLSFFEKLPPCLVGIEACASSHYWSRELRALGHTVQLMPPAYVKPYVKRQKNDSTDAEAICEAVTRPNMRFVPIKTIEQQSCLMLHRVRHLFIRQQTAVINSIRAYLAEFGIVAPVGRRGVEQLLEVVADPAECRLPEVARACLAALGSQLRALKAQILDFDRRIIAWHRSNATSKRLDAIPGVGPALATALVASVADANAFRSGRDFSAWVGLVPKQNSSGGKDRLGSISKQGDRYLRSLFTAGALAVIRYAKIHGARHRPWLTALLARRPTKVAAIALANKLARMAWAMMARNERYREPAALTA

SEQ ID NO: 150900 - protein, 337 aa, unidentified
MTLYCGIDLHANNSVISVIDERDDVMYEKRHPNDLTVIRDVLAPFRDDLLACVVESTYNWYWLVDGLMDAGFDVRLAHTGAIPQYAGLKHSNDQTDARHLAHLLRLGILPQGHIQPREQRAVRDLLRRRLLLVRQKMLYHLSLQSLIVRHTGERLSANQIKALDNDAIADKLADPIRLGGQLTHLARCWHERAIAMLEEEVLKHLKPRRDYQLLSSIPGVGKILASTIALETGAIERFPGPGQYASYARCVNTERVSNGKLKGRGNKRNGNKYLAWAFMEAAHYAAIWSPEIKRFYQKRQAKRHILVAKKTVANKLAKASYHMLKRQEPFDVNRAFG

SEQ ID NO: 150901 - protein, 354 aa, unidentified
MPRQSKDTVAILGIDIGKNTFHLVGFNKRGAIVLHQKLSRRQLEARLANLPPCLIGMEACVGAHHLSRWLKAFGHDARLMPAKYVRAFLKGNKNDYRDAEAIAEAVQRPTMRFVATKTAEQLDLQALHRVRSRLVSERTAIANEIRAFLLDRGIAVAQGLHRLRGALPDILATRTDLLAPRLLHILEDLIGDWRRLDERIHSVSLEIQRLAQQDPACDRLMTVPGIGPIISSATVAAIGTGDVFSNGRDFSAWLGLVPKQISTGDRTILGKISKRGNKYLRTLFVQAARVVLLRPATWQRHGLQSWIAAAAQRLHHNVLAIALANKLARIAWSVLHHGRNFEVRKMSEATSQAA

SEQ ID NO: 150902 - protein, 367 aa, unidentified
MKKVSTVAAKPSKKISQQKLTVGLDLGDRNSWYCVLDECGQIQVEQRVRTNVKALEEVFAAMPHSRIALEIGTHSPWISRLLSELGHEVIVANARKVRLIGESRKKDDRLDAQTLARLARIDPQLLYPVKHRSAQAQADLMMIRARAGLVRARTGLVNTARGLAKSYGERLRGCNVRNMNPEKAEGLSPELQSALEPLLNAIESLSERIVEYNERIEKLAQESYSQVALLKQIKGVGTLIALTYMLTLEDPHRFRKSRDVGCYLGLQPGRRNSGQSEPQLHISKEGDPYLRTLLVQGAQHILGPFGIDCDLRRWGLKLAERGGRNGKKRAIVATARKLAVLLHHLWVSGEVYKPLHNSSPTTVAAAA

SEQ ID NO: 150903 - protein, 347 aa, unidentified
MLYAGLDLSRHKLDVHVMNEAGEPVQVTTAPPDGDGLRGLARQTAGYGEPVAAAIESMNGARFVHDQLELAGWQVQVADAQKVKGLAPLACKTDRIDAWVLAELARRELVPAIWLPTPEVRAERERARWRLHLVRHRVALKNRVHATLLAFGRPCPTSDLFGSGGRQLLDRLRLPEPWAGTTAAAVALIDDLDEQVHGCERELRHLGADHAYVPLLMTAPGIAWVLGYTIAAELGDIARFPSPKKLCGYTGLCPRVYQSGTRDHRGPLAKNGPKYLRWALIEAATHAARHPCYHDHYQATKRRLGRQRGPAVARVEIARKLAEAIWHMLTTQAPFRPARPHAKALAA

SEQ ID NO: 150904 - protein, 399 aa, unidentified
MSASRRVVIGADTHLDTNHLAVLTDTGKPLADAEFPTSPAGYDDAVRWAQSLGTICIAGVEGTSSYGAGLTRVLQAAGIEVAEVSRPDRAARRRRGKSDPLDAYAAARAALAGDRLAVPKDEHTTALRALLSARRSAVKAHTAATNQLHALLVTAPAELRERYRRHHTTALVAALAQCRPATHGDPTTAAVLTAAKALAQRVKFLEQQRQDLTAQLDGLVGQINPALRAAYGVGPHTAAQLLVTAGTNPHRLRSEASFAALCGAAPVPASSGTITRHRLSRGGDRAANNALYRIALVRMSSHSQTRDYVERQVTKGRTKKEILRLLKRAIAREVFRLLTRPGPVDDYRDLRAARQAKNLTLAAVAQHFGVPIITISRLERGHQRNDTLANHYRQWLTAA

SEQ ID NO: 150905 - protein, 387 aa, unidentified
MGNCAGVDWASEKHDVLIADQSGKELFAGTFVHDEPGITSLCAGLVKHDVEVVAIERPDGVLVERLLETGIQVLALHPNQVKAARDRFRASGGKSDRFDSFVLCELARTDRHRFRLLEPDSDETKALRALTRAREDLVTARVAMANQLRAELERFWPGPVGLFADLDSRISLAFLARYPSPADANGLGEKRLAGFLKTHGYSSRKTPAQLLERLRSAPAGRGGPVETCTRRSIVLSLTRTLQIMVEQIRELESEIAEALDAHPDGEIFRSFFVTRTSVICAATLLSEIGDCRARYPHRDAIAAQAGHAPVGVESGKRKKREVPLGLQQASPPRSRHRRDEHRQMEPVGRRPLRPGARPRSQPPPSSQDGRTRLEPHPVALLADPNAV

SEQ ID NO: 150906 - protein, 343 aa, unidentified
MDHFAGLDVSVKETSVCIVDDTGRIVRDVKVASEPAALLAVLTNPACHFKRIGLEAGPLSQWLFSALGEAGLPVICVETRHMRAVLKAQINKTDRNDARGIAQMMRVGLYRPVHVKTLRSQKQRMLLTHRKLMQSQAIAIENDLRATLRNFGLKVGVVGTVKFEARIKELVENLPDLVVLVEPLLIARRVLREQIGILHRRLLAIVRDDDVCRRLMTVPGVGPVVALTYRATVDVPSRFRNSKAVGAVFGLTPSKHQSGESNRTGRISRCGDEMMRMMLYEAAHIMLVRSAKWSWLKAWAMKIARHRGLKKAIVALARRLAVILHRIWVDGTEFRWTGQVAAP

SEQ ID NO: 150907 - protein, 320 aa, unidentified
MAKHITICAGIDTGKRKLDVALGGTPESLQVDNTGEGHKALLDWLRRHRVKRVGIEASGGYEQAVVAELRRRRFVVVVFQPAQVRAYAKFHGQRAKNDKIDAALIAACTAAVKKIHEAPDVRLLPFAEQLTMIEQIGEDISKLKNRLESCRDERIRNVWKEDISRLAKREKIAFKALVTAIREQRDLAARLDLIYSVSGSGLPTAVAILIRMPEIGQISREQAAALAGLAPYDDDSGDRIGARHIDGGRKRLRRALYAAALPASFRWNRQLIILYQRLIAAGKGHKRALIACARKLLIFVNTVVARGTPWQNQPPAAMPT

SEQ ID NO: 150908 - protein, 482 aa, unidentified
MKPKSPLETNKTNDHAMQGRWQEMNRKQRREIMRKIQSADLSLEVIHRNAAGIDIGNESHYVAVPQSRDSQPVRRYGCTTGELKAMADWLKQCGIQTVAMQSTGVYWVAVYDILEQVGLEVYLVNARDTKNLPGRKSDVQESQWLMKLHTYGLLRNSFRPVQEIRTMRTYWRQRNDLVQSAGRHIQRIQKTLTQMNIQLANVLSDVSGVTGQAIIKAILEGERDPHKLAAFRDSRVKASEGQIARSLEGNWQPDLLFVLKQEQEGYEFCQKQMAECDQQLKQYLQNSEDRSQGAALPEEQRKARRQKKKGNKPQFDLRAELFRLTGTDLTRIDSIDVMTATTIISEAGYDMSKWETENHFVSWLRLCPDNRISGGKIIGKGRLPTNNRATVALRMAASTLRLSDTYLGAQFRRLRTKLGAPCAIKAMAAKLARLVYRMLRYGMKYLDRGAAFYDAEHRRLQIKHLKWKAANLGLRIVEAPAT

SEQ ID NO: 150909 - protein, 313 aa, unidentified
MSEKFVGIDVSKYAFDFNVNGNNKVEHFNNDVKGIKKCSKALVKLAPALVVIEATGGYEMDLAMALQQAGLAVAVINPARIRNFAKAAGILAKTDDIDAKAISFFASALKPPTTAMITESTRKIKSLIARRGQLIRMRTSEMNRRGHAVDKFVDKSLEATIKLLDKQIESIDKEIKDCINNDPEMNTKADIAESMPGIGEVTASMLVTELPELGSLTRRQIASLAGLAPIARDSGTFKGKRMTGGGRGDVRAKLYMPTLVAIQYNPAIREFYQRLLKAGKTKMTAVTACMRKMLTILNVMVARKEYWKSELYA

SEQ ID NO: 150910 - protein, 375 aa, unidentified
MAQGTRWVGLDAARVSALVAVEASNDGLVKGEAAGRLPIVMGLDQHRAQITAEWIDLSTGEISRGRVVPADRASVRKFLKRFAGRDLEVALEATTGWRFVAEELERVGAGVHLAEPAETSGLRGPKKRPKTDWADARHLRELLLIGRLPESWIPPDHILDLRARVRCRHTLSHQRTEWQQRIQSVLYHHGCPQRRALMTVEGREWLDAQPLPAAAREQITVAVAMINALDVQVAPLTARLYDYAKRQTGCKALIAAYYGIGGLTAVTILAELGDTRRFENSRDVVRYGGLDITVKQSDQHRAPGHLSRQGPPALRWALYEAAQQARHPRSPDREYYLQAAERIGGNRACLALARKLLKRCYHTLRDLGEDALTPA

SEQ ID NO: 150911 - protein, 347 aa, unidentified
MRFYTKQHPFYCGIDLHARTMYVCILDQAGETRLHRNMPATPEALLKAIAPYREQIVLAAECMFTWYWLADLCAEHGIPFVLGHALYMKAIHGGKAKNDKIDSQKIAALLRGGMLPQAYVYPAEMRATRDLLRRRMHLARKRGELLAHVQNTNSQYNLPAIGKKIAYKANRDGVAERFADPAVQKSIEVDLALITYYDELLRDVELTIVKTAKHHDAQTLYLLQTVPGIGKILSLVLLYEIHDIERFPRVQDFASYCRLVKCARESAGKRSGTSGAKIGNAHLKWAFSEAAVLFLRDNPAGQKLLTRLEKKHSKGKALTILAHKLARAVYYMLKRQTAFDLHTFLQG

SEQ ID NO: 150912 - protein, 372 aa, unidentified
MLYVGLDVHSRQSSLCILNTNGGLVNRFEIKGRHAAVVDRLRQLQEPFSLCYEASCGYGQLYEQVRPLAHHVAVAHPARLHLIFGSKRKNNRFDAEKLAKLLLLNVVPRVHVPSVDVRAWRSLIQLRQRLMRQRVMAKNQIRAVLRENDLAGAKWLWSKKQIAWLESLDLHASAKLRLELNIEELKSLKTKVDRVEKELAVYADKHPAVRQLMTIPGVGIRTAETFVAWVDDITRFRRTSQLGCYFGLVPCQDASADKNRLGHITRDGPPVMRKLITEATWTAIKKCPSFKRFFERVMGGKTDRKKIALIATAHRLIRIMGAMLRSGEAYDAGHADPKRSPQSGGRSGENPIRPQAVLSAPAPHLAPASPLP

SEQ ID NO: 150913 - protein, 328 aa, unidentified
MKDLLEISCGLDVHKEKIVACILTGPLGKPTRSEIREFSTLIPDMIALRNWIVSKNCHHVAMESTGIYWMPIYEILEDAFYGDITLLVVNARHMKNVPGKKTDMRDSEWISTLLRAGLLNGSFIPEKRIREFRDLNRYRKSVIRDITSQKNRIEKFLQSSGFRLSSFISDIFGASGRNIILHLIEHGQIDKTALDSCLKTKTRNRIDEILMSVNGTLSEHQKAFLRILMTHYDSLKKHLAEIETSLEKDMAPFALQVEQLNSIYGISTTASCAIIAEIGIDMKPFKTAEHICSWAGLCPGNNESAGKRKSTSVTKGNPYIKSMLCEIA

SEQ ID NO: 150914 - protein, 354 aa, unidentified
MSQTLNTSIAVVGIDIGKNSFHLVGQDRRGAIVLRQKWSRGQVETRLANLPPCLIGMEACVGAHHLSRKLQMLGHDARLMPAKYVRPYSKGQKNDFRDAEAIAEAVQRPTMKFVATKTAEQLDLQALHRVRERLVGQRTGIINQIRAFLLERGVAVRQGLRFLRAELPGILATRSDVLSPRMLRIIEDLAGDWRRLDERIEGLSNEIETLARHDQACARLMTVPGIGPIISSAMVAAIGTGDVFSKGRDFGAWLGLVPKQISTGDRTILGSISRRGNRYLRVLFVQAAWVVLVRLKQWERYGLKSWIEAAKKRLHHNVLAVALANKLARIAWAVLNKGRAFECVKTDAMASRPA

SEQ ID NO: 150915 - protein, 416 aa, unidentified
MEIEHTHCAGLDVHKKTVVAAIIVPDGQGGLRKEVRTFATMTVDLLALLDWLLSFGVTHVAMESTGEYWKPIHNILEENFEVLLVNARHIKQVPGRKTDVMDAEWIADLLRHGLLRGSFIPPIGQRELRELTRHRTNFVRERVTLVNRIQKTLESANIKLASVASNVMGVSGRAMLNAIVAGTANATEMSEMAKGRLREKREQLDKALEGRVKAHHRFVLSEYLCQVDNLDETIARFDAEIEKYCHPFEEAVELLDTIPGVARRAAEVIVSEIGSDMGRFPTANHLAAWAGVAPGNNESAGKRYSGATRHGNQALTVALVQAAHAAAHSRNTYLSAQYHRLAGRRGKKRAIVAVAHSILVISYHIIQHKEPYRDLGGDYFDKQRPEATARRLLRRLHHLGYDISRIEQSGFLPVTT

SEQ ID NO: 150916 - protein, 375 aa, unidentified
MVVVVGIDVHKGTHCAVALDQVGRPIGAPRTVRATDAGHRQLLRWAQSLTEQLPPVEVVEVVEVVEVVESVEVVFAVEDCRHVSGRLERALLDAGQVVLRVPPKMMAQARSSARTRGKSDPIDAQAIAMVALRTPDLPRAEHTGVSRDLKLLVDQRERLVRHRTGLQNLLRWHLHELDPDLDPPSRALDRIVQLDRVQDRLTAMPEHGPSSHAMLRRLALETLADVRALTIRVNALEREITALVCTVAPRLLALPGCGALTAAKIVGETANPARFRSEARFAMHAGVAPIPASSGKTNRHRLARGGNRQLNAALHRIAVTQARLNGPGRDYYQRRRQLGNTKMHALRALKRRLARIVYGLLNPTTTAAAAPPQAA

SEQ ID NO: 150917 - protein, 339 aa, unidentified
MQVTTIGLDLAKNVFQVHGIDDHGEVAFNRALRRAQVLAFFERLEPCLVGIEACGTSHHWARELIKLGHNVRLIPPAYVKPYVKRGKSDAVDAAAICEAVTRPTMRFVEVKTPEQQAILSVHRTRDLIVRQRTQTINMLRAQLAEFGAVLPQGIYHALKFAKDCINGEPLNLPKDAEEVVFDLCDQLLFLHAKILGHSRHMTQIAKREKRVALLRTIPGVGPITASAIVATVGSGAQFNNGREFAAWLGLTPLNRSSGGKERLGHISKMGDQYIRRLLVLGMTSRIRSIRLEPEKFDPWFADILSRKPSRVAAVAMANKTARMIWAVLTQNEPYKVRTV

SEQ ID NO: 150918 - protein, 324 aa, unidentified
MVVAATGAVIQQVTVPAAPAGYQQLLRLADRHDGRRVWAIEGTGGYGAGLTRFLQAHTEQVVELDRPKRAARRHGAKSDALDAIRAAREALGRDQLAQPRAAGHRAALSVRLAARRSAVQATTDAQRQLHALVVAAPDTLRSRLRDLTTPRLVSICGRLRLRADTDPETAATAASLRALARRIQLLDAEIVDHTRAITALVRAWHPELLAPTGVGPIVAAVVSCAWSHPGRCRTDAAFAMLGGAAPIPASSGQRVRVRPNRSGDRQLNQALHLVVLTRLRHDPATRAYAQRRRAEGKTNREIRRCLVRYVARQLYRLLETQPAL

SEQ ID NO: 150919 - protein, 400 aa, unidentified
MRVVFGIDVSKVSSEVAILVNGEKVHNYTMSNDAIGFSRLLGDLKTVHKPEIIFEATGVYSRRLQAFLDEHGYAYTRLNPLEAKKQLDSLRVRKTNQIDAEKLAQSQFVLNRKPTYVQEEVYQNLRDLSRFYQNLTEDIVRAKNRLHKVLQVTFPELENILSTPSGEQYWNLVIAFPCKDFVLELSNDELSKSIRLSTSKRISDKRVAYLAEKLIALANQSYCAVKKTSSILEEVRYYAKELLRLSEQRQAVLDEMVELAQPLPEYDILLSIPGIAETTATSIIGELGDIRRFQSANQINAFIGIDLRHYESGNFLAKEHITKRGNPYARKILFKCIHNIASASHTNPCHIADFYEKRKRQSQTTSTKPHTIASIHRLIRTMYYLIMHNKLYDYASTQNR

SEQ ID NO: 150920 - protein, 352 aa, unidentified
MKKTLFIGIDFAKANFVASALLGEDPDPACLPKSFSNDDKGAKALVSWIVKLLPETCSFSDVLVCGEHTGSYSLLLPRRLFDAGIDCWLENAVCIKNGSGRIVREKSDSADATMIAEYARTFYQKRVRLFVPESPVLSELRECNDIRRRLVKEQAGLKCKKHDAEVRLKAKPGSKAIMMNIKILERQLAYIKEQIAKVDRQMYSLIRAEKKLSGIYDIIVSINGVGPVTAIALIVLTSGFTTFFSKRSLACFLGIAPFRSESGTSIQNGSHRSRQADSYYSGLLYMVAVSAMIWNPEIALYRERLLKKGKPKLVIINNIKNKLITIIWAMVKNDTLYDPDHHLKVARQYQTA

SEQ ID NO: 150921 - protein, 338 aa, unidentified
MNIVFLGIDLAKNVFQLCGLNQAGKPVYTKRTGRKELLQTLANIPACLIGIEASTGVFYWQREFEKLGHKVKVISPQYVKPFVRGQKNDGNDAQAIAVALMQPTMQFVPPKSPEQQDIQTLHRARQRIVNHRTATVCQIRGLLLDRGIPIGSAVSRARRAIPLILEDAENGLSSRMRRTIAELYDLFNDLGRRIHFFDKEIETVFRQSEACQRIAKVKGIGPKTATAVVAAIGKGTEFKNGRHFAAWLGLVPRQHSSGDRQVLMNMTKKGDRHLRTLFIHGARAVVRVATNNNDGHMNQWVNQLKERRGFNKTTVAVANKNARIIWSMLRNETGYQVV

SEQ ID NO: 150922 - protein, 347 aa, unidentified
MRFYNQQHNYYCGIDLHARILYVCILDATGNKILHKKIGADPDALLEILAPFQDEIVVGVECMHCWYWVSDLCLDYAFDFVLGHALYMKAIHGGKTKNDRIDSFKIASLLRGGNFPLAYAYPKVMRATRDLLRRRTKIVRHGANLKAHVSNNFSQYNLPAPNLQLRYPYAREEVRNRFNEPAINRNLDIDLNVIAFYSKELANVEHFIEQSAKQHNPHDYQLLQTVPGIGRILALTILYEIGNIQRFPTVQHFASYSRLIKCKAESAGKQYGTSGNKIGNAHLKWAFSEAAVLYLRGNEKAKKYLTRLQKRMSKAKALSALAHKLGRCIYFMLRNQTVFDERRFLPE

SEQ ID NO: 150923 - protein, 358 aa, unidentified
MSKLNQLDFTGTTIYCGLDVHLKNWRIHIRDEEMELRDFSQNPDPILLSYFLKKNYPGATYKVGYEAGFCGFHIQRKLTSLGIECVVLNAADIPKGNKDKRQKNDKRDARIISEEIKKKQVGIYIPSVDWEYGRSLVRTREQQIADSTRMKARIWQFLYFHNLAAPQKQEVGQHWSRRFIEQLQAHDCHNNAQLKAALHIMLTDYLQKRKLLLEVIKAMRRLYRQEPYKKNMELILSIPGIGEINAAVILFELQDIHRFKTFDQLCSYVGFIPDTDDSGETKRDKGITHRFNRRLRKALIESSWVVIRRDPALLMKYKHYCKRMHKNKAIVRVAKHLLARIRFVLKEQKKYVEGVLAG

SEQ ID NO: 150924 - protein, 371 aa, unidentified
MTKYKLQLSATTTPEAVALSAREGREIKLGLDIHQSKYVIVAQHDHATPKAPRSFAPEQFLPWIDGLLRAGHRLHVVYEACGFGFGLCRELRARGVDCQVIAPQRLDERNTGVKTDGRDAKTLCLRLDRWLQGNRDALATIRIPSADEEQKRQVHRQREQLVRQKTKLEAQGRSLLVNHGLPAPSRWWKPLAWKPLQKQLPPWLIEALEIYRPLLTLLEEKIQQLTAVIQQRVKATQPMLPTGLGELTAGVIGGEIMDWTRFKNRGQISSYTGLCPGEYSSGDKRRQGCVTKHGNPRLRAALVELAWRMVRFQPQYRAVQKRLAILARGAKATGAQRKKAIVAVARQLAVDLWRIHTGRCTAGQLGFAILV

SEQ ID NO: 150925 - protein, 391 aa, unidentified
MIYVGIDVAKDKHDCFITNSDGEVLFKAFTITNNLDGFNDLYQKIETVMKDITKVKVGLEATEHYSYNLLGYLIDKGLPTYVINPLHTNLYRKSLSLRQTKTDKVDARTIASILMSDVNLKSYSDISYHNEELKSLTRYRFDKVKERAKLKSSVSRLICILFPELEKLVPTLHMPSVYALLSEFPGAKQVANAHLTRLTNLLSEASKGRYSKDTAITFRDAARTSIGSNMPAKSLELKLTIKLIKELDSEIDEIENEIKIIMDEINSPILSIPGINYRMGAMIIAEIGDFSRFDSPDKILAYAGFSPSTYQSGHLYGAYAHMEKRGSRYLRYALYNAAKYVCHWDPTFTAYLAKKRAEGKHYNVAISHAVKKLIRVIYHLEKTNQQYIKAS

SEQ ID NO: 150926 - protein, 341 aa, unidentified
MRYIGLDVHKDNITACVLTSTGKPKFEKDFLKESGNWILDELLDFGDKEGFCVMMESGTYAYAPFRFFSDRGVEVHVVHAKALKVITDSDKKTDRKDALTIAKMLRLWKKGDIDLQMAYMPTREQCELKDICRYREEISKKIGDETRRIKSHMSRNCEYLPEEFDNFQTEKAREFVKKTYPEDWTLMRRMDCLIDLFGERDLVKEDVESRLPGSRDVELLCGIPGIGRQTAVQIMSMIVDVNRFSDAEKLCAYFGMVPRVRDSGGKEHHGRMTKNGDRMMRMIMERVTESHVRNCNSSLTQYYKRKREEMGTKKALITASRKMLSVIYAVLKSGRDFRPAA

SEQ ID NO: 150927 - protein, 358 aa, unidentified
METLKLTVGIDVSKDDCKCNLSKLTSEFTVKVIASKTFLNTEKDLQELLKWIAKHTVEYGPVRTGVVLEASGVYHERFALGLQQAGHRVSVVLANKAKKYMQSLGIKTKNDHIDAKGLAQMGCEQHLEEWSPLSPFFHKLRTYTRLHEDIQQKRTDTANQLHALKHSATEMREAVKILEKLIEVFDKELDKIKILIKKHIDSNEQVKEKMEKICSIKGVALLTSATVVAETNGFELIKNIPQLVSYAGYDIEEDQSGKRIGKTKISKKGNSHIRRILFMPSLQLKSYQVGIFPELYERTFNKHGIKMKSYVAIQRKLLVLIYTLWKKNQKFDEHYHKKISARVEKVETSSRVSLEEAV

SEQ ID NO: 150928 - protein, 427 aa, unidentified
MSVTQNEKIRQVTETTMVIGVDIASEMHWAGAFDWRGLELGKAVKFENSAEGFRFFLHWLSELAAEQKKSSVMVGLEPTGHYWFTLAAYLQGSSIKLVLVNPYHVKRSKELDDGHPSKSDKKDPKTIAKLVLEGRYAFPYIPQGLYAELRVAMNCRWRVQKELTSVQNQIQRWLKIYFPEHKTVFGKFEGMGSMALLHAAPFPSDLIALGVDGINQIWRQMKLRCVGLKRAQRAFEAAKNSVGCTTGIEAARMELQILLEDYDVKLQQYERIMEVVESLCGQIPEAEELLQIKGIGLTTVAGIFAEVGDIRRFSSPRQLQKLAGLAITENSSGKHKGQTEISRRGRAHLRAILFRAAMPLVAKNEEFQKLHQYFTTRAENPLKKMQSMIAICCKLLRVFYAVAIKGCAYSAEKMLADIHRNQPLKAA

SEQ ID NO: 150929 - protein, 262 aa, unidentified
MDCFAGLDISMDDTHICVLDREGAVVYERKTTSTARAIADELAKAPSCRRIVFETGRMAPILFHGLSRLGLPVVCIESRQAYQALKSLATHKTDRNDARGLAHLARTGFFKPVHVKSLSAHALRSLIIARKKLVGQRVTLENQIRGLAVVFGVRLPRALTAAFVNQALKASQGVAGLTAAMRGLIAARTAVMTAVAAIDADIRRMTKASAACRGLMTIQGVGQLTALAFVAAIDDPSRIRRSRDIGAYLGLVPKRYQSGGVD

SEQ ID NO: 150930 - protein, 387 aa, unidentified
MPQPNDLSRSLVALDQNSTIIAVIEMSQSSWLVAGMLPGIERQPRKKLEPNPERLLGLLHRWQGEVVRAGRTITRIAVAFEAGRDGFWLARWLAARGIEAHVIHASSVAVSREHRRAKTDRLDTELLKRGFLGWLRGERGHCSMARVPTIAEEDAKRPNRERDCLVGERTRIVNRIKSTLARLGIRNFKPTLRKAAERLATVHTPEGVPLPPNTLAELQRDMARLGFVVGQIREIEEARQKRLEQQPESGPHAMVRLLARIVGVGVETADLLVHEVLSRPMRDRRAVARYAGLTGSPDESGARRREQGLARAGNARVRRGMIQLAWRFLMFQKESALALWYRARTADSRSGTRKTMIVALARKLIIALWRFVTAGEPLEGVVLRPAS

SEQ ID NO: 150931 - protein, 421 aa, unidentified
MSYRIAGIDVHKKMLAVVVSNVEVESDFQFERRMFGSNPEQLRSLASWLLEQKSEEVVMESTAQYWKPVWGVLERYWKPICEKREGTRRKSGTLHLAQAQSNRGRRGRKRDFVDAERLVKRLVARELTLSFVPDAEQRLWRTVTRKKYQLRRDRVRLHNQLESLLEEAHIKLSSLVTDLLGVSARRMLKALAEGETNPAALAILAHERLRATPEQLCDALGACADFNPMYRRLLKMTLEQLHFLEQQIGQLDQELATLLHPHQDAVQRLAEMPGLGVDSAQQIIAEVGPTAATFPSGEQLSSWVGACPGDEESAGVNYSHRSPKGNRQMRRLLNQAANSAVKVKGSIFETVYRRCVPRLGHNQAIGVIAHRQCRLIWLMLHQGTPYEERGPAVNKRSKYQRTWRMIRQLQRLGYRIESPNP

SEQ ID NO: 150932 - protein, 570 aa, unidentified
MAIPITVYVPGMWVSLSRNTRTTVWATFRGMRNGFSLLLQEVVRMSTTTRSRGRRSRSKSRQRVVLQKPNGVLHPRVQRVEPEHFGIVSVDVAKSRSKWMLCDFYGNVIIEPVHVKHTKSGFENCIRDLHQGILEHDLKDLVVSVERTGNYHEAPKRAFREAGFEIRIVHPFATKQFRQPANPGDKTDDNDLAAIHRATVNGFGLTEPVLDELYRQLRILVRHRRYLVHRCTALSCQIRERLMLTMPGYAQCFKSLWESNIAIAVMRATGSAEAVKQLGVDGINKILVEQRIAFKNKSLHKILAWSESATPSDPDASVHHRICCHLVDDRVRKVHEIRALEAEICTLLVKTPYVLLLAIPGINVVSASDFAGEMGPITHYANANHITGRAGLFSGRYQSEDVDKRLGLVRCANKRLRNALMQIADNLVHCNNYFAGHAALWKQQKVDERLIRIRVAKRFTRVAYSAVSGRQRLHHRCCQPRDAILEKLNCFQLEHQVPMDQLLVNTNAAIDQMPTTVYREESVPLAEKLERFKSQPRRGPQPIGQILPQVVARLLGEQVQSDVSEDQVSN

SEQ ID NO: 150933 - protein, 403 aa, unidentified
MNMNAVGIDVSKGKSMVAILRPFGEIVSTPFEVKHTVSGIRSLIEHIKAIDGESRIVMEHTGRYYEHLVRELSQADLFVSAVNPKLIKDFGDNSLRKVKSDKADAVKIARYTLDSWTELRQYSLMDEIRNQLKTMNRQFDFYMKHKTAMKNNLIGVLDQTYPGANTYFDSPAREDGSQKWVDFATTYWHVDCVRKLSLNAFINHYQKWCKRRKYNFSQSKAVEIYEASKEIVSVLPKDDLTKLIIKQAVEQLNMASQTVEQLRTMMNDAASKLPEYPVVMAMKGVGKSLGPQLMAEIGDVSRFTHKGAITAFAGVDPGVNESGSYEQKSVPASKRGSGTLRKTLFQVMDALIKTKPQDDPVYLFMDKKRSQGKPYYVYMTAGANKFLRIYYGRVKEYLSSLPK

SEQ ID NO: 150934 - protein, 387 aa, unidentified
MTPTSALIQPAAPDYDNTLILAIELSNASWVLASQVPGLPRVKAKRSVEPTAEALMTAIDVYRDRARKAGHAVKRVIAIYEAGWSGFWLARWLAQRNIEVYVVQPSSIPVDRRARRAKSDGIDAELLLRSLLAWLRGEPRVCSMVPIPTEVDEDARRCVRERGELVSERGSLVNRIGSVLATLGVSDFNPLLRNRRQRLEELRTGLGTTLPPHARAKVIRMIDRLELVLKQIDELDRERDAVLEKEAPDKAGLMIQKLVKLRGIGVQSATVLVHEAFVREFANGKALGSYAGLAATPYSSGGTEREQGIDKAGNRRLRTVMVELAWLWQRYQPGAAQVRWFRERVVGTGARMRKIMVVALARKLLIALWRYATQGVLPEGAIVKPAS

SEQ ID NO: 150935 - protein, 355 aa, unidentified
MMIIGCDFHPRFQQVAFMDQETGECGGRRLQHRDEAEVFYRSLKGCAVRVGMEATGNYRWFGRLLEDEGHELLLGDASRIRAACVRKQKTDRRDAEQILKLLVEDRFPAIWQPDAANQDLRVLLLHRVKQVRLRTRVKNELDALSKSEGYLSARVWSTGRRAELEALPLAGWLARRRADLLQMHDELDERIAPLDEALREAAEADPGARLLMTHPGVGPMVSMAFVLTIGDWRRFPRGKHVASYLGLIPSEESSGERRRLGGVSKQGNSLMRWLLVQAAATAQRYDASWRRQYARLSINKHHGVAKLAIAHKLAVRLYWILRSGEDYSRVAERGSRADDKGSEAAMEDRKKAGYF

SEQ ID NO: 150936 - protein, 404 aa, unidentified
MELKPLYRCVAALDVHQAKLTVCVLYEDSDGEVHVELREFGGFKRDRCEMAEWVASFQPEEVVMESTGIYWKSPYAALERCGIQALVVNARHVKQVPGRKTDIGDAQWLAILARSGLLRGGFVPPANFRELRLTSRQMQKLTGILGAEKNRLHKVLTDAGIRLAVVVSDIHGQSARAMIKGLIAGESPEQVLGYASKRLKATEEELLDALDGELTDEHRFVLVELMDHIEDLEQRITRFANHLVQGLAPQQVLLQALQTIPGLDERGAAMLLVEIGDDMEAFGSGEKLASWAGVCPANHESAGKRKSGKKRKGNPYVRRILCEAANAAARTRSALAELFKSLLIRRGRKRAIFALAHKILRIVFVLISRGDYYRDATVDYEAMSVERNAPRWIRMLKKYGYISA

SEQ ID NO: 150937 - protein, 463 aa, unidentified
MQKNCDKNSKPDKEVGIEGLPVIRPNVAGIDLGSETHWVCAPNVERTGLEVETFGATTPELERMAEWLKARKIESVAMESTGVYWIAPHEVLERHGLEIVLVNTRELARVPGRKKTDRVDCRWTQRLHSCGLLKGSFRPNEPVCMLRTLVRDKGNLVAEAGDWLRRMQKSLDQMNVRVHRAVSDIDGVTGMRIVRSIVAGERDAHELAKLRDRRCGKSEEEIVEQLSGHWREDHLFSLRQALKMYDAIQERIADYEREILRKLAEMERAECHGQEPPKLKNPQKAKAIQKRGEEPLRQALYRLSGVDLTGIDAIGVETVQVVLSEYGPDLSRFPSEKQFVSHVTLAPRQALSGGKPVKKKKRGSASTRVAAALRMAALSLRHSQTALGAYYRQISRRIGGDVAVFATARKLATLIYRLLRWGQPYVDVGAAAWENRYRQARIQRLAATAKDLGYQLTPNPTKA

SEQ ID NO: 150938 - protein, 433 aa, unidentified
MLLLPLFKEVIIMRRVMYPIACGIDVHKKKLACTIVIAKSIQDEPVYHHRNFSTHNYDLVKLADWLTHFDCHCVCMESTGKYWTPVFNYLEDRDFDITITHPKYVKSPKGKKTDFLDSIHIADLFQMGEVQPSYIPDKEFRQLRDLSRYRYKITNFISSEKNRIQNCQTMSNITLASVVSDPFGVSASAVFSELLISPDFDDAHIRSLLRGSLKKKSEEVLNSIRGFHLGDDQSFKALLALAHKQFLAEMKTDISSEISKRLSKYQPFIDLALQVPGIGYDSATTIIAEVGVDMSVFPDAENFTSWIGLTPTNNESADKKKSVRTSHAGTYLKPTLIQCALAALKVKKCPYFKIKYDKIKKRRGHKHAIIAIARMMAACLYHMFKDLKDFHPSDYEELMNPHPPKPRKQDVQAALELLQSAGGYTITPITAAS

SEQ ID NO: 150939 - protein, 483 aa, unidentified
MSAGKKNAKNNNGGDGARGAVPVHGGEGAEVAEESTQVVEYAAAIDVAKGFGMVCTRVPGSRPDRRRQKVWRVEAAFKEVTALMDHLRCEGIQRLVLESTSDYWRIFYYLAEAAGLEVWLASARDVKHLPGRGKSDRLDCVWHCKLNERGMLMRSFVPPEPVRDLRALTRTRARLAQDQTRHQSRVEKILEDALVKVSAVISDLFGTSGRRFPGALVAGQRSPKALAALGDYRLKASTAGLEAALTGRFRDIHATEIAVHLRLIDAINAEIALLDEQIEQHLPSVPHTAPVCTACGEIGGCHAPGCGSHGTAPLSLAGRLDEVTGIGPVNAPAIIAELGTDPSQFPTPGHAAAWARLTSRSRQSGESAKPGRTGKGNRYLRGALGQAAMTAANTDTRLGAMYRRIARKRGKQKAIVAVSRVICEIARILICDPGARYEELGADYYHPRSPARQTRDKIREIERLNPGKKVILADAGPQADAAA

SEQ ID NO: 150940 - protein, 371 aa, unidentified
MKSIIYIGMDVHKKTYSLCALLKETGEIIGETKIPADVSLIIKFIENAKKSVDSDDVQIKTGYEAGCLGYSLYWQLAEKGIECDILAPSTMHRSAKNKVVKNDRRDAKNIAANLANGTYKSVYVPTDEDVEIKEYIRMMHDFKIELKKVKQHINAFLLRFGHQYPGKSKWVPAHIKWLKELELSDMHREILDEYLSQLEILSEKIERFKHRLEELSQKETYNEKIGQLRCIKGIDTTAAMTMHAETSDFDRFPTANAFASYCGLTPGEDSSGESYHRLSITKQGNSMIRTTLIEAAQVLVRGTIGKKGKKVKSKQKDQDVKVIDYADKAVIRLQKKYHRMIFKGVKRNIAITAVARELACFVWGIETGHIS

SEQ ID NO: 150941 - protein, 430 aa, unidentified
MEIVYPRSCGVDVHKSFIVAVICISESVKPKYIKKRFSTFNNQLIQFRDWLIENNCQNVCMESTGKYYIPVYNALEGHISNVVVANPKWVKAIKGEKDDNKDAKWIADLFKFGIVRSSYIPEKDIRILREFTRYQYKLVNMRSSEKNRFQNALTTGNCKLDIVFSDIFGKSASAIVDTILSNNPYTSEDILSKVHAGCKASHEDILSAVEGIQLNQFQKARIRIVQKHMEYLDSLLDEIQHHIDLMVANYEEYIQLLCTIPGINRKSAITIISEIGTDMSQRSSHRKLAAWAGLAPGCNESAGKKKSVKISKAGVYLKPCLVQVAHAAVKDKNCDYYADKFNKISKRRGKKRAIIAIARKILIAVYHLLKTGEVFNPTDMADVETTKKQRIEYVKNNLRNAFNQLSRTGLSEAEILQLIRKESTNSPQIE

SEQ ID NO: 150942 - protein, 403 aa, unidentified
MNSVGIDISKGRSTVAVMRPFGEVVISPFEVRHTDSELSKLARRLKSLNGETRVVMEATGNYHAPVAKLLHDAGLYVSVVNAKLVHGYGNNDLRRVKTDRKDAVKLANYGLDRWLTLPRYIPEEDTRLLLKNCYRQYRQYSKVQTILKNNLISLLDTVFPNVNRLFSSPARADGSEKWVDFVAEFWHCRCVSEKSEKVFTNKYQRWCRKHGYNFSEEKAHTIYVEASGHIGVMPKSETTKLLVEQAVAQLRATSAALAALKHEMQSLASMLPEYPVVMDMFGVGPTLGPQLIAEIGDVRRFYSKKALVAYAGLDAPPNDSGDVTGRHKSMSKVGASSLRRTLFLVMGVYLQKSPLDEPVYLFMDRKRAEGKPYRVYMMASANKFLRIYYATVKAYLESLELTA

SEQ ID NO: 150943 - protein, 376 aa, unidentified
MSKVRFVGLDVHAETIAVAIAETSGEVRSLGVIPNRLESIRKLIGKLRPANQLRVCYEAGPTGYILYWQLTGLGVQCHVVAPALVPTKAGDRVKTDRRDAERLARCHRAGDLTAVWVPDEAHEALRDLVRAREAAKTDQLRARQRLGKFLLRHGKAPAIKITPWTAKHMDWIKRQVHFGQQALEATLLDYVQEVDHAAARIERLEKSIDEAIATAPMEIRAVVEALQSLRGVAKMTAVTIVSEVGALSRFENARQLMGYSGLVPSEFSSGKTIRRGRITKTGNAHLRRVVVESSWSYRYRPWLGSELRRRQQNLPDNIKEIAWKAQHRLHSRYKKLAATGKNKPHIVTAIGRELLGFIWAIGVTTETQYRAKTVAA

SEQ ID NO: 150944 - protein, 387 aa, unidentified
MTVYVGVDIAKELHYAAIMNDDGVVSNPFSFENNDKGFQSFLSHLAPFEKESVLVGYESTAHYQENLAYFLKREGYRTAELNPLQTSALRKANIRNTKTDRVDAKLICLTLAQHNAALSGRDVSRLDDLYSLCRMRMDLITKRTQCKIQFVAIMDRIFPELATFFKGNLHINTAYRLIEKYPLPSQIKKTRIDVLTSLFQKASKGHYGRDKATALKKLASVSVGIPSDTFAFQAQQLIHQIEFYSDQIAAVDQKIDSDPVVTSSLLMTIPGISSYACACILSVIKNINDFHGPCKILAYAGLDPVIRQSGKFNARSTRMSKRGNSLLRYSLIWTAGNVVLNNATFAAYYAKKISEGKSHYQALGHCAKKLVKSIFHVLKYNEAFNLA

SEQ ID NO: 150945 - protein, 392 aa, unidentified
MSDVITYVGIDAHKKDLFIAMLVGQQAKPVAWTVANEPNAVRRLAKKLEREAPGPVQAFYEAGPCGYALQRQLTTPRVQCDVVAPGLIPQKPGERVKTNRRDARKLVELGRAGLLTPVRPPTPEEEAVRDLCRARDDAREDLQRCRHRLGKLLLRRGLQYRVGRHWTKAHRRWIDSLKWPHDAERVVVEDYLLAIDQHETRLKELDQQLAAVAETAPYREPVAWLRCFRGIDTLSAMLILAELHDFRRFPSPRALMAYVGLVPGENSSGEKHCRGRITRAGNALVRRLLVEAAWHYQHRPGVGVALARRRKGQPGRIIAIADKAQQRLCRRFQYLAVMNKPRPTIAVAIARELVGGAATGPRGRELTERTTAGKSTKAISVTRARSDREAGG

SEQ ID NO: 150946 - protein, 493 aa, unidentified
MGDDVMISVDPHKASNTLAVMDPVTKTVIARQRFMNTAVGYRRLREFAGGWTHRRWAVEGCHGAGRSLAQRLAGDGEIVLDVPAKLAARVRVYSQGHGRKSDADDAISIGLAALNSTRVAVVRRDDTLVSLRLLCDRRDELGALRTQAVCRLHRLLCELTPGGTHRGLRASRAEQLLAKLRPVDPVDVVRCQLAHQHLDDIRALDAKMTAVRAQIAALVDGTGTRLTELYGIGPVIAGRILAEVETIDRFPSKDHFASYNGTAPIDASSGEQVRHRLSRAGNRRLNHALHMMAVTQIRQPETIGRRYYERKRLEGKTPKEALRCLKRRLSDVVYWQLVADRRATITQCGSATTPTRTRPTSTSATTPVPRTAPPRRPPHPTVSTGSSHSTGKTAASSASKSSTPAVGSPKTSSTKQKTRAEATRKPTTSSAAVPDRRPTSAAAAGSRLAQPPEGLGLEPPARTTTQSPGGNSPPQLLTERCRSRRPGKRWLAS

SEQ ID NO: 150947 - protein, 314 aa, unidentified
MSISTQHYVGIDVSKDQLDVFSLFDNTESQYANTETGITALVNQVITIPQGVVIVEATGGLEMLLVQSLATHGIVVIVINPRQVRDFAKATGRLAKTDTLDAHIIARFGAAVKPEPRALKDNQTLELSALISRRQQLMEMLIAEQNRLRTAAKPVQAQLNVHIDWLKKSIKDIDRNRDQFIKGSPLWRAKADLLRSAPGIGPVASASLIADLPELGQLNRREIAALAGVAPFNRDSGTQRGRRCIWGGRAQLRSTLYMATLTATRCNPIIKPFYQKLIQAGKPHKVALTACMRKLIVILNTMMKNQTLWEYSTP

SEQ ID NO: 150948 - protein, 338 aa, unidentified
MEQVITIGLDLAKNVFQVHGIDAAGKVLVRRQLRRGDVLRFFGGLPRCLVGMEACATAHYWARELTKLGHTVRLMPPAYVKPYVKRGKTDVADAEAIAEAVTRPTMRFVAVKTAYQQAALMLHKVRDLLVRQRTMLINALRGHLAEFGIIAARGPGGVTAAIISLHEAQDSLPELARVALHGLIDQLRMVRGEIARVEKRIVAWHRASNASRRLATIPGIGPITASAIAAAVPDATLFQSGRQFAAWLGLTPRAHSSGGKERRVGISKQGDGYIRRLLVTGATAVIRLARQGNASKTWAAKLLERKSARLVSVALANKTARIAWAVLARNQSYVAPAM

SEQ ID NO: 150949 - protein, 349 aa, unidentified
MQSKVQIKSIGIDLGKTTFHLIALGTRSQVVIRKKFSRSQLLVFTANLPSSLIGMEAGVGSHFLGRALREQGHEVRLIPAQFVRPFVKSNKNDYRDAEAIAEAVERENMRFVPIKTEDQLDLQALHRVRDRLIARRTSVINQIRAFLLERGISFRKGPASLRRQMPEILENADEKLSTAMRRLLDFLWQEWKGLQMQIESLNADLEQIASSDPSCVRLQQIPGVGPLVSTAVVSAIGNGAAFKKGRDFAAWLGLVPRQWSTGGKAKLLGISKRGNPYLRKMFIHGARAAVLRVKREGSSLGKWMSGLETRTARNVVIVATANKLARISWAVLAKGNDYQPLHKAAVFSN

SEQ ID NO: 150950 - protein, 314 aa, unidentified
MNTMTLLGIDIGKHSFHLHGQDAKGHQVLRKKTNRSQLLSALAQLPACTVVMESCGGAHWLARQIGALGHEVKLIAPQYVKPFVKGNKSDFIDAEAICEAASRPAMRFCSIKTAEQQTLSALHRVRESLIGHRTLATSQIHAFLLEFGISLAIGAAALHRVPALLDDPQHPVPWRFKGVVMRLHQQIQQLNEEIKDIESELKQQLKEDDAGSRLQSIPGIGPITASALLADVGDASNYRSGRDFAASLGLVPRQYSTGGKTVLLGISKRGDKHIRRLLVQGARALMQHIDKREDALGPWAVLAKGSQYDPHPNV

SEQ ID NO: 150951 - protein, 485 aa, unidentified
MPQVYKSSKSKYPLSTQRKTRNPKKQTKADPTQGLQVANPNAAAIDIGSSEHWVAVPPGRAEPCYRRFGCCTADLEALADWLVECRVDTVVLEATGNYWVVLYDILEQRKLRAVVVNPRYAKNMSGKKGDIPDCQWMQKLHTYGLFANSFRPAEEIRVLRTYLRQRETLVAAASQSIQHMQKALTEMNIQLTNTISDVSGETGLRIIDAILSGQRDPKELARLKDPRIRATQSELARALRGHWKTEQLFVLEQARLTYGHYQEQILACEEAIQQQICALQARFPQAVAPTAAATEDTAGQRAQTSGEVKPATAQPEAPTFSLSRELLRITGVDLTAIDGIGPVTAQIVLSEIGTDLSYWPDEKHFASWLGLCPDHRISGGRVLRRSTRPVVNRVRNALRLAAFTLDHSDSWLGAKYRRLKRKLGAPKAIVAMAHHLARLIYRMIKHGQQYVDKGIQAYEAKFREQRKRWLQKLAKELNMKLVETD

SEQ ID NO: 150952 - protein, 354 aa, unidentified
MIIIGVDFHPEFQQIALLNTTTGEVEEKRLAHPEEAEKFYRALAGAGETVRIGMEASGHARWFERLVAELQFDLWMGDAAEIRTKRVRKQKTDRQDAQLILSLLLEDRFPKIWVPSWENRDLRQLLWHRHRMVQARTRVMNQLQAVALNEGLRCKKKLWRERGRQQLESFGLAPWASRRRRDLLELLDRFNPAIAELTQAIEREVENCPAAQRLRTHPGVGVLTALAFVLILGDAERFHCGKQVASYVGLVPLEDSSGNRRRLGHITKQGSSILRFLLVEAAQVAVRSLPEWRSKYFHLVLRRGRKIAKVAMARRLAVQLFWMMRKEWNYEQLKKFGSHAGQPGNRHGVQSNTE

SEQ ID NO: 150953 - protein, 393 aa, unidentified
MYIVGIDIAKNNHEATLIDQAGSIIGKSLRFANKLTGYNRLMEFVHTHVPDTADIVFGMEATGHYWLPLYAHLRNAGFKVHVINPIQSDALRGLYIRQTKNDSKDSFIIAEVIRFGRFSETNISSPDMHALRELCRHRFYIVDSVSDIKRKVIALLDQVFPEYEGLFTDTFGKTSLQLLSECSTPEEILALDSDKLCDIINTASRGRFGPDKAMEIRDTAQNTFGIMLASESFGLLIKQYIEQINFVERQLSVIEDEIARLLACFDCQLSTITGIGPTLAAVILSEIGDVRKFGSSAKLAAFAGIDPAVKQSGEFNGTRCKMSKRGSPYLRRAIWLASTVAAFRDPAVNALYLKKRSEGKSHMTTMGHVCRKMVSIVFAVLRDNAPYIPAVVH

SEQ ID NO: 150954 - protein, 345 aa, unidentified
MKKIAIGIDFAKEKFDVTVKNVETGASEYGQYPNTPAGGRSMVRMVRKFAKGIDSSEWLFCGEDTGYYSQTIARYLTEKGYFMWLQNPYSIKHSEGDIRRGKDDRADSAAIADYAHRYEDKARKWELPSKVSEELHLLLTRRDAYVRAKRVIQSGASEIPKRDKQGESVSLIKSSAKRLLREIDEEIERLEEQMKKIVKEEEAMQKNYEILRSFTGIGLVNSMCFIAYTDNFKKFDLNARKIATFWGVAPFGKYSGKTVHVDPHVSQFCNHWLKAIISNAANSALKWNPIIIAYNERLVKRGKCEGIRRNNVKNKIIQTVVAMIRKGEKFDPEFKFTNKMVPVEC

SEQ ID NO: 150955 - protein, 346 aa, unidentified
MSRTECLVTVGVDSHKELHVAVAVDQLGRRLGTTAVATTRRGFGQLERWAQRLGVIQRFGIEGTGSYGAGLARWLAARGHQVVEVNRPNRQTRRRQGKSDPIDAEAAARAALAGQGLVRPKAADGTVEMLRVLRMARRSALKARTQTVQQLDSLVVTAPDQLRARLRGLSLEQLVPVAAGLRPGELAGPLAATKLALRTLARRHQALSAEVACLDQQITRLTATAAPRLLARGGIGPQVATALLIAAGDNPGRLRSDAAFSMLCGAAPIPASSGKVIRHRLNRGGDRQANSALWTIAVCRMSYDPRTIAYVRRRTQEGKSKREIIRCLKRYIAREVHRDLKAALVM

SEQ ID NO: 150956 - protein, 450 aa, unidentified
MSKLKPKSQSLPVINPNAAGIDIGGRFHVVAVPPDRSDKSVQTFKAFTGDIHNMARWLTKCRITTVAMESTGVYWVPVYEILEEHGFEVVLSNARDTRAVPGRKTDVGDAQWIQRLHACGLLKASFRPDATIAELRTYMRVRERMLDYAAAHIQHMQKALTFMNVQLHIVVSDITGVTGMKIVRAIVAGEHDPAILAKFRDPRCKADEQTICAALKGNYQPEHLFALRQAVLMYDAYQLRVGECDVQIEAVLDRLCINSSEPDEPIPKPKHRAKQANAMTFDVREKLYRLIGADLTQIHGIGPFLALRLISECGTDMNKWPTEKHFTSWLTLCPGSKISGGKVMSSHSRKSNNRVVAHLRLAATTVGRSDTALGAFYRRLSSRIGKAKAVTATARKIAILFYNAMKYGKKYQDPGAEYYEERYKERVLKNLKRQAERMGMTLQAKEECVS

SEQ ID NO: 150957 - protein, 341 aa, unidentified
MELQAIGIDLGKTLFHLVAMDAKGNVVVRKRCSRKQLLVYTANLCVERIGMEACAGAHFLGRALREQGHDVRLMPAQYVKPYVKTNKSDYIDAEAMAEAVQRPNMRFVPIKTEEQLDLQAVHRVRERWVRRRTAVVNQIRGLLLERGLTLPKGRWHVDNTLPDILEDASLNLSGSFRVLLAQLKLELGQLAACIEQMDTLIQKTASENEACQRLTAIPGIGPVTATALVAAVGNASGFRRGRDLAAWVGMVPREYSTGGKQRLLGISKRGNRYLRRLFVQGARVVMQYRHRQASGLSSWLDQLLSRAHQNVVIVALANKLLRMAWAVLCKNEVYRAPVLAS

SEQ ID NO: 150958 - protein, 312 aa, unidentified
MNKQDMGVNVGIDVGKFQLDIFIWERDRHFTVENNDSGVREAIKILNRYKVQCIALEATGRYEMAFATAAFEKDLPVAIVRPILVRQFARAADQLAKTDKIDAAIIARFAAVMKPRLTKQRSENLQLIKDLVVRRRQLIAMRTQETNRAKVMGKQMERSCARIIKALNKDIDWVEAKLEKAVEAEPTWNDRKEILSSVPGVGNALIWTLLSEMPELGTLNHKQISALAGLAPINRDSGKSQGKRRILGGRHSVRTTLYMATLSATQCNPIIGGFYRHLVKQGKHKKVALTAAMRKFLTILNAMVRDGLEWAY

SEQ ID NO: 150959 - protein, 454 aa, unidentified
MSIHSTDPVTGLSPVRVQVGIDAAVVANHHVCVREILPDGQVRLSRFTAPPTLAGLAMLSDRLRGFPGVVAVAEPTSMTWLALSIAMHRGGGDLSLLGARHAARLRGAIIGKDKSDVIDADVLATAGEVFTLTPLRPLTPPQLALRRAVTRRGKLVVDGNRARRRLISLARWAFPDVWSAFAGSQPTAVAVLTRWPDLRALGSARRSTLTGVVAAHTRGVPDVPARVEAIHLAARAWSDFWQGHLDLDALAWEVAEHLHDMAEADQRIARATAQATRYWADLYGDDPLLLSVPGMGPMTAPAVRAFLGDGGAFTTAKAAASYVGMNPSTWSSGTVVQPSRAITKEGPAVLRLAFYQAAGGARRVDPQLAAFYRHLMVDRGHSHTKATVAVARKLIERTWTVLHRDQPYQLRDIDGTPLTRVRAKEIARTHAVPPEVRARARAQSAATHRSKLTR

SEQ ID NO: 150960 - protein, 431 aa, unidentified
MNRSVEFLSVGIDVGADFSLMAFALPSQELLGKPYKIIHSSQRSLNGAVEKIKTLSQKYQLPARVFMESTGIYHYPLYHKMKDAGFDVFVLNPLVTHAGRDLNVRNIHNDKYDSQKIALLGLRPGLKTSLIPSDQVISMKVILREYYAVKKEISMYICRLKNQLRQAFPQFLPLFSKVNGVTAMAILCEYPNPESLLNAGEHAVADFMKSVSHNGPLKVQKKAAALIQAAQDARSFGHWNHGISILIRHYIEMIRLLDVRAKTLLAQAKALLAEQDSKTLAHQTELLQTIPGIGFLSALTLICELGDFSAFKRPKQLFSYFGLDPIVRQSGNYNRTNFKLSKRGSPFARRCIFVIALQSISLNIHKEPKNPVLRTFYEEKCMCKAKMTAIGAVMHKICNLIFAVLRNDAPFVLQTPEQHNAAYLSKTHSVA

SEQ ID NO: 150961 - protein, 403 aa, unidentified
MKPNTEVRLLPQVSKACGLDMHKDKIVCFISNQDGTEQHMEEFGTFSNDLFRIRDTLVKYQVTHALMESTGIYWVSLYGILCDAQINTTVANPQHIKQIPKRKTDRKDAKWLCTLILHGLARHSFVPGPTQQALRDLCRNRLFYKQGQTKIKNRIIKILERANIKIRSVVSDISLKTSMEIIRLLATGTTDIDQLAACCRGRLKAKKEQMKQALVGTLGSNERLMLKMLLADIDHYESQVQQIEKQITELVNQQYKEVADCLVTISGIGPQSAQVIISEIGDNMDFFPTADHLTSWCGLAPGNNESAGKHRSTSIKKGNKYLRVAMVTVAWGAVRTKDSYWKALFEQLRKRMKAQKAIIAVARRLLKIIYKTIKAKTLYIEKGFNHFLDLRQKSLDRQKAKLA

SEQ ID NO: 150962 - protein, 364 aa, unidentified
MNVHTTNFTFCCYTADSDRGFAVAQTEPDYRQVIKYMERVQKQRGEECKFVCGYEAGCLGYSLYHQLTRCGVDCVILAPSTMHQEKGKRIKTDRRDAENIAKCLAFSLYSPVYVPTTEDDAVKEYIRMRDDIKADLKRVKQQIIAFTTRHGFAFDGKSYWTQKHLKWLETLVFEHPLYKKTLQEYLILYYMLDEKVAVYATRIEEMSHLEHYEENVQKLCCFRGVAAHTALSLLVEVGDFQRFRSAKHFAAYLGLVPGEHSSSDKQIRTSITKAGNTHLRRLLVEAAQSYNRGAIGKKSAALKARQGGNPAEVIAYADKANERMQRKYYRIAFKSRHNIAKTAIARELACFVWGMMTGNISNAA

SEQ ID NO: 150963 - protein, 342 aa, unidentified
MQIATIGIDIGKSSFHVVGLNARGAIVRRRRCSRNQLMRELANLPPCLVGMEACCGAHHLGRRLATFGHTVRLIPPQFVKPFVKSQKNDLLDAEAIAEAVQRPTMRFVPLKTTDQLDLQAIHRGRTRLVRRRTAVINQLRAFLLERGVTVPVGRHALIERFPEVLDNPAFGLSPRMCRLLQQLRDEWRVLDQAIQEADHEVATLAHEDEACRRLTQVPGIGPVTATALVAAIGNGAAFTKGRDLAAWLGLVPQQYSTGGKVTLRGITKRGNRYLRCLFIHGARAVCRHHRHRPHRLGRWIASLEARAHPNIVVVALANKLARTAWAVLQRDVHYDGRFFMSA

SEQ ID NO: 150964 - protein, 355 aa, unidentified
MNSIKYVGLDVHRDTISVAVLNAEGKLVMQFVIATHASTILDFLHGLRGTLHVTFEEGTHSAWLYELLVRRVAYLVVCNPRQNALLKAGSKSDAIDARKLAELLRAGLLSPVYHGQNSTAAVKHLGRSYAALTEDTTRIMGRLKALYRSQAIACAGQKPYGSRHREEWLAQLADSGLQRRARRLYQELDLLQQLRREARRDLILECGKHSETKLLRTVPWLGPIRAALLIGRVQTPHRFRTKRQFWAYCGLALETRSSADYGFVDGQLERRKKPGFIRGLNRNHNHDLKNLFKSAATAASGSDGPFRPFYENLLKKGMRAEMARLTLARKIAAITLHVWKKGEPFDAEYLKSQAA

SEQ ID NO: 150965 - protein, 451 aa, unidentified
MLIQGSSDPPRLVRVGIDAAIVAQHEVCIRATDAQGRVRTDRFRVQPTLAGLRSLSNRLAEVPGVVAVAEPTSMSWLALSVALRDAGCDLSLLGARHAARLRGAITGKSKSDVIDADVLARAGEVFDLRPMRPVEPAQLALRRACVRRGTAVIDGNRYLRRLISLARWAFPDVWNGFRGSLPTAVAVLQRWPHLVQLAAARRSTLTGVVALHTRGVPDLPERVEMIRSSAAAWASFWHGHLDLDALAFDVTEHLTDMAEASARTQRATAQAQRYWMQLFGDDELLMSVPGMGPITACVVRGFLADGSAFASAKAAASYVGLNPSTWSSGTVSQPSRAITKEGPAVLRLAFFQAANAARRQDPQLAGFYHRLMTQQGHCHTQACVAVARKLVERTWTVLTRGEPYQLRDPDGQPISHIGAKKMIKEECTVPDHVRARARAHSAATFRAKLTR

SEQ ID NO: 150966 - protein, 404 aa, unidentified
MTAAGTADTAGQWVFGGVDSHADTIHVAVVTDNGGHLADAEFPTTPAGYTPALAFLGAHGDVIAIGVEGTASYGTGFTCAARTDGLSVVEVNRPDRAERRRSGKSDPIDAYAAARAALSGRASSAPKDETVTGIRALHNAARSTVKARTAAMNQIGHILIGAPDTIRARYRALRGKPLVDALARLRPAGDAVHAGVLTALKSLARRVQALATEHDKLTAALDDMVTGHNPGLRAAYGVGPDTAAQLLITAGGNPDRLRTEASFAALCGAAPVPASSGKTNRHRLSRGGDRAANAALYRIALVRMASDSRTRDYVARQTAAGRTKKEIIRLLKRAIAREVFRCLTTTVTVPEIADLRPARQAKNITLTAVANHFGVWPAVISCIERGTRRDDDLANAYRDWLTTA

SEQ ID NO: 150967 - protein, 401 aa, unidentified
MNAVGIDVSKGKSMIAILRPYGEIVSSPFEIHHTSSEISSLIEQIKSIEGESRIVMEHTGRYYEPLAHELSLANLFVSAVNPKLIKDFGDNSLRKVKSDKADSVKIARYALDSWTNLKQYCLMDEIRNQLKTMNRQFGFYVKHKTAMKNNFIGILDQTYPGVNTYFDSPARDDGSQKWVDFATTYWHVDCVRKMSLNAFTDHYQKWCKRRKFNFSKSKAEEIYGAAKELVPVLPKDDLTKLIVKQAVEQLNTASKTVEELRALMKETASKLPEYPIVMEMTGVGPSLGPQLMAEIGDVTRFTHKGAITAFAGVDPGVNQSGTYEQKSVHASKRGSSTLRKTLFQVMDALIKNKPQDDAVYRFMDKKRTQGKPYYVYMTAGANKFLRIYYGRVKEYLASHSQ

SEQ ID NO: 150968 - protein, 340 aa, unidentified
MQYKFFIGIDVSKSTLDVGLIDSGYPASVKHHQVSNDDDGIAAMVQWLEQQVNFSVEATLFCLEHTGIYNYPLLQFFTKQSASVWVENPIQIKKSLGLQRGKNDKVDAVRIANYAFRSVDRAKLWQPPRIVVDKLKHLSALRERLVETKKRLQTPVDELVKVGNDSIAKILAKSMRKTMTGLDKDLKSIEQQMKDVIDGDDELKKIYGLITSVVGIGFVTAVNLIIYTNEFRRFANHRQFACYSGVAPFEYKSGSSIRGRTRVSPLANKKVKTYLHMASLSGVKLDQGLKAYYERKVAEGKNKMSVLNAIRNKLLSRVFAVVKRGEPYQKINIQNAYILS

SEQ ID NO: 150969 - protein, 352 aa, unidentified
MTVTIVETRPLARAITGGVDTHADVHVAAALDPVGGLLGVAEFPATAAGYARLLGWLGGFGPVCLVGIEGTGSYGAGLARHIAAAGIRVVEVDRSDRQDRRRAGKSDPLDAVSAARAALSGRAAGMPKGRDGQVEAIRALMVAKRSARSERIQTINQARALVITGPDDLRARFARHAPAELVAELAALRPRPGSMIRYHTLLSLRELGRRVAFLDGQLQRLDELIVPLVTARAPGLLCLYGVGHDTAAKLLIAAGDHPERLRSEAAWAHLCATAPIPASSGKVTRHRLNPGGDRQANHALYRIVITRMSSHPPTRAYVDRRSKEGLSKKEIIRCLKRYVAREVYPHLRPGAG

SEQ ID NO: 150970 - protein, 327 aa, unidentified
MTDATTPSPVVPVFVGVDVAKDKLDLARSDAEAVLTVANDAAGIAHVVRLLRAAGPALSVIVVEATGGLERPLLDALLDAGLPAALVNPGHVRHFAKGIGKLAKTDAIDARMLAEFARLAAPRLAQKRSANRAELEALVTCRRQLLHVRTEQANRRGATASKAAVRSIDRVLKALDKEVDALDAQVKKLVESDDDLDSIDRLLRSVPGVGPVLSSTLLAELMELGTIGRRQVGALVGVAPFNCDSGRSKGKRAIRGGRASVRSVLYMATIAAMRVNPVIRRFAERLAGAAKLKKVAIVACMRKLLSILNAMIRERITWDQLKLVKST

SEQ ID NO: 150971 - protein, 458 aa, unidentified
MYRELQPLRQALSSELKASLPAPGVGIDQEPLLQSYLDRLTLYIGCDVADQTFTLYAQTAGGDEISHRINIPNRTQGFQQAWSWLESLREQQHLRILLLAMETTGVYYWAWWDFLSGRPNLARVLYNARTTEHMTEVLSKKVRNDLVDAYALAEQVRLGGTPETLLTEDADLQTARYCSRFARDLAQQANRKKTQLRSILRAYNPVLEQVFPKNQLHHPAVYALLERYVFPPEFVQAGAEAVTQILVNQCRYAFGEKQAKQLVELCGQQLVRPIGQEVIHQRVRQLCEDILTIKRRQKVFLKTGYDLIRDRPETKLLSGSVGAGLSNTLALVSEVGDVSRFPDGEHLASFLGITTSKHISGTSIFHAKHITKQGSPNGRYAIVNLAQHLCRKVPKYQAMYQRIKTRKPARIGYLIAVVAVARDFATNILYDMWRNQRPFFLEVGDYRKYRQEHPNSPA

SEQ ID NO: 150972 - protein, 453 aa, unidentified
MGKKKKKELRVKKVEELKQINLNSAGIDIGDSLLYVSVPEDRDEKPVRMFNSFTRDLHDIVKWLKECQIETVAMESTGVYWVNIYHLLEKSGIEVYLVNARHAKNIPGRKTDILDCQWLRQLHTYGLLRSSFVPKAMIRTIRGIIRHRENLVRYRVSHVLHMQKALQLMNLKLTNVISSITGMSGLAIIRSIIAGERNPKILAEHRDPRCKNSKEIIAKSLEGNYHEEQIFALKQSLTLYDTYTQLIDENDSEIDRFLQIHAANVKQKDHLLPEPRGKKSRFTAKEESIRTALFQIVGVDITQIDGIQVLNAQTILSEIGTDMNKWPTVKHFTSWLCLCPSNKKTGGKVISSKTKRTDNRAHHAFKQAAHCVARSNCSLGIYYRRQRAKGGPHVAATNTAHKIARIVYHMIKNQTPFIPTDPNEEFMRYQERKFKQLQRQVKQFGGTIVLNPS

SEQ ID NO: 150973 - protein, 459 aa, unidentified
MQKKIKPSKKPKKKVSIKQDWPLMNPHAAGVDLGSREHWVAVPADRDPQPVRSFGTFTADLAALADWLTACGITSVAMEATGVYWIPLFQLLERRGFAVLLVNARQIKNVSGRKSDILDCQWIQRLHAYGLLGGSFRPADAYCVLRSYLRYRDELVAARSTQTQHMQKALQQMNLPLTQVLADVNGVSGLAIIGAILKGERNPLTLATLADRRVKASPSQIAKALVGDYRAEHLFVLQIAFELYHTYEAKITACDEALARELAALPDRVAAPDQPPPAKAGKKNLDENLRRGLYRKLGVDLTAIEGFGALVGLTVLTEVGPDLSRFKTEKHFTSWLGLCPDNRISGGKVLSCRTRRVVNRLSDVLRLAATTLERSQSALGAYYRRMKAKLGAAEGVTATAHKLARILYRLLKHGEAYVRQGLADYEQKHRERKLKGLQKAAAAIGFELIQKEIVAEVVS

SEQ ID NO: 150974 - protein, 351 aa, unidentified
MSQKLDSKIAVIGIDIGKNSFHIIGQDRRGALVLRQKWSRGQVDARLANLPPCLIGMEACVGAHHLSRKLQALGHDARLMPAKYVRPYSKGEKNDYRDAEAIAEAVQRPTMKFVATKSADQLDLQALHRVRERLVGQRTGIINQIRAFLLERGIAVRQGLHFLRAELPTILAKPIDVLSPRMLRIIEDLASDWRRLDERIDSLSDEIAALARQDKGCERLMTVPGIGPIISSAMVAAIGTGDAFSKGRDFAAWLGLVPKQISTGDRTILGKISKRGNRYLRVLFVQAAWVVLIKPQSWERHGLKPWIEAAKKRLHRNVLAIALANKLARIAWSVLARGRSFEARPAMASAA

SEQ ID NO: 150975 - protein, 344 aa, unidentified
MICYGKVREQFSAVELTFVNLMNKDIKYLGIDISHLVFDVTDSDGNYYQFKDNELGFKKFSKFLNSNSYCVMEATGYYHYQLAYHLLESGIKVSVENPLSVKRFIQMGLSKVKTDKSDSKLICAYTEQVELKIWKGNSKEEIEYLQVVRTLSVCTKQSTMLKNKLHGEAVLGNPSKLVVRSLKRSLRELTKEMKMLEDKLLILVKQSHKDLFTRLKTIPGIGPKTAIMLVVLTGGFDRFTSASELYCYAGLTPIIRQSGSSVKGRPRISKIGNQKLRNLLFMCSFNACKHNKACRDLYERIVAKGKSKKLALIAVCNKLLKQAFAIAKSGLIYDGNYKSTLVKN

SEQ ID NO: 150976 - protein, 390 aa, unidentified
MQALCPRPDEHAPIRTDLKAIFVSLELSRSTWIITSLAPGGGEKMSKHSVPSGDVAALLARLSQLQEKARARTGRIFPIIVIQEAGLDGFWIHRVLQQEGIESHVVDPASIATSRRRRRAKTDRIDGEAQVRALLAYKRGEPRVCAMVQAPTPQEEDRRRISRERETLTAERVRHVNRIKGLLFAQGIGDYEPLHRNRRERLEALITGDGRPLPECLKAQIRRELDRLELLIEQVKAVEAERDAVLARAQASPGVPAPAALLLALKGIGPEAAATLWSEGLFRTFSNRKQVAAYAGLAPTPWQSGSVHRDQGVSKAGNPRLRTIMIQIAWLWLRHQPQSALAVWFRARIKRTGGRLGKTMIVALARKLLVALWKYATAGVLIEGAILKPA

SEQ ID NO: 150977 - protein, 312 aa, unidentified
MTYVGIDVSKATFVVAYSSAKSSETKTFKNTTKGIREFIRTISPKENHCVLEATGNYSMLLVYLLSKAGFTVSMENPLKIKNFARVMLSVVKTDEIDARLIALYGERMQPAPFKLRSDSLLLLKQKRTVLRQLKKQLTANRNLEGSLKILPFIDSKCKKVLEKTIKFLEKQIEEMEEELTSLAEIEYKKQMDLLTSIKGIGATLAAALIIATGGFTYFDNAKQLTRYLGCHLLTNSLVRQSMSKGTLIVTEMLICVVSFILELWHHCGATQNAKHALNACGQMGSQEKWLLSLLPTNSSDKPSLLLHRRKYI

SEQ ID NO: 150978 - protein, 341 aa, unidentified
MKIIGCDFHPSYQQIATVDTETGELWEGRLEHEEGQARRFYQALQGQTVRVGIEAVGNSQWFEQMLAEMGHELWIGDAAQIRRLVVRQQKTDRRDAKHILDLLVDGRFPRLWVPSQQIRDVRQLLRHRQKLVEMRTQVKNQLQHLALNQGVRRKRRLWSGQGRAVLEQLPLTGWTARRRSDLLAMLDRLQEQVRELDGAVRAEAEQRPEVRLLMTHPGVGPVVGLAYVLTIGPITRFPRGKQVASYLGLIPREHSSGGHQSLGPISKQGNTMMRTLLVEAAQTAARFDEELRRAYGRLKAKKHSAPAKVMVARKLAVRMYWMLRENKSYTQMYARRPVARM

SEQ ID NO: 150979 - protein, 325 aa, unidentified
MRFYTNSHLHYCGIDLHAKTMYLCILDREGQILLHQNVRSRPEAFLAAMAPYREDLVVAVECMFTWYWLADLCRREGIAFVLGHALYMKAIHGAKAKNDKVDAFKIASLLRGGNLPQAYVYPPEMRATRDLLRRRLHLVRRRGNLLAHVQNTHHQYNLPAPTAKVAYRANRAGVAEAFAEPDARKSLEVDLQLIEHYDQILRELELHLVRQAKQHDPQAFHRLRSVPGIGKILALTILYEIHEIERFPRVQDFLSYARLVKCDHTSAGKRLGTGGAKIGNVHLKWAFSEAAALFLRNNPEGQKHLRRLAGRHGKAKALSILAAKL

SEQ ID NO: 150980 - protein, 338 aa, unidentified
MNLSRIGLDLAKQVFQVHGVDRHEHVVCRRQLKRAQVRDFFRQLPPCLVAMEACGSAHYWARELRELGHTVRLIAPQFVKPYVKGDKHDAHDAEAICEAASRPSMRYVPVKSAEQQAVQSVHRVRSRLVRARTALCNEVRGLLGEFGLIATRRGRAATMALLETVMATEPAPLPAPMGKLLRELKDELQTLEARIARLERQIQAHVRGDARIQRLLAVEGIGPISASAVAASAGDARQFRTGRQFAAWLGLVPRQHSTGGQQRLGNISKRGDTYLRTLLIHGARAVVRCCANKTDARSRWLQGLLQRRPANVVAVALANKNARILWALLSRETCYRPG

SEQ ID NO: 150981 - protein, 403 aa, unidentified
MEWGITYVGLDTSKKSIQVAMLKPGEKDAVEWQEANDARGVKRLVKRLKRESPGELRACYEAGPCGYALQRDLRSAGVECIVIAPSLIPVKPGERVKTDRRDARKLGECLRAGTLTEVHPPTPEQEAARDLCRCREDVRQDLERSRHRMGKLLLRRALTHPGRAWTKAHRGWLRSLRFEEAADRAVFDDYLLAIEHLEERLRGLEVKLAELSLQKPYRESVGWLRCFRGIDTVTAMTIVTELHGFERFRTARELMSYLGLVPSEHSSGSKQRRGPITKAGNSHLRRVLIEAAWHYRHRPAESAPLRKRREGQPAWAIAIADRAQQRLHKRYWRLLERGKAHNKTVTAVARELVGFIWATLSEHGRSVAVDAPGESKTARTYRIKNVTGASASRTRRSGRRAAA

SEQ ID NO: 150982 - protein, 394 aa, unidentified
MKLVGIDVGKNSHHFCVMDKETGEFNVTPSSFSNNKEGFDFLINSLKPYSKKSILLGMEDTGHYHVALLKFLLSNGYTVALINPKTTDLTRKMEGGITKNDKLDTITICDVLDTPERKKQYRITKVDRFDLYEQRQLTRHHHNLKEELNIYCNRLQKSIDLVFPEFNTLFGSKYGVVYMNLLKTFGSAEAIASTDIRTIRKCFEIKGRGNRISLTPEKLKECAKNSIGISSEVETIQIKHLVSQITLIKEQIAEIDKKIEEFSIKNNSPILSIPGISHFSGTSILAELGDIGNYSKPSRIIKFAGVAPYHYESSQYNAQHTGITKKGSKYLRKTLYQVILPVINNNPVFKKYYRLKISQGKGHRCAQGHCIRKLLRIIYHLLETGQSFDPALLR

SEQ ID NO: 150983 - protein, 425 aa, unidentified
MNHSTLCICIGADVHLDEIVLCVVDKADGHEVIEHFRVTNNLPGAQAAATAIAETATRLGCARIEIGWEATGMLWIPFHRYLCHCPQFQSFELELVCFNPQLVTKFKDGLVLRRPKNDRRSASAIAARLRFGELPLSYVPGDFWQGLRRLTRYRFHLSRNLSREKMRFQSYAFLKCSDWKRVKVFSDVFGATSVALLTEFTVAELTEMTHDQLVDLVSRRGRGRFADPAGTARMVREALRSSYPIDPQTDEMVTATLATGWDHIRFIKRQMKRLDKLIARYIDPVPNPIITIKGLGAVITAGILAEIVDVTRFPEHKHLAQYTGLTWEKRSSGNFVSQNTRLTKAGSKYLRYYLIMGANTLRQFNLEYKAFYWRKHGEVAKYRHKRALVLTARKLVRLVHALLTKNVPYVRPRMLANVQEDGSLQ

SEQ ID NO: 150984 - protein, 474 aa, unidentified
MNTNSTQTSNSIFSEKYFCGIDLASKVIQVSVTKPGEGSFDKALSKDEFTKFIKANNPEDYIYGMEACGDSNYWAELINTLCNDKAFIFPAKKCRSYNHGCKDDRGDARGVRDLLLTYFLSPDASTIHPCVIRDRQNRADMALLKSYGDNQSDITRNVRRLIAFLKEQDATLCYSYSMSPESTIKAATEYIKKLNKEESQNNSFLISDIQTQSAIIAMLLKRRSNILMGFLKYFESHSECQYFMAIPGVGLLLAVGTHIITQGDFTRFKNARSFAAYTGFTPAHSGTGGKNKIAHMSDNGNPVLKTLIYEGANACTILQKHKNKKDKRVKISYGRHIAIDLWKIGINLKNPDIKEIVSHYDAELAFKITEKNTSTKLCKFKSKCNKANKTFERLSSTPAVTSWCQNNLLEQHKQDSALSPYLAEFKNKNQLIDLSDPEGPFRRQSATLVAYLVEHNEVQELEINDLERLDVGEW

SEQ ID NO: 150985 - protein, 338 aa, unidentified
MAKQYVAIDLHLRRSLIVREDEAGNEVGVVRVDNDPVALSLALAEAGPNPEVAIEAAYGWYWAVDLLQAEGATVHLVHPSGLHWGDRRVKNDYRDCKELLDRMRLHKLPESWIAPPAVRELRELVRYRAKLVALRTGLKAQVKAVLAKHGLHPPVNDLWGPGGTAYLNSLELEDGYHIRIESLRDLVEHCSREVAMLERVIHQRLRDHAGYRAIQAIDGVGPILAAIFVTEIGDVSRFPNPEALCSWAGLTPKHRESDTKAHRGRITKQGSVLVRWGAIETVAGGHGGPKLRADYRRIAARRGTRIAQVAAARKLLTLVYFGLRDGEVRCLARSAEVA

SEQ ID NO: 150986 - protein, 397 aa, unidentified
MYIVGIDIAKRKHEAAVIDGEGTVIIKPFSFTNNCSGYNRLLAMLTKAKLPLDEVSFAMEATGHYWLALFTRLQKEGFRVQVINPVQTNSIRSFYIRQAKTDPRDALLIAEVIRFGHFSESTLHPENIYELRELCRGRHAIVSMQADVKRKVVALLDQVFPEYETAFTNLFGDTSMAILQTCPTPKELSKMPLEELCHLIEVSSHKRFRMAKAQELQALARNSFGFAMAGDVFSTMIRLYAKHLDFLKQQVREMDCKIAEIMETLDTPITTIAGIGPTLGAYILSEIGDISRFSSAAKLAAYAGIDPTMRQSGEYNGVRNRMSKRGSPYLRHAIWLAASSAVLHDPALKLYFQKKRDEGKPYMASVGHACRKMVSIIYAVMRDNKAYTPCIPNEISA

SEQ ID NO: 150987 - protein, 406 aa, unidentified
MHLYIGIDWSLNKHDAVFMNDAGATVLYLPFPHSADGLAYFDAERQKLGVEPDACLIGIETAHNLLIDFLWDRSYSGIYVIPPSMTKANRSRFTSSGAHDDQRDATVLADILRTDRSRLHPWAPDTKRTRQLRAQVGLHMFLTRDVVRTNNRLYSILLRYYPAALVVFSDLTAQITLHFIQAYPTPAHVQALSYEDFAAFGQRHHYPRPKALPECYARLQTPQPQAAPDTVAIYEKQAQQLAQLLLTLVRAKQVADAELDRIFADHPDRDLYLSLPGTGPFLAPALAAKMGEERARFPTAASVQTLAGTCPVTEKSGKFKSIHFRRACDHEFRDIAQKWAKLSLGESAWATTYYSQQLAHGAGKSQATRCLANRWLAILWHLWQSNQTYDEAHHLHDATARMRPRL

SEQ ID NO: 150988 - protein, 366 aa, unidentified
MKKVSTVRVNGNMIFKGHKLTIGVDLGDRWSCYCVLDEAGEILLEQKVATTPEAMKQIFEKIPRSLIAMETGTHSPWVSRLLTELGHNVIVAHAQKVQLITKSNRKDDRHDARTLARLARIDPELLGPVRHRSAKAQIHLTVIRARAELVSARTALVNAARGLVKSYGQRLPKCGTQQVNRELAAGLKAELREVLEPLLQEIESLNERIQEYEVRMEKIAKESYPQVELLKQVKGVGTQIALTYILTLEDPHRFPKSREVGCFLGLRPGRRDSGESQPEMHISKEGDPYLRTMLVQGAHYILGPFGADSDLRRWGLKLAARGGKSAKKRAVVAVARKLAILLHRLWVSGEVYEPLRNSDKAPRAVA

SEQ ID NO: 150989 - protein, 340 aa, unidentified
MSLVLQSLLPFPDSCQGMSPHQQGRGTKMTEHCYGGIDVSKDRLDVMVLPDRKSFSVDNNAAGYSELVKRLRGLSIAAIGIEPTGGYERAVIRALLAADLSVRRINPNKLRQFGRARGVLAKNDRLDARLIAEYVAIMPTRVVQRDPATEQLAEVVTMRRQLCDEHVAVENQTAHLEDAMLRRLNKRRLARLAADILLLDRRMAQIVVSNANLTRRYELLTSMQGVGPTLAFTLVALLPELGQMSRKQIAALVGLAPYDFDSGRLKGHRCIYGGRLPVRNVLYMAALSACRYNPALKVFHHRLAATNKKPKVIIVAVMRKMITTLNAMLRDNVAWQPRSA

SEQ ID NO: 150990 - protein, 355 aa, unidentified
MNNCTIIGIDLGDKKHAVVGLDDKANIVLKRWIPNTKADLEALFRRNRRAVFGMETGTHCRWVSALCGQCGCEVYVGNAHHLRSIFGNSHKNDMRDAEEIARLLHGDKRHFHPVQLRDAEHQNLVQLVKMREIVVSQRTKSANAIRGMAKANGVRLPDSDADSLHKKLAAVVDTLPESLQTLLGPQVGLLEKLCAAIEEYDRAIRDYRNAHFRKECNLLETIPGVGPVNAAAFVAFTGDVTRFRHARDVGPYYGLTAGRDQSSSKDEPKKITKEGNGFVRHLLVNAANLIMQGRGRNTELRQFGLRVWGNRGKVAKRKAKVALARKLAVTMAAMLRSGAPYNGIMEENENGQSNA

SEQ ID NO: 150991 - protein, 410 aa, unidentified
MQTLVERGCGLDVHQATVVACLLIVLQNGKVQKQIRTFGTTTRELQSLREWLLSEGCTHIAMESTGVYWKPVYAILEGALEIVVANAQHVKKVPGRKTDVKDAEWIADLLCHGLLRSSFVPPKPIRELRDLTRYRRKLVESQTAERNRLLKLLETANIKLASVATDVFGVSGRLMLEALVEGKATPQEMAELAKGRLRQKIDELGPALEGKLEEHHRFLLRLQLDRLEAAEKDLAVLEQRLQEKLKPYAEQLTLLDEIPGVDWTLAAVIIAELGVDMSVFGSVSQLASWAGVCPGNNESAGKRKSSRIPKGNVYLKTALVEAANSAAKAKGTYLRDKFYRLKARRGYKRAAVAVAHKILVAIYHMFSDRVCYNELGDVYLDKLNKHHLTRNLVHRLERLGYSVTLEQKAA

SEQ ID NO: 150992 - protein, 345 aa, unidentified
MSQQHFVGLDVSVKKTAICVVDLQGRVVDRAAVESHPAVISQYLLGLRLTFSRVGLEAGPLSPWLYAGLVEAALPVICVETRHMHAALSARINKTDRNDALGIAQMMRVGLFKPVHVKTPASQQRRLLLTSRKLLQRKVYDIENDLRGQLRNFGLKVGIVGTVGFEQRVRDLVLDLPHIAAVVIPLLAARSALRVQLAKLHKMLLDEVRADPVCRRLMTAPGVGPVVALTYRACVDNPARFSRSKCVGAHYGLTPRLYQSGETARIGRVSKCGDAIMRAALYEAALVLLTGSRGRWSTLKAWGMGIAKRRRMQKAIVAVARKLAIVLHRMWRDGTNFRWSVAQAD

SEQ ID NO: 150993 - protein, 490 aa, unidentified
MQRRLVGIDLGIASAHTVRVLDGAGREVCRRRTGPTVAELSRIEDAALHDAEPGTRLEVVLEPTGPAWLPVAVFFCGRGHVVFRVSSAKASDLRRFLSRHAKSNGIDADTLARLPLIDPDGLRPLQLPGPQTAALDRRVRATDRLTRAAAEHKVRIKDLVRQLLPATPLTGDLGRADLAVLERWADPRALLAAGLSQLTAVIVTASNGHQGTDRATAWRGAAAAAVELYSSYPAMPFTDLAAEVASEVRLLRAVTAELAEHAAHREDAYRWADPGQLARSLPGLAAVGAPALVAVVGDAARFPSARHFTSFTGLAPRASETGDTDRKGQPMSKAGPALLRTTLVRAADNARRQDPQLARIYYTQIVERGANHTKALCVVAAALAHRAWTVLRRGMPYVVCDTDGNPIDPALAKQIIAERWTVPAEIRARRRSSKHPTARTKTGKAPQQVPTGQDRSDTRRRRQTRRPSPPVILTRSTTTTQEDRLTADPP

SEQ ID NO: 150994 - protein, 407 aa, unidentified
MRAVMIGIDPHKGSHTAVAISAAEEPLGELRVCASAAQAGTLVAWAAPWPERTWAVEGAGGLGRLLAQQLVAAGERVLDVPPKLASRVRLLQAGDTSKNDPNDALSVAVAALRSTARRQVAAEDHAAVLKVWAKRHRDLARARNQVACRLHAVLCDLLAGGISKEITAAHAARILEQVTPSGPVAAARRELAGQFLADLRRLDAQLRDTKKKLAAAVRASGTSLTGVFGFGPVNTGTVIGDVADVTRFPSRDHFASYNGTAPVEVSSGNRKIYRLSLRGNRRINHALHMAAITQIRHAHSDGRAYYDRKIAEGKTHKEALRCLKRRISDAVFARLQADARQATAAAAAKGPGGQPGNDSDSSAAGSHPERRLFGRATPEPSPTLRPASPRRRTTPPKSASKKTRQTT

SEQ ID NO: 150995 - protein, 408 aa, unidentified
MNAVGIDVSKGKSIVAALRPMGEVALLPQEFLHTEVGLEQMAYTIIALGEDTRVIMEATGRYHEPVAAALHEYGIYVCVLNPLFIKQSGGGSIRKVKTDKADAMKIAKYGLDNWVDLREYTPMDTVRQQLKLCSRQYNLYMKTVISLQNNLISLTDKTFPGVNELFSSPERADGHQKWVDFVMTFWHCDCICGVSEKVFTERYQKWCKRKGYHFSPEKALDIYAGICGHFTTLPKNDNTKLLITTAAQQLLAGKMTLAALRAEMTRLAMQLPEYDIVRAMYGVGETTAAQLMAEIGDVRRFPRRSSIVGFAGVDPGVDESGKHSAKSVPTTKRGSPHLRKTLYQIVCTYLRKAPANEPVYQFLDKKRAEGKPYFVYMTAAQNKFLRIYYARVKECLEAFDAQQSISQG

SEQ ID NO: 150996 - protein, 339 aa, unidentified
MTTYAGIDLHSSNNFLGIIDQKDRRVFARRLPNELDQILNALQPYKESLNAVVVESTYNWYWLVDALQSHGYPVHLANPSAIKQYEGLKHTDDKYDSFWLAHLQRLGILPTGYIYPKDQRPLRDLLRRRLLFVKHRTAHLLSLQSMIQRHLGRRISANQLKSIDTPQLMQWFESEHEQLIVKCQLNLIQYLKQLIDSIENHIVSAVKLRKQFQMLLSITGIGKILGLTIMLEVGDITRFAKVGHYSSYCCCVQSQRYSNGKKKAVNNRRNGNRYLAWAYVEAANFARRYCKLAQQFYQRKAAKKNPAVAVKALSNKLARASYYVMRDQVPYEPQRLFRS

SEQ ID NO: 150997 - protein, 347 aa, unidentified
MTIVEAARGITGGVDTHRDVHVAAALDPLGGLLGTESFSTDPAGYKALLSWLASFGDVTKIGVQGTGSYGAGLARHLRRSGVEVIEVDRPNRQKRRSSGKSDPLDAVEAARAALGGRASGRPKSRDGAVEAIRVLVVAKRSARQARVKALIQMRHLGYSAPEQLRCRMKGLSVPALVAEGAKLRPTRSADPVTAATKASLSSLAHRIEALDRELAELDERIEALLVATVPDLLDLFGVGPDTAAALVMAAGDNPERLHSEAAWAHLCGVAPVPDGSGKTSGRVKAHDGGDRQANSALWRIVMVRIAHDPETRVYFERRVKEGKTKSEVIRILKRYVAREIYRYLPRG

SEQ ID NO: 150998 - protein, 421 aa, unidentified
MKEWKDITHYVGFDWARDHHAVVIVNAQGEIVADFEFPHSLEGWKSFHEKTAAWPNLAVAIETNQGAAVDQLLQHNYTVYPVNPVASESYRKRKVPSGTKTDHVDGWGLADALRMDGQGWKSLQPMDPLTQQLRLLCCDEVLLIQQRTLLVNQLQQALVEYFPAARQAFDDWTCPFTWEFILQFATPEALVQAGSRRWQKFLHTHKLWRPQTADKRLAIFAQADQFKASEAVTKAKSQLALSLCKLLRTLEEQLEQYRKQIEHLFQEHPDHDLFGSLPGAKKVLAPRLLAAVGTDPQRYGNHAVLQCFAGTAPISYQSGQIHKTKMRWACDKFLRHTVHLWANCFRKASVWGQTYYEKKRAQGMSHACALRCLGQRLLKILFKMLTDKKPYDAELHAHNQQKHGSWILKMMPEHEAQKAGV

SEQ ID NO: 150999 - protein, 322 aa, unidentified
MSQPNPLCVGIDVSKATLDIAASSDVAQFTVSNDSDGFNAIITGLRRHSVALVLMEATGGLEVAVACSLQAEGFEVAVVNPRQARDFARAMGYLAKTDRIDARVLTQMAEVINRHPERKRFIRALPDAERQALAAMVVRRRQLIAMLVAERNRLYPSHPQSKKSINTIIKALEDELVRLEKEMDSHIRNHFKEIAERLSSIKGVGTMTVSAMLAEIPELGTLSRREISALIGVAPVNRDSGTMRGRRTIFGGRAGVRSALYMAALVATRFNPVIKTFYVRLLAAGKAKKVALVACMRKLLTILNAMLRKNEEWDESYHHVAP

SEQ ID NO: 151000 - protein, 414 aa, unidentified
MESGYRLLVGIDWATEAHQVCVLDSQGRLLEQRRVEHRAEAIAAMIDRLIGLAGGDPASIAVAIEVPRGAVVEALVERDLPVFAINPKQLDRFRDRHTMSRAKDDRRDAFVLADSLRTDLSAFRRVHLDDAWTIQIRELTRIEEDLNTEINRLANQLRDLLLRFYPQMLRLCSSADQPWLWALLKLAPTPAKAQRLRRSSIERLLHQYHIRKWTADQVRTELKTAPLSVAPGVTEATSAHIALLLPRLELLMAQLKLCSKAVQTALDEKIAEEEQRREHRDVEILLSLPGVGRVVAATMLAEASQLLAQRNYHALRTLGGIAPVTRQSGKRLAVRRRYGCNQRLSNAFYHWARVSSQWDPRAKHRYQTLRQIGHSHGRALRGVADRLLALLVAMLRDQTLYDTTRAHAPNPIAV

SEQ ID NO: 151001 - protein, 427 aa, unidentified
MGYRIAAVDIHKKMLAVVVTDVVGEGEYQFERRKFDATPDRLHVLAQWLVEQEVEEVVMESTAQYWKPVWGALERYWKPARQQREGATKMSGALHLCQAKSNRGARGRKSDFVDGERMVKRLVAQELVLSFVPDPEQRLWRTVTRRKHQLTRDKIRFQNQLEALLEQAHIKLSSFVSDLLGLSARRMLKAIAEGETDPAALAALADCRLRATPEQLCDALGACRQLNGVYRRLLKMALEELKLMEEQMDQLDREASCLLQQHQDAVQRVAEVPGFGVDSGMQMIAEVGAGAATFHSAQELSSWVGVIPGSEESAGKSQSTRSPKGNRTMRRLLNQAAQSAVKVQGSIFHITFRKLLPRLGYQQAIWAIAHRLCRLLWMILHKGIRYEERGPAVSAKSQRARSARMIKELRKLGYRIEGGPIPAGTQA

SEQ ID NO: 151002 - protein, 501 aa, unidentified
MSCRLRDEQPGPKEERLREVTVNVQVNGTGQVPVRRLVGIDLGIASEHTVRVLDGAGQKVCAARCVPARESLLAMEARALAGTPAGTRLEVVLEPTGAAWFPVARFLSARGHAVYRVSSAKAADLRKFYRRHAKSNGIDAETLARLPLAAPDGLIELELAAGDEAVLDRRVRACDRLTQQAARQKTRIKDLVRQLMPMTPLTGDVGKADLQVLERYADPRALLAAGSAQLAALIRSASRGHQGQARVTQWVAAAQAAIELYGPDDPAVPFADLAAEVATEIRLLQAIEAELTAHAAAREAAYRTVDPGQIARTLPGLAEVGGPAMTAIMGKPARFPGGHHFKSFLGLAPRASETGETDRKGEPMTKAGPSLGRATMIRAADTARKLDPQLARIYYTQMTERGANHLKACCVVAGHLSLRLHAAMLRGAPYQLRDTDGTLVTPEQARQIIAANWTVPEDVRKRRRSRKTKRRTPQQAGKPVQRGDPPRPGSRPGHTPVNPAP

SEQ ID NO: 151003 - protein, 413 aa, unidentified
MAVFCGIDWAEDHHDIALVDQDGTLLTTRRIGDDATGFAALLQLLVEAGDDPDAPIPVAIETSHGLLVACLRATGRPVFPINPLSVSRYRDRHSVARRKSDAGDALVLANILRTDLAAHRPLPADSELAQAIAVLARAQQDAVWARTDAHNKLRSLLREYYPAILLAFATKRGGLLRPEARALLRAAPTPRAAARLTLSQLRALRHRAGLQRGIDTEALRLQQLLRADYLHHPTLVEEAFGRQALALLRQLDTACGNAEDLADAATEHFAQHPDAAIITSMPGLAALTGARILAEIGDDRARFADARGLKAYAGSAPVTRASGKTTAVMHRRVKNQRLASVGYVWAFAALTASPGARSHYDRRKAAGDRHVAAQRNLFNRLLGCLHHCLHTRQTYDEATAFPTSSSTPAERAA

SEQ ID NO: 151004 - protein, 437 aa, unidentified
MRRKKNNANKSVNLQVLPVVNPNAAGIDVGAKEHLVAVPCDRDPQPVRTFQAFTPDLHELAAWLKRCGIETVALESTGIYWISLYEVLEQYGFEIRVVNARHVKHVPGRTKTDVLDCQWIQKLHSFGLLNGSFRPDQQIRKLRTYMRLRDNLVVASTQAVHHMQKALFEMNVQLSNVISDIVGETGLTILEAIIAGKRDPKQLAALCSSRIKASRETVAKSLHGNWDGALLFALKVALETYRFNQIKIQACDCCIQHHLAQFESRAELINSPQNLKTQLHRVCGVDLTKIPGIKEQSAQIIISEVGLDMTKWKTEKQFCSFLGLCPNNSISGGKVLHRATRKVYNRAADTLRLCAQSLTYSKSALGAKYRRLKAKLGAPKAIVAIAHHLARLVYRMLRYGQNYVEKGIHHYELKFRLQRIKWLKKEAHSLNLQLVAA

SEQ ID NO: 151005 - protein, 345 aa, unidentified
MTYYTGIDVSLRSVSICVVDDKGEVCLEAKVAAEIDAIVERLRRFSSDVKSVGFEAGTLTQYLTYGLQAAGFEVICLEARQVSVTLAAMRNKTDRNDARGLAQILRTGWYSRVQVKSLHSHQVRALLASRKAILKKCVDLENELRGLLKVFGIRLPSRVGHGSFDAELRETVSSDEMLACALVPLLDARTVLYKTYLKLDNAVKGLVRVDPICRRLMSIPGVGAVTALTFKAAVDDPNRFKSSRTVAAHFGLTPRRFQSGEVDNPGHISRAGDADVRSALYVAAHSLLTRNAQWSTLKAWGVRLAKIRGHRRAVIAVARKLAVILHRMWIDGSEFRWGSPALTVV

SEQ ID NO: 151006 - protein, 475 aa, unidentified
MNIKGSKKKNQVLSVNIFEQQEIIAKADAIKAELKASTWHELETKGKFDKNDKLSFVSDDMLILGCDIGSETHYVRAIDTRGRELSKSAFGFSNTAEGFESMLDWSTKLAVANDKKQIVLGLEPTGHYWFCLTTWLVAKGISVVQVNPYAVKQTKEVEDNSQLKDDKKDPKLIANLVKDGNFGMPYLPEKLYADIRRLSMFRDQLNEDRIRNLNRLHREMKIYFPEYKDAFGKIDGAFSLELLKAAPFPDELAALGTEGMKQIWHEAKLRGRGYANASSILEYARKSVGIKDGADASRQAVKWFVSRIIELDEQLSDIENQLNQRCNEIPYAKNILAISGIGENILSGILAEMGDISRFDNVKEIQKLSGLGLVACSSGKHTGETKISHRGRKRLRYWLFQAAKSAVAHSEEFKELHVYYTTRKQNPLKKMQSLIVIACKILRVIFTILTKGTAYDPKKLLGDIVRPDQAIPQAA

SEQ ID NO: 151007 - protein, 512 aa, unidentified
MVVHVAAVVSSAVVVAVDVGKSSFAVSVTDGSRRRLFGPVDAPMTAPGVRDVVARVSGVLPDDPVVVKVGVEAAGHYHWPLLTATAWPQHWEVLELNPAHVTEQRRVQGRRRVKTDAVDLEAITELVLTGRGVPIGARGIATGELAAWCGHRARRVATRTATKNQLLGQLDRSFPGLTLALPDVLGTKVGRLVAAEFADPARLAALGTSRFVRFAAARDVQVTRSRAQRLVAAARDALPLPGAPVARRVLDEDLALLADLDTQISGADAELARLLPATAFATLPTVPGWGVTRAAKYGAAVGDPVRWPGPLQLYRAAGLSPAQYESAGRRRDGGISREGSVELRRALIDLGIGLWHCDPPSRAYAAGLRAPAASTAGSSPARSRTGRTGSRSRSCVTTPATTRAAGPDPSWPFLDRCHHAGGRKRSTWSARSAARTNDVDSDERRRTIGQRGRPLAREVTAAGFTTPAGGATLSRTKSRTRPRKRYGGHACATPHLAWRPALRHHSSPDEAR

SEQ ID NO: 151008 - protein, 370 aa, unidentified
MGNRSMFVGLDVHKETIDVSIAEGDRGGEVRHYGVIKSDLEPLDKVVRALRAPNRRLHFVYEAGPCGFGIHRHLTSHGEDCVVVSPSMIPKRSGERVKTDRRDSQMLARLHRAGELRAIYVPDDTDEAMRDLVRAREDAVVVGTQAKYRLKAFLLRQGRRYPGREGWTLPYRRWLSDLSFPSAAQHIALQEYRDAIGETEQRLERLTEQLRQLAPAWRWAPVVAAFQALRGVSFITGVSLVAELGDVTRFRHPRELMAYLGLVPSEHSSGPRVRRGAITKAGNPHARHLLAEAAWAYQGTPRIGRKHADRQEALPKVVCDIAWKAQLRLTARFRRLVARGKAKPKVATAIARELTGFIWAIAQEVSPAPQ

SEQ ID NO: 151009 - protein, 350 aa, unidentified
MSEHITIGMDLGDRNHLIVVFDDNGNEIACKRITNTKLALQKFFQTYPGASVAVEAGTHSPWISRELQKLGLVVYVGNPRKLRLIWDSHDKSDERDARILAMVCRVEPRLLWPVKHRNAQAYNDLEIIKARDMLVQTRTKLINHVRSVVKSHGERLPGCSAQSFVRRVASHLPTALSDALSYLIETIADITRRIVELERKIEQLSNQRYPETHRLRQVAGVGPTTALTYVLTIEDPSRFSKSRLVGAYLGLTPRRDQSGASDKQLRISKAGNGYLRRLLVTCAHYILGRFGPECDLRRFGLAIAARGGKNAKKRAAVAVARKLAVLLHHLWVSQQNYEPFYAIACNRKVA

SEQ ID NO: 151010 - protein, 414 aa, unidentified
MSVTDTAVPARGNSAGVDWAKDDYAVCVVDADGEPLERLALKYTRTGLRRLIDLLDRHRVDAVGIERPDGPIVDALLAADTTVYVIPPSQVKALRRRYGSAGNKDDRFDAYVLADTVRTDRRRLTPLVLDSETTTGLRKLCRARKDLVAHRIAVANQLRAHLATTLPATVELFNEIDSSISRQFLTRFTTQDALDWLSPKRLAAWLKSASYCGRTDPAVLHARINAAPRGATGNYGQTLAGITRAYLATLAAIVAQIDALNQQITEALDLHPDRDIFTSLPRSGTVRAARLLAEIGDARGRFPTPASLACLAGVAPSTRESGKVRIVTFRWAVDKQLRDAVCDFAGDSRHANPWAADLYQRARARGHDHPHAVRILARAWLDIIWKCWTTNTPYDPDRHRALQHLLKQDHQVAA

SEQ ID NO: 151011 - protein, 430 aa, unidentified
MNCLDDIRFEQFLQMRKEIRGSGQYLIVGIDAAKEKHRAFFGTAQGKTLLKNLVFDNTIEGFEKLDAYVERVKVQHSLSKVVFGIEPTANYHKPLGEHLIKCGRLVVLVGGVAVKNNRQLLNGRWDKNDDKDSANVADLIAQGKCLFYEYPLMTLQNVRILNALKRRLKKREHSISVCIRNHILAQYFPELDQQYGPSVTLAVVRECLDPSAIAGMEYDTFCRTVSPGKMTLAKSRRTEAIWRAAVNSIGCTMGEAASFEAQVMVDSLKQIRQTIKSVEDKLEDACLQFPEYTYLLSIPGFGPDVSSKVLGAIGNPHRFASGKQVLKMAGLDLCANRSGQTSSSSIPVISKQGKTDLRYALYQAALIASLKNKDFIAYYTNKLKGRAREKGIGVKMRVKLSAKLLIIAWTLMKKKEPFDPGRLNRLDKAA

SEQ ID NO: 151012 - protein, 324 aa, unidentified
MSETENKRMCVGIDLHKTQFTVCALDEESGVIELEGEFRTNAEGYTDFTDRMHGIESKSGHVIELAVESTGNARFFKNKMEAEGFSVVVVNTNKFKVITMSTNKNDAHDAETLAFYLLKEMLPESHLCDQTSEEIRRMLKTRSILVQATVKMKNQIHGMMLGYGIETKSAQFQSKKKRQELYQDLADHSFSEFNASSLKVILDSLDDLQKQIKTIEEQLEKMVAENRNVELLKTMPGIGPIGAVTIAAYTNDMSRFDGNFKRFASYLGIVPSNHDSNKTVRRGKITKHGPQELRTAFVQVAMGIIRQPQNTSEWKLMIDYCRMK

SEQ ID NO: 151013 - protein, 360 aa, unidentified
MSKKEERRLCVGVDLHKTQFTVSALTEDGEVILQEEYRTTPDGYSEFIEEMHRYEEEGCSIELAVETTGNARFFKNQMEKEFFDVTVVNTNKFKVITYSTKKTDANDALTLAMYLQKEMLPEAHLCSQTSEEIRRMLKTRRILVQSSVKIKNQIHGMLLGYGIETNAAQFQSKRKRQELMNDLANHYYSDFTASSLEVMLNILDVLADQIKDVEKQIETMVEDNEDVELLKTIPGVGKIGAATIASYTEDLERFDGDFKRFAAYIGIVPSVHNSNETVHLGHITKHGPQELRTAFVQVALGMIRASKQTSDWRLIEEYRRKKTEKGSGRAIIALTRKIARIVFVMLENRETFNPDLMLSK

SEQ ID NO: 151014 - protein, 375 aa, unidentified
MSKIRCIGLDVHAGTIAIAVAEPNGEVRSVGIIPNRLESIRKAMAKLGPAKQLKACYEAGPTGYVLYWQLTQLGVACEVIAPSLVPAKAGDRVKTDRRDAEKLARCYRNGDLTAVWVPDAAHEALRDLVRAREDAKQDQQRARQRLGKFLLRHGAQAPADIKKKWTAKYMTWLHDHVHFEQPALQATLADYVHEVHHAGERTARLEKAIDEAIASAPEQIRSVIAALQALRGVAQMTAVTIVAETGSLSRFQNPRQLMSYSGLVSSEYSSGNRIQRGRITKTGNAHLRRVMVEAAWAYQHKPWVGGFLLKRQQGLAQDIKDIAWKAQWRLCTRYKKLAATGKNKPQIVTAIARELLGFAWAIAVKTEPQPQQQAA

SEQ ID NO: 151015 - protein, 446 aa, unidentified
MEKSLSMDVVNALAAGIDVGSTSYFVSIGQQSDQVREFGVYTEDHQQLIDWLKSANIVSVAMESTGSYWQTLFSSLQNAGFNVLLVNGKYTKNVKGRKTDVLDCMWIQKLHSLGLLSGSFLPAEQIRELQSYYHHRQYLIRQSGSYMQKMQQALRLMNLRLDVVLRDITGLTGTAIIEAILKGERNPTRLANLAHHRVKKSKTEIALALQGEWREDQLFLLEECYQFYCYYRSKVTQSDQKIEALLKRALIGKPSLVELPKIKRKKKHKNTPTFELRPIAYHFFGVDLYQIDGISDSTILCILCMLGEGVDRFPSAKHFVSWLNLAPNNKISGGKVLSSRTPKGKNKLSLALRHAANVIGNLKDHPLSSFFSRVAYRKGRGAAITATARKLATIIYHMLTKKEAFDPNHHTHEKKKHRKKNIRSLQRKIASLDLSDNEKAFIFQGT

SEQ ID NO: 151016 - protein, 459 aa, unidentified
MRTIGIDLAVRAEHRAVVVDERGEYVTPVVPFHTAPVELDRLLAQARASAPGCALQAVMEATAMSWFPVAVYLHRQGVRVYVVNSQQVADLRRYYKRHAKSDRIDARVLARLPLVNPDQLHPLHLAPATALACQRGCRESDRLTQQVTASLNRLRAIDRWAWPGLEASVFPDPFTAAGRWFRQHWYDPRPVLAAGATSLRQQWQESGVNPADSGEWAEPLVQLAHEVLTLYGGDGTYLDYAYLQAEVQREQARLQATEAAQHVLQLKTVRRLYRQLHPSRHLETIKGVGQDGAAVFASFIGDPKRFSSTRACRSWSGLVPDSRQSANTEAKGLHITQAGPNLVKKFAYLDADTARQWDPQLAALYYDQMVRKGKHHNQALCAVATHLLDRILVVLRNDRPYVLRDLDGTPLTVAQARAMVLQRYTVPEEVRRRNNKRARQARADRRAEHKQKRETAPVG

SEQ ID NO: 151017 - protein, 326 aa, unidentified
MVEHYIGVDLHKAFFQVCVVNAQGERLWEQAFPRTDEGIAAFIARCPARTAVAVEASTPTWHFADAIRDHVDDLRVVDSLKTRLKAGYAAKTDRLDARRLADALRRDSVVGIYCPPMGIRELRELCRGRHTLVQLRTRLLQRLRAVLLRQGIVEARRLVRQDAVLDTLALPPRAAASVALLRRLLADVRRELHDVDREVQALAQQDPIAVRLQQIPGIGPVLALLMRAEIGDVRRFPTPGHLASYAGLVPRVEASAGRYHYGRITRRGSPWLRWALVEAAVHGPRRADAVGRWTRRLALRKGALKARVACARSLCGEIFAVWIATA

SEQ ID NO: 151018 - protein, 357 aa, unidentified
MDGSKEHPKMTAGLDLGDKYSHLCLIDSQSGEVIEEGRLRTSPEAFRRRFASEQPMRIAIEAGTHSPWVSRVLEECGHEVLVANARKLRLIYANKRKTDEIDAENLARLARLDPKLLYPLRHRGEDSQAHLAIIRSRETLVSARTQLVNHVRGAVKSFGARLPKCPAVSFHNKAPEHIPEALWPALGPILETIGSLTRRIRDYDRQLETISKARYPETELLRQVEGVGPLTALTFVLTLEDPYRFEKSRSVGAYLGLVPAMDQSGDRDPQRRISKEGDEMLRKLLVSSAHYILGPFGSDSDLRRHGEKMASRGAKNAKKRAVVAVARKLAVLLHSLWMSAEVYEPLRNTHRSGGQAA

SEQ ID NO: 151019 - protein, 390 aa, unidentified
MTQVDDLSRCLAALDENSTLVAIVEMSQSSWLTAGLVPGVDRRPLKKLEPDAATLLRLLERWRKEAKTAGRMITRIVLAYEAGRDGFWLARWLRARGIEAYVIHSTSVAVSREHKRAKTDRLDAAMLLRVFLGWLRGERDHCGMVAIPTLEQEDAKRPSRERESLVGERTRIINRMKSALARLGIRGFKPELRKAPERLEALGTPEGDSIPPNTLDEFRRDLARLAVVRGQIEAIEQNRLARMEQMPAQGPHAMVRLLARVIGVGVETADMLVQEILSRNLRDRRAVARYAGLTGSPDESGSKRREKGLCKAGNARVRRGMIQLAWRFLIFQKESALAQWYRAQTAATKGAGKDKRKKMIVALARKLLIALWRMATTGEIPEGVMLHPAA

SEQ ID NO: 151020 - protein, 352 aa, unidentified
MNQLKYIGMDVHKAMTVISVLNSEGKELAQAIIETKSTTILDFIQGQRGTLHVTFEEGAQAAWLYDLIRPHVTTVLVCDPRKIVTQGNKADKIDARRLAELLRTKGLTAVYHGEQSTRAVKELTRSYQEMIEDSTRVKNRLKALFRARGIDCTGSAVYSPDERKNWTDKLEQAAVRARAGRLWEELDALEKLREQAEDDLNTEARKHAAIKILRGIPGIGPVRAAVILGIAGTPHRFRSKKQFWTYCGLAVTSKITSEYQLVDGRISKSKKQPLVRGLNHNYSRTLKDAFKGAAKTAAAGAWKSHFDAMVANGQDSSLVLLTLARKIASITLALWKRGEGYDSKKVKILHAA

SEQ ID NO: 151021 - protein, 345 aa, unidentified
MPIVGGLDIHRKQITFDYLDTETGQVQRGQISPADREHLRAWLARFADCEDVAFAVEGCTGWRYGVEELAAAGVAAHLAEPADTAFARGRKRHAKTDKTDCRHLRMLLAEGRLPECWIPPGHILECRALLETYHDLRREHTAWAQRIHAVLFHQGAPALGEGTLRTGPGVAALRAAAAAHLSPAGQLQIATALDMTDMLDTRLHELRHQLLDAARHLAGAKVLAARLYGVGPVTALAMTCWLGGKDRFSSSRKAVRFAGLDVTVRSSDRKGPPGRLSRQGPPVLRWAVYEAGKTHARSSAPDYRYYAQVKDRCNGKRAALSEARKILRQACHILAELGDDALSAA

SEQ ID NO: 151022 - protein, 337 aa, unidentified
MSELNMHNGFWLGVDVAKATFDVAAAPVAASPADWAKLPTAHFESNGSGLTAFEQWLKPLLSEGKCVGICLESTGIYSHRFVKFISMLELPECSMVNPALPVAFRKSFGLRDKCDRVDSAVLALYGVVHTPKPNVKRSPEYERLRALWRLHEDYIEDVRRWKNRSDQILDCLEPTQINLTVTHLQECAQKVWKQIENWVQQHESLRHDAQLLCSIPSVGQKTAFMVMAEYGNLRAWSRKQVISYAGLYPKVYSSGTSVNRKPCLAKGGGQRIRRGLFLPACSATRYNPLLAQWRQVLLERGKARMAAIGAMMRKMLVLMRGVLVSETLFNLTKFKTA

SEQ ID NO: 151023 - protein, 326 aa, unidentified
MLQPDKFVGIDVAKKDFYACFEENSESKKFNNTTTGINSFLRHLSKINFQTQSTVIGLESTGSYHLRLCLQCSTIGFPIKVINPLIVKKQNQTNLRRVKNDQKDASLIRYCLTTGAGYAFTETPDTLLLKSLVRQRNSLVNIKFKNKRQQSDIAYKEDCLKINFNSIYQEISDVLSQKIKELEIQLKQYQPKTQKLLQSIPGVGPITAVSFIAEINDIKRFKQAKQLVAYIGLDSRVHQSGTSVRGKGYISKRGNKILRTRLYNATHVAVLHPNLFQNFFQKKRSEGKPYKVALVATMHKMANVIYSVWTNNKPFVDYTTNKPKEA

SEQ ID NO: 151024 - protein, 338 aa, unidentified
MKVTTLGIDLAKSIFQLPGGNAHGKVALQKRVTRSKLLATVAQLPPCLIGMEACGSAQYWAREFEQLGHTVKLISPQFVKPYVKGNKNDSRDAEAICEAVSRPHMRFVPLKTVESQDIQAIHRLRSRLIKERTARGNQIRGLLAERGVVMPQGITRLRKQLPVIVEDLDNTLTPLGREVIRELYEEFVALDERVTRADHLVQRVFTQSAACQKLARVEGIGPVVATALVAAVGNAREFANGPHLAAWLGLVPRQCSSGGKERLLGISKRGDRYLRTLLIHGARATVHRAQHKTDARSRWIRSLEQRRGKNIATVAIANKNARIAWVLLTSDAEYRQAA

SEQ ID NO: 151025 - protein, 330 aa, unidentified
MSVYVGIDVHRKRSQVAVVAEDGKVQLNRNVVNGQEPILRLIGGLPPGTPVAFEAAYGWGWLIELLEDYGFDPHMVHPLRGKAIASARLKNDKVDAAILAQLLRADLLPEAWIAPLEVRQLRALLRHRASLVRLGTQLRNRIHAVAADFGYDRTGSYWTGPGRGWLAELDLPPVSREIVTDCLASIDALEPVIGRLDAGLRRHARADARVKVLTTLPGVGQFTALVLLAEIGDITRFPNARKLASWAGLTPTVRGSDLTVRHGHISKQGSAWLRWVLNQAAQTAKRSPEFAATYAAISKRRGKKIATIAISRKLLTRAYHLLADAQAAQA

SEQ ID NO: 151026 - protein, 358 aa, unidentified
MVIGIDPHKQTHTAAAVERATGELRGERTVKARAQGHEQLLVWARALDGERLFALEDCRHVSGSLERFLLARGERVVRVPPRLMGEARKGGRSVGKSDAIDALAVARAALREPGLPAAFLAGSEREIRLLHDHRADLVAERTRIQNRLRWHLHDLDPEHEIPAGALDRRLWLDRIGRRLARLAQTAQVRISRGLVGRCRELSRRITELERELEALVAAEAGELLELVGCGPLTAAQLVGEVAGVERFATDAKLAKHGGSAPLPASSGQKQRHRLNRKGNRQLNCALHRIAVNQGRHYEPARAYLARKEAEGKSRREALRCLKRHLTRVVFRILKAIAARRTSQPSTTPTVPQIAVGLT

SEQ ID NO: 151027 - protein, 338 aa, unidentified
MEHKRISIDTSKHVFTIHGVDDQERPVLRRDIRRAQVEPFFAKLAPTEVVLEACAGSHHWGRVLGGMGHRVRLIPPQYVKPFVKRSKNDRNDAEAISEAASRPTMRTVPVKSVDEQAATMIVKHRELMVNQRTQAINALRGHAAEFGIVAAKGCANVTALLAVLSTEEAIPAIAKAMFKQMGQHITDLDEKIEVLEKQLLEQHKANAVSTLLSAIPGVGPITAITMALTVNPANFETGRHFAAWLGLTPREHSTGGKHRMGKISKAGNERLRQLLVVGAMAVIRYAKPGSKSATAWLLQLLERRPRKVAAIALAHKMARIIWAMMARGEAYRRQPVAA

SEQ ID NO: 151028 - protein, 425 aa, unidentified
MNYKQNEKINQVKESTLVVGIDIGSTTQYARAFDWRGIELGKVFPFSNSREGFESFKAWMQHLQDKYKKLDAIVGIEPTGHYWFDLGAYLEDEGILLVMVNPYAVKQTKELDDNSQSKNDRKDPKVIAKLVTEGRYSAPYTPDGVYADLRIMVANRKRLIREMTQIKNRFARWFAIYFPEYTDVFGDYEAQSSMLLLKKVCTPEAIVELGAEKINQIWRDAKLRAVGMKRATTLCETAKRSIGLKKGSSAARYEMKLLLEDYEYKKAQLDAVMEEIEKLCRKIPESEQMLAIKGIGVITVAGFLAEVGDVRRFESPRQIQKLAGLSLRENSSGKHKGQTTISKRGRSKLRAVLFNAAIPLIAKNPEFKSLHEYYTTRANNPLKKKQSVIAISCKLIRVFYAILANGVIYDAQKMLSDIHRQPQAA

SEQ ID NO: 151029 - protein, 343 aa, unidentified
MQTVSTIGLDIAKSVFQVHGVDAGGQVIIRRQLKRRYVLAFFQKLPPCLIGIEACASSHHWSRELQALGHTVRLMPPAYVKPYVKRQKNDATDAEAICEAVTRANMRFVPTKTPEQQSGLVLHRTRHLFIRQQTSVINAIRAHLAEFGIVAPVGRRGVEELLTVVSDPNDKRVPEIARACLSAFGAQLRRIKEQILEFDRLITGWHRSNELSMRLDEAPGVGPVLATAVVATVADPKVFRSGRNFSAWIGLVPKQHSSGGKDRLGGITKQGDRYLRGLFVAGALAVIRYAKIHGTKHRPWLTALLARRPTKVAAIALANKIARMVWAMMAKGERYNEPVALAA

SEQ ID NO: 151030 - protein, 480 aa, unidentified
MNVKARRTKKQVNVENQAIMLLSKEELDRKIEVIKKELRSYTWRDLETNGKFAKNDKLSFITDDMLIAGCDIGSETHYIRAIDVRGRELSSGAFEFSNTSEGFANAKAWVLALAAKNDKKQIVLGLEPTGHYWFALAAWMISNGISVVQVNPYAVKQSKEIEDNSQLKDDRKDPKLIANLVKDGNYGMPYLPEKVYADMRRLSMFRDQLTEDRIRNINRLHRKLKIYFPEYMDAFGKIDGAFTLEVLKISAIPSDITALGAEGIKNIWHNVKLRGRGYSRANEIVSYAEKSVGLTDGTDAGREAVKWYAEQILRLDEQLAEIESALHEKCREIPYAENILAINGVGENILAGILAEMGDISRFDDVKEIQKLSGMGLVACSSGKHKGQTKISHRGRKRLRYWLFQAAKSAVSHADEFKQLHEYYTTRSNNPLKKMQSLVVIACKILRVIYTILKTGTTYDPQKLLKDIKHPAASQAPMAA

SEQ ID NO: 151031 - protein, 419 aa, unidentified
MDVVVERCAGLDVHRDDVVATVRVPGAGRRRWDQQTRTFRATLAGLADLAAWLAEFGVTLVGMEATGVYWKTVFQALEDRFECWLLNAHHLRNVPGRKTDVKDSEWICQLVQHGLVRPSFVPPPEIRRLRDLTRLRKAQTNERARTIQRLEKVLQDAGIKLSSVASTTYSKSARAMLEALLAGVSDPEQLAELSKARMRSKIPQLREALQSRFQIEHHGVMVAQLLAHIDTLDTALQNLTERIELMLIPHAKTVELLCTIPGVQAHAAQVLIAECGLDMTLFPTVRHFASWAGACPGHHESAGRRRSGRTRPGPRWLTDQLTECARAAVRTKDTYLAAHFAQLRGRRGEPKAIGAIRHDLLVAYYHIVSDQVPYRELGPDWQRKRYSVEHRARRLQRQLEALGYAVTLDQAEQPQEQTA

SEQ ID NO: 151032 - protein, 342 aa, unidentified
MIVINLFKIMEKLIHFIGIDVSKLTIDVAIIINNDIGRIIQLVFANDSKGFKELKNRLNKEKISFPETVFCMEHTGYYSKQLSRFIIARHGNLWMEMSLKIIRSLGVQRGKNDKLDAKRIALFAQRNQQDFVPYNPPRLIVENLKTLLMLREKLINSKTALVVPVNELTSVDKAAGKIALKAISKGLQGIENNIVTLDAKIDELIASDKELAQKFKLVSSVPGVARITFCYLVYFTNEFKNYTEAKQLACYCGVVPFEYTSGSSVKGKPKVHNMANKKMKKLLHTAALCAVTHYPEFKQYYERKIKEGKPKMLILNNVRNKIVLRIAAVIKNNLPYKANTAA

SEQ ID NO: 151033 - protein, 348 aa, unidentified
MLADELDYVIGVDPHRDSHALAVVHVLSGVIVFEATVAANSAGYALALELVDEHAAARRAFAVEGTGSFGAGLTRFLTGRGERVLEVGRLRRERRSGGKTDALDAVRAARSVLTQKRPATPRAGGERQALQALVAAREGAVNAKRAALCQLRDLLITTPEPWRSQLRPLTRARLLQRLAATRPAGRRDPELRGSMLALRSIARRVLQLTAEERQLAREIETLTRKLAPQLLDQPGVGPQAAAQLVLSWSHPGRIGSEAAFARLAGAAPIPASSGQTIRYRLDRSGDRKLNRALHMILVTRKRSHPATIAYIQRRIQEGKTRREANRCLKRYLARSLYRLLEHGAPLAT

SEQ ID NO: 151034 - protein, 359 aa, unidentified
MGLASWLVAGLLPGVNREPLKKIAPDPEVLLRLLYRWRDEAIKAGKEITRIAVAYETGRDGFWLARWLRDRGIDAYVIHATSVAISREHRRAKTDRIDTAMLKRGFLGWLRGERGHCSMALIPTIAEEDAKRPHRERESLVKERTRTINRMKAILAQFGVRNFKPALRKAAEKIAEVRTPEKVPLPPNAAAALRRHIEHFRLTNEQIKAIEKIRLQRLRQNPTDKFNAMVFLLVRIIGLGVETAEQLVHEILFRNLRDRKAVARYSGLTGSPDESGARHREKGLSRSGNERVRKILIQLSWRMLRFQPNSGLVRWFKARTASSRRSRKPMIVAFARKLIIALWRYANTGLVPEGFQLAK

SEQ ID NO: 151035 - protein, 456 aa, unidentified
MADCPDQRENGARSSIESCPFVEDRYKANFSVHRCWNWQEVTKEENQKVKRYYLGVDWADEFHQVWVSDPEGKKIAEMKVVQSTAGLGELGRWLHERKAEEIELWAAIEKPHGRIVDFLLDHGAVVYPVNPKALDRARDRFRMSQSKSDLFDAYVLAEFVRTDHVHLRALEPNSEPAQELKMLTRDHDRLMRQKTRLLNQIEITLKEYYPRPLEVFSDLETHIARDFLKEYPTPQALSKLNRRRWNHFARRDHHLSEARCDELWEKIDKPQLTSPPYVIRAKAKLLLALVVQLEALLPAVESYSEEIKRFFDSMPAAELVKSLPGGKSGTTIPKLWAELGDAKNRWQSFRHLQAEGGGVPVTKSSGKSHVVHFRFACNKYLRHAIYWVSFNSLNRCEWANKYYRDQRAKGHSHPRALRALGAKWLKIIFVMWRDHKPYDENYHLANMARQRMRQAT

SEQ ID NO: 151036 - protein, 343 aa, unidentified
MKIAILGIDLGKNSCSVVGLDHAGTVVKRRRMRPESIPAFTRTMPACTVAMEACCGAHHFGRLLRSQGHTVRLMSPEYVRPYVKAQKNDDRDAEAIAEAATRPTMRFVELKSEEQLDMQTLHRVRDRLVGERTALINQLRAILLERGCAVPQGRRKLEQHLAAMPDPDNDTSLSPRVCRLIDDMRAEWLELDRRIATFDNEFAARARNDADARRLATIPGIGVLNATALVAAIGNGETFARGRDLAAWLGLVPRQVTTGGKPRLVGITKRGNKYLRKLIIHGARSALPVLASGPTPLGEWLRALMKRVHKNVAVVALANKLARITWAVLRRGEEFAATARAAT

SEQ ID NO: 151037 - protein, 359 aa, unidentified
MLVERMSVGLDVHARSVAAAAIDGVTGELKRARLTPSHDHIRFWLGELAGPVAVAYEAGPTGFGLYRSLTALGIRCVVAAPSKLQRPCGDRVKTDARDAVHLARLLRLGELTAVCVPSVDQEAARDLVRAREDCRGDLMRARHRLSKLLLRQGIVYCGGNAWTDAHDRWLRRQRFDSPATTTAFESDYDTILTAAARRDRLDNTIAELAADSEFTPVVRRLACLRGISTLTAFALAVQIGDWHRFTGNTIGSFIGLVPSEHSSGASRVQGSITKTGNTHARRLLVEAAWHHPASYRPGKTMHQRWERAPAAARARGDAGNRRLHARWITFNLRRKRLVIANVAIARELAGWCWSLAVMD

SEQ ID NO: 151038 - protein, 447 aa, unidentified
MEESVAVRKRELTVMFPNAAGIDVGSASHYVAVPPERCEHSVREFESFTEDLTRLADWLAECGIDTVVMESTGVYWIALYELLEARGFTVYLVNARHVKNVSGKKSDVLDCQWLQQLMSFGLLAGAFRPAGEVCALRAVVRQRDTLIDAQAQQIQRMQKALTQMNVQLVNVISDIAGKTGQDIVRAIVAGERDPHKLARLRNYRVHASEDEIARSLMGNWREEHLFCLAQALKLFDTLQVLIEEADAKIETLLARMHRHTGELPPNKNKGRTKNAPRFDARSALYGWAGVDLTRIGGIDVSTALKILAELGTDLSKFKTAKHFASWLGLCPGTRITGGKRISGNTKRIANRVAQALKLAAHGLHRSQCALGAYYRRMAARLGAGKAITATAHKLARLVYAILTKGEEFVQRSQDHYEDQVRARTIKYLQKKAASLGFNLQPTAAVCA

SEQ ID NO: 151039 - protein, 417 aa, unidentified
MEQKERRVAGIDVHKSMLAVVVRREKDGKAEYNSRNFGATTAEIAHLAAWLSSEGATEVAMESTAQYWRPVWHGLEAHFKLHLCHPLKVKAPRGRKHDFGDARRLADRWWSGDLEDSFVPGAEQRQWRLMTRTRVQIKRKKGVVRNQVEGLLEHGGIKLSAVASDLFGASGLAMLKLVADGKTDPEVLLGAARGQLRKKAAQLREALAGGLDEYGRMLLRQGLEQVEQLRKHLAEINTALAKAMAPYTATLLRLSKVPGVNLYAAQELVAEIGPAAASFASPEQFTSWAGICPGRQESAGVNHSTRSPKGSPHLKRLFNQIAWAAIHTKDCFFAALYGKLKARKDNKEKKAAWAVAHRIARLVWLMLHEGVEYHEKGPSPLDPRKLARKMRRAIRDCVRGGLDPMQFMDPLPGAVGG

SEQ ID NO: 151040 - protein, 318 aa, unidentified
MPGVFVGLDVSKDSVAVAVTPSGAAWTAETTAAGLKALVRKLQKLAPALVVLEATGGYEIPVLAALCDAELPVSLVQPLRVRQYAQSQGLLAKTDALDAQVLAKFATQLEGKLRVYPDETQRALMMLVHRYRQLTEMLVAEKQRLAQQALLRRSPIVQELEETVAYLKAKRKATERQLHEHVSANPRWDAAHHLLRSIPGVGFLTAVTLLAYLAELGTLDRRAIAALVGVAPMARDSGRYRGQRRIIGGRAIVRRLLYMAALSCTRSARGASVFGAHYQQLRARGKQFKVAIVACMRRLLTILRTKQPWQPLLAAPTA

SEQ ID NO: 151041 - protein, 373 aa, unidentified
MQNSIGFKDQKFFIGMDVHKKSWVITIRSMGIQIARFTQPPSVEALVKYLEKNYPGGKYYSVYEAGFCGTDTHEQLCKAGINNIIVHAADIPTTDKQRKNKTDLHDSSTLADKLEKNEVHGIHVLTRDQQELRGLFRLRQQRVIDVTRANNRLKGYLMYLSIELPAELSKTEYLSKKALDWLSNLELSIEAGTLSLKTYSEELKYQRAQLSRITKLLREHINLHHARSYLCLLTIPGIGSITAMGLLAEIADFNRFKDPDEYCSYLGLMPWEDSSGEVKRTKGIQPRHNKFLRPLLIEASWTAIKNDRGLFAYYSKHAKRDSKKAIVKVTRKVALTARGVVIKQQPYDPDYYKRKEGEQKQNNEGLKEKQECI

SEQ ID NO: 151042 - protein, 463 aa, unidentified
MRKGKGGARKKRGKTLEEVIEGLPPMNLNAAGIDVGNAEHTVAVPPGRDAQAVRTFGSFTADVHRLGRWLVACKVDTVVMQATGVYWVGLFQILEMYGLVVLVVNARYTKTLPGRKTDVQECQWLQKLHTFGLLNNSFLPREEIRVLRTYLRQRENLVASAGACIQHIQKALTEMNVQLANVISDLSGVTGMAILRAIVAGERDPQRLAELKNDRIQASRQEIARSLEGNWREELLFVVEQGLQMRDAYEEKILACDRRIEAQLKSMEARVDVVAQPLPQPRRVKWPRKHRPAYDLRGELYRVTGVDLTQIDGLDVGTIQTVISEVGVEMSAWKTEHHFSSWLGLSPDNRISGGKVLKRGTRKVVNRATTALRLAAWSLLRSQSALGANFRRLRARLGAPKAITAMAHKLARLIYRMLKYGKEYVDKGMAYYEAKYRERQLKWLNKQAAALNLQLVPLKSVNC

SEQ ID NO: 151043 - protein, 400 aa, unidentified
MISVGIDVSKGKSTVCILKPYGEIVASPFEVRHTESELKYLIQMIQRLDGEIRIVMEATGIYHLPMLSSLQDQNLFVAVINPFEMKEYASRGLRRVKTDKQDSITIANYGIDNWYRLENHQGSDAVYSELKLLGRQYCHYMELHVKALLELTHMLDYTMPGVKKMFSSWSESNGKDKLSDFVERYWHFDNITAMTKDEFIEDYVSWAAEKKYHQNRSKAAELYDLASDGISTLPANTPSTKMLVLEAVRVLREIDSTLLKIITRMKELAKTLPEYETVRAMGGVGDVLAPKLIAEIGDIRRFHSGKALIAFAGIDAPPYESGQFVGTNRKISKRGSKVLRKIGYETMRVLKTHKAPEDDAVYRFILKKEAEGKSKRRAKIAGLNKFLRIYYARVSEVYKA

SEQ ID NO: 151044 - protein, 343 aa, unidentified
MKLTRVGIDLAKNVFQLHGVDRHGKTIWKRRLKRDRWLSALLDKVEPGCELGMEACGGAYHWARELQSQGYTVKLIPPQFVKPYVKSNKNDANDAEAICEAMSRPNMRFVAVKSVEQQDIQATHRIRADLMTQRTAKANQIRGLVAEYGLVAPQQLRALRAAIPGWLEDAENGLTDHFRSLLHGVWVDLLALDDRVLELDREIERLANSNEVTKRLQQLRGVGPMVATALVATVGTAEQYHKGRQMAASLGLTPRQCSSGDKQRLLGISKRGDVYLRSLLIHGARAVVSQAKHRDDRLSRWVTGIATRRHPNVAAVALANKTARMAWAMLRNKTNYDPDFAMS

SEQ ID NO: 151045 - protein, 320 aa, unidentified
MRNAVGLDISQNTFNAAAIVNGQCKQALFDNSINGFESFKAWLDGFDCELHICMEATGNYFEDVADYIGQFYIVSVINPYKISEYGKSRFHRTKTDKQDARLIAEYCHTAMPKDLPVRQKISIGHYRLKRLLALYDQLKTQKTAQKNRLKVAKDEFVRKIHKAQIQELDQHIQQVEAEIQAITNSNQDLKAVSDRLQTIPAIGKLTAAILTNYLLSGDFKTANQFTAFAGLNPQQKESGTSVKGRSSMTRYGNRRLKSALFMPAMVALNRDYFPNFVKRLKAKNKPKMLILGALMRKLLVVAYHVYKTQKPYNPERYNPA

SEQ ID NO: 151046 - protein, 355 aa, unidentified
MNTIACHVEELILGVDTHLHTHCAVLVDLLGRQADTKTFPTTRAGVDALIKWSRLRGTVRRAGVEGTGSYGSGLARSLTLEGIRVIEVTRPSRRGQRHRGKSDERDALAAAKVVLSDEAQAVPKSRDGIVESIRVLRNTRASAVKARTQTGQQLRGLVLTALPELRDRLRDMSTKNTVAHCARWRRMDLTDATRCTRLAMRTLARRHQILDEEVAELDIHIKTLTKTAAPRLLAELGVGPETAARLLIVAGDNPDRLRSDAALAALCGASPVEASSGKTQRHRLNRGGDRQGNNALWTIANNRMIHDPETRAYVKRRTTEGKSPKEIRRCLMRHVARRLYPLLIADIHHAQTTPT

SEQ ID NO: 151047 - protein, 405 aa, unidentified
MKKVIKVCGLDVHKDTIFACIKSGNYQSEVKQFSTMTCGLAELNHWLKAELVSKVAMESTGIYWMPVWRALENDFKLLLVNPYFIKQMPGRKTDVQDAQWIATLLAKKLLRGSVVPEKTIRVLRAYLRRYAQLQGQTTRCLQQIEKQLSQCNIKIASLSSTIGSKTVIDIVESISKGNYAPEQLLALVHGRIVKRHGEKVKQSLQGIIEEHDVFLLRQIYEDYLHIKRQCNELLAQAQKIAEAHYKEQLELLQTIPGIKQLSAVIIFAELGGNIKLFETAQRLTGWCGLRPKNDESAGKIKSRSITKGNKYLRRILVQTAWAASRTKTCYLKTKFEQLAVRKSSKKALIAIARKQLVIIWNVLSKQEQYKEPQIKLSAEQVSRKQKYYQEKLNKLQQQQVLEKAD

SEQ ID NO: 151048 - protein, 348 aa, unidentified
MRIAEGIATYGIDLGKSKFHVVGLDQHGRVTLRRRFRRDGILQFFANVPAALIGMEACPGSHWLSRKLTTFGHTARIIPAQFVKPFVKSNKNDTIDAEAIAEAATRPSMRFVAIKRNDQFDVQALHRVRDRLVSSRTRLISQMRAFLLEYGIPLRNGAGLFRQELPAVVGDDTNELTPAMRAVLGELWNEFKGLDERVAAVSQQIEALAARDDTARRLTSIPGIGPLGATALLAAVGDGKQFRRGRDLAAWLGLVPKQYSTGGKTTLLGISKRGNPYVRRLLIHGARSCLLHLDRHRDRLGVWLDRLCVRMHPNKVVVALANKIARIAWTVLTRPGTSYERIDPRFAA

SEQ ID NO: 151049 - protein, 388 aa, unidentified
MIYVGIDIAKLNHFATAVSSDGEILIEPFKFTNDYDGFYLLLSKLAPLDQNSIVIGLESTAHYGDNLVRFLISKDFKVCVLNPIQTSFMRKNNVRKTKTDKVDTFVIAKTLMMQDSLRFLTLEDLDYLELKELGRFRQKLVKQRTRLKIQLTSYVDQVFPELQYFFKSGLHQHSVYALLKEAPTPNAIASMHMTHLAHILEVASHGHFGKDKARDLRVLAQKSVGVNDSSLSIQITHTIEQIELLDSQLFHTELEMANLVTCLHSVIMTIPGIGFVNGGLILGEIGDIHRFSEPKKLLAFAGLDPSVHQSGNFQAKKTRMSKRGSRVLRYALMNAAHNVVKNNTTFKDYYDSKKAEGRSHYNALGHCAGKLVRVIWKMLTDEVEFNLE

SEQ ID NO: 151050 - protein, 406 aa, unidentified
MTIYMGIDWSREKHDVAILNEQGAVLETRQVKHDAQGFEQLDKMRQQLDVGVGDCIVGIESANTLLIDFLWSRGYEQVYIVPPSVVNANRGRNRQSGARNDRYDSCVIAETLMTDRHKFHPWQPGSVLLQQMRRRISQGEFWTQESTRLANRLEELLLRYYPQALALFPSWPTSIICHFIIDYPSPAAASRLSVDEFIAFGKMHGYPKPRLLPGCYDRLGAVYPAAQPAVVMSGAAEAVPLAQALLHSLQSEKENIDRLQALFKQHPDAAIFASLPGTGKWLAPALLVKFGEDRQRFASPQPLQSLAGTCPATSQSGKKHTVYFRRSCDHSFRQIAQLWARSAVAQSAWATTYYRELAARRIPANQAYRCVANRLLAIAWKLWQERVCYDEAIHLQHRAKRRRPLA

SEQ ID NO: 151051 - protein, 345 aa, unidentified
MKLTPVGIDIAKMVFQVHYVDEETGEIVNKPVKRAAFLEHFANRSSCLVGMEACGGAHHWARKLMKMGHQVKLMPGEFVKAFNIRNKNDAADARAIWLAVQQPSKAVAVKTEVQQAMLALHRMREQLVKFRTMQINGLRGLLTEYGEVTAKGRASLDKAIPEILARVAERLPAVLIDTLREQWNGLTNLDEQIAAIERRMREWKKDDRAVKAISEIPGVGLLTATAAVAMMGDAKAFRSGREFAAWAGLVPKQTGSGGKVSLHGISKRGDTYLRTLLIHGARSVLINAKDPGLWVEQMKQRRHPNVVTVALANRIARTIWAVLAHDRPYQKGYVSVKPALAVTAR

SEQ ID NO: 151052 - protein, 444 aa, unidentified
MHYQKVLKMPESIPYLSVGFDVGADFTWMSIMLPNGILIGKPFKIIHSDPQSRELAISKIKEAQEMYSLESRCFLESTGIYHIPLLCFLRDKGFDCAVINPIITKNSTNMNVRKLHNDKFDSKKAAKVGLDASLKASIVPDDAIIDLRNLVRDYYYFKDLQSAIVLKLHAELKVSFPAYLNVFSKVTTQTSLKLLEAYPLAADMLAAPKDELVEIIRSTARFGETYALARYDAICTAAKDAAVFGRALPSNALRIRLYIKMYREYQAHLDSILEELHQAVGKLEGTPDYDRISFIQTLHGVGFLSAVVLIAEMGAFDLFSSPKKLYAYFGLDPGVNDSGKFHGDRVHMSKRGSSLARRILHMVAINNLKVDKATKTPVNPVIYDYYTRKCASKKKSVAVGAVMHKICNIIFAMLRDNKPFELITPEEHRERYAAEHPESVNTAA

SEQ ID NO: 151053 - protein, 347 aa, unidentified
MRYVGIDVGKQRCRAAIMDPEGAVIDEFTFSNNHQGIEDLASRLTVDDRVVMESTGSVWTNLYNSLDERRISVVLANPLKTKAIASARIKSDKVDARILAHLLRSNLIAESYVPPKEMREIRALIRHRASIIKVRTMVKNKVHAFIDKHGLRSDHSDTFGKRGTEWLRSLKLPSLDILMLSNHLDHIESLNKQIERIDEEIHSKASQDEDVKLLLSMTGIDIYTALLIRGEIGSIERFADYKKLVSWAGLAPSLHQSGRIEYHGAITKQGSRMLRWNMVEAARVAATHDERMKAFYERVKRRRGDQKAIVAVANKMLKIIWFMLTRREPYQSRNPRLYMRKLNSLID

SEQ ID NO: 151054 - protein, 450 aa, unidentified
MSPLALDVVTKTDKTPVLGRMLSKYVGRKTSSIENGITKARNHSRQRGNIMRVVFGIDVSKASSEVAILVNGEKVHGYTIPNDAIGFNRLLGDLKTVHQPEIVFETTGVYSRRLQAFFEDNSYTYTRLNPLESKKQLDSLRVRKTDKIDAEKLAMSQFILNRKPSYVQEALYQELRDLSRFYQNLTEDIVCAKNRLHKVLQITFPELENILSAPTGEQYWNLVITFPCNSFVLESDDATLTAIIRQSTAKRISEKRVTYLVDKLTKLANQSYCAVKKTSPVIEEVKYYAGELLRLSEHRQGVVEEMVTLAQSLPEYEILLSIPGIAETTATSIIGELGDIRRFHSANQINAFIGIDLRHYESGNFLAKEHITKRGNPYARKILFKCIHNIASASHTNPCHIADFYEKRKRQSQVTSTKPHTIASIHRLIRTMYYLITHNKLYDYTSIQNR

SEQ ID NO: 151055 - protein, 414 aa, unidentified
MKKKDFIQFEQVVERGCGMDVHKKVIVVTIQGNGIITVTKSYSSFTSSLIKLRKWLQKHGITHIAMESTGVYWKPVFNVLGDDFQILLVNARHVKNVPGHKTDKKDSRWLAKLLLSGLLRGSYIPCREIRELRDLTRYKTKLTNQVSAEKNRFLKILEDANIKLSSVLSNVFGSTGQKMIAEIMKGDYKPERLLYHVHGHVKADRKDIREALTGHVTEHHRFMLETIMENITKIESTITKLENELAIKTEPYKDILVLLETIPGVGHDGAIGIIAEIGVNMEAFPSQKHLASWAGMSPGSNESAGKNKSGRITFGNKYLRALLVEQAWAASRTKHTYLSSKYKSLVGRRGKKRAVIAVGHKILLATYFIIKNKVEYNELGEDYLNNFRKDKLVEYYKKQLERLDPNVNFDNEVA

SEQ ID NO: 151056 - protein, 344 aa, unidentified
MGEVITIGLDIAKSVFQVHGVDGAGAVVIRKRVSRAKVLTFFADLPPCVIGIEACPSAHHWGRELEALGHTVRLMPPSYVKAYLKRSKNDANDAEAICEAVTRPSMRFVALKTKAQQAALMLHRTRQVLVRQRTMLSNAMRGHLAELGIVSAKGRNGTSELLRIIADGADSRVPPVARGILEVLARQYSAISAELGSIQKGILAWHRSCEASRRLEEIPGIGPIVATALVAEIGDWKAFGSGRDLAAWIGLVPKQHTTGGKDRLGGITKQGNRYLRWLLVTGAMAVIRYAQKHGIRKQPWLGRLIERRPTKVAAVALANKIARVAWAIMVHGDRYKEPELPVAA

SEQ ID NO: 151057 - protein, 461 aa, unidentified
MAESRPRRPRRPRRTSPSVLERINPDAAGIDCGATTHVVAVPPDRDHEPVQSFRTFTTDLHRLADWLVACRITSVALESTGVFWIPIYEILEARGLSVHLVNARHVRNLPGRKSDVSDAEWLRDLHSVGLLHASFRPTAAIVTLRTYMRHRHTLVELAVMHVQRMQKALVQMNLQLPFVISDITGQTGLQIIRAIVAGEHDPAQLARFRHGRCRATPAEITAALTGHYRPELLFALQQNLELYDACERQIAECDRVIEAHVRTLTANITPPGPLPAARAARQRIEPAFEVRAMLHHLTGGVDLTQIDGIGAYTALKLVAEIGTDMRRWPSAQHFTSWLTLAPKNKVSGGKLLSSQTQPSANRAASAFRLAAASLGRTQTALGAFYRRLAARTGKPQAVTATARKLAVLVYHVLKGDFVYRDPGADGYDAQQRARQLRQLRQRATRLGFALVSHETGEVLGG

SEQ ID NO: 151058 - protein, 374 aa, unidentified
MVWLERGTRLSILNQECPPRFPSTDDQEDLTEMVMIGIDPHKGSHTAVALDDQELELASLRVRAGRRQRQQLLEWATPFDVRVWAIESANGLGYLLAQQLLAAGERVLDVPATLASRVRVLSSGRSNKNDPNDARSVAVAALRSPAMTEVRCEDHVTVLRLLAKRHIDLGRWRNKVCCRLHAHVAELVAGGISTEIVVAQASELLAGLHPRGVAAVERHRQALELVEDLARIDDQLRASRRRVTGAVAASGTTLTELFGVGPINAAILIGYTGDPRRFATQHHYAAYNGTAPIEIASAGRTIHRLSRRGNRQLNHAIHMAAVTQIRHTHSPGRAYFDRKVEEKKTPKVALRCLKRRISDSVYRRLVADARRARR

SEQ ID NO: 151059 - protein, 460 aa, unidentified
MNPKRSKSRNGGKMPMMHPNAAAIDVGATMHMAAVRADRAPEPVRSFGTFTADLHRLVDWFTECGVETVVMESTSVYWIPIFELLDARGFTVFLVNARDAKHVPGRKTDVSDAQWLQRLHSFGLLRASFRPKGQIAELRAYVRQRERLLEYAASHIQHMQKALTEMNLQLHHVVADITGATGLRIIRAILAGERDPEALACLRHYSCHSSAETIAKALTGSYRAEHLFALEQALALYDAYHEKASACDVRIEAVLKELSIHRGHGHGSAPRASRRRNRTDQANALAFDVREALFALLGKDITTIDGLGPYLSLKLIAECGDDLSSWPSAKHFTSWLGLAPSNKVSGGKMLSSRTRRSGGRAAALLRLAAVTVGRTDTALGAFYRRLSARIGKAKAVTATARKIAVLFYNAVRYGMDYVDPGASSYETRYRTRVVNNLHRRAKAFGFVLQPLEPNVGAAVS

SEQ ID NO: 151060 - protein, 387 aa, unidentified
MQKPHDDSKMCPAAFQQDSTLVVVVEMSLSSWLVAGLIPGVSREPLKKIDPDPERLLRLLYRWRDEAVAAGSKINRIAVAYETGRDGFWLARWLRNRGIDAHVIHATSVAISREHRRAKTDRIDTAMLRRGFLGWLRGEPGHCSMAVVPSVAEEDAKRPHRERDTLIHERTSIVNRMKSILIQFGVRNFNPVLRKANEKLDAVRTPEGIPLPANAVAALRRLMDRLRVIKEQVKAIEQTRLQRMQRNPADRMNAMVFLLVRIIGMGVETAEQLVREMLFRNFHDRKAVARYAGLTGSPDESGSKRREKGLSRSGNGRVRNILIQLSWRMLQFQPDSGLVIWYKKRTESARGSRKPMIVALARKLIISLWRYVNTGVVPEGFELRSAA

SEQ ID NO: 151061 - protein, 340 aa, unidentified
MEFRFFIGIDVSKDTLDIGLLDAESSETVNHQQVNNNDSGITAMLNWLQQHNEFTIEGSLFCLEHTGMYNYPLLQFFSKQGASVWVENPIQIKRSLGLQRGKNDKVDAVRIAQYAYRSKQRVRLWQPAREVIERLKHLSALRERLVETRKRLLTPVEELSKVGNEAMAKVLEKAMRKTMKALDNDLEAIETQMKEVIDKDDDLRNMYELITSVVGIGFVTAVNLIVYTNEFKLFSCHRQFACYSGIAPFDYRSGSSIRGKTKVSHMANKKVKRYLHMASLTGIRLDEGLKSYYKRKVEEGKNKMSVLNAIRNKLLARIFAVVNRGSLYQKINYQNNLFLS

SEQ ID NO: 151062 - protein, 372 aa, unidentified
MILIEAPFLATGSVHCYRQSNATNFNVSEPRRRLYEILHPNPQILLRIVDRDGNVLVHRNMKSAAEPFLSVVAPYREDLAVAVECIFTWYWLADLCAREGIAFVLGHALYMKAIHGGKTKSDRLDSQKIALLLKGGLIPQAYVYPPAMRATRDLLRRRLHLVRKRADLIAHIQNTASQYNLPPLAASLGRKHQRKGIAEHFPDPVVRQMIELDLRLIDTFDAEVRVLDQDLALKAKAHDAHAYHLIRSVPGIGRVLTLVILYEIHDIHRFPTLQQFASYARLVKCTKESAGKPVGKSHKKIGNSYLKWAFSEAAVLFLRKNPKAQQYIQRLAAKHGKGKALSILAHRLGRTVYTMWQTGQPFDKERFMATLN

SEQ ID NO: 151063 - protein, 323 aa, unidentified
MNKDIKYFGIDISHLVFDVTDSDGNYYQFKNNVSGFKKFVRLLNLDSHCVMEATGYYHYQLAYHLLESGIKVSVENPLAVKRFIQMKLSKIKTDKSDSKLICEYAEQVELKLWKGNTKVELECLQITRALVIYTKQSTMLKNKLHGKAVLGEPSKAVVRSLKRNLKQVVKEIKTLEDRLLELVKQVHQNLLTRLKTIPGIGRKTAIMLVVLTGGFERFTSASELCSYAGLTPVIRQSGSSVKGRPCISKIGNQKLRNLLFMCSFNACKCNKACRDLYERIIAKGKSKKLALIAVCNKLLKQAFAIAKSGLIYDDNYRSTLVKN

SEQ ID NO: 151064 - protein, 406 aa, unidentified
MRKKNDNRQVEKRQRITGATLVIGMDIGCEFNAMCLMNKEGTVLGRYPKIYNSRKGFDYFHGIVEGMKKKYGFTDVLIGMEPTGHYWRKIAFFAMDKNHEVRFIRTTALKHQRELDESSSAKNDMRDAYTIGNIVREGKYIDTVIEDGVFRQLRTLAHTRERIQRISTGAKHALKGVLEDYFPELKSIFWSMNAKGLLALLEQCPFPGDVLTIGPDTLTEILAKSTRRKKKAREKALMIYEAAGQSVGLKCIGEADRHRTALFLSEIRHSEGQLKEIELRMKTLLQKIPFAEYILSMPGIGVLTCGVFLGELGDPYNFRDPKQIVKYAGYDPKEHDSGQSIGRKIISKKGRWLLRKYLYFMAMRVVHRSPFFKKYYENKQKTMAKKRSALCGGYKTRQSHLCTAQR

SEQ ID NO: 151065 - protein, 400 aa, unidentified
MNAVGIDVSKGKSTVAVIQPFGVVIAEPFDVFHTDSSLKELVRFIKSLSGETKVVMEYTGTYYEPVANALHNAGIFVSVVNPLLIDDYDTNRVRKVKTDKLDALKIASYALDKWIKLRKYEPAETVRKTLQIMNRQCIKLNKILVMQKNSLIALLDCCFPNANTLFTSPRRVSDGHEKWVDFAMKFPHVDSVAKLSLSAFRAKYQSWCKKEHYNYSESKADQIHAYARTIISTLPMTESVRKMVSDAAKLLNSTLEALGTLHSEMDALASQLPEYETVMNLYGVGKVFCSQLIAEIGDVTRLKSNKSLTALAGIDPPPNQSGKDDPKSRRISKRGSPALRRTLFLIMTIYLQHQPADEPVYQFLDKKRAEGKPYKVYMIAAAHKFLRIYYARVKELMPKE

SEQ ID NO: 151066 - protein, 349 aa, unidentified
MVAELVDYVVGVDTHRDEHTLALVEAATGAVLAQRAVASNGRGYAQALRFARPQTDASRVWAVEGAGHYGAGLARYLSERGETVLEVGRSPRSERRLRGKDDQLDAVRAARAALSSEPLARPRSGERREALRLLLVARRGAVDVRREALVQLRSVIVTAPDRLRQELRGLPRQRLLGRCSRLRRSSSATPDELAARLVLRTLARRFEAASAEADELEREILAHVRALAPELLEEPGVGPIVAAQLVVAWSHPGRVRSEAAFARLAGVAPLPASSGQTGRHRLSRGGDRQLNRALHTIVLHRRQHDPKTRDYISKRIAEGKSRRDATRLLKRYLARHLYRLLQNQEPLLA

SEQ ID NO: 151067 - protein, 344 aa, unidentified
MGEVSTIGLDIAKSVFQVHGVDVDGAVVIRKRVSRAKVLEFFESLPPCLVGIEACPSAHHWSRELQALGHTVKLMPPSYVKAYLKRSKNDANDAAAICEAVTRPSMRFVPTKTEQQQSGLMLHRSRQLLVRQRTMLSNAIRGHMAELGIISAKGRNGTAELLKVIAGNEDGRIPVVARFSLDVLARQYAAITTEIGAIEKRIHAWHRSCEESRRLEEIPGVGPIVATALIAEVGDWKAFSSGRNLAAWIGLVPKQHSTGGKDRLGGISKQGNRYLRWLLVTGAMAVIRYARLRGTKRLWLTRIMERRPVKVAAVALANKIARMAWAMMVRGEQFKEPRLLPAAA

SEQ ID NO: 151068 - protein, 370 aa, unidentified
MKMSIGVDLHKTQFTVCMLSEDRKIVESGIYPTRNDGYEKFLEVVSTFVEKGYETTAAVESTGNTRFFMNKLLTAGIDVKVVNTLKFKVVNESVKKTDRHDARVLAEFLEKDMLPESVLCSQESEDIRRVIKTRAILVKSLVSMKNQVHGLLLGYGIETKRGQLQSKRERQRILTGLEDHRSFGSAAKAVEPLLDTINQVALEVKKLEKVLEDLVAEDKDVELLKTIPGVGLITASIIRAYTDEIERYGSPKKYAAHAGLVPWVQNSNMTVRHGHITKRGPVELRTAFVQMVMGMVRNQSKTGDYRIILKYSEMKRHKGSGKSIIATARKMSTIVYMVLKTREPFDPVKMTFRREYKEMQAAALDSAMVS

SEQ ID NO: 151069 - protein, 349 aa, unidentified
MIIIGVDFHPEFQQIAFVDTDTGELEERRLHHPDEAEAFYRALVSQGKTVRVGMEASGHGRWFERLMSELHIELWVGDAAEIRTKRVRKQKTDRQDAQLILKLMLKDDFPKIWVPSWENRDLRQLLWHRHRMVQARTRIMNQLQAVALNEGLRCKKRLWRTERPRLESFQLAPWASRGRRDLLELLDRLDPTIAELSQAVEQEVEKCPEAQRLATHPGVGPLTAMAFVLIIGQADRFQCGKQVASYLGLVPMEDSSGNRRRLGHITKQGSSILRFLLVEAAQVTVRSLPEWRSRYFHLMMRRGRKIAKVAMARRLAVCLYWMMRQGWDYQQWVEFGSYAGQPGNRHGVQ

SEQ ID NO: 151070 - protein, 361 aa, unidentified
MPSMHPPGPSDTAEVVLGVDTHKDAHVAAVLTALGALLATSSFPTTAKGYRQLLAWARGFGTVHRAGVECTGSYGAALSRQLRSEAVTVIEVNRTDRGDRRRRGKTDTIDAETAARAVLSGRATAIAKSGDGEVEMLRMFKLVKASAIKSRGQAINQLKAVLVGADPALRESMTGLSNPALFRRCAELNHPDPGDPPSAAAFTLRLLARRILELTSEIDELNAQIATTAKARAPQLLQRYGVGPDTAAALMLAAGDNPERLHSEASFAALCGVSPIEASSGKTHRRRLNRGGDRQANSALYTITIARLRWDKRTQDYVRRRVAEGKTRREAIRCLKRYIAREIYEDLTKTKSTPPSAQSAA

SEQ ID NO: 151071 - protein, 360 aa, unidentified
MKQVSTIGLDLAKHIFQVHGAGADGSPVFNRRLRRSEVLHFFSKQPACLVGIEACGSAHYWAREIATLGHEVRLIPPAYVKPFVKRGKTDAADAEAISEAVTRKTMRFVPIKTAEQQAGTMVLKSRALLVKQQTQTINALRSHLAELGIIAAAGRTKVEALVAIVRDVADIRLPAAARFALTAVADQIEAQADQIDKLERAIVAAARTDKDMRRLTTIPGIGAITAATIKALVPDPGGFKSARHFAAWLGLTPRQHSSGGKERMGRISKMGNPELRSLLVLGATSVLRIARKADRAPPWLKSLLARRPYKVAAVALANKTARIAWALLNRGGIYRHPETLARPIRESAFFSPIDVAAHLL

SEQ ID NO: 151072 - protein, 329 aa, unidentified
MLIVGCDYHPSVQQIAWADTGSGECGERRLAHCAEAEQFYRDLKQKGISVRVGIEATGYSRWFERLLTELNFELWVGDPAQIRAKQVRKQKNDRRDAEHMLKLMLENNFPQLWVPTPEDRDVRQLVWHRHRMVQMRTRVMNQLQAIAMNEGVRRKRGLWTRRGRAQLQALTLPPWTNRRRQELLELLDRFNPSIDELTEAIEQEAQRRPEVERLQTHPGVGPVTALAYVLVVGTPERFACGKQVASYLGLIPCEDSSADHWRLGHISKQGNALLRYLLVQSALSAAHVEQEWQRKYVHLAMRRNHAIAKIAIARKLAVRLFWMWRRKWD

SEQ ID NO: 151073 - protein, 430 aa, unidentified
MKNRINQRLDEITPTTLIVGIDIAKSVHWARFVDYRGREVGKVISFTCNHQGFERIIASIKELSNSKVFNQPFDNVLIGMEPTGHYWKTLASYLMKAGYRVVCVNPHHTKKAKELDDNSQTANDKKEAMTIARLIKDGRFFDPYLPQDVYAELRMLATARISVMSRNNEIKNTITAILDEYFPETWTVWKKPLKSKAARQLLRSCPFPEFIMKMGESNILSEIKKVAKKSVGVKKVQQLIQAAETSIGVDYGLESTKLRLRMLLDELDLLEKNIAEIEASMEQMLNVTGYAEKLLSINGIGVVTAASFLGEVGDPLRFQNARQIMNYAGYNLVEDSSGKSKSGTCISKRGRSRLRSLLYQMAFTMVAKNKEMKELHQYLISRSKNPLKKKQSLVVISKKVITVIYSLLKKQELYDPTLVLGAARREIMAA

SEQ ID NO: 151074 - protein, 350 aa, unidentified
MMIIGCDLHTRYQQIAMVDTETGEFVERRLEHESGEARTFYAGLRGAVRVGIEATGHTAWFEAMLAEFGHELWMGDAAKIRAAVVRKQKTDARDAAHLLDMLCTNRFPTIWRPSLAERDLRQLLWHRQKLVWMWGAVKNQMHALAMGEGVCRKKKLFTAKGRTELEGLKLGRWASYRRQELLRLFDELQSSVKKLDQAVEFAAQSNPLAARLMTHPGVGPITSLAFVLIIGPVERFDRSKQVVSYLGLNPQEHSSGGRQRLGSISKQGNPMMRSLLVEAGHTAARLDPQLQRVYQRLKFRRGAAVAKVAIARKLAVRLYWMLRSTADYAQLVRMRGSSWATLVEDSPSLG

SEQ ID NO: 151075 - protein, 342 aa, unidentified
MKRFIGVDLHKNSFTVCYMQRKGEHNLKTFRVSPEDVEVFKKTLTKQDEVAVESTGNTGYFAREVKGSVGKVRIINPIQFKIISESVKKTDEHDAITIARYLSKGLIPEVRMRSKEEAKLASLIGTRDKFVKLRTTLKNKIHNILNASGIVTSKEMFGGDKALDKVLSMNLDQSDLFEIRIIVDQIKSLNKSIDEINKELTDRGKNLPGHKNLTSITGIGDLSATILLNTIGNVKDFDDDKKLAAYFGIVPRVYVSNQTSQYGNITKRGNKIARTALVQSTLIAIRYNHYLRRFYFKLKAKKGSGKAIIATARKLLTIVYRTLKNDWVFEDFNKFKLAAVTA

SEQ ID NO: 151076 - protein, 260 aa, unidentified
MLYDGIKGRIKTRNIQNNRHSVENIIRWLRLQHCGPEDVHVVMEATCVYHERLATELHDARFRVSLANPHRSREFARGMGIMTKTDKVDAYMLACYAFLKKPHRWEPPAPEIRYLGALLRRRDVLLGDALREENRLEKYLSTDTPADIISSCRRMAQLLREEVSNIERQIKAHIKASPALRRDYTLLTSIKSVGPQLGMHMLVVLRSHNFVSAEQAAAFLGVVPIEKRSGTSVRSRPRMSKIGPSVESEALHVRPVRKNI

SEQ ID NO: 151077 - protein, 337 aa, unidentified
MIVMGLDQHRAQITAEWIDTDTGEVERARISPAHREPVRRFLRRFRGCELEVALEATTGWRFVVEELRGVGAGVHLAEPAETAGLRGPKKRAKSDRADARHLRELLMVSRVPESWIPPDHVLDLRARVGLRHTLSEQRGEWQQRIQAVLYHHGLPQRRALMTGEGRAWLAGQPLPETAREQVTVAIAMIDALDVQLAPIEKELRAYARRQPGCRALMAHYGIGELTAVTILAELGDCRRFSSSRHAVRYSGLDITVHESDRRRAPGHLSRQGPPALRWALFEAAQVARRTGSPDRDYYAQAADRLGSNRACLSIARKLLKRSYHTLRELGEEALQPA

SEQ ID NO: 151078 - protein, 451 aa, unidentified
MANPKTTRTRKKRTAPTPSKSNPDAAGIDLGATVHYAAVPADRDAKPVRHFGTLTEDLEALADWLKDCGITTVAMEATGVYWIPLFQILEDRGFEVCLVNARHVKNVPGRKSDVQDCQWLQYLHSVGLLNASFRPPAAICAVRSLMRHRESLMRAACQHLLRVQKALDQMNVQLHHAVTDITGLTGLAILDSIVAGERDPEALARLRHYRCKKSEAEIAKALKGDWREEHLFTLRQSLEAWRFHQAQMVECDTQIAEKMDALGDCGVGPAPPSPKQGANAPDEPMRQELFEKFGVDLTAVEGISIQTTLAFLGEVGTDVEKFPSAEHFASWLGLCPDNRITGGRTHAAHTRKVNNRLATALRMAAQSLHRSKSGLGDWFRRIKSKLGTKAAVTAAAHKLARILWAMVKYRRPYDPKRLGNPELARARKERYLRRQAEQLGFALNPVHGEVS

SEQ ID NO: 151079 - protein, 345 aa, unidentified
MKVLKQVLGIDVAQKELVVTLGKLNDDLTIDLYANCVFKNTDNGFLKLSKWVEQRTDKVTKVRYVMEATGVYHQKFAYYLDEKKEDLSIVLPNKISNYMRTLEIKTITDKTCSEAIARFGLERKLDNWEKPKEVYRTLKQLTRERHQITDERTIVKNQLHAEETEAMPSFSSIERCNKRIHFLNTLEKEIKDEIQAIIKQNRELSRDISNICTIPGVSILTAATVIGETNGFELIRSKKQLTSFAGLDVREKLSGTSVKGKPSISKRGNRYLRSCLHLPALSTIKWDDNFRDQYARIVAKHGIKMKGCVAVQRKLLELIYILYKNKTVYDKDFESKKIACQQTNA

SEQ ID NO: 151080 - protein, 388 aa, unidentified
MTQVDDLSRSLITFEQNSTMVVVLEMSQSSWLAAGVVPGIERRPLKKLDPDPTTLLRLVEGWRDHAMKAGRMITRIVLAFEAGRDGFWLARWLRARSIEPFVIHSTSVAVSREHRRAKTDRLDTEMLIRVFLGWLRGEPRHCKMVAIPTLEEEDARRPSRERESLIGERTRIINRMKAALIRLGIRGFKPELLKAPQRLEAQYTAEGVPIPPNMLDELRRDMARLAWVREQINAIEQARLERLEQAPSTGPHAMVRMLASIIGVGVETADMLVQEILSRNLRDRRAVARYAGLTGSPDESGVKRREKGLAKAGNARVRRGLIQLAWRFLRFQKESALGQWYRARTEGAAGKRKTTMIVALARKLLIALWRMVTTGEIPAGVALRTAAA

SEQ ID NO: 151081 - protein, 388 aa, unidentified
MTVIIGMDPHKRSATIEVVDDRGRILAAGCYGTDKAGYAAMLAAGRRYRERTWAVEGCNGIGKHIAHRLVHDGETVLDVPAKLSAQVRVFATGNGRKSDPVDAHSVAMVALRTPNLVRVQLDADLQVMGMLADRRDELGRARTQTINRLHRLLLELLPGGAKKYLSAMQARKLVATVKPRDPVGKTRRRLVVELIGELEAIDRKIKAVDKDLKAQVLARGSTLMDLHGIGPAGAARLLADVGDIHRFADRDRFASYNGTAPLDASSGAQLRHRLSRAGNRRINRVLHIMAVVQLRNRTPGRVYFDGKKAAGKTSMEAMRALRRRLSNVVYARMIADQNRREAAGPGGHSGTTLQSSVTDLTPDVGSSDKPLPGPATRKPTRHPGRVLT

SEQ ID NO: 151082 - protein, 370 aa, unidentified
MRITTKCQELDLPATQEHQATLYASLELSRSTWLITSLSPCSSKMSKHTIAGGNGPALLALLERLRAKASQLTGRPVNVVVIQEAGLDGFWVHRLLGADGIESYVVDPASIAVPRRRRRAKTDAIDGETMLRTLLAWKRGEPRVCSMVVPPTPGQEDRRRASRERVILLQERVRHVNRIKGLLAGQGVTHYDPLHKDRRTQLDVLQTGDGRPLPAHLKAELLRELTRIELVMQQIDAVEIERDAAATSELEGQQSPVALLGQLKAIGPQIGAVLYHEGLYRSFANRREVAAYAGLAPTPWRSGTIEREQGISKAGNPRLRHLMIELAWLWVRHQPDSALSGWFRSRVGNERGRMRRIAIVALEGVMNLLG

SEQ ID NO: 151083 - protein, 364 aa, unidentified
MRNVALDLGVREISYCEVANGKVIRRLTVTKLSTLEEFLGPEAAPAKVAIEACREAWHVHDILSAWGNQVLLVDTTRARRIGVGEHGRKTDRVDAEKLAFAVERGGIPAAHLLSPHRRKLRLELSVRRALVETRAQYVTTVRGLVRAHGQQIRRCATSSFVKVVRETALKEEVRELSEPLLRVIELVDGQISEVEERIERLAKQEPVVELLATTSGVGAIVASAYVSVIDEAGRFRNAHQVAAYLGLVPGETSTGGKQRLGGITKQGNSYVRWLLVQAAWSILRKRGTDDGLAEWGRRIAERRGKRIGVVAVARRLSGILWAMWRDGTEYDPHFAARATAGGFMAASRKLKASAERLEQSATQS

SEQ ID NO: 151084 - protein, 350 aa, unidentified
MIIIGCDYHPGFQQIAYVNTDTGELSEARLGHKEQAEQFYRELSKRGVTVRVGMEASGHARWFERLLIELQFEVWIGDAAAVRTKRVRKQKTDRQDAQLLLRLLLEDRFPKIWVPDAENRDLWQLLWHRHRLVQMRTRVINQLHVVALNEGVRRKKGLWRPAGRAELEGLSLAPWASRRRQDLLDLLDRLTPKIHELNGKLEQIVERRPVTRQLSTHPGVDPLTALAFELVIGTPGRFACAKQIASYVGLVPSEESSGDRRRLGHISKQGNALLRFLLVEAAQVAVRSDPQWRSQFFHLAMRRGRKIAKVAMARKLAVELYWMWRRGWDYDEMQQLGSHAGEPGNPHGVQ

SEQ ID NO: 151085 - protein, 379 aa, unidentified
MKNVSIFVGLDVHKDSIDIALVEEDRTATVRFYGTVGGDLTDLEKAVRKIKKAHPCATLHFVYEAGPCGYGIYRYLTKAGHECLVVAPSMIPKRSGNRIKTDRRDSIMLASLHRAGELAAVFVPRAEDEAMRDLVRARQDAVKAERVAKQQLKGFLLRHGIKNAGPGDWKPSYMKWLAGIKMPNPTQQIVLQDYLNAVIDCSDRKMRFNAQIREVLPSWDLAPLVNALQAMRGVALMIAVTVVAELGDLKRFDTPRQLMSYLGLVPSEHSSGGTRRTGGITKAGNGHVRKVLVEAAQTYRLPARVSKILLERQEGLPKVIRDIAWKAQVRLCGRFRKMVARGKKHQTVVCATARELCAFMWAIAKEVSINTSSVATVSQ

SEQ ID NO: 151086 - protein, 344 aa, unidentified
MTVATIGLDIAKSVFQVHGVDSAGQVVVRQRLTRRRVLAFFEKLAPCLIGIESCSSSHYWARELIARGHEVRLMPAQYVKPYVKRGKNDAADAEAICEAVTRPTMRFVPVKTPEQQSVMMLHRVRLMLNRQRTQLSNSIRAHLSEFGIVAPIGRRGLDQLLAIVADEDDARVPADARLCLQMLAAQLAVVKQQILENDRRVRASARETELGRRLMEVPGVGPLLASALVATVADPAAFKTGRDLAAWIGLVPKQNSSGGKERLGSISKAGNRYLRQMLVVGATAVIRYAERHGTRRPWLVQLMQRRSAKVAAVALANKMARIIWAVMASGERYREPATVSAMAA

SEQ ID NO: 151087 - protein, 383 aa, unidentified
MSGPLVLVPVCNAIVGIDLADNKQMVVVTDHDSKVLARRTFRCRAWDLGLALDWAGHQASKAGFAGVTVACEPTGHRWRVLGQLAADRGMAFVCVQTLLTSWARRSEDLTFDKTDEKDAVLIARLTAQLRCYVPEPLDERWGRLRHLGARRERLLAETVGQVQQIRDLLECVWPASLDTAKQPFRSRTWLAGMSVILARTDGDPARLRRLGPARFEAAVRREVVARQGKRPCLRIVRLLFVAAADPRGVTIHRPGALERAQLLLDDFRDTQRRLGEAEARMVAVLDELQLSELVCSIVGLSALGGATILAETGDLTRFASARAVVKHSGLAPREKSSGTFTGRTKLTGQGRPGLRAAAWRAVWGAQKANPVYAAKFTHLTSRT

SEQ ID NO: 151088 - protein, 400 aa, unidentified
MLSIGIDVSKGKSTVCGMKPGGEIVYTPFEVQHTREGMSELVSLLRGSGEEVRAVLESTGSYHCPVVAALLENGIFVSVVNSLRMKRFCSQSIRKVKTDRIDAMQIALYGLAYWQELQPTRLPEDTYRELQLLARQYYQMTSLLIKAKVDFNAICDQVLPGMQELMSDHAGRHKLSDFVLRYCHTTHILEMGETRFRKDYCKWAEKKGYRNCERMAALIFATAQNGIPVLPNAPSTQIVITEAIRVLHTVEASRDAILTQMQALAKTLPEYSLVREMPCIGDTLAPRLIAEIGDVRRFHSKRALIAYAGIDAPPYQSGKFCANNRHISKRGNRYLRKTGYEVMQSYVMHKPANDPIFTFIEKKRGEGKSGKLAMVAGLNKFLRVYYGKVTELYRSLPAIE

SEQ ID NO: 151089 - protein, 367 aa, unidentified
MSNYVTAIGLDVHARSISACAFDPMTGEVTRARFGYDPASVAEWALGFESPKAVYESGPTGFHLCRALRALGVDCAVGAVSKMHRPAADRGRKNDRRDAEWLARLLACRNVVEVWVPDERTEAARDLSRALEDARDDLQRARQRMSKFLLRHGLVFDETTPGGRRRSNWTEAYWRWARSIEFGEADDAAAYEHYTDAVDRCAEAKRELERKVVEAASRPEWAPTVDALCLVKGVDVATAFLLAAEAGDFSRFPSAPSFAAWCGLAPSERSSGETESRGAITRAGNSHVRRALVEASWHVPMSTRHPKKPRPGHGVAPAASRHAAKCNRRLQDRRDAMSQAGKRPCVANCATAREMACWVWAIALMAR

SEQ ID NO: 151090 - protein, 401 aa, unidentified
MSTRQERIWVGIDAGKGHHWAVALDADGETLFSTKVINDEAQILTLIGTARERADDVRWAVDISGRASTLLLALLVAHDENVVYVPGRTVNRMSGAYQGEGKTDAKDARVIADQARMRPKAFAALDTPPELVSTLRVLTNYRADLIADRVRLVNRLRDLLVGICPALERAFDYSAAKGPVVMLTEYQTPAALRRIGVKRLTTWLERRKVRGADTVAAKAVEAAQSQQIALPGEKRAAKLVCDLAHQLLDLDARIKDNDREIRETFRADDRAEIIESMPGMGPILGAEFVAIVGDLSGYRDVGRLASHAGLAPVARDSGRRTGNYHRPKRYNRRLRHIFYMAAQTAMMRPGPSRDYYLKKRSEGLLHTQALLALARRRVDVLWAMLRDKRLFTSAPPVTQAA

SEQ ID NO: 151091 - protein, 445 aa, unidentified
MASKIEKVHENVAGIDIGSTRFFVGVDSDEGSDEVKSFDTYTQGCNDLLEHLKQKGIKKVGMEATGSYWQILYRILTENGIEVLVANGRHIKHVPGRKTDVKDCVWIKELHKHGLLRGSFIPKSQVETLRHYLRIREKYIENKADAVRRMDKALIAMNIRISNAVSDIQGKSAMAMIEAIVNGQRNAEELIKLCDIRIISKKKEEVLKSLNGFYKHEQLFALQCAYDEYKFYIGKIAQCDQKAEEILDLLTKDKPEITTKQQFKRIYHNKPQIKDLDIKMMQLYDGKNYTVLPGITSYTLLRFYGETGDDYSVWPTDKCFTAWLALASSKFQSGKSRKYKKIKCNTAAGQILKEAAQSLLKSKNNALGLWGRQVAARRGPAVAIKAMARKLAVWIYNMKTKGMQFVENGIKQYEEKQKQKNLKWLKKQAAKYNLALVDLDTAQVA

SEQ ID NO: 151092 - protein, 356 aa, unidentified
MKRVTDNSSNFNGKIVNVGIDVHKLSWRVTAMIEGVVVKAVTIKPSYSVLKTVLSQFTGARIRVAYEAGPAGFSLYDELTAGDIECIVVPPSLIPVESGNRVKTDKKDSTKLAHYLENNLLKQVWVLSKEERAHRQYLRTRRQISRHRSDVMRQIKSLLLFHGIDCPYEGPQIWTNTFVRWLRSINSDEHIVHSLNVLVDLYEYLTQQVKELTEEVITLAHTEKYAHRVRLLTSIPGIGVLTAIEILVELQDVSRFRSADQLAAYIGVTPSQYSSGERVRMGSITHLGNHRVRTLVVESSWTLIRKDPALYKVYESIKNRRGAKRAIIAISRKLVMRMRRILLDEKPYKINYSLAA

SEQ ID NO: 151093 - protein, 361 aa, unidentified
MTVIHYIGMDVHKKSISYCIKRADGKVVQEGKVVACRPELRRWAEEQQQPWSGAMEATLFSLWVYDTLKPYAERLVMGHPAKMKAISAGKKKSDRIDARTIADLLRCDLLPACYVMPPEMRDLRRLLRYRSLVVQQSVRMQNKMAGLLMESGTVFQKEKLHGKKYFSELMRSLEEVPKSVKDLLRMSRSSMEMFQSAQKQIIQRLLSEPSLQRRIERLMSIRGVGPITALTWALEVADPHRFSSVGDAVSYCGLTAAFRSSAGKQQRGPISKQRNAWLQTVLIEAAKLAPRWNPQLAVLHGAQLELGHRNRATLQVARKLVAYLLAVDKSGRPFQVMTSPPPTKDAMKIKTRTHASLIQAA

SEQ ID NO: 151094 - protein, 364 aa, unidentified
MKIVGCDLHAGQQSIAMMDSETGELTEKVLKHEGNAVREFYGWLEGPVVVGIEATGAMQWFLELLEELGIECRVGHPAKIRAAETRQQKHDRRDAEVILELLLMKNRFPDIWMPSTEQRDLRSLLRDRHQWVKMRARLQHTLQAIALNHALRKGKALWTATGRQALQDLALPDYTAQRRDELLRLYLQLERRIQQLDKQVEKEAQGRPQARRLLTHPGVGPVTALATEVFLGDPHRFRTAKEVASYIGMIPCEHSSGKRRRLGKLTKEGNSLLRYLWREATLHAAVKDPELKRFYRRKLVQKGMGKARVATARKLGIRLWIMLRDEIDYEEFCRRGKLPQKGKTHAGMPDFNSGPAQAVTGSTE

SEQ ID NO: 151095 - protein, 344 aa, unidentified
MDHFGGLDVSVKETSICIVDDTGRIVKEVKVASEPAALLKVLGHPTYRFKRIGLEAGPLSQWLFSALAEAELPVICVETRHMQAVLKAQINKTDRNDARGIAQMIRVGLYRPVHVKTLRSQKLRMLLTHRKLLQSKAIAIENDLRGTLRNFGLKVGMVGKVRFEARIQELVENLPDLAVLVEPLLIVRRALREQIVILHRRLLAIVREDEVCRRLMTTPGVGPVVALTYRATVDVPARFRKSKSVGAVFGLTCSRYQSGEIDWSGKISRCGDEMMRTMLYEAAQSMMHSKKWSWLKAWAMQIARRRGMKKAIVALARRLAVIMHRIWVDGTEFRWTREKAEAAA

SEQ ID NO: 151096 - protein, 322 aa, unidentified
MTTVLGIDISKKDFYVSLLTESRATKPKKFTNNTQGFESLHNWLKQQSVVELHACMEATSIYGEALAEFLYGEGFQVSIVNPARIKGFAKSELLRTKTDSVDAALIARFCAAMKPSLWTPTAPEVKELQALLRRLESVTEMMTCEHNRLETATPTVAALTLEHWEYLQQQQQMIKKLISDHFDQHPHLKQQRELLTSIPGIGDLTASILLAEIGDVSDYDNARQLAAYAGLTPSERSSGTSVKGKTRLSCTGNVRLRKALYMPAVVAMRYNPLLKAMSERLLGRGKVKMQVIGALMRKLVHLAFGILKSQKPFDPNYLTATP

SEQ ID NO: 151097 - protein, 409 aa, unidentified
MPGSLLVGIDVSSGDNRVRLLDSSGNSISKFSVPNNQPGAKTLVSKIVSAMTSNRFDSLVIGLEATSVYGEPLVLFLKQDADISPFRPRIHVLNPKQVNAFKKAFLDLPKTDDVDAWIIAENLRFGRINQEVYMDDRILALRKLTRARYYTARNLTREKNYFLNTLFLKFSSLAQEKIFADRFGATSLAIVEEFLSVDEIAYMPIEELSAFVNEKGKGKFGTPEDIAKLIQKAARSSYRLPKTVNDSVNQILAISLVSIRTLKDQLKLFDKAIEEQMKVIPNTLTSVKGIGPVYAAGIIAEIGDIHRFKNQAALAKFAGICWSKYQSGKYTADNTHLISSGNRYLRYYLMEAANKVRMHDPEFKRFYELKYRETPKTPHKRALALTARKLVRLVYALLHDNRLYIPPKE

SEQ ID NO: 151098 - protein, 286 aa, unidentified
MMDVYYAGIDVSARTLDSALALPDMPVRQGHFANTPSGHRQLIKWLTKGGRSVRVCLEATGLYSLGVALALHEHRHCEVMVVNPKAIKHYAQARQQRAKTDVLDAQLMLDYGQRLPFVPWQPPAPEILHLQAITRRISQLKVESTRERNRLHADAYRTGMTDLIKRDIQVNIRHLERRRARLEAEGQALVLAAPSLCAPFQRLLSIPGIGETSASRLLAELPVLPAAMKPPQWVAHAGLDPRPHESGSSVLSPRRITKTGNKYLRAALYMPALRAIRHHSEHQSFL

SEQ ID NO: 151099 - protein, 337 aa, unidentified
MMYGGIDLHSNNSVIAVVDDAGHIVAQKRLPNEISKIIGFLARWQDEMAGVVVESTYNWYWLVDGLQDAGFQVHLANTSAIKQYEGLKHSGDETDAQHLAHLLRLGILPTGTILPREHRAVRDLARKRMQLVQSCTAHVLAVENIMTRQLGGRMTGNQIKRLTADAIDSLPLAADVSLAIKANVAVVATLQSQIELLEKRLQERVKPRPQYGLLISVPGIGQTLATVILLETGPIDRFADVGNFASYARCVDSVHTSNRKKKGEGNVKNGNKYLAWAFVEAANFARRFCPEAKRFHERKKARTNNIVATKALAHKLARASYHILKEGKPFNVARCFA

SEQ ID NO: 151100 - protein, 388 aa, unidentified
MQIVTDRSQAPTAIRTDLGAIFVSLELSRSTWLVTSLSPGGGEKMSKHMIRSGDVAGLWSRFSQLKDKALDRTGQGVPIIVIQEAGLDGFWIHRLLQSERIESHVVDPASIATSRRRRRAKTDKIDGEALVRALLAYKRGEPRVCTMVRAPTPQEEDRRRICRERKTLTAERVEHVNRIKGLLFAQGISDYEPLLRKRWERLEELRTGDGRPLPEHLKAQIRRELDRLELTLQQIKAVETERNAMLSPSDDGTPAPGAMLKNLKGIGPEFAGVLWSEGLFRSFSNRRQVAAYAGLAPTPWRSGSVAHEQGVSKAGNPRLRTTMIQLAWLWVRHQPRSILTLWFHQRTQLNGGRVRKVLIVALARKLLIAFWKYVTAGVVLEGAETTSA

SEQ ID NO: 151101 - protein, 423 aa, unidentified
MKNSAAKKIRQVPVGYLVVGVDPHKKRHAAVAITQDFAVHGKFKFNNSREGFMMTLERVRVEMTKTGSRGVIFAIETGGHYWRNLAYFLDEVGIPFHFINQFTLKRRREGKDLNRRKNDYRDSEVAAQLLCTGEFTETQLQQGVYAELRAAHNAYRRLVKERTRIVNLVKSLLDGLFPEFTQVFKNPCGLTALSVLSTCPIPGVIAGMTEKEFTSTIKASHHGRLMRKKLYALRYAAETSIGVKAGAQPVSTELLFLVEKLQLIRCHIRSIDGTLVKLVDRTEEGKYLLSIIGINYISVAGLLAELGSFKCYQNAKQLIKMAGTNPTESESGGKRRSHTPMSRQGRPTLRYCAWTAVIPMLRFNPDFRAWAKELRERPVHKNPLVKREVVGAALNRLLRLAFALVRKQTFYQTPHPVQVTSRR

SEQ ID NO: 151102 - protein, 357 aa, unidentified
MKKLFIGIDFSKEKLDATIILACGMNEIGSREYGCFPNNNTGYRKLCNWVKTNAWDTISGEWLFCGEDTGSCSIGLSKWLYGKGYDIWIENAYNIKHSSGIQRVKNDKADSAIIAEYAWRQQDKAVPFEPLNESLAQLREVFLYRHKLVGQRVAMELRKEDKSQSNKSKAISFINRKSKHLIDEINKAIAECDKMIDNIIEADEELKENYAIITSIKGVARQNATCMLIYTNNFKKFGYDPRKIACYYGVAPFGKQSGTSVNTPAHTSHFANKLIKSLLGQAAHIAKIYNPEIRDYYQRLINKGKKPQVALNNVKNKLIRIIVALVRKKVPYDQNTYKYYEEREVVKGKKNEKLIYC

SEQ ID NO: 151103 - protein, 438 aa, unidentified
MWWNSQWLLSIFQKGALPVKVVYQTCCGVDVHKSFLVATIIKTTSGVQPSYQKKRFSTFNNSILEFKKWLLDNSCRDVCMESTGKYWVPVFNLLEDEINVTIANPKWVKAVKGNKDDTKDSKWIGDLFRLGLVPGSYIPCKPIRILREFTRYRYKLTSCKSSEKNRFQNALTICNVALDSVVSDIFGKSATSVIDYLLEQSDNSINHEEISSRLLRSLKKKSESVIESIEGYQMTDAQKYRMRLVHAHIDYITSMISDIDSMIDSLVEPYENAVQLLCTIPGIDRSSAITIISEIGTDMTQFSNPKRLCCWAGLTPGNNESAGKKKSVRITRAGVYLKPALVQVAHAAVKSNKSPYYKAKYERIMKRRGKKRAIIAVARMILTAVYHMLSTGEAWNPTDLYKIDMPEPLKNKQKEKAVKQAMKLLIAEGIIKEPLLAS

SEQ ID NO: 151104 - protein, 347 aa, unidentified
MTIMVDTQRALTGGVDTHADVHVAAVIDPQGGLLGVESFATDLAGYKQLSGWMCAFGKIGLVGVEGTGSYGAGLSRHLHQVGLVVVEVDRPNRQERARQGKSDSLDAIEAARAAQSGRAFGVAKTRDGNVEAIRALMVARRSARESRTKAMNQIRQLVYTAPDELRERFVGVPSWRLAEGVAILRVHADRDPVRMATKSALGTLGRRAVALGEEGKRLDVLIARLVDKVAPELVELVGVGPDTAALLLIAAGDNPSRLRSEATWAKLCGVAPLEASSGKVTRHRLNRGGDRQANSALWRIVLTRMSCHEPTKVYVARRTAEGKSKREIMRILKRYVAREVYHYLPRE

SEQ ID NO: 151105 - protein, 335 aa, unidentified
MYYSIGLDISKELISVHIPITKVNLEIDNNCKAMKALYSKLKKLYKKELDNLVFIYEPTGSYSFALTKFCNEKNIKCFIINPKQFSNHAKALGERNKTDEIDAQVLSKTLHLAKENEIKVPYINKEAENIKELMGYYKFISKQKTKTINHLEALTAKDGNTYTINELKKSIRELKKKEVAVLIKIKEIINNNEHLKDAFNNIQTLSGIGEVGAIVLLHLFIKYPNANQRQITALAGVDPIVKQSGTSVHKKEKISKAGSKIYRGTLFMGVMTAIRFDENFKSFFERLKANGKHTTLAQIAVMRKMIVIAHSLYKNNTQYDVEVYKKACGVQQRVS

SEQ ID NO: 151106 - protein, 420 aa, unidentified
MKLNKSKKVKVINEKTMIAALDIGKTAHYAYFRAPNGKDIKPFPFYNFRKSFNEFWTKLCQFKREHKLEDIVVGFESSGPYAEPLFHYLRKKPVKLVQINPMHSKRLKELTGNSPNKTDKKDPRVIADVISLGHALTLVVPEGPAAQLRRLSQARERALKRRTAAINQLQDLIFIIFPEFLAIMKNISTKTASYLIKKYPTPESIVALGIESLAMIVKRVSRGKLKQQRAEEVFNAAQNSIGISEGKRSILLEVEYLISQIRADSRFIVNLEEQMENYLEKIPYSCSLLSIKGIGTVTVAGLIGEVGDFKKFNTISEIMKLAGLDLYEISSGKHKGQRRISKRGRSLMRKLLYFAAINAVKSTGIMHEPYQQMLSRGMPKMKALVAISRKLLRIAFALARDDTVYVENYSNIHDRFKLAA

SEQ ID NO: 151107 - protein, 347 aa, unidentified
MGTPSYEGKQVYMGLDVHREFFVASCICDGVVVKRCRMPGTAEAVISLVSKEFSEASVCAAYEAGYSGFWLYRKLVAAGVGCIVVHAASIEVSSRDTVKTDKRDSLKIAQQLAAGRLRGVRVPSEEEEQRRLLTRTREQLMNKKRRVMVQIRMRLHYFGLFPASIQRRIKLQDVDEILVSLDGELQRTIGMLRDEWIELVKRVKEIDRLLVEQAKEDPLDAVYRSVPGVGPLISRILSAELGDMSQFRNERALFSFTGLTPSEYSSGGHICRGHISRQGNTRLRHMLVEASWKAVRKDPVIREYYIKLSERIGKRKAIVAVARKLAGRIRAALRKHEHYTLDYRAAA

SEQ ID NO: 151108 - protein, 421 aa, unidentified
MRSMMHPIACGIDVHKKKLACTIIIAESMQVEPVYHHRKFSTHNYDLVKLVDWLDHYDCHCVCMESTGKYWIPVFNYLEDRDFNIVITHPKYVKSPKGKKTDFLDSIHIAELFQMGEVQPSYIPNKEFRQLRDLSRYRYKITNFISSEKNRVQNCQTVSNISLASVVSDPFGVSASAVFSELLTSSDVDEVHIRSLLRGSLKKKSEEILNSIRGFHLDDDQSYKSLLSLGHMQFLEDMKSALSSEIDKRTSKYHVYIDLATQLPGIGHLSATTLVSETGVDMSVFSDAEHFTSWIGLTPTNNASADKKKSVRISHAGTYLKPMLIQCALAALKDKKCPYFKIKYDKIKKRRGHKRAIIAIARMMAVCLYHMFKDLKDFHPSDYEELMNPIPPKPRKQDIQDALELLQSVGEYKITPILVAS

SEQ ID NO: 151109 - protein, 344 aa, unidentified
MSKHTVRGGDVAGLLKLFAQLREKAKGRTGKVFPLIVIQEAGLDGFWIDRVLQNEGIESHVVDPASIATSRRRRRAKTDGIDGEALVRALLAYKRGEPRVCSMVRVPTPEDEDQRRLCRERKVLTMERVQHVNRIKGLLFSQGVSGYEPLRRDRRERLDALQTGDGRPLPPHLKAQVRRELDRLELLLAQIKAAEAERDALLAAEQTKAPVPPAMLLGVRGIGPEFAAVLWSEGLSRPFENRRQVAAYAGLAPTPWQSGSVDREQGILQSGNPRLRTTMIQLAWLWLRHQPDSALALWFHDRVKRNGGRLRKTTIVALARKLLVALWKYVTAGVVIEGAVMKTA

SEQ ID NO: 151110 - protein, 369 aa, unidentified
MEWEFRQLSVGVDLHKTQFTVCALAPSGEVVLEQEFETTSEGYDAFALWAHGVERERDLETVLAVEATGNARYFKNFMEAEGFAVKVINTARFKVIVKSAVKNDRRDAHTIAMFLMKDFIPESRLCSQHDEDLRRLLKLRSMLVRQSVAIKNNIHGMLLSYGIRTTAAQFQSKKGRLQLARELEAHKVFNAEAAGILNLMLETLEKTRGMILETEGKLEAYVEGDEEVELLQTIPGVGKIMSAQIAAWTGDIRNFESYKHYAAYCGLVPYLKESNETTCLGHITKRGPAELRTAFVQVVMGLLRLKSRNPAWRIYSRYGLLKKEKGSGRAIVACSRKMSRIIYCMLRDKKPFDSSLMDEKPARTKSACA

SEQ ID NO: 151111 - protein, 333 aa, unidentified
MKRASNSAAANSNPTVAALGLDVAKGKVDACLRLPDGRYVEACFVSSRQGHEACLAWLEKHGRGLTIKAGLESTGPYSRPWCDLLYAADHHVSLLNPARPKAYGQACGTRNKTDRVDARLLADFVAERRPDAWAPRAPEREELKELTRRREDLLALLQAEKNRLESVRSKTVMESVNRSIKALQKELERVETELDQLMGRHAGLQKEEKLLCTIKGIGKVTARKILAELPPATCFEDARQAAAYAGLSPRRHESGKSVRKRGRLCKVGNAGLRKALYMPAMVAIKHNPTIKAFAQRLRENGKCENVIIGAAMRKLLHIAYGVLKHQKPFNSEL

SEQ ID NO: 151112 - protein, 348 aa, unidentified
MKVTRIGLDLAKQVFQVHGVDEKGRKVLSRQLKRGQVEGFFRGLEGCLVGMEACAGAHHWARVLGGLGHEVRLMAPQHVKPYVKGSKNDANDAEGICEAVGRPNMRFVAMKTVEQQRLQSLHRVRRTLVRNRTAAVNEIRGLLGEYGIVVRVGVAKLRGRLPELLEEADNGLPMSFRPVLAGLKEDLEYLDRRIGEMDAAMVRAAQEDERARALMKLRGVGPVTATALVAGLGDGKQFRRGRQASAWVGIVPGQHSSGGKERLLGISKRGDEYLRTLLIHGARSVVNSCKGKTDRLSRWVQEVCARRNKNVAAVALANKTMRMAWALLSRGEQYDPDYEMNRRAAQAA

SEQ ID NO: 151113 - protein, 402 aa, unidentified
MNAVGIDVSKGKSMVAIMRPFGEIVSTPFEIKHTTSDINSLVELISSVEGESRIVMEHTGRYYEVLAHQLSEANLFVSTINPKLIKDFDNDSLRKVKSDKADAVKIARYALDKWQNLKQYSVMDELRNQLKTMNRQFGFYMKHKTAMKNNLIGILDQTYPGVNTYFDSPVRSDGNQKWVDFASTYWHVDCVRKMSLNAFIDHYQNWCKRKKYNFSQSKAEEIYGKAKELVPVLPKDAITKLIIKQAVDQLNSVSTTVESLRTLMNETASKLPEYPVVMAMKGVGTSLGPQLMAEIGDVSRFTHKSAITAFAGVDPGVNESGTYEQKSVPTSKRGSADLRKTLFQVMDVLIKTHPQDDPVYQFLDKKRTQGKPYYVYMTAGANKFLRIYYGRVKEYLSSLPES

SEQ ID NO: 151114 - protein, 440 aa, unidentified
MEQQVRVFVGIDWATEAHQVCAIDASGKELGNRSFAHDGEGLSSMARWLIGLADGAAETVHVGIETPHGAVVELLIERQCAVHSLNPKQMDRFRDRFTVAGAKDDRLDAKVVADALRTDVHCFRRLRLDEPLVVEIREWSRMADELGHELNRLANRMREQLRRYFPQVLDVESDVTRPWLLDLWELVPTPDAAKRARKSQVAALLKRSRIRRIDAEQVLELLRRAPLSVAAGTTEAAVAHIRQLVGRLRLAEKQHRECASKLDELAAALSDKAPAEDTEPGQKNEQHDVTILRSLPGVGRIVLGVLLAEAWWALRARDYHALRALAGAAPITRQSGKRRIVVMRQACSLRLRTAVYHWARVAAQCDPASKAAYAELRKRGHSHGRALRTIADRLLAVACAMLRGGQTYDPQRRKASARLMEPESPSADAGSGKKSVGDAR

SEQ ID NO: 151115 - protein, 422 aa, unidentified
MEEVDELDQVVERVAGLDLAKAGLVACVRVPSGRPGRRCQEVRSYATFTRSLLELADWLRAERVTRVAMEATSDYWKPVFYLLEAEGFECWLVNPKHFKHLPGRPKTDKLDAVWLAKVTERGMCRPSLVHPAPVRHLRDLTRYRRTLIRDRTRERQRLEKLLEDAQIKLSSVISDILGVSGRAMLEALIAGNRSPRALAQMARTNMRSKIPVLEEALTGHFTDHHAFLARTMIDRIDGITADIEKVDTAVEEAMAPFRAEAERLDEITGIGIVSAQELIGEIGVDMTRFPTPAHLCSWGKRAPIVKQSAAKTRNGSAGKGNPWLAGTLGEIVVGVSRTHTFLGERYRRIARRRGKKRAIVAVSNSILTIVWHLLSDPDIRYQDLGEDHYLSRHTTQRRRRTLIRDLEHLTGQKVTLQPHTAA

SEQ ID NO: 151116 - protein, 412 aa, unidentified
MSVVQFTQVLSRGCGMDIHKKVVIATVQGEGICKETRSFDTFTRSLTQLREWLVSLGITHVAMESTGVYWKPIYNVFEGFIPHIWIVNARHIKNVPGHKTDKNDSEWICQLLMAGLLKPSFIPPKAQRELRDLTRYRRKLIQSVSANKNRIIRILEDGNIKLSSVLSDTSGATAVKLIDMLCDGKQITLSDIESVRHGRCQHTKEEMLEACTGCLDEHKVYMLGKIRECNASLKEDILDFDKRIKDVLSSYHDAIERMCEIPGIQNRVCEDLVAEIGLDMSKFPTSAHLCSWAGMCPGNNESAGKKKSGRTNHGDKQVKETLVEAAWAASRAKGTFFMERFNRLAPRKGSKKALIAVGHSLLKCIHYVLSTGGHYKELGDNYVPNKKEQKRKEYLKKELQKLGYSVKLSKED

SEQ ID NO: 151117 - protein, 427 aa, unidentified
MKSNTQNAKIEAITEKTLVLGIDVGSETHYARAFDYRGIEYSKKPFKFSNTEAGFVTFKEWILDLKERHEKDKVVPGMEPTGHYWFNLGKFLQDNEMKPVLVNPHHVKKSKELDDNNPTKNDRKDPKVIAGLVREGRYMIPYLPDGVYADLRTASNIRFQLQAELTRIQNRISRWFNIYFPEYKTVYGKPDAKSGMLILKAAPLPEDILTLGIDGVNQIWRDAKLRAVGKARAKTLIEAAGHSVGSKEGAVSARMEIRMLLEDYESRNMRLQEVMVLIEELVKGIPMAEKLLEIKGVGIRTVSGFLAEVGDISRFNNPKELQKLAGLALVENSSGKHKGETTISRRGRKRLRYLLFEVAMSLVAKNPEFRELHNYYTTRRLNPLKKMQSLMAIAAKLIRVFYAMLTKGVDYDPKKMASDIKRPAVYL

SEQ ID NO: 151118 - protein, 280 aa, unidentified
MQFIGVDLHANKFTCCCRDENSVPDGKKATQTFGLSPHGIAQFYPTLTEETHVPIEAAITTFCFSRPMQPSARQVIAANTYELKQISLARKNTDKADADILCRILKTQVLSGEKTISPAVVPPIAIQELRGLFSACRFYEKQTAQIKNRMRSLLKERLHGFTQEEIFTQKQRKAVRALEKGSAMSFQTNELFDGLEFMEARVEPLRGKIMEHAEPFTKEIQILTRMKGIGVFIAIAIIADIINVERFGNSKAFASYLRSAPKAANSNTAVNVGRTSKKGR

SEQ ID NO: 151119 - protein, 466 aa, unidentified
MRSWRSRPTSGVQSLNKRTHGYEVHRIALTENRDGSGPAGLLYVGIDVGRRTHMVAAIPRQRMEDDSWERVPARRFTAMGTGYRELSDWLTGSGLEPHQIQVGLEPTGGWYAQTAAAWLVRGGYQLSWLQNAALHERRQLMIGKQTKTDALDARLIARLLYERDCLGTQRGFLHRAPRSVDALRLLVRNRTKLVEAQTRYRLQLTAIVDVLFPELKAFFTSSITGKVVRHLLEEYATPQRVAAAAPADLYEVVVRKGRARRLAKRMDELQELAAGSAGLVDDIGPILNAQEWLLSQLNVVDAQIANVEDALAQTLAGWPSEELTILSSLPGMTVLRQAVLISAMGDIASFQSDRQLRKLLGWYPEAKESGTSVFKHRLGQSGNRLARREIWLWVMFLISPKSQATPFRTFYQRLRNRGVPGRTAIGHVAGKLISVMFHCLRSGQPYDLQRHAFDLGRGDAKSVFEA

SEQ ID NO: 151120 - protein, 317 aa, unidentified
MVTVGFDVGKKELVGARIDRSVQMKELYRIENSPEAINKFLDQLSAKFRHLQIGSEATAEYHRILALSCLDRNIKFRLLNPIITKQFTRATVRKKKSDPSDALVIAKLCSQGEGRIVVKDDFNSNKAILRTSVKLSNMAQSLALIKKRVEDNYPDEVTSIKIIDKCLSTIQEGIKELRTEGKSENKDLLQLLQSLPGIGVTTANTLIAEIIDINRFKDSKSLTAYSGLDPRIRQSGLTLQKNTKLTKRGSPYLRRAIFTAASIGLRHDPELQTYYLKKRAEGKSYKEAVIATSKKLINRIYSVWKRKKPYVKVQVLT

SEQ ID NO: 151121 - protein, 344 aa, unidentified
MKNQYDYVIGVDISKDSFHARILSTKSDSVVPVDKISKFDNSIKGFTSFFNWLSKCNICFQSSLIVMEATGIYWEKLAFYCVQKENINVSIVNPKQIKHFAHTNLRRSKTDPLDADLIAHFGIALKPNVWNPPHPILEELKQISRERDSFVKMLTEEYNRLHAIKSSSNPSSVVLKSHRAVIKYLEKQIKKLEKVISDKLDNDPGLKEKKELLKTVPGIGDISAAVLLTETNEFSTFTDPKQLAAYAGISPCQHESGSSVNKKPRISKVGNSKIRSTLYLSSLSCIRSNSPFKKFYERLREKGKPAKVALIAVARKLLHIIFAIIKSGKAFDPCYISKKPAFAT

SEQ ID NO: 151122 - protein, 346 aa, unidentified
MMIIGCDFHPSWQQVSWVDSETGDCGERKLVHVTGDAQQFYQQLVAPVLIGMEATGNSQWFIELVEDLGHAIWIGDAAQIRASYVRKQKTDKRDAAHILKLMMENRFPRLWTPDREQRDLRQLVLHRHKLVILRARVKNELQHLSLNKGVQRKHRLWSQAGQKMLRELPLKPWAACRREDLLGLLSMLNQQIGKLDDAVQTAAEEDPQAKLLMTQPGVGPNTALAYVLTIGEVSRFQRGKQVASYLGLIPREESSGGRQKLGSITKQGNRMLRSLLVEAAQVAVQHDPGLRQQYLHRCHQKPKGVAKVATARKLAVRLYWMLRTQVVYPEIVRIESSSGLPLVGAS

SEQ ID NO: 151123 - protein, 361 aa, unidentified
MAETMTVAGFDVHARSVCGAALHLPTGELVRIRFGGGVEGPIAWLRSLPGPVRACYEAGPTGFGLYRAAVAAGIDMRVVAPSKTPRGPGDRVKTDRKDAELLARLLLSGSLKPITVPSPRVEAARELVRAHDAVRRDLMTARHRVSKQLLRHGRVYPKPSTWTQEHRRWLTRQCFEEAMTELAFADAIAAVEGLTARKTALAERISRLAADGEWWPTVARLRCFRGIDTLTAFALHLELAADWQRFERPKALGSWLGLTPSLAQSGESSHSGSITKTGSTLARRLLVEAAWHYARAPRIGATLQNRQAGQPDHILQIANRAQLRLHRVYHQMRGRGKPHNVTTIAIARELACFLWAAATTD

SEQ ID NO: 151124 - protein, 539 aa, unidentified
MGRQESPAAPTGNNFAAARLATVLHWLFDTMVPYPFLRFSRPGGSGLLTISRRNDFELMDRPVGRGWALNDSSRGRCSIARRLFYIGVAGSSPREAQNTKQHTDTMHPSPPYDLVLGLDRADKKADLCLIDTRTGARRAAVLDTAPEALWEWLAQLRQQHPDARVGLCLEQPAVHLIAFLEAYAWITLHPINPITLQKYREAFVTSRAKDDTQDADYLADLLLTHADKLPVWAPQDPATRAVQQLVVHRRAVVDERTGLSNRLIALLKQYFPQALTLCGEDLWRPLATAFLLKWPSLAAVRKAKPATLKQFYYLQGSRSAKLLEERLALIEKAVPVTDETGVIGSFVLRVQLLARELQAVQRTIGEFDRQIAAAYAAHPDHAIFASLPGAGPVLGPRLLASLGADRERFADSAAQLQRYTGVAPVTKRSGGSCHIHRRYCCPKFHRQSFHEYAKESVLWSRWAGAFYLQQRSKGAPHHTAVRALAFKWQRVIWRCWQDRQPYDDARYEAALRKAGSPVVALFDRVELGKSPWKNPAKKS

SEQ ID NO: 151125 - protein, 420 aa, unidentified
MKDVNTKKLKRVNGRTLIVAVDIGKVKHTGYWRFPDGTEIKPFEFFNNGRGFQEFWDGVCQAKKGHTIEEVVIGFESTGSYAEPLLHFLRKREVRLVQVNPFHTKRLKELQGNSPNKTDHKDPKVIADIMELGHALTVIIPEGKAAELRRLTNAREKSIQRRTVLLNQLQDMVFMIFPEFLEVMKGVKSRSAQYLLMDCPTPEKVMGKGLEELTQVLKKVSKGKLGKDRAQALYEVARNSVGIQEGQRSIVLEIMEYISSIEAIDRFIGRVEKEMIVHLKEIPYSRWILSIKGIGPVTAAGLIGEIGDFGQFGTISEILKYAGMDLFEISSGKRQGRRRISKRGRALLRKLLFYASLNTVRKGGAMQEYYRRYLERGMPGKKALVAVARKLLRIIFALVRDHKVFVQSGLATNYQFKEAA

SEQ ID NO: 151126 - protein, 399 aa, unidentified
MHHRRLVGIDLGIISAHTVRVLAGDGSVVCRRKAVPTVASLTETEQAALQGAAPTTRLEVVLEPTGPSWLPIAVFFTSRGHTVYRVSSARAHDLRRVLSRQAKSNGIDADTLARLPLVDPAGLHPLALPSAERAALDRRVRACDRLTQQGACHKRRIKDLVRQLLPTSPLAGELGMADLAVLERFGADPHALLAAGPGRLARLIGKASGGQHGQQRATHWLAAARAALQLYGDHPAVAFTDLAAEVHTEVRLLRATQAELAAHATQREYCYRWVDPLGLARSLPGLAEVGGPALVATMGDAHRFAAASRFRSFTGLAPRASETGNTDRKGQPISKAGNRLLRTTWSAPPTPPAARTPSSPASTTCRWSSAARTTSARSAWSPPTWPSGPGRSWTGGCRM

SEQ ID NO: 151127 - protein, 360 aa, unidentified
MIYVGLDVHKKYSKAGLFDPATGELSDLGDVPSRPEAIGQTLSGIAAPKCVVLEAGRSSHFLAAALEPLAEEVWMVDPTQVRALQKQSAKTDVRDAAAMAFWAAKGALKPIWRPAAATLDLRELTRGKTALVRLATRVRCMLRSLLARHGYECPARDLLSQKAQTWLEGVTLGGYAGLMLATLRGLLPILQQAADQFEEPIEKAAAQHMGAQRLMTIPGIGPFLGLALAVEIDDVHRFASPRKLRGYSGLDPRVIQSGPRDSRGPLTKRGNRWLRYAAVLASQRIAAMRQADPKLKRSFLNVAFRRGRNPAKVHCARLLLDLCHHLLLHEEAYQPPPTTDSHYQPAGRRASHVGHAPSTA

SEQ ID NO: 151128 - protein, 368 aa, unidentified
MKHVTTYVGIDAHKKDLFIAMLIGNQLRPVTWQLPNEPNAVRRLVRKLEREAPGTIRAFYEAGPCGYALQRRLTTPRVSCDVVAPALIPRKPGERVKTNRRDARKLAELGRASLLTAVRPPTADEEAVRDLCRARDDAREDLQRCRHRLGKLLLRRGLHYAGRNWTRAHRQWVDSLEWTHAAERVVVDDYLLAIDHTEARLLELDARLAEIAERDPYRQPVGWLRCFRGIDTLSAMLILAELHDFRRFASPRALMAYLGLGPGEASSGEKHRRGRITRTGNALVRRVLVETAWHYQHRPGIGVALARRRKGQPGRVIAIADKAQQRLCRRFRKLAAEHKPAPKIAVAIARELTGFLWAALQREPAAVP

SEQ ID NO: 151129 - protein, 317 aa, unidentified
MNDQKSITTYFGLDVSKEKLDISGTETNKIKHQVFENTSKGINALVRFIKPLTPSAQIILEPTGGYERNVVDALGKAQIAFSKINPYQVRSFATGIGKLAKTDEIDALVLAKFGEHCTPKPTQPLDTAQEELRDLYDRCQQLTNAKTRESNRLETASPKMKSHLKKSLKFIESQIEEINKMIDEYFSAHPEAQKKINRLQEVTGIGKKTATVFAAYMPELGQISNKAAAALVGVAPFNRDSGKTRAYRCIQRGRHQIRHVLYMAAVCASQKNHILKKFYDHLIAQGKPAKVALVAVMRKLVMLLNHMIKNPNFSLAN

SEQ ID NO: 151130 - protein, 344 aa, unidentified
MGSMVAIGVDTHKAEHVAVACDRLGRELGSMALPATSAGYLALAGWARALGEPVFAVEGGGSYGAGLVRFLAAAGEAVYECERPARRGRGRGKSDLIDAALAARRLLAGEGLSRPRGGGRREDLRLLLLERRGLVRAETATRNQLQAVLVAAPAALRERLAGRRGERLLAACARLRARAEQERVSVGVLGRLGRRAQALAAELAARDRELEALVEALVPELLAECGVGPVCAAQLVVSCGDPARMRSEASFAALAGTSPVEASSGPRRRHRLNRGGDRQLNRALHVIALARVRHHRETAAYYRRLLASGKSTREARRCVKRALARYFYHRLRELPQLAQAADPT

SEQ ID NO: 151131 - protein, 321 aa, unidentified
MEYYVGIDVSLELSSVCVVDGRGKIVKEAKVASEPEALVCFFNELGFPVDRIGFEAGPLSQWLHAGLTQAGFETVLLETRHVKAALSAMTVKTDRKDACGLAQLLRMGWFQPVHAKSIGSQEIRALLVARKQLLGRLLDVELSIRGILRGFGLKVGQVTRKTFEARIRELVTGHTTLERIAEAMLSARATLQAQYAKLHKAVLAIVGEDAVCRRLITVPGVGPVVAVTFKSAVDDPSRIAKSKAVGALFGLTPKKYQSGEKDVTGGITRTGDEMVRTALYEAANVLLSRITRFSKLKRWGMDVAKRRGSKRAKSPWLARSE

SEQ ID NO: 151132 - protein, 312 aa, unidentified
MENKVYVGIDVSKDKVDLAVRPGGQAWSEGQDDASLEQLVRKLKDIAPTLVVLEATGGYEARVAALLATAGIAVSVVNPRQVRDFAKSTGKLAKTDRLDAHAIAHFAEAIQPQVRYVSDEEGREMAALMSRRRQLIEMMVAEKNRMHTCLPKLLPNLKAHIAWLEQCLEELDKDIQDKIQNSAIWHEKDDLLRTVPGVGKVVSFSLLAGLPELGVLDRKKIAALVGVAPLNRDSGKYSGRRGIWGGRGDVRSALYMATLSATRCNPVIKAYYQGMVARGKLKAVALTAAMHKLLTILNAMVAQSKPWCPHIA

SEQ ID NO: 151133 - protein, 370 aa, unidentified
MAKRSMFVGMDVHKESIDVSLAEEGRGGDVRHYGVIPGDLESVAKVLRALRAPTRRLRFVYEAGPCGFGLHRYLTGQGEDCVVVNPSSMPKRSGDRIKTDRRDGDALARLHRAGELTAIYIPTPADEALRDLVRAREDAVGLSTQAKHRLKAFLLRQGRRYPGRAGWTRPYRRWLADLSFPLAPHHITLQEYRDTIDETERRVERLTDQLRQLTPAWRWAPVVDALQALRGVSFVTAVGLVTEVGDIRRFTHPRELMAYLGLVPSEYSSGPSVRRGGITKAGNPHARRLLAEAAWAYQGVPRIGRQMLYRQEALPKTVCDIAWKAQLRLTSRFRKLVARGKAKPKVATAIARELTGFIWAIAREVPPPPA

SEQ ID NO: 151134 - protein, 310 aa, unidentified
MTILCGVDVSKSWLDAWIEPAGHQRFANTAEGVAELGAWCRAHHAALVVMEASGGLEQPAYLALWQAGQPCAVANARSVRKFAEAMGYLEKTDRIDAMMIARFADAKRMVATPPSSADQQRLVALAVRLRQVTADLGVQKQRLHSVRDPFARQSIQEAIAFFTTQASQLASEIAALIEVDPLWVALDRTFRSIKGVADRTVAYILAELPEIGTISNRAVTKLVGLAPLPDDSGQRRGRRSIRGGRAGLRSILFLVADVARRYDQSLTDFRERLLARGLSKMEVRIALARKLLVRLNAKARDVRAELAHAL

SEQ ID NO: 151135 - protein, 367 aa, unidentified
MQISVLGIDLGKNSCSVVGLDEAGRIVLRRRLSRARVIELSSQLPACVMAMEACCGAHHLGRILAAHGHRVRLMSPEYVQPYVKAQKNDERDAEAIAEAATRPTMRFVDLKSEEQLDMQSLHRARSRLVGERTALINQLRAVLLERGIIVAQGRRRLAQYLSQALDGDEAAPLQLSSRIRLLIEDMRAQWRELDRRVAEFDGEFVAAARSEAAARRLSTIPGIGAINATALVAAVGDARSFARARDLAAWLGLVPRQATTGGRPRLLGITKRGNKYLRTLLIHGARAALPSLLTVESPLGNWLRGLSGRAHRNTVIVALASKLARIAWAVLRSSTSYNAAPLGGALSLHRAGGPQQLALRNNRICEW

SEQ ID NO: 151136 - protein, 469 aa, unidentified
MAADKGTADGTGVPGHGGNGAEVAEDSTQVVEYAAAIDVAKGSGMVCIRVPGSRAGRRRQVTWPVQATFTAVTALMDHLRAEGIQRLVLESTSDYWRIWYYLAEAAGLEVWLVNARDVKHLPGRGKSDKADCVWLCKLNERGMLRRSFVPPQPVRDLRALTRTRARLAQDQARHQARVEKILEDALLKISVVISDLFGASGRRFLDALVAGERSPAALAALGDKRLKATRAELAEALTGRFRDIHATEIAVHLRLIDAINTEVTRLDEEIGRQLALVPGTAPACAACGLAGGGHAPGCADDGAEVLGLAGRLDEITGVGAVNGRAIIAELGTDPSQFPTPGHAAGWARLTPRSQQSGQTARPGRTGKGNRYLRGALGQAAMTAAKTDTRLGAMYRRIARKRGKQKAIVAVSRVICEIAWILICDPSARYTELGPDYYQPLSPARQTRAKIREIERLNPGKKVILADAAT

SEQ ID NO: 151137 - protein, 418 aa, unidentified
MDLDEVVYRVACGLDVHFTFLTACLLTTGPMGKPKVEEHRFPTNQKGLNSLREWLTENGCEAVGMEATGVYWMPVYAALEGACTLVVGNPQHMKNARGHKTDRMDARWIAGQVRHGRIRSSFVPPPEFREARRLARCRRQLVEARTSIRNEIQRLLAEVGITLAGVVSDVFGTSGTSILNALSEGKCVRDELSIHLYSSLRKKDKMASIAAALEAPLPEVSRQLLAIHLRRIEALDGNIDEVEALLFRQLAPHAGKLDLLQRIPGISKLSAHIILAEIGVDMTVWPTAKKFSAWAGVAPGCNQTGGRSKRAAVRKGNPYLCTILMECAGGAVQKLDSHLRAKHRKLCAQLGSKKKARMAIAHKLALIIYKVLGENVEYKDPEPKQPSEKAKRRILQTRVKDLERLGYRVVLEPIEAVS

SEQ ID NO: 151138 - protein, 396 aa, unidentified
MDTAVYLGVDIGKSGHYALAVDAAGKPIYQTAVPNDEAALHKLVKWAHQHQAGLVVDQPGGAAAVLLRLCWQSEVRIGYLHGLAMARARDFYAGESKTDPKDAFVLADVARAHPNRIVWLESSSEALAHLELLCGYDADLRGDANRLTNRLRALLVTHWPALERAFGERLDSHGVLAVLQQYPSGPAVRDAGVEQLTAALKAQRVRRPEAFAKQLHQAALAQTVTITGSQTAARLISELAGQLTAILARRAELEKDIERGFFALPEAAILRSLPGIGPRLGARIAVEIGSICRFRTPGHLASYAGLGPTPWKSGTSINANMPSRFGNHRLKNALFLAAFASLRHEPSRTYYDRKRAQGKRHNQAVLCLARRRVDVLHAMLSRGEPYRAPTPLPAAA

SEQ ID NO: 151139 - protein, 387 aa, unidentified
MPQSNDLSRSLAALDQDSTLIAVIEMSQSSWLVGAIVPGISRQPLKKLVVEERELLRLLHRWRDEATKAGRMINRITVAYEAGRDGFWLARWLQGQGIEAHVIHPTSVAVSREHRRAKTDRLDTELLKRAFLGWLLGERGHCSMAMIPTPQEEDAKRPNREREGLVGERTRIVNRMKSTLARLGIRDFKPTLRKAPERLTGLLTPEGVPLPPNTLAELRRDMARLRFVMGQIREIEAARLQQLEQHPEQGPHAMVRLLAQVIGVGIETADMLVHEILSRTLRDRKAVARYAGLTGAPDESGARRREKGLARAGNARVRRGMIQLAWRFLMFQKDSALAQWYRARTADARGTTRKTMIVALARKLLIALWQLVTTGEIPQGVVLRAAA

SEQ ID NO: 151140 - protein, 370 aa, unidentified
MSIKRILVNTIDTDLEYEVIGIDLAKNCVSAILLTTDGEIFGIDRLDYQELEKSAQELSPTIFAMEPCTEMNYMVQKLEDWGHHCIVISGKNVKDYVESHFSNQKTDLNDAQALAFLTKDTQLRTVKAKDPEQLKYASLTTLREQYVKQYRQTMVSLKGICQVWGLSISKGISGKARLKDMIENHAAFPAELRTALVGMVAHAQAVQKDLKSVTKILEELAKKDKACQLIQTVPGLGTICSCRLRATVGDIQRFKHPKDFPAYYGLVPRSMATGHNEKKGKITHRGDKTMRSLMVQGAGIVINQATKGNLHSKQLTKWILKKQKEKIPWGKLVCAVAAKLLRIVRAILISGKPYNPKIAGVAKCSLPKAS

SEQ ID NO: 151141 - protein, 431 aa, unidentified
MAVRVEGADVLGVGIDWAEEFHDIALGTAEEGVIEQFRIEHGPAGVARLIGRCLRLEPDPAEVRVVLETRHGLLVEALLDAGFTVVPVNPDLVARRRGPARKKDDAEDARICCLLALDRHAALKRLVGHGQLGGELRAIARDDERAARDQRRLLNRLRADLQSTYPAALTLAGADLGAPTVLRLLDRWPTQHQLAAATRDELVAFARAGRHGWPDRFADRVTAALATPTLPVRDYLVRAKTAGIRLAAVQLLALHEARRGWERRMGEILLGAPRTGRDHTAKDPDPGNAFPGGEIYLSFPGLGDCLAARVAGEIGEHHTQFDTPNALQCYAGRAPVTRRSGKNDFVVARRLAHNRYLGDAVHQWAFCSLNLSPWAREFYDSKIAAGKSHHNALRALGNRWLEILWHCLNKGVLYDEATHQANRNHALGRAA

SEQ ID NO: 151142 - protein, 350 aa, unidentified
MTIRNKPRPAAVFGVDIGKNLFHVVGLDPTGAPIQKATFRRETLLQFFERASPTLVGMEACPGSQWLARRISALGHTVRIIPAQFVKPYVKSNKNDIIDAAAIAEAATRPTMRFVEIKTTEQVDLQALHRIRDRMIAHRTRLINQMRAFCLEYGIATHQGAGKFKVDLPKILADEGNDLTSAMRRILTMSFDELAELEGRIEHLNREIEGIAARSDTARRLMSIPGIGPLGATALLASAGSAKQFKKARDMAAWLGLVPREYSTGGKTTLLGIGKRGNKYLRRMLIHGARSCVNHLDRTRDRLGNWLDGLQSRMHKNKVTVALASKIARIAWVIMTRPGSTYDRRDPALS

SEQ ID NO: 151143 - protein, 346 aa, unidentified
MKKIFIGIDFSKEKFDVVIIMAENLEEKAPRVHEQFANDKAGYRKFLKWVKENSHGVDLSLWLFCGENTGDYSKGLSNFLYGKGCDMWLENAKCIKDSCGIRRLKSDRADAAMIAEYAMRNHDRMTLYEPLSGPLAQLRELFLFRQMNVRKRSGYIVRKGEKGRTLDSSPAKSFMARKCKHMIAELDKTIKECDKMIEALIASDRDLQETYEIVTSVPGIGAQNAVCMMVYTDNFKRFDCNPRKIACYYGIAPFGHDSGTSVHCDPHVHYMANKTIKGILTQAALCAINHCPPVAHYYARLIERGKKTMVALNNVKNKLVRIVTALVRTKQKFIPEYELAKRYAMD

SEQ ID NO: 151144 - protein, 452 aa, unidentified
MERSKSGALSMVNPRAAAIDIGSTMHMAAINPNADDDPVRAFGTFTGDLQDMARWFKAYGVTTVAMESTGVYWIPAYEVLEGHGFEVILVNARYAKNVPGRKTDVSDAAWLQRLHSYGLLRGSFRPEAGVATMRAYLRQRERLIEYAASHIQHMQKALMEMNVQLHHVVSDITGVTGMRIIRAIVNGERTPSTLAQMRDVRCHATIETICAALSGNWRDEHIFALGQSLALFDFYQTKILECDRKLEVALKALEIDNGHDVRHLPKVRTKGRQVNTPDFEVRSALYRVLGVDLTQIHGIGPSLALKLVGECGTDLAAWPSSKHFTSWLCLAPGNKISGGKLLSSKTRRSSSRAAALLRLAATTIGRSDTALGAFYRRLSARAGKAKAVTATARKIAVLFYNSLRYGMAYHDPGASQYEERYRSRVIGNLQRRAKAFGFILHEMPAEPDTAVS

SEQ ID NO: 151145 - protein, 355 aa, unidentified
MNSEKYIGLDVHQATISVAVLDSTGKLVMESILETKAATILEFFTGLRGTLSVTFEEGTWAAWLYDVLHPHVANLIVCNPRKNALVKDGSKSDRIDAHKLAELLYLNKLSSVYHGENGVRMLRELARSYLTMVKDLTRVMSRLKAVYRSWAIPCTGRDVYYTRHRAEWLGKIKEAGVRRRAERLYQQLDMLQHLRQQARRELLAESRKHPITARLRQVPSLGPIRSALAVALIQTPHRFRTKRQLWAYSGLALETRTSAEYRYVKGQLHRAKKQISIRGLNKDHNHDLKGLFKGAATRASVLPGPFQDFYQRSLAKGIKPTMARLTLARKIAAITLTLWKKGENFDADKLKSQAA

SEQ ID NO: 151146 - protein, 344 aa, unidentified
MEGYVGRQFVGMDLHRRRSVLVRMTPEGDVLERVRISNDVDRLAAVIARAGDSPEVVLEATYGWYWAVDALRDQGAVVHLAHPLGVKAFEYRRVKNDERDATDLADLLRMGRLPEAWIAPPATRELRELVRHRAKLVGLRSHCKAEVHAVLAKCGIQVLMSDLFGVKGTELLDRLDLPAPYAARIRSQRRIMELLDFEIDHFAGMVRGRLAADPGYVAVQTIPGIGPTLGALLVAEIGDVTRFTRPEQLTCWAGLTPKHHESDTHVHRGRITKQGSRLVRWAVVESVQILPKTTRVGQIRDQVAARRGRNIGVVAAARRQLEYVYYALRDHHVRAPLRSHATAA

SEQ ID NO: 151147 - protein, 387 aa, unidentified
MPRFKGSAQAAVDYNSTIIGALELSEKKWVLAVQLPGVERHSRHVLDACGDKLVSFVERLKARCVGSGRKIARVILTHEAGRDGFWLARFLARHSIEVQVMQPSSLPVDRRARRAKTDMIDVEMLLRTLMAWLRGEPRVCSMVPIPNEADEEARRAHREREDLTRERRSIVNKIDGILATLGIKGYKALRRDRREQLSCARQPGGDPIPQKARARIERLLDRLDLVLKLIDQVESARDAVLKKDAPADEAERMIRSLTDLRSIGPDFATLLVREAFVRQFRSRRALAGYVGLGGTPFSSGGSDREQGIGKDGNRRVRAAMVELAWMWLRWQPDSALSVWFRGRVGAMGGRIRKIMIVALARKLLVALWRYVTDGVIPDGAILKVAVA

SEQ ID NO: 151148 - protein, 405 aa, unidentified
MRTKRYTRFCGIDVAKRKHVACVIDRDDEFVVRSQSFNNDAEGYQGLLNRLQDAGRRNQLLVGMEATGHYWYALRDFLAGKGYEVVVLNPIQTKQQARKDIRVRKTDKIEARHIARLLRNGEHKVTLVPDDFAMTCRQLTRLRYKLIGQGADIKRLLWSRLHPVWPEYETLLANPFCKTGRQLLMTAPTPVDVLTLGQQAITELIRKTSRGKYGLAKAEEIWQAAQQTVGTRRGLDGARVSIRSLLTQIEALTPIRKRLEADIEALANRLPGYIFTLPGANRLSAVSLFGETDPIETFSSGAQLVAFAGLDTTVFQTGQYEAPRRRITKRGSPFLRHTLWRMAHRACYQEGDLRDYWLRRRGDGLHHLAAVTATAIKLCHVTWRILTDHRDYLPKAPTARKSRRC

SEQ ID NO: 151149 - protein, 354 aa, unidentified
MSQIPNTAIAVIGIDIGKNSFHAVGHDARGAIVLRQKWSRGQVEARLANIPPCLVGMEACVGAHHLSRKLASLGHDARLMPAKYVRPYSKGQKNDFNDAEAIAEAVQRPTMKFVATKTAEQLDLQALHRVRERLVSQRTGIINQIRAFMLERGIAVRQGISFLRTELTTILATRTDALSPRMLRVIEELAGDWRRLDQRIDGLTGEIEALARQDQACSRLMTVPGIGPIISSAMVAAIGTGDVFSKGRDFGAWLGLVPKQISTGDRTILGKISRRGNRYLRVLFVQAAWVVLVRIKDWERYGLKSWIEAAKRRLHHNVLAIALANKLARIAWAVLAKGRAFELTRTDDAGVRPA

SEQ ID NO: 151150 - protein, 341 aa, unidentified
MATYYVGLDVHWKHTTICILDQDGKRVKRLTIRGAWSKIADELKRLPGKVSVCYEASSGYGYLHELFSKVVDRVVVAHPGQLRLIFRSKKKNDRADAEKLAKLLFLGEVPPVYVPSQDVRAWRQLVEYRRRLIAKRTRTKNALRAILRTVGLRPPREFGLWSRLGAAWLAQVELPKLTALQRDLLLEELAMFERQVGRAEKELERYSRDNPAVALLRTIPGVGIRTAEAVVAYLDDPSRFASSKQLGSYFGLVPSQDQSGSTNRLGHITRCGPSVVRHLLSEAAWRSVQCSPTIGRYHERIQQGNPERKKIAIIATAHYLIRVMYAMLRDNQPWEEQVAAA

SEQ ID NO: 151151 - protein, 413 aa, unidentified
METIINSLWRSHMISVGIDVSKEKSTVCILKPYGEIISKPFEIRHVEQELKELSVMLLRLEDEVRVVMEATGIYHLPVLSYLQEKGLFVAVINPYEMKEYRCQGLRRVKTDKQDAITISNYGLDHWYRLKNYEADTGIYEELKLLGRQYRHYMRMRIDSVLELTHLLDYTMPGIKSLLKGWNETNGKDKLSDFVEEYWHYDTITQKSEKQFIDSYVKWAEKKGYHQSQDKASKIYALALEGIPTLSSSTPSVKMLVQEAVRVLREVNNTLMIILTQMQELAKSLPEYPVVRAMGGVGNVLAPKLIAEIGDVRRFHNGKALIAHAGIDAPPYQSGQFTGTERKISKRGSAYLRKIGYEVMRCLKTHTAPKDDAVYQFILKKEREGKSKRSAKIAGLNKFLRIYYARVMEVYTQK

SEQ ID NO: 151152 - protein, 338 aa, unidentified
MRMLAAFGTADCSQGSVREGDRPDVYVKEHSMSFIGCDVAKREIAVYLDGALSLVPNEREALRACLKRMRIGSAVVMESTGRYHLALAREAFDLGRSVYVVNPKEFSFYRRSLEFRHTNDASAAELLARFGEKEHDRLTTWQPPLPHIESARALLRHRAVLVRARATIAQSLDGVSHEASENAVQALSQAVDDADREIAELLREEPGYTRLQSIPGVGPVTAAAMTCAFAKGAFRSADSFVAFVGLDLKFADSGTKTGDRRLSKRGDPFLRCLLYTAACAGAHSEVWLPFYQRHLDRGLEKVQALIALARKIARTIWSMLAHQTDFQPKRALGVDMKP

SEQ ID NO: 151153 - protein, 350 aa, unidentified
MVVVGADVHKRTHTFVAIDEVGRKVGEKVVAATSSGHAEAVMWARERFGAQVVWAIEDCRHLSARLERDLLTAGQQVVRVPPKLMAQTRASARTRGKSDPIDALAVARAFLREPDLPIASHDEVSRELKLLVDRREVLVAQRTAAINRLLWRVHELDPERAPKPRSLDLAKHRRILGDWLDTVAGLVAELARDELADITRLTETINGLAKRIGDRVRQVAPVLLALPGCGELTAAKLIGEAAGVSRFKSEAAFARHAGVAPIPVWSGNTAGRVRMTRSGNRQLNAALHRIAVTQIRLDGLGGTYYRKRLNTGASNPEALRSLKRRLARIVFHHLHIDHHNRNQPCQPAAA

SEQ ID NO: 151154 - protein, 223 aa, unidentified
MNYNTVYVGMDVHKETFSLCCYTNEKEQAEYSQKVDAHYSKVLNYLEAMRFRYGDDVMFICGYEAGCLGFALYHQLTSHNVKCIILAPTTMSKPTGKKKVKTDKRDAALIARCLAHHDYSPVHIPTEQDEQLTDKLERLDQRIEELASKEDYQENVNYLSCFLGVKTQTALSTLVEVGDFKRFASAQQFASYLGLTPGEDSSGEDLNRLGITKAGNSHIRNFC

SEQ ID NO: 151155 - protein, 343 aa, unidentified
MEKTAGVETFVGIDAHSRQCSIKAITRQGDALWERDVPTRAAALKQALRGLPRPVWAMVESSYLAPLMREMVEASVDRLVVCETRENRWISRSEDKGDQVDADRLSRLLRMGEFKAVHVPAGLGRDRQEVLRLYQKAQGDVVRTKNRIKGKYREHGVALAGTRVYTEGHRRECLALVKRPQARFLLEVLYRKLEADEASCQALRKRLVELMRRDPGYASLQEIPGLGKVLSAVVAVVIDDPNRFANKRKLWNYSGLGIRTRWSGDPSQARVSGNKSGNRLLKYAVLSAATAALRGNNRFSRHYRKMIGEGADPAMAKRTVARKILATALVLLKTGAAYEDNLV

SEQ ID NO: 151156 - protein, 424 aa, unidentified
MSQRTLTERVTMVKRGMLLVGIDLGRDDNVAVVLTDTAQRLARFKFPHTRAGYDFFYRQLEQLRAQHPGQGLLIGMEPTNHYWKWLAADLEAHQPPLPYRLVNAYTVRKHREGEQLERAKDDLRDAFQIAELLRTGKFTETQLLQGAYAQLRQYATLHMRLQHDAAQLQNVLTTAVDLGFPELRQVFKDLSGETALALLRTASCASTIRKLPLSEFLAQVREQLQGHRLSVSKLKQAHALAQTSVGLVDTGALHFTIQVYSEQLAHAHESLKRTETALVELFLTMPEAPYLLSLPAISPLFAALLLAELGDPQAFSCASQWVKLAGVQPVADSSGHRTRSPTPMSHKGRSRLRELLYWLVLRWVQHDPYFKAEYERLQTRPQHPLTKMEALGALMNKALHVIWAVLRDRTFYDPQYRQAGAGAL

SEQ ID NO: 151157 - protein, 318 aa, unidentified
MDQPIIGIDVAKATLDAYVHPSGARFPVTNDDDGIRTLLERLKAFPEVTVVLEATGGLEFRVAAALASAGFRVAIVNPRHVRDFARAIGRLAKTDPIDAEILALFGDRVRPEPRPIPDSALRSLEAHVARRRQIVDMITAETNRLGQAIDADIKKQIKRHITWLEHELKSVDTDLGDAVRQSPIWRAKDQLIQSTPGVGRVTSFTLLAQFPQLGTLRGKQASSLVGLAPFNVDSGTLRGRRHIWGGRASIRSVLYMATLSAVRYNPVLAEFYQRLLRAGKSKKVALVACARKLLVILNAMLRDNRPWSPAPLDPQHGC

SEQ ID NO: 151158 - protein, 309 aa, unidentified
MGLQIGIDVSKHQLDWAGSQDETVRHVRNDRRSVGQLVRRLAGLAPERIIVESTGGYERLVVDRLAEAGLPVVVVNPYRVRRLGEGLGILAKTDPIDAHLLALYGEHVRPTIRPIPQGETRKLADLVARRRQLIAMIVAEKSRLDTAPRHVRSDVAGVVKHLENRIARLDRRIDAALAADPERAELFELLQSVPGVGPSVARTLVVDLPELGHLDRREIASLVGVAPFAKDSGLKRGQRKVRGGRASVRTALYLAAMSASRFNPVLRELYERLRKAGKAPKLAFIAVARKMLTMLNAIARERTFWEPNT

SEQ ID NO: 151159 - protein, 338 aa, unidentified
MKRQYVGIDLHRRSTTIYRMSPTGKMLDCVKIPSQPAELIQAMAAAGETPEVVLESTYGWYWAADLLAELGANVHLAHPLGNNWGNRRVKNDERDARDLAAMLRLGRLAEGWIAPPETRELRELVRYRFRVVHHRTSAKAQIHGVMAKNGILPVKKELWGPSGTAQLDALELPAAYALRLKSLRHLIEIYDREVEMLDRTIHRQLKDDPGYKAIQQIEGVGRVLGAIFVAEIGDVSRFESPDKLCSWAGVTPKHRESDDKVHRGPITKQGSPLVRWAAIEAISKYRGGPKLREDYHRIAERRGKFKARVAMARRLLVLVYYGLRDHEIRCLHHGEEAA

SEQ ID NO: 151160 - protein, 320 aa, unidentified
MRNAVGLDISQNTFDAAAIVNGQCKQALFDNSINGFESFKAWLDGFDCELHICMEATGNYFEDVADYIGQFYTVSVINPYKISEYGKSRFHRTKTDKQDARLIAEYCHTAMLKDLPARQKISIGHYRLKRLLALYEQLKTQKTAQKNRLKVAKDDFVRKIHQAQIQELDQHIQQVEAEIQAITNSNQDLKAVSDRLQTIPAIGKLTAAILTNYLLSGDFKTANQFTAFAGLNPQQKESGTSVKGRSSMTRYGNRRLKSALFMPAMVALNRNYFPDFVKRLKAKNKPKMLILGAIMRKLLVVAYYVYKTQKPYNPERYKLT

SEQ ID NO: 151161 - protein, 321 aa, unidentified
MANVSKIIGIDISKEKFDVCFSFQPCGYSSRTYTYDNEGIRSFLKDVPQDCVCIMEATGVYHLRLAYCLNKHGVFVSVVNPLSVKNFSRAVMCRTKTDKADARQLVDYARRMELTEWKPTPDNYIRIQQIYRTIELFVTNITQIENQLEAISHSPVRDKMLCSMLKRDIKLIQKRIERLEKQIEELIAKDDKYVVSRIRTIPGVGNKTSIALLTATKGMHGFDNYRQVSSYFGLCPRIYDSGKSVHGKAHICKMGMGWIRKLLYMCAISASKYNKACKNLYSRLTEKGKPIKVIMIAVANKLIKQIFAIIKNNKEYSEFYA

SEQ ID NO: 151162 - protein, 413 aa, unidentified
MDTIYQRVAGLDLHKKSIYAEVRCFSPDGKLRTELRTFGTMTCDLLELSDWLASFGVTHVAMEATGVLWKPVWNILEGRFELLLANPRELKQVPGRKSDVKDCQWIAQLMQHGLLRSSFVPDRPQRELRDLTRHRAQLQDEHTRVANRIHKLLEDANIKLGSVASDILGASGRDILERLAAGEQDAAQLAQLARGRMKPKIPQLELALQGKFRDHHRFMLKQLLGHLDHLDEQIGQFSHRIEEIMAPLLDAELQEKLDAVPGIDRVTIENVVAEIGTDMNQFPTDAHLASWAGVCPGNEESAGKRKRSKTTQGNRWLRRALVEAAWAAQNTRDSYLCARYRRLIGRRGKKRALLAVGHTLLVIIYHILKNRVDYQDLGPDYFLRLEPARQKRYLVKRLEQLGYEVQLQPKQAA

SEQ ID NO: 151163 - protein, 293 aa, unidentified
MFGIGIDVSKATLDVAVHGEQFRQFSNDKRGFVRLIRWLKTWPIKQVVLEASGGYERAALDVLHAAGLPMVRINPARARRFAQGTGRAAKTDRLDATVLAQMAHLLPLTRYVPPAPWQQRLAEFAQCRRQLVQMRVSEMQRLRRLVDPDLIAMKQRHIAQLSDDLKQLDKAIAEQLEGQPGWKNIGALKGVGPILISTLACELPELGSLGSKAIASLVGLAPMNRESGTWQGQRRISGGRAVVREALYMAALTANPVRAKAARVLRWPEGQGQSEQGGARGGHAQNAGDPQRP

SEQ ID NO: 151164 - protein, 370 aa, unidentified
MIQKLLKTAEKNQLTQLKIGMESTDQYSWHLAHYLKNQLQGYAPLFQTAVFMLNARKVARFKKGYDTLPKNDRMDAWVIADHLRFGRLPYDMQETLQHEALRRLTRTRFHMMHEIARNKTYMLNQLFLKFSGLRQDNPFSNTFGTTSLAVIEELDPEMIAEMPLEELVEFLQEKGKNRFAEPEEIAKYLQKLARNSFRLDKTMADPVNLSLSVILSTIRHMEAQVKRLDKEIERMMKGFTQTLTSVKGIGPVYAAGLLSEIGDIKRFDDHHALAKYAGLVWSQYQSGEYESENTHRVRTGNKYLRYYLVQAADAIRKHDTEYKAFYQKKFNEVTKNQHKRALVLTARKLVRLVHSLLRTNQLYIPAERRE

SEQ ID NO: 151165 - protein, 361 aa, unidentified
MTGHKYVGMDVHSATSVIEVMNQQGKAVAKAIIQTRAGEIKDYFRGLSGTVHVTFEEGVHASWLYDLIKPLVAEVIVCNPRHNRLVQSGNKADRIDAHKLAELLRLGSLKPVYHKDCGTRKLREAVRSYQSLTSDSLRTMNRIKAIFRGRGIDCRGTEVYQPAHRENWINRLEDTSAVTRLELLYQQLDLITPLRVQACKEMVTQARSQPAYKVLRRIKTLGPVRVAQIIGVVRSPFRFRTKRQFWAYCGLAVVTTSSADYVIRDGKVCRSSKPAATRGLNENYNRTLKNVFKGAALLGTATEPFKQYYEGLRTRGLRPELARLTLARKVAAITLVTWKKQAVFDPSEVIKASGPLESDPM

SEQ ID NO: 151166 - protein, 322 aa, unidentified
MTTIVGIDIAKAKFDVALLRQDGRIEYGQFDNSSKGFKQFNTWLDKRRTDTLHACMEATGLYSNDLALFLHQQGYTVSVVNPARISAYGDSLLRRNKTDKLDAALIADFCRTQTPPDPVWLELQSLARHLEDLEQTRQQQRNRLGSGVRTPLVREQLQRHIALLDEQIDQLKRHIQNHLDQHPDLRQQKELLTSIPGIGDLTAGKLLAQIPNIRAFDDPRQLVAFAGLNPTQRQSGKSRRSKTPISKQGHAALRAALFMPAISAKRHNPILHAFAQRLTDRGLCGLEVVVAVMRKLLHLIFGILKSGQPFDPHFRSHLNFSV

SEQ ID NO: 151167 - protein, 344 aa, unidentified
MKHYAGLDVSVKETSVCIVDETGKICRELKVPSHPEDLLRVLQDPAWNLERVGLEAGPLSQWLFNGLAEAGLPVVCIETRHARAYLKAQINKTDRNDARGIAQMMRVNLFRPVHVKTLASQKQRALLTARKLLQSKAIAIDNDIRGLLRNFGLKVGVVSAAKFEQRIQELVEGLPDLSELMEVLLEARRKLRELFTKLHKKLLTIVREDAVCQRLMSVPGVGAVTALAYRATIDVPARFRNSKAVGAVLGLTPAQHQSGESKRVGQISLCGDGMMRALLYEGAQTVLTRSTKWSWLKAWAMKIAKNRGLKRAIVALARRLAVIMHRIWVDGTEFRWTKEEAAPA

SEQ ID NO: 151168 - protein, 384 aa, unidentified
MRESSTLYVDLDVHKDSIDIATADTGRDGEVRHVCSIGGDLLGLDKALHRLISRGHRLHVVYEAGPCGFVIWRHLSTQGIDCEVVAPSSIPKRSGDRVKTDRRDAMMLARLSRSGNLTAVRVPGAADEAVRDLARSREDAVRECRNARHRLKALLLRSGIAYAGKSAWTAAHLRWLATLKMEHAAQHIALQEYLHAVTEATTRIGRLEQAMRDTLPEWGLAPLVQALQAMRGVQLVAAMTLVAKLQDFLRFDNPRQLMAYVGLVPGEHSSGPKRRQGSITKAGNSAARRMLVEVAWHYQHSPRVSPIIAKRHDPLPKAVTDIAWKAQLRLNAKFKRLVARRVMKNKAVVAVARELTGFVWAIGREVQTSGWQGIKLEPAGNAAD

SEQ ID NO: 151169 - protein, 319 aa, unidentified
MAQNGLVVAGIDVAKDKVDVCIRSLSLKRTFANTVEDRRALNGWLRRNKVGKAVMEASGGYEREWAKALRHAGIEVRIVDPKRVRSFARSAGRLAKNDTIDAEMIAWFAETFDQARGQVYDAAREQLHQMVHARHALKDMQSRLTSQGEHALPAAVQRVHVRISKTIAVELVKIEAEITALIQATPHFAELAEIIESVPGLARITSAALIADMPELGQINDKIAAALLGVAPYDDDSGRRRGERRIKGGRRRTRNIFHMATLGAATRHNPVLKAFYDRLVAKGKLKKVALTACMRKLIVILNTMIARGEKWDANRYAVS

SEQ ID NO: 151170 - protein, 358 aa, unidentified
MAETAVTTQVVVLGVDTHQQTHHAAIVATDGRPLADREFPTTTAGYTQLWQWACGFGRVEDAAVESSASYGAGLTRMLTAEGVRVIEVNTPDLPRRYAHGKTDQLDAYAAAMAVITGRATAVAKDTRGAVESVRMLTVARASAVEEATRIGNQIRDLCTTAPAEYADQARQARTIAKRAAFIKDLPVPAEKADLSGPAAAFVRAARSLLDRHRLAQQQARSLARELTRLLSKLVPTLLSRPQIGPITAARLVITAGDNVERMGTEARFAKLVGAAPLPASSGKTSRHRLNRGGDRQANSALHMIAVGRMKSHAPTRAYVERRSAEHKTKKDILRCLKRYIAREVFRDLTTDLGALDKL

SEQ ID NO: 151171 - protein, 310 aa, unidentified
MGPMFVGIDVSKDRLDVHLRPSGEAFAVTRDGKGIDELIAALAKAVPRLIVIEATGGFETVVAAGLAAAGLPLAVVNPRQIRDFARATGRLAKTDALDAAVIAHFAEAVQPEPRALPDEAACELGELVARRRQLIEMILAENNRRRSLTRAKPIKTVDRVLATLQKQLTAIESDIDDSIRGSPVWRETEDLLLSVPGIGPRIARTLIAELPELGNLNRHQIAALVGVAPFNRDSGQMRGRRTIAGGRTVVRNALYMSILVAIRRKLPLAATYQRLRHAGKPAKVAIVACMRKLLVILNAILRDQKPWASA

SEQ ID NO: 151172 - protein, 346 aa, unidentified
MEQSIRCGVDIAKLVFQIHGVNAKSGETVMVKKLARNEMLRYFANKPPMLIGIEACGGAHYWARELTKLGHTVKLMTPQYVAPYRRGGKNDANDAEAICEALARPNMRFVAVKSESQQAVLVMHRMRDQWVRERTSLMNQIRSYLHEFGIVINQGRAALAKTLPLVAEQEALPLLFRQSIADLADRLTDLEMRIDTLNKRIESWSKQDSSAQALLALCGVGSITASAAVATAGDVSVFKNGRQFAAWLGLVPKQNSSGGKTQLGAITKRGDRYLRTLLVQGARTVMLAASRAQKSTQTTPMFEWIYKLQERRPNNVVAVAIAAKQARMLWAIMAKQQRQEVLGLAI

SEQ ID NO: 151173 - protein, 475 aa, unidentified
MTPRKNKNLCQPPSPEPLRLTNPHAAGIDIHAAIHWVAVPPHDAPPPSPDHPRNVPAHVRSFGACTVDLIRLADWLTQCGVTTVVMESTGIYWIPLFELLESRGFEVFLVDPRQSRHAPGRPKSDVLDCQWLQRLHSYGLLTASFRPADQVVVVRSYLRQRQMLIRYAGQHVQHMQKALEQMNVKLAEVVSDITGVTGMAIIQAILRGERDPRALAKLRNEHCKRTEADIARALQGNWRAEHLFALQQAVELQEFYRGQLRACDAQLQAQLATFADRSQGQPRPPRQQRRALQKRANDPKFEVGSALYRMAGVDLTVLEGIDETTALVILSEIGLDVSRFPTAKHFTSWLGLCPQHQGSAGKIRSRRVRRGCNRAGRALRLAVQACHRAKHALGAFYRRIQARAGAPKAIVATARKLAERVYRLLKYGADYVRQEVEAYEAAYQQRVVKGLTRRAAELGYKLERIVATEGTGAGT

SEQ ID NO: 151174 - protein, 356 aa, unidentified
MSYDVKYIGMDVHKEAIVIAVLNEGGKLVMESVIETKASSILQFLHGLRGELHVTWEEGTWAAWLYDLLQPQVQHIVVCNPRRNALLKEGSKSDKVDARKLAELLRTGMLRPVYHGENGLRTLRELGRSYQTISKDLTRVMNRLKALYRGWGIPCAGTQVYAARCREEWLNKIPQAGLRRRAELLYQQLDGLQALRREVRPEFLAESRKHKAAKLLRQIPCIGPIRAARLLALMQTPHRFRSKRQLWTYSGLGIETHDSAQYRFVSGQLQRAKKPQQIRGLNRNHNHEMKEIFKSAATRASCGRGPFHDFYAGLLAKGMKPEMARLTLARKIAAITLTLWKKEERFDIELLKTQAA

SEQ ID NO: 151175 - protein, 343 aa, unidentified
MEEGGTDYQLYVGIDVAAETFVSAWLAPGGKPGTPVTGEQTPAGFAALQRCLRATAVSPAATLVVLEATGNYWVALAVALHEAGYRVAVVNPRQAHHFAKAQLRRAKTDALDARDLARLAAALRPTPWTPPPAVYHEVRQRLVARDGLLAMRTQARNQRHALLQWPVVVAAVCQHLDELIADLDRRVAALEAEITAVLTGSVWAESLLCLTSAPGIGLVTASWLLVGTLNFALCAGPEALTAYAGLAPVPRESGRSIRGRAQIGHDGNARLRTALYMATLSAARYNPAIRVFYQRLRAAGKPEKVARCAAARKLLHQAWALGSRLQRFDPRYQQHEVGQSLAA

SEQ ID NO: 151176 - protein, 406 aa, unidentified
MGGAEDIFHPSSRFTPMEHPMQKFDDLSRSLTTLEPGGTLIAVIEMSLSSWLVAGIVPGVERQRLKKLAIDESALLKLLHRWREEAKKAGHRIERIAVAFEAGRDGFWLARWLKTRGIEAYVIHASSIAVSREHRRAKTDRLDTELLKRSFLGWLRGERDHCKMVEIPTIKDEDAKRPNRERDNLIGERSRIINRMKAALVRLGIRGFNPKLKRAAARLDGLRTPEGEPIPPNTQAELRRDMERRRLVSDHIRQIEEARLERIEQAPSNGPHAIVRLLARVMGVGIETADMLVHEVLSRNMRDRRAVARYAGLTGSPDESGRKRREKGLARSGNARVRRGMIQLAWRFLLHQKDSALTKWFRSRTENARGTRKPMIVALARKLLIALWRLVREGVVPDGVVMRPAQ

SEQ ID NO: 151177 - protein, 414 aa, unidentified
MERVYERCAALDVHKAQVTACVHVPDRQGKRAELCAEFSTMTAELLALRDWLKGLGVTHVAMEATGVYWKPVYYLLEDDFELLLVNAQHVKNVPGRKTDVQDAQWLCQLLEHGLVRSSYVPPKPIRELRDLTRYRKSLVWERAREANRLHKVLEDANIKLDCVASRPFGASGKAMLKELCEGNNDPVALADLAKGKLRAKLPALHQALEGRFRDHHALLVGHLLAHIEYLDQTIAELSEEIEERMRPFEHKRELLCTIPGVAERTAEVIIAELGPDMERFPTHRHAASWAAICHGHHESAGKRHSGRTRKGDSWLRTALIEAAQSAAGRTKDTYLNSQYLRVKRRRGHKKAIVAVAHSILVAAYYILRDQVPYEELGGDYFVRREDQDRLTRRLVRQLERLGQHVTLEPALEAR

SEQ ID NO: 151178 - protein, 344 aa, unidentified
MDHTTYGLDIAKRVMQVYWVDHQTGEIGRRTLKRSHLMAFFGRRPGARIVLEACGSGHYWARQLSKLGHEVRLMHAKRVRPFVRGNKDDAADAQAIWTAAQQPEVRWVPLKSEEQQAVLSLHRVRSQWIKVRAQMVNAMRGLLYEFGLVLPGGRLAGLKAISAARAEIDRALPALMRPVLDGQLQALREVDARIEALQAQLQGLESQLPTARRVRQIPGVGFLGSTALAGVLGADARGYRSGREFAACLGLVPTHRGTGGKVTVGSLSRRGDPYLRTLLIHGARSVILHARQRSPWLEAMLARRPKNVVAVALANKMARTAWALVAHGRDYQAGGFAQANPSLH

SEQ ID NO: 151179 - protein, 387 aa, unidentified
MPHANDLSRCLAPLEQDCTIVAVIEMSQSSWLVAGIVPGIERQPLKKLEPDKSALLRLLHRWRNEAATAGRTVTRIAVAFEAGRDGFWLSRWLRAHGAEAYVIHPASVAVAREHRRAKTDRLDTGLLKRAFLGWLRGERGHCSMAAVPTLAEEDAKRPSRERESLVGERTRIVNRMKGTLTRLGIRSFKPTLRNAIECLPTLRTAEGAPLPPNTLAELRRDMARLRFVSDQIKEIEDTRLERLEQQPQEGPHAMVRLLARVIGVGIETADLLVHEVLARQLRDRRAVARYAGLTGSPDESGARRREKGLAKAGSARVRRSMIELAWRFLRFQPDSGLARWYRARTADARGGTRKTMIVALARKLLVALWRFVTTGETPEGIVLRSAA

SEQ ID NO: 151180 - protein, 321 aa, unidentified
MQPVTVTVYAGVDVAKASLQLHLQGRQTEFPNQPAGLAKLRQQLQTIPHVHVVCEATGGYERPLVQALHQAQIPVSVANPAQVRAAAQAQGQRAKTDRIDAALLTDFGQRFQPKPTPPTSPSQDQLVALTQWLTQLIQAQALARTQAEHHAAAFVCKQHAKLMAHFESQIEAVEKQIRALVAQDALLQQRVECLDQITGVGPRTAWLVLAHMPELGQVNRQQVAALAGLAPWTRESGTMKGLRCIGGGRPEVRLALYMAALSAARFNPVLQPFYQRLRGKEKPGKVALTAVMRRLLVYMNHQLKALAAAQAATKIDHAKTP

SEQ ID NO: 151181 - protein, 586 aa, unidentified
MSTTTGLDRIGVGIDTARYGHRVSFLRPDRQPAAKPLTVLENCAGYQALKERLVQLHENYPHAHFHVRIDAAGQYAVNLEQFLRGLDLPMTLSIGEPKRNKDYQKAHFPKRTTDDTESQAMARFAVVEQPDATPAPSAAMILLREVAGRLEAQVKQTTQATNRLHNLLARTFPELATLTDDIARGWVLRLLDKYPTADRIAQAHLASLEKIPHLSGDQARALHQAAGQSVASLRDSVAESLVSALVAQVRHCQNAEKAMRKLLTKAFADLPASPHVQVLTIPGIGEATAAALVAKIVDIKRFATPDRLVGYFGVFPEENTSGVDRHGNPLPPGTLSMSRKGNDLVRGYLWNAARAAIRHNPAIRVLYRRLRAKGTRGDVAMGHCMGKLLHLVFAVWKTNRPFDAKHFAWEEPGANPLPTTTAGDRDARVTPAAHTDAVGHKRDVPAEKVVTTAGSHGEPAPAPVKLATPPNSVARPRVDFAFLRQQVTMKQVLEHLGLLGQLRGPGDQRRGPCPVHSHPADRDRTFSVHLGKNAFQCFQADCGVKGNVLDLWAAIHRLPLYDAALHLAETFQVPRNREEEPVKGTR

SEQ ID NO: 151182 - protein, 355 aa, unidentified
MNNAAGRKKKQIMIGLDLGDRRHTYCVLDEAGKIAREGSLCNTREQLAAMARSYPGATAAMEAGTHSPWVSRFLQELGLRVIVANPRKTRAIYQNERKSDRRDAIMLARLARMDPTLLHPLEHVSQDAQQDMLQLKLRDSLVRARVALINAVRFSLKSLGYPVSNPSSARFHKLVLNEVPESIREMIAHNVAAIAELTERIKALDTSISCLAAERYPQTMFLQQVSGVGPITSLYFVLKVGDPGRFQRARDIGAFLGLCPKRDQSGEIDKELRISKCGDRYLRRLLVSAAQYILGPFGPDSALREHGLRLAKEGTAKAKKRAVVAVARKLAVLLLTLWKSREPYESFPPRDLNRF

SEQ ID NO: 151183 - protein, 359 aa, unidentified
MEAQVKKIDFTDQNIYVGFDAHLNSWKVTVMAEDIVYKTFTQPPRPEVLYNYLKKNFPGGNYHSAYEAGFCGYWIHDKLVSFGIKSIVVNPADIPTTDKERVQKEDKRDSRKIARSLSTGTLMPIYVPSIHTQRDRSLLRTRAMLVKDLARYKNRIKSFLYFYGISIDDSFSNPQSHWSNRFMSWLESIEIDGGSGKEALNVLILECKNLRASILKVTRQIRRLSQTATYREQVILLKSVPGIGLLTAMIILTELESIDRFNNLDKMCGYIGLIPSTKSSGEKERTGDITPRGHSVLRTAIIESSWTAIRNDPSLMKSYLTYCKRMESNKAIIKIAKKLLSRIRFVLSNKKQYVCLMGN

SEQ ID NO: 151184 - protein, 349 aa, unidentified
MSQSLNSAIAVIGIDIGKNSFHVVGLDDRGAIVLRQKWSRGQIEVRLANMPPCLIGMEACVGAHHLSRKLQAFGHEARLMPAKYVRPYSKGQKNDFRDAEAIAEAVQRPTMKFVATKTAEQLDLQAMHRVRERLVSQRTGIINQIRAFLLERGMPVRQGLRFLRAELPRILATPPDVLSARMVQVISDLAEDWRRLDHRIDDLSNEITLLARQDTGCERLMSVPGIGSIISSAMVAAIGTGDAFTKGRDFAAWLGLVPKQISTGDRTILGKISKRGNRYLRVLFVQAAWVVLIKPMSWERHGLKHWIEAAKKRLHRNVLAIALANKLARIAWAVLAGSRTFEANKLQAA

SEQ ID NO: 151185 - protein, 341 aa, unidentified
MVADRVVTHLCVGIDIAAATFTAAWARTDTPVTPAHTYHQTPHGFAALQTQLAATTVAPADTLVVMEATGSYWIALAVILHTAGYRVSVINPLQAHHFAKAQLRRAKTDALDAQDLCHLAAVLRPPVWTPPPAVYHEVRQRLLVRDGLVTMRQQARNQHHALIQWPVVVVGARDPLTAVIADMDARIAVLEGEIAQVLAASDWAESLGYLTSAPGIGLLTAAWLLVATVNFTLGETPEAVVAYAGLAPVPRQSGTSVRGKAQIGHSGNARLRTAAYLATLSAVRYNPMLRVFYQRLREAGKPVKVARCAAARKLLHLAWALVTKRQPFDPLRHLPPPLAAA

SEQ ID NO: 151186 - protein, 318 aa, unidentified
MEPNVFVGIDVSSKNLDVATRPTNKQSRVSNDAEGHLAIVETLRGQAALVVLEPTGGYERPLVAALVEAKIPVAVVNARQIRDFAKSRGKLAKTDKIDAQMIAAFAEANRPEPREIPDEETRGLEALVNRRRQLVDMRATEMARRELAPKIVRPSIETVIKLLSDQIDDVDSDLGTRIQKNSVWRAKDAVLQSPKGVGPVLSRTLIALVPELGTLDRKQIAALVGIAPFNNDSGSKRGRRSCWGGRAPVRSVLYMATVVAAIHNPVIAATYKRLIGRGKLAKVALVACMRKLLTMLNAMVRDGRPWSPPLLAEGAKSA

SEQ ID NO: 151187 - protein, 347 aa, unidentified
MAFIGVDLHSKSFTICRLEADGSESFATFQLSAQDIERFCLSLDGDDQLAVEATGNTAWFCGEVRACVGRVVVVNPRQFQVIRKSVNKTDRNDARALAFFLSRDMLPQTRLRSSAEAELSSLVQTRDVLVKQRTMLFNKIHALFARHGQKLKKEGLASRKRLSELDLAGFTELERVELRALRDQALSLSETIGALDKAIEGAARTFDGFEGLTSIKGIGPRSAAVLLAGIGNVEDFENADKLAAYVGIVPRVSQSADSDNRGRITKRGDKLLRTTLVQCALVAIRYSGYLNAFYRRIKERRGAGKAIIATARKLLSIVYDTLKNGWVFEDFPAFKIKQNQCAAGQSS

SEQ ID NO: 151188 - protein, 349 aa, unidentified
MNNISSISVDLAKHKFQVHGYGPRDEKRFAKTLSRQAFEALLRTLSPCTVAMEACGSAHYWSRLCQTLGHRPLQVPTQFVKPFRMGHKTDPNDADAIHEASQRPKLRPVPVKTLAQQDAMLVHLTRERLKKQRLELTNEVRGVLRERGIVFSSSFKALREGVRRLLAQPLGGESTACLAEWLVEALAEWEALDTRFAAAERTLQQTFKHSESAQQLAALPGVGVLTATAVLARAPDARHFPSTRHYAASFGLTPRVDASADRCHLGGITKCGDGYCRSLLIHGGRSVVRSVLKKHAAGHPLNRFEHWVLGVHQRRGFNKAAVAVANKNARIIGAMLASGQPYRPATQAA

SEQ ID NO: 151189 - protein, 345 aa, unidentified
MEITTIGVDLAKNVFQVHGVDERGKTVLRKQLRREQMVEFFAKLPPCLVGMEACGSAHHWARVLQGQGHTVRVIASQFVKPYVKSNKNDAADAEAICEAVARPNMRFVPVKSVEQQAVLAVHRARQGFVKARTAQANQIRGLLAEFGLVIPRGLWHIQQRVPALLERAADALPLALRHLIERLLGQLKELDRQVAELEAQIQAWHRSSELSRRLERIPGIGPLTASALVASIADARSFDNGRQLAAWLGLVPRQSSSGGKPLLLGMSKRGDVYLRTLLIHGARSAILAAQRKVGAADTWLGQLLKRRHPNVAAVALANKNARTVWALLAHDREFRPDCRPRLATA

SEQ ID NO: 151190 - protein, 336 aa, unidentified
MSAYYCGIDLANKTSSICVLGPGHELVRACEVPTSFEGFQEGLQGLTQLRCIVEASPLAEWACGMLRRLGQEAVIIDAKKAKGVIAAKKKTDAIDAEKLARLALTGWYNPVHEKSAQGRWLRSLLQARNGLVSGATAANNRIRGLLRAHGIQVGIAQGDAFGPRVQELLQDEAKELTPVILPLLVVWQVQRNEVAKLTGCLEEMAKRDATAKRLMTAPGVGPLVALSFMATVDDPHRFTKGDQLAAYLGLVPAVYQSGERCVYGRITHEGDKMLRWLLAESAHIVLHRLKRSCELADWGRALAERKGPSKAKAAVARKLAKILLSLWKEQRNFAWT

SEQ ID NO: 151191 - protein, 345 aa, unidentified
MTIVESRLITGGVDTHADTHVAAALDPIGGLLGVEEFPVTPAGYARLLGWLGGFGTVGLVGIEGTGSYGAGLARHVTAAGIRVVEVDRSDRQDRRRQGKSDPLDAVSAARAAQSGRARGAPKGRDGAVEAIRALMVAKRSARSERTQTINQARALIVTGPDDLRARFAGHTVAALVSELATLRPRPGDVVGYATRIALRELGRRAEFLDSQLERLDELIVPLVTARAPGLLALHGVGPDTAALLLIAAGDHPARLRSEAAWAHLCAAAPIPASSGKVTRHRLNPGGNREANHALWRIVITRMSAHAPTRAYVERRSEQGLSKKEIIRCLKRYVAREVYRHLRPAA

SEQ ID NO: 151192 - protein, 387 aa, unidentified
MQPDGRAQVEIRQFGTMTDDLLEMVEWLKGQGVTHVAMESTGVFWKPIYNILEGHFTVLLVNARSVKQVPGRKTDARDCQWLAQLLQYGLLKGSFIPARWQRDLRDLTRERTQLAEEQTRVANRIHKVLEDANIKLGSVATDILGVSGRDILERLIAGEQDTEKLAERARGRLRRKIPELRRALRGHLSEHHRFALRLQLDHLQRLEQLIERLDQRIAELCKPYDEQIEQLDQVPGVDRTGAQSIVAEVGVDMQVFPSDGHLCSWAGICSGNNESAGKRRSGRIPKGNRWLRRTLVLAAQAAGHAKDTYLASRFRRLAARRGNKRACVAVAHSILKIVYHLLKYGCPYRDLGVSYFDRLDPVRLTRYLVRRLERLGHKVTLEPVPTA

SEQ ID NO: 151193 - protein, 323 aa, unidentified
MSRTQEKITQYPENVYAGVDVGKDNLDFFVSPLDIKLRVANDKNGINKLIRRCKSHNVQLVALEATGKYHRLLHEMLHEAGIPAAVINPFRSRQFADSMGRFAKTDTIDAETIARFAERMKPEPTKPPTAQYKALRELHSARRQVLEEASDLKRQLHATELSLAAKQIRARIKMAERHKAALEKEILKLIDADAGMKRKLEILTSIPGIGSMTASILIADLAELGQANARQISALVGVAPMNWDSGAKHGNRMIRGGRKSVRNALYMCAVGCVGRSGHLGLFYRRLVKRGKKPKVALTAVMRKLAILANTLIAENRSWQPAQP

SEQ ID NO: 151194 - protein, 349 aa, unidentified
MICVGVDVSKGKSTVAVIDKDGEILMRASEYEHTETGMTKLIQRLKMLKEEPRIVVENTGYYHWPLVNSLMDAGFFVCVVNSIIVSKFAKVQMRSGKTDRLDAMMLCRFGLAYWSELVRCQPDEERRTLLRLYSSEHSHAVHLVVEQKVHFTSLLDKVMPGIKTLLEDKGGRSKLSDFALEFWHFEKISKQKPDSFTKRYCKWAKEKGYHANESKAAQIHALSQNGIPTLPCTDAVKQLVQEAARVLKHLEESVNSILAQMNALASTFPEFEVVSKMKGVGKHTASRLIAEIGDVRRFHSAKALTAYAGLDAPPYQSGKFESHNRKISKRGNKYLRKVGYDVMASLMST

SEQ ID NO: 151195 - protein, 367 aa, unidentified
MKDQKERSVGIDLAKKTMEVRIMTKEGKVVLQWHGKTDHIGRKKLMSYLISGDKVFIEACQLAFKIAREIMANTEAQVYVLNPRRLHIIWRTVKKTDSEDALKLARLGIRFPVEELPVVPLPTEEEERLRELVHELNFLKKQRTRSINRLHAIYTGFGITTLTKKNLKTKEAREKSIKKLSGRKYKEAFRIHQRVDILENQIKEVETEQESLVVKNNAAEYIMSIPGVGVGFAAVFLGFVGNGERFSNAKQVSNYSGLVPKVDQSGEKTYYGGINKESCSAIRRVAVLAAWALTRSKQGGSLLEKYEKKAKERGKLVAIVMLARRIVELCYCLIKNKMYYDKGEVVIEVPKFERLKKKVAKKEEEVA

SEQ ID NO: 151196 - protein, 450 aa, unidentified
MSKLSRELHPLQLAVINEHSAAIDIGSMMMMVSYSDRNGVPQLLECSAYTESLDSLAQTLQQEGVTHVAMEATGIYWIVLYEILERYGMKITLINPKHFKNVDAQKTDVKDCQWLHQLHASGLLRASHIAPEIFRELKNYLHERDILQKQKSDTLNRIQRILSQMNIKFQHLISDIEGVSGMKLLHGISSGITDPQKLLLLIDTGKLKASADDLVKSLTGIYKQQFITILKNLLKAYHFFKDEMKAYETIIEQVLKKMLPEDKDGNKPLIEPKKTYTRKNQYSINLKSYLNHILGVDLTKVDGLDEISILTILAITGVDMNKWPTADHFVSWLNLSPRPKITGGKRIGHDKRFTNNPATQAFRMAAQSMWQNKGPLGHLYRRLSAQKGSKKAIKAIARKLAVIFYNMVKNKSEYDKTRLQQNTHRQEQRRIARLRKEAAKYGFKLENLIA

SEQ ID NO: 151197 - protein, 266 aa, unidentified
MTEAYDGRQVAGMDLHRRRSVLVRMTEDGRKLGTTRITNSPAALRKAIAEAGEAPRVVLEAAYGWYWAGDVLEQAGAEVHLAHPLGVKAFSYRRVKNDQRDAADLADLLRMGRLPEAWIAPREVREITRYRHKLVKLRTSCKDQVHGVLAKLGVPVTHSDIFGVHGQAWLDELKLPQPYAGKVASLRMLASELSREIGLLELVTADLLDRHDGYRAIQALPGIGPVLAAVIVAEIGDITRFRRPEQLCCWAGLTPRHYESDTRNPA

SEQ ID NO: 151198 - protein, 385 aa, unidentified
MRNGAQDTQLTNQENMIYMGIDVHKRHINVAVMSEHVVLGQNHVEIRDVDAYMVRLKKKYPDRRLRAAYEAGFSGFALYHQLESLGIETIVVNAADVPTTDKERTTKSDRADSLKICHALKCGQLRKIWVPPDELSGDRDLVRYRLVLRQHLAKTKTRIKMFLYKQGVQIPPELESSHWTKAFQAWLKEQTMTTASSQTTLMLMLEELQHADQVYKKHLRRINELALTQRYSHNVDLLYTIPGIGRLTAITILTELGPIARFAKADQLASYAGLIPMQHQSGSSDRNMPIQRRAHQELRTLLVQCSWMAIKGSNHFNMVYEHKRKNKTSQVAIIAVARRLLNTIYAVLKKVTTFHGVWHKLENNHQSTLLSKVGVCLSPLAACLQ

SEQ ID NO: 151199 - protein, 360 aa, unidentified
MERIITPIGTPVGVDVHKRRCTVVEFQQGKIKRRKPIANTREEWMEMLTELPPDAEIGLEVSTAGYYAMSVLEEAGWRERAHWIHTAGIDSNRRQKNDRLDAERLARKLAAHHLDPLPQAWFPPPEIRMLRLRARARCWLARLRTQCKNHLQSLLQMHGLLLPGSDPFGAAGQKWLAEQKLPLPLTESIPQIQRLLKLLEEEIEISEQYLQAVDPQFPELVLLRSIPGIGVLLAPVIWSEIGSIARFRSAKALANATGLVASFYDSGDVQTSGPITRHGSRWLRWALVTAANVAIQYRNPFARRYHRLRRGKKPNVAKAAIAHSLARCVYGVLKHGCPYREDRWGRKVGALEQETRGSHR

SEQ ID NO: 151200 - protein, 361 aa, unidentified
MAKSTTIVAFDQHAATTVAAVLLPGHRTPALHTLTSDSPTILRFVQRLRVSGLHCCYEAGPCGFELQRALTARGIPCDVIAPSLIPRRPGDRIKTDRRDAVQLAVLYRAGALTAIHIPSEQEEAARDLLRCREDIGADLLRARHRLSKFLLRHGRRFTATKRAWTTRHHAWLQDQAWPLPALAQTHRAYGRAVDDALARRQMVEADLQQLLTLEPLRARVDRLRCFRGIDDLTALTIAAELGDARRFASATRVMAFTGLVPSEHSSGAKQARGRITKTGNAHVRRVLVESAWHYRHHPFVGKALRQRQRGAPADAVDRAWHAQQRLYRRYRRLVARGKPKQHIVTAIARELSGFLWAALTH

SEQ ID NO: 151201 - protein, 351 aa, unidentified
MERYIGGDVHAASVSFTVRSEAGKILRRDVVETNGQALVAYLRQQAGHVHLCIEEGELSQWLYEILSAHVGEFVVYRPRYAPGNKSDRLDADALSEKILSRKFGNPVYKDPGPYQALRQAARTYRMLTKDQVRVKARIKSTFRARGIPCAGDGVYDADRRRELARALPVPHRHAVDVLGQELDGLQDLQATAEQEMLRESHRHAISRVLETAPGFGPIRVALLLPIVVTPYRFRTKRQFWSYCGFSIVTRSTSDWVQTGGGWRRAPVVQTRGLTRDYNKTLKWLFKGAATTVLEHSGPNPHRDHYDALLEAGTRPNLAKLTIAREIAAIVLAMWKTKRRYQPERIHFSPQS

SEQ ID NO: 151202 - protein, 410 aa, unidentified
MNAVGIDCAKGKSMITIRQPLGVVIVRPYEILHTVSELEILAESLKSLSGETRVIMENTGVYHLPVADYLHEAGIFVSVGNAKNIRGYDRDPLRKVKTDKADAKKIAEYGLAKWEKLRRYAPEDDIRRQLQIYNRQYWHYAKIKTMHKNNLDALLEQVFPELKTAFSSPKRDDGHEKWIDFTDTFWHSECVSRLSESKFHESFKQWCRKKGYHYRKTQAAKIYGLAAKHTAVLPKDDFTKQLIKSAVSQIISIAENQAALLHKMKEIAKSMPEWEAVIEMSGVGETLAAQLIAEIGDINRFASKKSLTGFAGIDSPPNQSGTVDRQGEPVTKSGSPHLRRALFLVMRCLIMTKPDDEVYHFILKKKAQNKKYLVYMVAGFTKFLRIYYGKVKEHLSKLNTVVSDEALSCQ

SEQ ID NO: 151203 - protein, 343 aa, unidentified
MQTATTIGLDIAKSVFQVHGVDMDGNVIFRRQIKRRHVLGFFQKVPPCLVGIEACASSHHWSRELQALGHTVRLMPPAYVKPYVKRQKNDARDAEAICEAVTRPNMRFVATKTAEQQSCLTLHRTRHLFIRQQTSVINVIRALFAEFGIVAPVGRSGVEQLLGVAADLSDKRLPDIARACVAALGAQLRMLKAQIFQFDRMIMAWHRSSEASRRLDDIPGVGPALATALVASVADPKVFRSGRDFSAWIGLVPKQNSSGGKDRFGSISKRGDRYLRSLFTTGALAVIRYAKIHGTRHRPWLTALLTRRPTKVAAIALANKIARMAWAIMAKGEHYKEPAALAA

SEQ ID NO: 151204 - protein, 428 aa, unidentified
MNDVDRNRLEEFRQLKQEIRHSEQYLIVGIDVAKDRHHAFFETASGKMLLKNAVFDNTYEGFKRLLDQTEALQERHGLSKVVYEMEPTANYHKPFGEGLIELGRNVVLVSGLMAKRNRESLDGRWDKHDRKDSANIADLIAQGKCLFYDYPVPELRGLRNLIALKRRLKKQEQSYAIRIRNQLIARYFPEMDRDYRGLGAEGLPIVRWCLPASEIAQFEVDAFVKRVSSKRIRAEKRRRLEALWEKAAESIGCEPVPGLDHEAKLMVEGLKQIREMIQETEQKIQELCKSFSSYGYLLTLPGFGPDVSAKVMAAVGDPDRFVNGRQVLKLAGLDLGADRSGKNSDKAIPEISKRGKADLRQALYQAALIASRRNPEFMRYYRSKIRGREKEKGIHRKVLVKLSAKMLVMAWTLMKKQEAFNPAFIKVE

SEQ ID NO: 151205 - protein, 340 aa, unidentified
MEFRFFIGIDVSKDTLDIGFLDAESSETVNHQQVTNNDSGITSMLNWLQQYNEFSLEGSLFCLEHTGMYNYPLLQFFSKQGASVWVENPIQIKRSLGLQRGKNDKVDAMRIAQYAYRSKQQVKLWEPTREVIERLKHLSALRERLVETRKRLLTPVEELSKVGNEAMAKILEKAMRKTMKALDKDLEAIETQMKEVIDQDDDLRNMYELITSVVGIGFVTAVSLIVHTNEFKLFSCHRQFACYSGIAPFEYRSGSSIRGKTKVSHMANKKVKRYLHMASLTGIKFDEGLKSYYKRKIEEGKSKMSILNAIRNKLLARVFAVVSRGSVYQKINYQNSLALS

SEQ ID NO: 151206 - protein, 344 aa, unidentified
MDHFAGLDVSVKETSVCIVDDTGRIVREVKVASEPDALLALLTNPAYQLKRIGLEAGPLSQWLFSALAEAELPVVCVETRHMQAVLKAQINKTDRNDARGIAQMMRVGIYRPVHVKTLRSQKLRMLLTHRKLLQSKAIAIENDLRGTLRNFGLKIGIVGKVRFEARIKELVENLPDLAVLVEPLLLVRRVLREQIIILHRHLLAIVRDDDVCRRLMTTPGVGPVVALTYRATVDVPARFRKSKAVGAVFGLTCSRYQSGETDRSGRISRCGDEMMRVMLYEAAQSMLRSKKWSWLKAWAMQVARRRGMKKAIVALARRLAVIMHRIWVDGTEFRWTREQAPAAA

SEQ ID NO: 151207 - protein, 445 aa, unidentified
MEVTFTHCAGLDVHKKTVVACCITPGAKGVKQIEVRTFGTMTVDLLALSDWLTSKQITHVAMESTGEFWKPIYNLLEGNFELLVVNAKHIKNVPGRKTDVKDAEWIAELLRHGLVRGSFIPPQAQRDLRDLTRQRTNLVQDRATVVNRLQKVLEWANIKLSSVATDVTGVSARAMLEAIVQDQVDPAALSELARGRLRKKRDALEQALTGAVRDHHRFMIAQHLMQIDFLDQQIAAFDEQITAAMQDLSQPPDEPGPTQSDASQVVVTPPEDTTAPLTWEAAVALLDTIPGVGPRSAEMILAEIGLDMSRFPSEGHFSSWAKLSPGNNESAGKRYSGAIGHGNRWLRTVLVQVAWAAVKVKKSYLSSFYHRLAARRGAKRAIIAVAHRILIAIYHMLKKHEPYKDLGVTYLDERNKPKVVSRMKHRIEQLGYRVTIEPVPVSAPG

SEQ ID NO: 151208 - protein, 357 aa, unidentified
MSKSRKPVEVPSRNPATVFCGIDVSAATLWVAVQAEPEWKLEQRQFANSPLGHRQLLAWLGKKKCPVRVTLEATGVYGVDVALALDEAEGLAVEVLNPKKASDFARSLGRSKTDKTDAAALAEYSRRMKFVAWKRPGREVLELRALGRHIAALTEEHTRASNRLHAAQASRTAPRCVRDDLKRTMAAIQKRLVRLRREARMRIESQAGMRRKWLRLLAIPGIGETSAVQILAELASLDEDMTVRQWVAHSGLDPVHETSGTSVHKPSRISRQGNRYLRKALYMPALTGARFDPHLKAFYMQLLARHKTKLQALTAVARKMLHAIYGIFKTDTPYDGAKLFPAMDLSITQKCQPFPTC

SEQ ID NO: 151209 - protein, 329 aa, unidentified
MLIIGCDYHPGFQQIAYVDSETGEFQERRLPHLEEAEKFYRDLGERKVRVRVGMEASGHARWFERLLEELGFELWTGDAAKIGAKRVRKKKTDREDARHILELLLENRFPKIWVPTWENRDLRQLLWHRHRMVQTRTRIMNQLQAVAINEGVRCKKRLWGEAGRKQLEALRLAQWASRRRQDLLEVLDRINPTIAELTQAIEEEAEKCPEARRLMTHPGVGALTAVAFVLIIGEAHRFDCGRQIAAYLGLVPEEDSSGERRRLGHISKQGNSLLRCLLVEAAQATARCDRRWRNQFFHLVQRRGRKIAKVAMARRLAVRLYWMWRREWN

SEQ ID NO: 151210 - protein, 384 aa, unidentified
MPADYRHDQIAIRVDLGAIFVSLELSRATWLITSLSPGRQKMSNHQVRGGDIAGLFACFAHLREKAQTRTGQLYPLIVIQEAGLDGFWIHRVLQSEQIESYVVDPASIATSRRRRRAKTDKIDGEALVRALLAYKRGEPRVCAMVRVPSCRQEDERRICRERSVLTAERVMHVNRIKGLLFTQGISDYEPMHRCRRARLDELKTGDGRPLPPQLKAQVSRELDRLELLLQQLKAVEAERDVLLASTKSADKPLPTALLLGLKGIGPDFASVLWLEGLCRSFANRRQVAAYAGLAPTPWRSGIVDREQGVSKAGNPRLRTTMIQLAWLWLRHQPGSALSRWFYERIERSKGRRKTTIVALARKLLVALWKYVTAGVVIEGATIKA

SEQ ID NO: 151211 - protein, 344 aa, unidentified
MNKNWFIGIDVSKKTLDASIFVAGEVINKFPHVQVRNDKQGFKDLFRWAKEQGMKTKDTLFGLEFTGYYSDALEQFLTKKQISYTMLPTTVVKHYQRGPHDKNDKIDSAKIADYLFRFNGTECIKLRVLPSKALQQLKDLKSERKFLVQQRVACENRQKVAKSKSEEKHLQKLIDLYKAEIEQVEQQIADVIVQDEEIYTTYRLLNSIPGIGFVNAVNTIANTQNFTAFETARQYAKYVGVAPSEHSSGTSVQWRRRPSPHADLQAKADLSMAALHAIELSAEIRQLYERKLGNKPKDKDIQKKALNAVKFKLVREMFSVAKQARIFELRGLDKAQAETHNTEE

SEQ ID NO: 151212 - protein, 371 aa, unidentified
MEAYVGQQFVGIDLHRRRSVVVRTTAAGEVLEKVRIVNDVGRLAEVIARAGDAPEVVLEATYGWYWAVDALQAAGAAVHLAHPLGVKAFEYRRVKNDERDAIDLADLLRMGRLPEAWIAPPATRELRELVRHRAKLVALRSHCKAEVHAVLAKCGVQVLMSDLFGVAGTDLLDGLHLPAPYTARIGSLRRLMDQLDFETDVFSGLVRRRLATDPGYTAIRTIPGVGPILGAVFVAEIGDVGRFATAPQLACWAGLTPKHHESDTHVHRGSITKQGSRLVRWAAVESVQLLPATSRVGQIRDRVGARRGRNIGVVAAARQQLEYVYYALRDHHVRALRSNPCGGISRPTELVGAGRAGHDPRSSTRRGRPSD

SEQ ID NO: 151213 - protein, 353 aa, unidentified
MTTLTDPATRVTAGVDTHRDVHLVAALDERGGRLGVEAFTADAAGYRKSLRWLRSFGTVERVGVEGTGTYGAGLARYLAAQGVSVIEVTCPNRQRRRSHGKSDPVDALSAARAAQGGEATAEPKARTGNVEAIRALRVARRSATKARNDALNQMRALLVTGPEELRAAYRGTTVWRMVSAAARLRPSDPTTPTGATKFALRDLARRVQALEAELDSLDAILVPLINVTAPELMARHGVGPDTAGALLVSAGDNPERLHSEAAFAHLCGSSPIDASSGLVVRKRLNRGGDRRANEALWRIVMVRMVSDPRTRHYVERRTKEGLSKREIIRCLKRYVARELYPLLADPQAPLDNR

SEQ ID NO: 151214 - protein, 322 aa, unidentified
MQGKVSKAKAEPAVYVGIDVSKAWLDIYLHPIGHAFRVPNNKDGLRKLRRELAGRTVSLVVLEATGKLHRPAHRSLDAAGLPVAVVNPYRSRKLADAFGELAKTDSIDARMLALYGELIGPRPSAVPCKALAELQELTLARQAAKAERTALANRLGAAESAIVKRILKRQLAQAERSIAALEAAMAALIGKDAELKRRYDILISIKGVGPVAAAMLVACMSELGQLNRQGAALLAGVAPLNCDSGERRGQRHIRGGRGHVRSVLYMAALSAVRCNASFRTFHQRLRAAGKKPKVALVAVMRKLVILANTLLRENRLWEPRHA

SEQ ID NO: 151215 - protein, 364 aa, unidentified
MSKITRVGIDLAKQVIQVHAIDAVGNRVIGRALARDKLIAWCAQLPPSCLVAMEASSSAHHWARRLIAMGLDARIIAAHLVEPYRRQGKSGKNDANDAAAICEAAGRPHMYFVSVKSVEQQSMLCIHRLREGFKAERTACINRIRGLLAEFGLVFGQRPSVLYQALPDAIEDAGNELGTLARLALQRAWAQWQELDAHLAWCDERIAAHLKTNETVRMAQQLMGVGPVTASAVVSTVGDFRQFKNGAQFGAWLGLVPRQHSSGGKSNLGAITKRGEPYLRTLLIQGAKSVVMTAHRRDDPISKWVYRLRENAGWQKAVVALANKNARILWAVFVRGKAFDAGHVSVKPRAPADNAPSVLAPSLA

SEQ ID NO: 151216 - protein, 323 aa, unidentified
MIIGIDVSKLKIDVCCLLNGKKQSKLFKNDESGFNELFKWVKTLKAAEKPVFCMEATGCYHEALAEYIYDAGYKVSVVNPLLIKRFRESKMVRQKTDKSDASIIAEYYLQNEPLSWKPSPPEIKELRDINRHLDCLNGELRRWTNRLEKKHHNQKVKENIDKKIAELKKEIKEFKEIAKSLIKSLPTLAPKAELLDEIVGVGEMSTLTILSEIPDVANFANAEQYTAFVGITPSHYSSGTSVKGQSKISRYGNPRIRKSLYMAAIIVKNHNPHFTKWVKKLENKGKTPKIIIVAVMRKLLRIAYGMLKSNQQFDAKLAFGGDV

SEQ ID NO: 151217 - protein, 362 aa, unidentified
MLIIGCDYHPSGQQVFGMDAESGEVFADRWIAHTGTELEEFYSGLPAGTVVGVECSGNMLWFEQRLAHYGHRLRLGDAAKIRSKETRKQKHDRRDAELIARLLRENNFPDLQWVPTLAERDQRQLLMHRHKLVRMRAQVKNQLQHIALNQGQQKKRQLWTKAGRELLENLPLEPWTARRRNDLLRWLDLLDRDCAGLEREVEQAAEARSDARLLMTHPGIGPVISLAFVLTIGSIERFQRSRELVSYLGLNPTEDSSGERRRLGGISKQGSSFMRLLLIQGAQTAVRGDEDLRRQYCRLASKKHRAVAKVMVARKLAVRLFWMLKTHKTHAELVRMRGSSSHSGVSKTDRLSERPASPRIQP

SEQ ID NO: 151218 - protein, 441 aa, unidentified
MIRASVAGIDLGSEQHWVCAPTRDRSGREVASFGATTAELIRMAEWLQARQVESVAMESTGVYWIAPHEVLEGQGLQVLLVDTRQLARVPGRDKKSDPTDCEWIQRLHSCGLLRGSFRPEAAICILRTLVRDKANLVAESADWLRRMQKSLDQMNVRLHRAVSDIDGVTGMAILRAIAGGERDARKLAQLRHGRCSKSEQEIADQLSGHWREDHLFSLQQALKMYDAVQERIAAYEQEILRKLGEMEREEQRGQTAPPLNNTNKARAIKNRGQEPRRQALYRMSGVDITQIDALAVETVEVVLSEYGPDLSRFPTEKQFVSHVTLAPHVPKSGGKPVKKKKRNSASTRVAAALRMAALSLRHSQTALGAYYRRIAQRRGGDIAVFASARKLATLIYRLLRWGQPYVDEGEAAYENRYRQHRIGRLAATAKELGYQLTPVPA

SEQ ID NO: 151219 - protein, 429 aa, unidentified
MKIIYPRVCGIDVHKKFIVAVICISESVEPVYLKKRFSTFHNDLIRFRDWLIQNDCQNVCMESTGKYYIPVYNILESHISNIVVANPKWVRAVKGEKDDDKDAKWIADLFKLGIVKSSFIPQKDFRILRELTRYKYKLVNMRSSEKNRYQNALTSGNCKLDMVFTDVFGKSASNIIDLILSDNPYTDEDILSKVHKNCKASPDMILNSINGTDLTPVQKSRIELVNNHIKQLSSNIQRLDKLIDLMIEPYKDYISFLCQIPGVSRNSAITILSEIGVDMNQFTSTRRLTSWAGLTPSSNQSTGKKKSVRISRAGVYLKPCLVEVAHAAVKDTNHPYYANKFNKISKRRGKKRAYIAIARKILVAAYHMLLTGEIWNPADLAEVETPVEQRIKYVKNNLKSDIKQLLDIGLTVEELTLMIQQNANNIATQ

SEQ ID NO: 151220 - protein, 399 aa, unidentified
MQQCQKHDVCVQFKNGERVFDVIEHTAEALDAWLTELHQKVKGRIAIALELKKGPVVYALQKYPFITVFPVHALSLARYRQAFSPSGAKDDPQDAELALELMLRYPQKIKAIEPDNADIRLLQQLVEQRRQLVEDKRRFVNRIINTLKQYYPQPLEWFSHRGSLLLCELIIRWPSLQQLKRARRDTIRNFLNAKGGRAMALTEQRVASIDNAIPLTTDPSVIEANALMAAALATQIKVVSEIIKTYDERIETLFDTLPDAGLFKSLPGMGPCMGPRMLAALGDNRDRFNSAEEIQNYAGIAPVTERSGQKSWVHWRWQCAKFVRQTFVEWAAKTVNSSYWAKLYYQGLREKGKSHQSAIRALAFKWIRIIYRCWKARTCYDEAKYLLALEARHSPLLKP

SEQ ID NO: 151221 - protein, 455 aa, unidentified
MPRKSAKASPELTRHIHGAAAIDIGSRMHMAAVSPETAKNPIRSFGTFTSDLHTLTEWFRACNVTSVAMESTGVYWIPVYEILEQHGFEVILVNARYAKNVPGRKTDVSDAAWLQQLHSYGLLRGSFRAQADIAALRAYLRQRERLVEYAAAHIQHMQKALMEMNLQLHHVVSDITGVTGMQIIRAIVGGERDPDTLAASRDIRCRSSAEVISAALMGNYRDEHVFALTQALELYDIYRERIVACDRRIKGLLLRLSHKSAKPAADLPKPRIRTKQVSAPSFDVRSILYRLLGVDLTQIHGIGVSLALKLVAECGTDLRAWPSAKHFTSWLCLVPGNRISGGRLLSSHTRRSSSRAAALLRQAATTLGRSDTALGAFYRRLSARVGKAKAVTATARKIAVLFYNTLRHGMAYADPGAGHYDEIHRKRIVSNLYRRAQSLGFILQPISGDPQPAVS

SEQ ID NO: 151222 - protein, 344 aa, unidentified
MSGVITVGLDIAKHVFHAHGVDDQGRALFSKRISRGKLLDFFAAQPSCTVALEACGGAHHWARQLTQLGHEVRLIPPAYVKPFVKRQKNDAIDAEAICEAAQRPNMRFVAVKSEQQQAAGLVFRTRDLLVRQRTQLINAIRGHLTEYGWIAPKGPSHVAELAHLIEEKRMAGSLPEAARAMFRLMLDQLASLNGRIAVLDKEIARRAREDEVSRRLMTIPGIGPISATAIAALAPPVETFAKGRDFAAWLGLTPVQRSTGGKQKLGATSKMGERTLRRLLIIGSSAVVQQASKRGAAKGSWLEQMLARKPRMLVAVALANKMARIVWALLVKHEVYRAPVAASA

SEQ ID NO: 151223 - protein, 363 aa, unidentified
MIVIGTDTHKRTHTCGAVFAGTGQRAGELTAPARKGGFAELLDWGRELDPERIWALEDCRHVSGSFERFLIAAGERVVRVPPKLMGESRRGERTSGKSDPIDALAVARAALREGPETLPGAHLDEAALELKLLLDHREDLVKARSGDQQRLRWHLHDLWPDFELPAGCLDRIVWLDRVARKLARAEQSARVRVSRELVRAIRERSKRASELEREIGAMVRAQAPQLLELPGCGALTAAKLIAETAGAARFASDAKLARLAGIAPIPASSGNRTRLRLDRGGNRQLNCAVHRIAVTQSRIHAPARECLARKRAEGKSNREALRCLKRHLIRRVWLLLNDSEINSSVKTVDTQRGLPVPHFAAAA

SEQ ID NO: 151224 - protein, 397 aa, unidentified
MYIVGIDIAKRKHEAAVIDGEGTVIIKPFSFTNNCSGYNRLLAMLAKAKLPLDEVSFAMEATGHYWLALFTRLQKEGFRVQVINPVQTNSIRSFYIRQAKTDPRDALLIAEVIRFGHFSESTLHPENIYELRELCRGRHAIVSMQADVKRKVVALLDQVFPEYETAFTNMFSDTSMAILQTCPTPKELSEMPLEELCHLIEVSSHKRFRMAKAQELQALARGSFGFAMAGDVFSTMIRLYAKHLDFLKQQVREMDRKIAEIMETLDTPITTITGIGPTLGAYILSEIGDISRFSSAAKLAAYAGIDPTMRQSGEYNGVRNRMSKRGSPYLRHAIWLAASSAVLHDPALKLYFQKKRDEGKPYMASVGHACRKMVSIIYAVMRDNKAYTPCIPNEISA

SEQ ID NO: 151225 - protein, 314 aa, unidentified
MQCISNNTELSSLEGTRCQFNGSKAVIKLGIDVHQEFYTVVVQVNGSNPKPPQRFRKEGFLHWAAKLKGRGAQVHAVYEACGFGFGLQRQLSALGIECYVVCPQKLDERNRRVKTDGLDAKALCLKLDRFVEGNREALALVRVPTEEEEQLRAIHRQREQLVKARKIMEAQGRSLMVNHGIEPVNKWWKRRTFAELAVPAWMKELLSNSQPILLALEEKIRALSVQLQAAARPNQPRGFGALTSVVIDREIANWHRFKNRRRIGSYTGLCPGEDSSGATRLQTCVTKHGNPRLRARWWKQPGDWSASSPTTSQW

SEQ ID NO: 151226 - protein, 350 aa, unidentified
MDSAYDGRQVVGMDLHRRRSVLVRMTEDGRRLGTARIINSAAELRKAVAAAGRNPRVVLEATYGWYWAADVLAAAGAEVHLAHPLGVKAFTYRRVKNDEKDAADLADLLRMGRLPEAWIAPPEIRELRELTRYRLKLVQRRSGYKDQVHAVLAKLGVPVTCSDLFGVWGSRWLDELSLPQPYAGKVASLRTLIAGLGTEITLLDAVIADLLAGHDGYRAIQALPGIGPVLAAVTVAEIGDIRRFSCPAKLCCWAGLTPRHRESDTKLTRGHITKQGSPILRWAMVEAIQHQPAASPVRGVKDRIIARRGKEARNIAKTAAARQLLTAVFYAMRDGQARSLATRTATQHAA

SEQ ID NO: 151227 - protein, 386 aa, unidentified
MHDSTDLPVPERTGIREDSATLFVSLELSRSTWVATSLAPGSKKMSKHTLVGGDGRKLLDLLARLKTRAEQRIAAPVKVVAIHEVGLDGFWIHRLLEANGVESHVVDPASIAVPRRHRRAKTDAIDGETLLRTLMAWQRGEPRVCAMTVPPSPSEEDCRRVSRERATLLRERIQHTNRIRGLLFGQGITNYNPLHKNRRECLEELRTGDGRSLPTHVKAEILREIDRLELVLRQISEVEAERDEMLRPAEASSPAALLMRLKGIGAEFATVLYLEGLFRHFENRRQLAAYAGLAPSPWKSGSIDHEQGISKAGNPRLRTTMVELAWMWVRYQPDSALSCWFRQRVGSERGRIRRISIVALARKLLIALSRYINHGEIPAGAVVKPD

SEQ ID NO: 151228 - protein, 391 aa, unidentified
MAQVNDLSRSLAVFDPISTLVVVVEMGKASWLVRSVVPGVERQPLKKLEPDATALLRLIERWRSEAVRAGQPIRRVALAYEAGRDGFWLARWLIARGIEAHVIHSASVAVSRERERAKTDRLDTAMLMRVFLGWLRGERGHCGMVSIPTMEEEDARRPSRERESLVNERSRIINRMKSALARLGIRGFKPHLRRAPERLACLQTGEGTSLPANIIEEFRRDMARLALVREQISSIEKTRAERLERAPDTGPHAMVRLLSRVIGIGIETADMLVREILSRKLRDRRAVARYAGLTGSPDESGLKSREKGLVKAGNARVRRGLIQLAWRFLMFQKDSALARWYRTRTEGPSGARKTTMIVALARKLLIALWRLVTTGEIADGVELRPAARAIV

SEQ ID NO: 151229 - protein, 345 aa, unidentified
MLIIGCDFHPGFQQVAIFDKQTGEISGKRLQHPQEARAFYAGLAGRARVGMEACGYTQWFERLLDELGHELWLGDAAQIRASVVRRQKTDRRDAEHLLELLLEERFPRLWVPTAEQRDVRQLLLHRHHLVRSRTQVKNQLQALALNQGVQKKRQLWSKAGRAELEKLALPTYTAGRRDECLQRLDYLDGQIRQLSQKVVAEAEKGEAARLLMTHPGVGPQTALAFVLTIGEVERFPNAKCVASYVGLIPTEYSSGGKQRLGRISKQGSPLLRFLLVEAAQSAARYDASLKRVYVRLCMRRSRGQAKVAVARRLATRLYWMLRSGKNYAQLTASGAGKPVSSRGAA

SEQ ID NO: 151230 - protein, 350 aa, unidentified
MQIIGVDLHTRQQTVAMLNVETGEIVEKTLQHEGGSVREFYSTLAGPSRVGIEATGSMQWFLELMEELGIDCQVGHPAKIRAAEPRKQKHDRRDAALVLQLLVENRFPSIWMPSREQRDVRSLILYRHQWVRIRTRVQNALQAIALSHGLRRGSSLWSEAGQQAISSLSLTRYTAERRTALQSLYRHLEEQIDDLNRKVEELAWQRPQARRLMTHPGVGPITALATETFLGEPKRFLDGKAVASYVGLIPSEHSSGGRQRLGGLSKQGNPLLRFLWCEAVGHAVRKDVELQRFYQHKLVQKGLGKAKVAAARKLGIRLWILLRDQIDYQEFCRRGQLRQKHGGAHAGMPA

SEQ ID NO: 151231 - protein, 294 aa, unidentified
MLIIGCDYHPSFQQIAFVDTDTGELQERRLEHREEAEKFYRELAVQGMKVRVGMEASGQARWFERLLAELNIELWIGDATEIARKREGKQKTDRQDAQHILHLLLKDDFPQIWVPSWENRDLRQLLWHRHRMVQAGTRILNQLQAVALNEGVGCKKRLGREKGREQLESFRLAPWASRRRHDLLEWLDRLNPTIGALSQAIEKEVEKCPEAQRLRPHPGVGPLTALAFVLIIGKPDRFQCGKQIASYLGLVPLEDSSGNRRRLGHITKQGNSLLRFLLVEAALSNGTQPSGMAQ

SEQ ID NO: 151232 - protein, 316 aa, unidentified
MESPQNFVGIDVSAKRLDVAVLPVGTHFTVAHTDEGIASLVRRLRELGPQIVVMEATGGYEIPVAYAMSEASLPVVIMNPKVLRHFAKSTGKLAKTDKLDARVLAHYAQAIQPPVRPLKDPEQAELATLMSRRRQLRDMIVMEGNRRRTSTPKVRGNIDQHLVYLRQLLKDLDREIHDAIRRTPLWHEKSEILQSFNGVGPKVSASLIADLSELGTAPRTQISALAGLAPMNRDSGQWRGKRTIQGGRPAVRQALYMAALVASRRNPVIREFYQRLRQAGKPAKVALTACMRKILVILNAMLKNRTYWNPQLPLAA

SEQ ID NO: 151233 - protein, 342 aa, unidentified
MKDMMIGVDPAKNVFQVHGALRAGEIQFRKKLTRKQFTAFMARQDPCLVIFEACGSAHYWAREMETLGHEVKLIAPQYARPFVKRQKNDAADAEAIVIAARQPEMRFVEPKTGEQQSRAAVFRGRERLVHQRTADMNALRALLYEHGHVFPAGIRYLDRMTALVEDEASDLPALIREECQDLLAQIAEKTARIIERTAKLKALAAQSDRARRLQTMPGVGPLTAVAVEAFGPDMAQFKTGRDFAAWLGLVPRQRSSGGKERLGRMTKAGQADIRRLLIIGAMSRLGWLGQRSIVEGSWLSRMLARKPRMLVAIALANKMARQVWAMLTKNEDYRDPALAVAA

SEQ ID NO: 151234 - protein, 358 aa, unidentified
MAYIGVDLHSDKFTAAFRDKTNKETLKSYYMSEYENFKRKLKRDDYVFLEASTPTFAFTDLLKDKVKKTIVIDPFKFKAIADSRKKTDKVDARQLAKMGKYHVETDKDFLPEVYVVEERIRKLRSLFTTFRLIKREINMNKNRIHSLFKQNLKPYSKKHIFDEIMTGLKPIDLDEEYKIQVEVLFDVLSKLEEKKAEIKKKILLTGEPFLADIDILVSISGISVFTALGLISDYATVERFQNAKQFSKYLRSTPRSEESNKKVKTGKTQKSGRKLSMELMLQSINHFRRESLFIDDFYHRLKKGKGACKTRTAVVRKMFVAMYYMLRDREYYRYMNKTSHDRKIREYKRFLDKNKKRG

SEQ ID NO: 151235 - protein, 339 aa, unidentified
MSKLLKNFIGIDISKSYFDVALIILMHSGQRIHHQFSQSKNGFKEMLQWLAQQGVIINEETIFCMEYTGIYNTGLVNFLVEQKALVWVEMPLRIKRSCGFERGSDDKTSAVKIAAYAFRHQDQIQLWRPLDSSIEKIKNLIAQRDRIVNAITGLTVPVKEMLECGCADEARQLEKLQKTPLKALQKARHAIEQLILKIVKQDEHIYKKTKQVESIKGIGKVTAVTLLAYTKGFTTFSTAKQLACYCGVVPFSKTSGSSVRFKPTVSNMANKKLKKLLHLCALSAIKNDPEIKLYFERKVGEGKNKMCVINAVRNKLIHRVFAVVRDDRFFEENYVRKCA

SEQ ID NO: 151236 - protein, 318 aa, unidentified
MQDQVMTWIGIDVAKESLDVAWSSGDKSQHLSAANSSAGFTSLVRQLPPPTEARVVVEATGGYERALVTALVEAGYRVAVVNPRHVRDFAKALGILAKTDRIDAMVLARFGHQVQPRVLEADPAERVELVQLVTRRRQLIDLRTMESNRLQQTTVRPAQKSIQHVLKLLAKEIDQLEAEIARLLQSDDDWRAKMELLSTTPGVAKVTSATLVAEVPELGRLNRQAIAALVGVAPFNDDSGRHRGTRRVKGGRAAVRRVLYMATLSARRCNPVIRAFSERLAAQGKKPKVIITACMRKLLVILNTMIRNNTPWRDLHAC

SEQ ID NO: 151237 - protein, 392 aa, unidentified
MKTNAIKEGTAEGAEQGRKTPQLIKLGVDVHWHEYVVVRQIDGGSPQSAQRFTPEGFVAWAARQTQLAEQVWCCYEAGPFGFVLHKQLERLGVRNVVVWPRNWDEYGARVKTDRRDALALCSSLDRYLAGNTHALAVVRVPTDEQEHSRSQTRQREQLVSERKRLGAQSLCAARYYGYDLPDQWWRPRRFAALQSQTPDFLLQLLARWQRLLLAIDEELDGLGGLIESAQQQMLPTGLGALTAQILDREIGEWNRFKNRRQIASYTGLVPSEHSSGQTQVRGPITKHGNPRVRHILIEAGWRLRQFQPEYRAVKQRQAAFDAAKQKGNSPARKRLGVALSRQFIVDWWRIKTGRTTPAQLGLQMSWPTCPHLPAKLQPSSETSTKPTTQPID

SEQ ID NO: 151238 - protein, 342 aa, unidentified
MEHFAGLDVSVKETSVCIVDDTGKIVREVKVASEPEALLAVLKNPAYHFKRVGLEAGPLSQWLYSALAEAGLPVICVETRHMRAVLKAQINKTDRNDARGMAQMMRVGLYRPVHVKTLRSQKLRMLLTHRQLLQSKAIAIENDLRGTLRNFGLKVGVVGKVKFEARIKELVENLPDLAALVEPMLVVRRVLREQIVILHRRLLAIVRDDEVCRRLMTTPGVGPVVSLTYRATVDVPARFRKSKSVGAVFGLTCAKYQSGEVNWDGRISRCGDEMTRVMLYEAAQSMMRSKKWSWLKAWAMQIARRRGMKKAIVALARRLAVILHRIWMDGTEFRWTRETAAA

SEQ ID NO: 151239 - protein, 339 aa, unidentified
MKLYAATDLHSSNNYLAIIDEHGERRFKQKLPNNPSIILEALMPYKEEITGIVVESTYNWYWLVDMLMAEGYKVHLANPVAIEKYSGLKHADDKHDAFWLAEMLRLGILPEGYIYPKEERPIRDLLRKRGHLVRLRTSLIISLQNIINRNCGRELDCNSMKRLKTDHVAPFLEDNEDLALAGRVSKEGIDFLTRRIKEIESAVEHKVKLQAPYANLQTIPGIGKIIALTIMLETGHVERFADTGNYVSYCRKVHTKWMSNGKQKGKGNRKNGNKYLAWAFSEAAELARRFDSKAKAYYQRKKQQTNFMVAHNALAHKLARAAYHIMRDNVSFMPEKLFA

SEQ ID NO: 151240 - protein, 403 aa, unidentified
MFYVGIDVAKEKHYVCILNDARELACKPFWIHTDIVGLNKLVKTLTNLSLSNDEFIIGVESTGALSENLYEFITDSDYKVVLLNSYQTAKYRDFSTIKKIKNDTIDAYVIAELLSTGKYKESYISNDDYQSLKVLGRLNRSLSDKIKSIKREISTVMAIVNPEITRVFPNIFSKSALEIIKAYPTAVDISKATPKKLTKLFRHIKGNNFNENKARFLIDLAGNSVYAGRAHEARALMILTNIRILELLCQEKSEIELQIELLIYGKIDAVDSCIDNLKSIPGVADKTISAILGECGDIRRFNSAKAFIGYLGLYPTQYQSGNYTSIGKLAKRGVPIAKHALYMAAVSSVMHNDQLRKLFRDKVSAGKSKKEALIIVSKKIATIIYSIFKYNKPYEPNRVFLPR

SEQ ID NO: 151241 - protein, 408 aa, unidentified
MKTLHKRCAGLDVHKAEVVACARLVLRGKVSHEVRRFPTTTRGLMALAEWLECLGVTHVAMEATGVYWKPVWHILEGCFQLVLANAAHIKGVPGRKSDVNDATWIADLLAHGLIRASFVPPAPIQELRDLTRTRKQLTREIVQHTQRIQAVLEEANVKLSSAITDIIGMSGRRILKAIIGGELDPATLAELGSSRLAASREELADALQGRIREHHRFLIGQHLKTIEQLEATIQAFDARIEAALLPFRETIDRLKQIPGLSTTSAQILIAEIGTDMGRFPTAGHLLSWAGLVPRLDESAGKRRSTRVRKGAPWLKPVLVQCAWAAARKKDSYYQALFLRLKARCGPKKAAVALAASILTTAYHMLADGTFYQDLGKDHFARRDPARTVAKLADRIRNLGYTVEIRSAA

SEQ ID NO: 151242 - protein, 345 aa, unidentified
MEYYAGIDVSLESASLCVVDATGRIVREAKVASEPETLIEWFRGLGIAVTRIGLEAGPLSQWLYAGMRDAGLAVELLETRHVRDAFKAMPVKTDRKDARGIAQLMRLGWFRPVHCKSLPAQEVRALLTARKLLQTKNHDVEMSLRGVLRGFGLKVGPTTPRTFPGRIRELVAGHTTLSTLVEALLAARNTLFEQWQKLEKRLRSLAREDGRVRRLMTAPGVGTIVALTYAAAIDDPGRFRSSKAVGAHFGLTPKKYQSGETDVTGRISKIGDGSVRTALYEAANVILTRPVKGSTLKSWGMRLAARAGMRKAKVALARKLAVVLHRMLADGTNFLAEKAAVGAAR

SEQ ID NO: 151243 - protein, 387 aa, unidentified
MAKQNDLSRCLVTLEQDATVIAVIEMGQSSWLAAGIVPGLERNPLKKLSPDPDALLQLLHRWQKEAVQAGRAIERIVVAYEAGRDGFWLARWLRAREIEAYVIHPSSVPVSREYRRAKTDRLDTELLKRAFLGWLRGEPKHCSMAAIPTVADEDTKRPGRERQSLVGERTRIINRVKANLARLGIRGFRANLAQASSRLEALRTPEGIAVPANTRAELQRDMDRLRFVKQQIKEIETTRAKRLAGAPNEQRHAMVRLLAQVVGVGIETADMLVQEVFSRNIRDRRALARYAGLTGAPDESGKKRRERGLAKAGNARVRRGMIELAWGHLLHQKASALTEWYRKRTSDTRGGTRKTMIVALARKLLIALWRLVTTGETPAGLLLRPAV

SEQ ID NO: 151244 - protein, 428 aa, unidentified
MSNFISVGIDVGADFSFMSLALPNQTFIGKPFKIVHNNLNSLERAVLTIREAEELHSMKARIVMESTGVYHYPLFCYLRDKVFDVAVINPIITKNSTNMNIRKVENDRSASKNLALIGLKPDLKTSVMPSDAVLDLRNIAREYYSLMDDRSAYVNKLSGLLRVAFPQYVGIFSKITVKTSLALLEKYPSPDDFLSARKSSIINMISKTSNFGKAYAEKQYQAIMEAAKSAGVFGYSVPSNSFQIRLCVSFIKKFDGEIASILTLMRKLVDNCVDEAFVKQIRLLETITGVGFLSAVTLLCEIGDFSVFKSPKQLFAYFGLDPAVKQSGNFTGTQVKMSKRGSAIARRVLFTTALVAIGRTRKGVANNPVIREYYLLKCQSKRKMVALGAVMHKLCNIIFAVLRDNKAFTLITPEQHMQSYEYNRPAAA

SEQ ID NO: 151245 - protein, 445 aa, unidentified
MSNYYLGCDVSKGYADFIILDSAKKTIEPVFQLDDTFEGHNQCYRFLQDFFKRYPGSTLFSAVESTGGLENNWLALFKRLADIMNIKSSRINPVGPNALHKASLERNSNDAISAKLIAEYLIIYPKKVNYAADDPYISLRKQWNLIEMYKKQKTQLLNQLNILLYTSMPFLMKYTRDGIPNWLLYLVHKYPTSSQLARTKETTLAKIPYISHKRACVIISDAKQSVGSADDEATAFIIKSVVEQILHLKNKIEQHKLYMIKRCDLPEVKLLQSFKGIGVYSAIGLVLNIVSIDRFPSAKHLASYFGVHPVYKISGDGKGGFHMSKKGRSAPRKILYMVARSSCVYNPLIKEVYINHLKKGNPKSSALGVCMHKILRIVFGILKHQKEFDPEIDRQNRNKTRIVKINDSKSDLKRRYQENEEDAPISRRQSIKRRKRKQSQNLLEV

SEQ ID NO: 151246 - protein, 345 aa, unidentified
MREVIRIGLDTSKHIFVLHGVDAAEQPVLRKKLSRKQVLEFFGKLPRTVIGMEACGASQYWARELGKLGHEVKLMAPQLVKPYVMRNKNDGRDAEGLCEAMSRPSMRFVPVKTAEQQAALMLAGLRDGLIARRTQLSNAIRGYAAELGLIAAKGLDKIEPLLAQIAQDESLPAMAREVFAVQGRQYAALQAELKQLEARLKAWHRADALSRRLAEIPSVGPITATRLVMKTPDPRAFRSGRHFAAWLGLTPKDHSTAGKTRLGKITRAGDEDLRRLFVAGATSVIQQVRRGRGHPSRWLVALLKRKPPKLAAVALANKVARIAWKLMATGENYDAARLDAMPAAV

SEQ ID NO: 151247 - protein, 333 aa, unidentified
MSSILRTVGIDISKDWLDAFAAPEGRASRFPNDRAGFRKLIAWIGPGVDRIAYEPTGAFHRDFEDTLLKAGLPLYAINPFQVRSFARSIGRRAKTDAVDARLLAIMASAIEDLRPTEARSEGQRELAELQLIRDALVRDRTAITNRGRNLRTPVGKRVTRQRLRQIDRQLKLVDAEIRQRIGEEQEMERRAEILTSIPGISDITAAGLIVHLPELGMLTRSRIASLAGLAPVTRESGNWKGYSFIQGGRHRVRTLLYMPAVVAVQHNPDLKRKYEALVARGKPSKVALTAVMRKLLVLANALVQQDRTWTAQPPREYSCPAFPTPSPAGSVHG

SEQ ID NO: 151248 - protein, 344 aa, unidentified
MGYYCGIDLGNKEIVLCILDGRRQVIAEEQVATNKKSLRQVLKGYKAMTCVVEASPLAEWLCNEVEGLGHKISIVCPRKAKVALASQSKKKTDKRDARSLAELCRSGWYEAVHRKSCEAREMRSYMTARKQLVECSTALASSIRGILRAHGVKLEGGTDEVGFFSKVEVAMKALPLLAQQGIKELLKAFELLHGQQRALYRALHKHTKENEVTKKLQTIPGVGPATAAAFVATIDDPNRFPDAGKVASYIGLTPSIYQSGETEYRGRITKTGDKLLRWLLVEAAHILLSRSGTPCDLRSWGLELEKKKGVGKARVAVARRLSGIMWKMWKDGSTFYSEPLHVAA

SEQ ID NO: 151249 - protein, 408 aa, unidentified
MNTLYVGIDVSSKSNVVYLMLPNGDKHSNFSVANSHEGSTLLVKKIYSALTSHSLDTVLIGLEATSVYGDNLVYFLREDATLAPFNRKIHVLNPKQVKKFHDTYNDLPKNDYVDSFVIADCLRFGRINKEVYMGEYRYKALQNLTRARFFAVQNLVKEKQRFMNVLFKKYSTMTQEKVFSDAFSTTALAVYDEFESAEALANMDLHELTDFIIEKGKNRFPDPVAVAKAIQKAARSSYRLPKTVNDSVNQVLSISITSMKALESQIKEFDKAIIALMELLPNVLISIPGIGPVYSAGIMAEIGDINRFDNQASLAKYAGLAWKQHQSGGFEAEVTRLIPSGNRFLKYYLCEAAFSLVRCDKKYSDFYHLKYKEVNRCQHKRALALTARKFVRLVFRLLKDNRLYCPAK

SEQ ID NO: 151250 - protein, 352 aa, unidentified
MDRYVGLDAHARTCTLGVLSRSGKRLSSMVVETNGRALVEAVKGVAGDVHLCLEEGTQSAWLHEILSPHTSELVVSVPEKKRGPKDDLRDAWSRAEDIRVGRVQTRVYKAPKHLAGLRSAACAYRLATRDVVRTKNRLKAVFRSRGIRSDIGVYEAASREQWLKQLPSGSRELADWLGQELDGLVPLRDEAEEWLLKEAKSHPIIRKLRTGPGMGPIRTAQLVAIVGTPHRFRTRRQFWSYCGLAVVTRSSSDWVQGKDGGWVRGQVYQTRGLTRQRHPVLKAIFKGAATSVIMQLPQDPLYEHYERMLASGIKPNLAKLTVSRRVAAIVLAMWKHQEVYDPQRHVVVTDKA

SEQ ID NO: 151251 - protein, 355 aa, unidentified
MTIVANTFAYVIGADTHSRTHTLAVLDARTGARVDTRTFPTTPAGLSRAVAWIARRTSGLADVLVTIEGVGSYGARLARACQDAGYRVVESFPTAARERRGRGKSDEIDAELIARSVLGVDADNLRDPRQDAGVRAALRVLIGARDLINLERTRSINALTALLRTVDLGIDARASLTKKQLAAIESWRTRQEDLATATARREAIRLARRVAVCDEDLAANRDEITALVAASDAAILLDEPGIGAINAAVIIAAWSHPGRVRSEAAFAVLAGVSPVPASSGNTTRHRLNRGGDRRLNRALSSIALTRMSHHPPTRAYVERRRAEGRTTKEIRRSLKRYIARQLYRRLSEQSGLDNT

SEQ ID NO: 151252 - protein, 410 aa, unidentified
MEPNTTVTLNPLLRCVAALDVHQNLLTACVLFVDEHGETKVEIREFRGFKRARREMARWIASHGPEEVVMESTGIYWKSPYSALEKVGIQAKVVNARHVKNVPGRKTDIQDAQWLAIVARAGLLTNSFVPPENLRGLRLISRQIQKLTGMLGSEKNRVHKVLTDGGIRLSVVVSDLHGKSARAMIKGLLAGETPEQVLRYADRRLKATDDELLEALEGELTECHRLVVRELIAHVEYLEQRIDALFQELLNGLAPQQAILDAFQTIPGVDCMAAAMVLVEIGDDMSQFGSPDRLAAWAGLCPANNQTNKKQRGGKKRKGNPYVRRILCEVAHAARRTQSALAAKFKGLALRRGFKRAIFALAHRILKIMFWLIQRGDYYRDATVDYEAQSVNRNAPRWIRMLKKHGYIPA

SEQ ID NO: 151253 - protein, 345 aa, unidentified
MSERYDGHEIVGLDLHRHRTVMVRMTPAGERLEVARFGNDTAVLRDQIAKAGPAPEVVLEATYGWYWAADALAAAGAAVHLAHPLGVKAFAYRRVKNDVRDATDLADLLRMGRLPEAWIAPPAVRARRELVRHRHKLVQGATWLKAQVHAVLAKCGRHIPVSDLFGVSGSRQLRQLPLPEPFRARVDSQLRLLVAFEAEIARFDELIRTEFRGDQGYRVIQRIDGIGPVLAAVLIAELGDVHRFTGAPAVCSWAGLTPKHRESDLHVHRFEITKQGSRLVRWAAIEAVQRAPASSPMRRTYDRIVARRGGTGKNLAKVAAARKLLTLVYYGLRDGEIRCLTAAPA

SEQ ID NO: 151254 - protein, 345 aa, unidentified
MQSMYYIGLDVHKKTISYCVKDGSGRIHAEGAIPATRLDLDIWMKRLPQPWTVAMEATIFTAWIYDHLQPHAAAVKVAHPLMLRAIAAAKKKNDRIDANKIADCLRCDFLPECYMASTEIRERRRTLRYRNLLVRQAVQMKNKIAVLLMEAGVSYNKQKLHKVRYFRELLATNQDIDDGLRALLRLCRETVVRLGKTESVLVRSLQRDSLLIERVERLMTIPAVGPITALTWALEVGDVQRFSSIKKAISYCGLCGAENSSANIIKRTPLSKQRNKHLQTMLIEAAKMAPRNSPDLAMLYDREKQKGNANRATLAVARKLVAYLVAVDRRQKDFLIVERENRTAA

SEQ ID NO: 151255 - protein, 345 aa, unidentified
MEIRTIGIDLGKTVFHLVGVNARGKVVVRKKCSRTQVLRFTSNLRECLIGMEACGGSHFLGRSLREQGHDVRLMPAQYVKPYVKTNKNDYIDAEACAEAVTRPTMRFVPIKTDDQLDLQSLHRVRERWVGRRTAVINQMRGLLLERGITVPKGRRHIEESLPGILEEPDNKLSGALRGLLRELRLEMQYLHRQIEQCDKLIVRIASELEQCKCLMTIPGIGPITATATIAAIGNGAAFKKGRGFAAWLGAVPGEHSTGGKQKLTGTSRRGNKYLRKLFVQGAHTVLLQRTKQASGLSMWLANLVSRKRPQVATVALANKMARMAWAVLTKGEAYRPPLVAQTVAA

SEQ ID NO: 151256 - protein, 342 aa, unidentified
MVQPVTVGLDIAKNVFHAHGVDAQGQKVLSRKLRRGQVEAFFAKLEPCLVGIEACATAHHWARTIAKLGHQVRLMPPAYVKPYVKTQKNDAADAEAICEAVTRPNMRFAETKTVEQQSVLVLHRTRAMLIRHRTRMGNTIRAHLAEFGITESIGRVGLSRLIDIIASGEDDRIPAVTRRALMCLVDQYCLLQGQILELDRQVMAWHKSNEASKRLATIPGIGPLAASALVASVGNASNFKNGRSFAAFIGLVPRQSSSGGKERLGKISKRGDHYLRWLLVVGGLAVIRYAQRHGTRRPWLLKLLQRRTTKIAAVALANKMARIAWVLMTRGGAYREPVPAAV

SEQ ID NO: 151257 - protein, 419 aa, unidentified
MSFKILKNNCCGLDVHKTWIYACIGITDSNGRTEYKQARFSSFTKGLQELCDWLVKYNCNDVCMESTGKYWIPVFNILEKNNLWVTLSHPKYTKPQKGNKTDRKDAKWICDLYMCGMVKPSFIPPADIRQLRDLVRYRFKLTCMITGEKNRAQNCLTVSNFKLDDVFSDVFGKSSHSITEQILQHPGETFDVAPFVDGRCKTPIEEIQAAVDGAISMEQAVKLRQCLNHIDELEKHQAEIEREIFRLSDKYESILNLIRTVPGFDKNPLTAIQVLSEIGGDMSVFPTAKNLISWAGCCPRNDQSNHKIKSTRISRAGSYFKPVLVQVANALIKSKKHPEFTTRYRRIKARRGHKKAIIAICRMILTAIWHILTDLKPYTPEGFLESRPVNASKVLTTSQALNLLKQRGYVIKDDTVPVT

SEQ ID NO: 151258 - protein, 341 aa, unidentified
MASYFVGLDVHLKHTSVCILDGDGKRIKRLTIRGPWRKIAEELKRLPGKVAVCFEASTAYGHLHELFSKVAARVVVAHPGQLRLIFRSKKKNDRADAEKLAKLLFLGEVPTVYVPSQDVRAWRQLVEYRRRLIAKRTRTKNALRAILRTVGQQPPREFGLWTRLGAAWLAQVELPQLTALQRDLLLEELAMFERQVGRAEKELERYSRDNPAVALLRTIPGVGIRTAEAVAAYLDDPSRFASSKQLGSYFGLVPSQDQSGSTNRLGHITRSGPSVVRHLLSEAAWRSVQCSPTVGRFHERIQQGNPERKKIALVATAHYLVRVMYAMLRDNRPWEEQVVAA

SEQ ID NO: 151259 - protein, 346 aa, unidentified
MKILALDLSKFKSVGCVYEAESGDHRYRRVKTTPQALHDLLVEVEPDRVVIEVSSVSGWVSDLVRALGIELQVVNTNGEAWRWRRVKQKHDQADALKLARLSAMNQLDLVHVPAPEIRQWRAVIKYRQHLVGRRTDIKNHVRELLVREGVILPRGRKCWSQEGCAALEEMCRSWEEVEIAELWRGELQSELQQLQVIQERLREVEAKLETLAAADDRVGLLRTIPGVGPRLAEAMVTLIDDPHRFKRGRDVGAYLGLVPRQYQSGEMNRLCRITKRGSKLLRSLLVEVSWVSLRHNPWLRRLYERMNRGSKTRKKIAIVAVARHLAIYCWAMLRDGTTWRQPCATQ

SEQ ID NO: 151260 - protein, 348 aa, unidentified
MNATIVAVDLAKNVFELAVADADWHIAQRQRLTRAKFLGFFVQLAPCQVVMEACGSAHYWARRISDLGHTVRLLPAQYVKAYVRRNKTDQADAAALIEAARCAEIRAVPVKTLEAQQIQSLHRLRSQWMSTRQRYVNTLRGILREFGFAIPLGVTVAKAQIGTALADPDGEVPDALRTTLADMLQEIRGLEEKILGVERQLNALTRADLRVQQLRQIPGIGALTSTALRAVVGDIQRFPSGRHFASWLGLTPNERSSAEKRRLGKISKQGDTYLRTLLVHGARSALLAAHRAERAGHSLDRLRRWALDCERQRGHNKATVALANRLARIVWASWKYERAFDGNWSAQA

SEQ ID NO: 151261 - protein, 319 aa, unidentified
MEILGIDVGKREMHAVLLQHDRSTSKSVANSAAGFKQLQGWLRNRKVTRVHACLEATGGWSEDLALVLHEAGHVVSLVNPTRIKSFAQSEMLRTKTDLIDAALIARFCRMHAPEPWTPPALEIRVLQGLIRRYQSLVQMRSEEQNRLQAPMIASVVKASIEATLAHLDREIARVDHEIDQLFDQYPPLRRQRDLLTSIPGVGETTAARILGEMPNIAEFRDVKAVAAYAGLSPRHYESGSIRRPSHIAKTGNGSLRTALYFPAISAMRYNPPLRRFAERLRERRKSNMVIITAVMRKLLTVAYGVLKSGQFFDPNYANP

SEQ ID NO: 151262 - protein, 352 aa, unidentified
MDTSKHFFQLHGVNAAEKVVLRKKMRRKEMVDFFKALAPAVIGIEACGASHYWARLLRSFGHEVKLIAPQLVKPYVKRGKNDTADAEALCEAMSRPAMRFVPVKTAEQQAALMLVALRDRLIRNRTQLSNAIRGYAAEFGFTAAKGMAHLDPLLDRLQADASVPGLARELFAAQAEEYAQLQAQIAEVDAKLMAWHKADECSRRLAKIPGVGPIGAALLMMKTPAPEMFRSGRQFAAWIGLTPKDHSTAGKVSPGIITRAGDKALRSVLVVGATAVIQHVRRGGRRSPWIVDLLKRKPPKLAAVALANKMARVAWKLMVTGDSYAAEIRARRRGERRIEISQTRGATHLQPC

SEQ ID NO: 151263 - protein, 343 aa, unidentified
MEHYVGLDVSLKQTSICVVNQVGSVVREGVVDSEPEAIAAFVRSKAPGAVRIGLETGPTATWLWTELKQLGLPVICIDARHAKAVLKMQINKSDRNDAGGIARIMQTGWFKEVRVKGPDSHSVRALLASRALLVKIKRDVENQNRGLLKNVGLVIGRAKFNVFAVRAEELIADRPQLIAVVGPLLKARQAIEQQTNDLNRKVLKLARYDAQVRRFMTVPGVGPITALCFKATIDDPARFKRSRSVGAYVGLTARRHASGEIDWTGRISKCGDAMLRSYLFEAASVLLTRVPKWSALKAWGMRLAKRNGLRKATVAVARKLAVILHRMWISQTEFNWSKKEVAG

SEQ ID NO: 151264 - protein, 341 aa, unidentified
MTEVSTIGLDLAKNVFQAHAASASGAILFRKKLRREQVLAFFAAQPRCLVAMEACASAHYWAREIAKLGHEVRLIAPTYVKPFVKRQKNNAADAEAICEAAQRPTMRFVAVKSEAKQASAVVFRTRDLLVGQRTQIINAIRGHLAEYGLIAPQGPSHVDQLIAQIEDPNSGIPDPARSCLAVLVETLRALQGKIVALDTEIAARAKRDDGARRLMSIPGIGPLIATAIEALAPPVETFRSGRDFAAWVGLTPLQRSTGAQERLGKISRMGERTLRRLLIIGASGVVRWARRKGVPAGSWLARMLARKPPMLVIVALANKMARIAWALIAKGGSYRAPAVAA

SEQ ID NO: 151265 - protein, 344 aa, unidentified
MTRFVGLDVSQKMTVICVVDDAGRRLWRGHCPTVPEQITVLVRRHAGDNARIGIETGAMTPWLVHELRNLGLEVVCLDARHARAALKMQINKTDQNDAEGLAQIVRTGWYREVAVKSMDAHTLRMLLVARSRLVSQRQATANTIRGLLKTFGLVVARGGKGLFPVRVREQIAGNPALIAIIEPLLAVWYAVRDQVAMLDRQMLARARNDQVARRLMTIPGVGVVIALAYTAVIDDPARFRRSVSVGAYLGLTPRRYQSGEVDTTGHISKCGDSLLRGYLYEAAAVLLCRDGRASILKSWGLGLAKRIGMRRAKVAVARKLAVIMHRIWSDQSEYRWTALPPTAA

SEQ ID NO: 151266 - protein, 483 aa, unidentified
MKTPTTQPTTAGTAVKKKQPPHPKSFQEQQFEMINPNAAGIDVATEEMWVCVPASRAEQNVQRFGAFTEDLYAIAQWLTECDITSVAMESTGVYWIPLYQVLEERGFEVCLTNAHHLKNVSGRPKTDRLDCQWIQRLHSYGFLPASFRPHDAICRIRTIQRHRDSLIRDASRHVQHMQKALHQMNVLLPKVVTDITGVTGMTIMQRILDGERDPVQLATLRNPHCKSSEATIAKALRGDYREEHLFVLQQAHAGYRFVHTQMLACDHAIEQWLTVIETQVDAAHTPMPPRTKTPQSPRKNQHTFTGDARTMLYERFGTDVTSLTGIDTGIGLALYTEVGADMRPWPTEKHFASWLGLSPNARSSGGKTKSSQTRDVASRAALAFRMAAKAASGSKTYIGAFYRRKKARIGAPKAMTATARKIAVIFYHMVKEHTPYHDFGETYYHTRDRERAVTRLRRQAARLGFTVMEPPTTSPDTGQETTQ

SEQ ID NO: 151267 - protein, 378 aa, unidentified
MNRIIKIGMDVHTTNYTLCIFEPSFEHDGTVHCITQVKPEIKKIIHVIETFKKKHENEELNIVCGYEAGCLGYSLYHELKEKGVECVILAPTTMKTEKGGRKLKNDYRDAKMIAECLAYGGYSAVHVPTELDNSVKEFIRMRDDIKENLKSIKQQIIAFLTRNGKQFNGKSYWTRKHIDWINTISFSEPLLQDTLKEYMIEYNHLCDRVETLDKQIEEVSLKEEYVEKVQQLQCLIGIKTHTALSLIVETSDFNRFKKGKMYSAYLGLIPGDDSSGGHEKKLGITKAGNSHLRKLLVEAAQGYTRGKVGFKSKDLKARQEKCSSEVVAYADRANERLRRKYYRMILRGKKYNVAKTAIARELACFVWGIMTNHIDLCS

SEQ ID NO: 151268 - protein, 301 aa, unidentified
MQVLYPRCAGLDVHKDTIVACVRCISPPMHQEVRSFGATTAELLKLADWLAEHDCTHVAMEATGVYWKPVWHVLEDEFELVLANAAHIRNVPGRKTDVNDAMWIADLLAHGLIRSSFVPPQAIQQLRDLTRTRKQLVREVSQHSLRIQKVLEDANLKLGSVLSDVLGKSGRAMLDAIVAGETDPACLAALAQGTARNKSAELREALRGRITDHHRTMLRLHLQVVDALQRTLAELDAAVGKALAPIQERARLLTTMPGISDLTASVVVAEIGVDMSRFPTAGHLVSWAGLCPRSDESAGSV

SEQ ID NO: 151269 - protein, 347 aa, unidentified
MRFYNQTHEHYCGIDLHVKTMYVCILDAAGKVLVHRNMPSTPEAFRDVVAPYRQGLVVAVECMFTWHWLADVCADDGIAFVLGHALAMKAIHGGKAKNDKIDSHKIAVLLRGGLLPQAYVYPATMRSTRDLLRRRLHLVRKRGELLAHIQNTRAQYNLPVFEKRLAYAANRDGVPDHFPDPSVRKSVEVDLSLIDHYDELITDLELTIVREAKRHDADAFHRLRSVPGIGKILALTILYEIHDITRFDRVQEFASYARLVKGRHESAGKVVGGGGAKQGNVHLKWAFSEAAVTFLRQNREGQRLKARLERRHGKGKALSILAHKIGRAVYYMLARHTVFSMEKFLAA

SEQ ID NO: 151270 - protein, 380 aa, unidentified
MNRVALQSKDNAGEQKLYMAMELSDKCWKLVFSDGGDKRRHETMEAGHRMELVEAIRKAKEKFDLSSEAKVVSCYEAGRDGFWLHRYLVTLGVDNQVVDSSSIETNRRKRRAKTDRIDGVKLLTMLMRYWGGERGLWSVVRVPSVEDEEGRRLHRELASLNKERTRHRNRIRGLLVAQGLRLEPKGDFLQRLEALTLWDGAPLPLELKGELEREYQRLRLVEAQRRALENTRKSRLRQADTASVQRVVQLMGLRAIGPNCAWLLVMEFFAWREFRNRRQLGACAGLTGTPYDSGASKRDQGISKAGNRRVRTMMIEIAWLWLRYQPNSKLSRWFRERFAGGGARMRRVGIVALARRLLVALWRYVEDGMLPEGAELKAAG

SEQ ID NO: 151271 - protein, 339 aa, unidentified
MSVYVGIDVHRKRSQVAVVAEDGKVQLNKNVVNGSEPMLRLIGDLPSGTPVAFEAAFGWGWLAALLEDYGFEAHLVHPLRCKAIASARLKNDKVDAAILAQLLRADLLPEAWIAPADVRQLRALLRHRVALVRLGTQLRNRIHAVAADHGYDRSASYWTGPGRGWLAELDLPAASREIVTDCLAVIDGLVPLIERIDGELHVRAKADSRVKVLRTLPGVGEFTALVMLAEIGDITRFPSARKLASWAGLTPTVRGSDLTVRHGHISKQGSAWLRWVMNQAAQTAKRSPEFAATYAAISKRRGKKIATIAISRKLLTRAWHLLADMQATTGTATPPQRQP

SEQ ID NO: 151272 - protein, 399 aa, unidentified
MTNQDHRVGGIDSHKDTIHVAVITAIGQPVTDREFPTTVAGYRRAVAWLIEHGPLSAVGVEGTSSYGIGITTELLAAGIRVVEVNRTRAAEKRKQGKTDPLDAYRAARSVLSGEASTEPKNPSIEPLRALTIARRSAVKSQQAAWRQIGSLLVTTRPALRDRFRDLPETKLIATLRDCRPDQIHDVDDADTLYALRTLARRYLALQDEITALEERMLRRATRANPALMAIKGVGPAVGAQLLITAGDNPDRLRTSASFAALCGTAPIPVSSGRTDKHRLSRGGDRQANAALHHIVKVRMSYEQRTRAYRDTRLANGWTTKEVFRALKRAVAREIFHALAGHTLAPDYSDLRPARHAKNLTLTAAAQHLGVWPARIGELELGRRPNDEPATRYRAWLAAA

SEQ ID NO: 151273 - protein, 353 aa, unidentified
MRRPKDKLIAGIDLHSNNVMLGVINQDGKRVAHRKVDCDLAEVVQFLKPFKAQLQSMAVESTFNWYWLVDGLRAQGYPIDLANPAKIEQYSGMKHVDDKDDAFHLADLQRLNILPKAHVYDPELRPVRDLLRRRTNLVHQHTALLLSFSSLHVRTTGQKLDLGDAKKMEPKQAPKLYEHPANQLIAQVQAEHIQALAKSISRIEKAVLACAREIPLYEKLLTLPGIGRILGMTITMEVGDISRFKTAGDFASYCRMVDAKRLSNGKRKAANNQKCGNKYLAWAFVEAANFARRYDERCRRWYDRKAAKAGKIIATKALGCKLAKAAWHVMAGQCDYDEKRMFPELATQTMKAT

SEQ ID NO: 151274 - protein, 336 aa, unidentified
MNYYSAIDLHSNNSYLVILDENDRIVLDKRLPNDLDRILLALAPYKEHIQGIAVESTYNWYWLVDGLMEAGYQLHLVNTTAVKTYSGLKRADDKDDARWLAHLLRLGILPTGFIYPKEARPLRDRLRKRLQLVQQRTRNILSLKSFYARQLGQSIPTNDIYRNVADFQLDDPQLNAIIRPNIELFVLLSNQIDLIERSLHQQVFKGKEDFNLVRSIPGIGLVLGMTVLLEIGSITRFDSAGNFASYARCVESKLISNNKKKGKNNRKCGNRYLSWAFHEAAHHSLAHYPQIKAFYTRKKRKTNGMIAIRAVAHKLARACYHILNKREPFNMDLAFQ

SEQ ID NO: 151275 - protein, 339 aa, unidentified
MNITTVGLDLAKNVFHVVCLNEHHIEVKKRMLRRNHVRQFFAQLPACTVAMEACATSHYWGRELIALGHNVKLIPPQHVKPMVLGNKNDYNDACAIAETVNRPKITFVAVKTTEEHDMQAIHRMRAQCIRDRTALSNSTRGLLGEYGISFSKGLAVLRRKIPELLEDADNGLSLRFRNLLARRYGQLVEIDEHIAFYTKELELLSKQDDACERLQTIPGFGPIVASAFRSAIGDGRAYVRGRHAAASLGLVPRQYSSGGKNVLLGISKRGDRYLRKLLVHGARTVVLHAANRDDPLSRWINRIRERRGYNRAAVAMANKMARMGWAILRHNTSYEPTLA

SEQ ID NO: 151276 - protein, 375 aa, unidentified
MGQHSEAFVGIDTSKLKNAVSVAEGGRGGEVRYLGEFDTTEAATRKLVNKLAAKYDKLTFCYEAGPTGYGLHRLIESLGHRNIVVAPSLIPKKTGDQVKTNRRDANNLARLSRAGELTAVWVPDARHEAMRDLSRARAASVDDLKRKRQQIASLLLRLGLHYPGKKTWGRAHRNWLASIKLAQHEQRFVFEELKLAERQAQERIDRVEAAIRAAVPEWSLREVVTALQAMRGIDLIAAVTVMAEIGDLTRFASAAELMGYLGLVPKENSTGDRVKRSGITKAGNTRARTTLVEASWSYRHPARVGREKLAKVEAAPEAARAIAWKAQVRLCGRFRTLKRKGKLPCVVATAIARELVGFVWAIGQTVRLTSTAGAR

SEQ ID NO: 151277 - protein, 453 aa, unidentified
MSQSSTLPQLNPQAAGVDIGAHSHFVAVPPGSDPDGRDVREFDTFTADLYALADWLSQCGVTTVAMESTGIYWIPLFQILEERRFEVKLVDPRRMKHVPGRKTDVVDCQWIQQLHSFGLLDGAFRPSDDIVLLRGFLRQRAMLLRCGAQHIQHIHKALEQMNLKLHLVVSNIVGVTGLRIIRTILAGERDPDKLAALRDRRCKNDVATIARALHGHYRSDLLFSLRQAVELFDIFQRKVAECDAEIETLLASFPDGSQGRTLPPARRKGSAYRNAPAFDARAALFRISGVDLTRIEGIDTSIALTLISEIGLDMSRWPSEKHFASWLGLCPGSKISGGRVLSSRSKRCANRAAAAFRLAAHGLHNAHSALGAFLRRKKAQLGAPKAITATAHKIARLVYALLRYGSDYVEVGEQEYERRYRARIVNNLERRARTFGFTLVRDPRPPSPSPLPT

SEQ ID NO: 151278 - protein, 348 aa, unidentified
MKYIGCDFHPSFQQIAMLDKETGEMVERRLLHTEEARAFYAGLQGAVVVGVEASGNMDWFESLLAGCQHQLWIGDAGAIARQEGRKQKHDRRAAALILKLMVENRFPQIWVPTVGERDLRQLLIHRQHLVRMRTRIKNQLQHIALNQGWQKKRKLWSQAGLELLRSLKLEPWTQQRRDTLLEMLEELEDKIKPLDQAVAKEAEQCKAARRLATHPGVGPVISLATVLTMGDVGRFADSRSWVSYLGLNPSEQSSGQRRRLGSISKQGNPFLRYLLVEGAVTATRRDKDLARMYARLKAKKHHGVAKVAVARKLAVRLYWMARTEKSYPEVVRTQGSQSHPVAKLRPSA

SEQ ID NO: 151279 - protein, 343 aa, unidentified
MTHYAALDVSLKLTAVCIMDGAGNIRHEEMIPTDPDDLITYLRSPGVEYVRIGLEAGSLTPWLYHAMIEAGLPVVCIETRHAKAVLKVQGVKTDRNDARALAQMMRTGWFKAVHIKSKESQRIRVLLNNRKCLASKRIDIENQIRGTLKVFGLKTGRVTTAQYEPRIRELIGDDRELQGYIFPLLESRRVMREQGRILDKQVRNIATGDEVCRRLMTVPGVGPIIALMYKATIDNPHRFTKSNTVGAHLGLTPGKYASGEVDYDGHITRCGDEMMRSHLYEAAQVLLTRSAKWSALRAWDLQIAKRRSMKIACVAVARKLAVVLHRMWVDNTTFCFSAREVAA

SEQ ID NO: 151280 - protein, 341 aa, unidentified
MASIRFYVGIDISKETLDITILNESVLIEHEKISNTVKEIAGWLKNAASKHGAKRSNTLFCMESMGLYGAYLQKQLIRIKAKFWIESPLQIKRSLGLQRGKNDKVDSLRIAQYCYVNRHNFTQYEKPRSEIEQLRLLTGLRNRIISSHNKLSVSIKESKNYLKKNNAQTITAFCKNSLTSLKQDKITIENTMLEVIKSDERLNKLYKILTSIQCVGKITAIQLLVVTNEFKKFDSPRKFACYCGVAPFEHTSGTSTKGKTRVSRLANIKMKTTLHLSAIVAVKCKGELHDYFKRKVAEGKSKMSVINAIRNKLIHRIFACIREERLYQKTWKPAAVKKEAF

SEQ ID NO: 151281 - protein, 335 aa, unidentified
METVYFLGIDVSKKMIDSALTINGKDYHQNQAQNTSKAIGIFFAEMRKMFGITDSQIVVCMEHTGIYCLPLLDFLTENNIKTCLESALKIKKSQGLTRGKSDKIDAMRIAHYAYKNREELHLWKPERDVVQRLKALMVTRDRLVKIRTQLAVPINECEEFIEESIRQDMVKSCRRTLKALEVDISNIEKAIKDLIKEDSQLTKQVKLATSVPGIGIITATNMIITTGEFIKISDAKKFACYTGVAPFPHRSGTTIRGKTRVSSLANMNMKKLLHLAAMSAVGYNEELKAFYTRKVETGKNKMSVLNAVRNKLISRVFACVKNNRVYQKNYSHALA

SEQ ID NO: 151282 - protein, 418 aa, unidentified
MEDERNWFVGVDWSSKTHHVHVADASGRKVGERAFTHGGEGLADMVAWLLTVTGAAPAAIFVAIETPHGPVVETLMQHGFRVHAINPKQLDRFRDRFSPAGAKDDSRDAEVLGDSLRTDPHCFRPLAPLDPIVVELREWSRIAEDLQAERNRLGNRVREQLWRYFPQLLDVADDYAAPWFLDLWRLVPTPQKASRLRVADLERLLKRYRIRRLAAEQLLAKLRTRAIPVAPGTVAAAQAHLKTLAKRLDLVNRQTAEANQQIDRLTQSLAGDEEDADGQSNEQRDVTILRSIPGVGRTVLATLLAEASETLHRRDYHALRCLSGVAPVTKRSGKSRMVIMRYAAQTRLRNAVYHWARVAVQHDARCRTKYAALRARGHGHARALRSVADRLLAVACAMLESRTTFNPDRTTKKLSPAA

SEQ ID NO: 151283 - protein, 360 aa, unidentified
MLYLGIDQHRKQLTVNVRNEAGDAILRRQVSTEWDRVRVFFEQLQQLAEPEGGFAAIVEVCGFNDWLLKMLTEFGCHETVLIQPEQRSKRKTDRRDAHQLSGLLWVNRDRLLAGERVEGVRRVQPASAQDAEDRQITELRKRMGQLRTRTINKIKALLRKHNLEQEQPAKGLDTKRTRKWLAALALGPIDRMEMDLLLTQWKVWDEQIETLEKEIQERQVQNETACVLATIPGCAAYGSLTLASRIGLIERFPRPASLANYWGLTPGCRNSGEATDRLGSITKQGNATARFILGQLVLHVLRRDAWMRAWYGRIKRRRGSKIARVAVMRRLATVIWHMVKNNEPYLAGGPPRRKFQAQGA

SEQ ID NO: 151284 - protein, 391 aa, unidentified
MYYIGIDIAKRNHEVSIIDADGKILSKSISIANSQKGLDTFNNYLSSFNVTSENSIIGMESTGHYWLNLYSSLVNLNFNVFVINPIQTDAFRKMYIRKTKNDSKDSYIIAQIMRFGEFSSSSISDENIFAIRQLSRYRSSLVDECSNWKRKVITILDQVFPEYSDLFSDTFGVTSKELLSKYPLPENMLEVSTKELTSLLNKASKGRFGIEKAQEIKEYATKSFGISFAKETFSFQIKQIINQISFIESQLKELEEKITNILKTLNSEITTITGIGDILGASILGEIGDISRFEKASQLVAFAGLDVAINQSGEFTGAEMKITKRGSPYLRRSIWIAATIACFKDPALSVYYKKLIDRGKKHLTAVGAVARKMCNIIFSVLKNKKPYTPNI

SEQ ID NO: 151285 - protein, 400 aa, unidentified
MLSIGIDVSKGKSTVCGMKPGGEIVYAPFEVQHTREGMSELVSLLRSSGEEVRAVLESTGSYHCPVVAALLESGIFVSVVNSLRMKRFCSQSIRKVKTDRIDAMQIALYGLAYWQELQPTKLPEDTYRELQLLARQYYQMTSMLIKAKVDFNALCDQVLPGMQELMSDHAGRHKLSDFVLRYHHTTYILETGETRFRKDYCKWAEKKGYRNCERMAALIFATAQNGIPVLPNAPSTQIVITEAIRVLHTVEASRDAILTQMQALAKTLPEYSLVREMPCIGDTLAPRLIAEIGDVRRFHSKRALIAYAGIDAPPYQSGKFCANNRHISKRGNRYLRKTGYEVMQSYVMHKPANDPIFTFIEKKRGEGKSGKLAMVAGLNKFLRVYYGKVTELYRSLPAIE

SEQ ID NO: 151286 - protein, 486 aa, unidentified
MGYKGNGDAEMTDTSLVRVRGVSRRRSASPSLSMVRESSVTLVSGASRIPFERSSRFRRFPWRRRSSTMMEQAMAMRKREEQVFPNAAGIDIGASSHWVAVPPDRTDAPVREFGVMTDDLNALADWLLACEVDVVALESTGVYWIPVYEVLEQRGLQVWLVDARQVKYVPGRKSDVQDCQWLQKLMSHGLLRAAFRPAADVCVLQAVVRSREVLLTEQASWVQRGQKALVQMNIQLTEVIRDVMGQTGQAIIRDRVAGERDPKALARHRHRRIKASEPDIVRALTGNWREEHLFVLKQALGMYDDIGAHLHECDAKLRELLAERSVVNVEIGKIPRTGSKAREAFDARQQLAHWAGADLTRINGLGIDSVMKILSEIGTDLSRFANVKHFCSWLGLCPATRISGGKVISARTKRLANRVRQALKMAAMCLSHSDSALGAFYRRRCSRMDKPRANTATAHKLARMVYFMLTRGEAFVDEGQPRYEEQ

SEQ ID NO: 151287 - protein, 310 aa, unidentified
MTIQPGFVGCDISKDHLDIFDDAIGKPERIANDAAALVPLIDRWKNKDILVLFEATGSYDACLRRALTAAHIPFARVNPARARDFARATGRLAKTDSIDAAMLADMARALRPACEPAPAPEREALARLHKRRDQLVAMRKQERTRLAAIDDPVMAEDVEAHIAWLSTRIVEIERQTRDLIAAAVLLTEEQNLLRSVPGIGPVAATTLMALMPELGTRSPKTIAALAGLAPFNVDSGQFRGKRVIKGGRRRIREALYMAAITATRSKHRFARIYKAMIDAGKPPKLALIAIARRILVTANAILRDRTAFQP

SEQ ID NO: 151288 - protein, 426 aa, unidentified
MAIVVGLDVHRSQITYDALNTATGEVMTGRIAPADRATLRTFLVRWAGEEVQAAVEATTGWRFVVEELRRAGADVQFAEPAETTAARGPKRRAKTDRRDARHLRDLLIEQRLPQSWIAPEHILELRALVRLRKTLVEQRTEWLQRIHSVLFHHGVRLAVSRLDGRDADEQLTALNVSPAAQRQITVALAVIDHVNAQLAQLDKDLRAFARAQPGCRALMGHYGIGPQVACAILAELGDTRRFSSSRQAVRFAGLDITVHESDGKRRAGHLSRQGASRAALGRVRSRGVGVQARVARPRLLPAAQGARRREPRRTVDRAQAAAPRAPHATRARRRRTRSRHLTRSIDHRGCQPTTPMTCGRLQPKSLPPQRARARDLGPEGMSRRTAPRGSSLSTILSPRPCPGSSTQIGRTRSVPRFRGGGDHAAA

SEQ ID NO: 151289 - protein, 373 aa, unidentified
MKYSTVYVGMDVHKESFSLCCYTNEKEQAEYPQKVDGHYSKVINYIEAMRFHYGDDALFICGYEAGCLGFTLYRQLTDHNVKCIILAPTTMLQQKGRKKVKTDKRDAALIARCLAHHDYSPVHIPTEQDEQTKEYIRMRGDHKLALKKVKQQILSFCLRHNYRFDDTTNHWTQAHLKWLRSLKPEGLYAEILQEYLLTYDNLTDKLERFDKRIEELASDETYQENIHKLSCFIGVKTVTALAVLTEVGDFKRFASAQHFASYIGLTPGEDSSGDDQNRLGITKAGNRHVRSLLVEAAQSYSRGQIGFKSKALKARQAGNSPEVIAYADKANERLRRKYYRMVLRNNKKTNVAKTAVARELACFMWGMITGNVA

SEQ ID NO: 151290 - protein, 409 aa, unidentified
MDVVYERCCGIDLHKRSVTACVLTPGGGGWPTKEIRTFDTMTADLLALGDWLAQAGITHVAMESTGVYWKPLWNLLEERFTLLLVNAAHVKVVPGRKRDVGDAEWLADLLRHGLLRASFVPDRPARELRELTRYRSSLVRERTAEVNRLQKTLEGADIKLASVVSDVLGVSARAMLAELVAGQEDAAVLADLAVGQLREKLPALERALTGRMSAHQRFMLTQHLAHIDALDAQVAAVGEQIAERMRPFDAQLRVLDSIPGIGRWSAEVIVAEIGTDMSRFPTAGHLASWAGMCPGHDESAGKRRSGKTRKGSPWVRVTLTEAAYAAGRSKGTFLSARYHRLIGRRGKKKTAIAVGRTILELCYELLTTGQVYDDRQARTPSEHVPMTEEERLVQRLEKLGHRVTLEPAA

SEQ ID NO: 151291 - protein, 327 aa, unidentified
MYVCIIDHQGEILLHKNIDAAPEPLLKILEPYRQDVVVGVECIFTWYWVADLCDQQVIPFVLGHALYMKAIHGGKAKNDRIDSHKIAALLRGGTFPMAYVYPAEMRATRDLLRRRNYLTRKRADLLSHIQNTNSQYNLEPFGKKITYKSNRGGVPDRFADPDVRMSVAVDLELIAQLDAIKKRLELHILRSARAHDPQALHLLRTVPGVGLIISLVILYEIYDIARFERVQDFASYARLVKCAKESAGKRTGGGGGKIGNAHLKWAFSEAAVLFLRNNPEGMKFKKHLEKKHGKAKSLSILAHKLGRAVYYMLKRDQAFDMAKFLRT

SEQ ID NO: 151292 - protein, 410 aa, unidentified
MEVLYQRCCGLDVHKETVVACLRVVSGGEVVREVRTFETTTVSLIALSEWLAENGCTHIAMEATGIYWKPVWHILAGGEFQLILANSAHVKNVPGRKTDVNDATWLAELLAHGLIRASFVPDTQTQELRTLLRTRKQLVREKSSHILRVQKTLEDANIKLDSVITDIIGMSGRAMIEALIAGESNPAKLARLANYRLRASQEKLREALRGRVTKHHRFLLRLHLNQIDALDASIATIDQQVEAGIAPFRVAVELVTSIPGVSDLGAQVIVSEIGTDMSRFPSEGQLISWAGMCPRNDESAGKRRSNRVRKGAPWLKTTLVQCAWAAVRKKDSYLKAQFLRIKARRGPKKAIMAVAASILTAIYHMLKDGTLYQDLGSNHFQSRSKGQQTKRLVKRLADLGYDVALTPLAS

SEQ ID NO: 151293 - protein, 363 aa, unidentified
MHNDSIAVSLAPSDSTEVRRYGIIGGEHDDVLKLAHKLQAAHPGTTLKFCYEAGPRGFALCRCLQAQGLDCILVCPSKVPRKPGERVKTDRRDADQLARLYRAGELTGLYVPEPEDEAMRDLIRARFQVGKQQHRSRQQLKMYLLRHNLRYGGQSSWTPAHLRYLAKIKMPFPVQQIVFQEMLEVISSATAQLERYDQEIERAVPNWRWEPAVRALMSLRGMALLHAATLVAELGDFNRFEHPGQLMGYLGLVPSEHTTGKDRQQGGITKMGNAPARRALVEAAWQYRIPARLSPQLKKRQEGLPKSITDIAWEAQRRLHHRYIHLTRVGKKKSQVAVTAVARELSGFVWAIARQVKPLSATP

SEQ ID NO: 151294 - protein, 320 aa, unidentified
MKHKVGKDNTVARFIGIDVSKQWLDVATLPERETRRFSNDGAGQEQLGAWLIQLAPELIVMEATGGFETRVATALAAEGLALAVVNPRHVRDFARAFGILAKTDRIDASVLAAFAEKVHPPVRPLPDEDRRELIDLVDRRRQLVTMRAEEKTRLSQATASARQDIKEHIEWLDERLRRLDIDLTAKLRSSSLWKAKEEILISVPGVGRVTVFTLLARLPELGALNRRAIAALTGVAPFARDSGQHRGRRMIWGGRADVRSVLYMAAVTAARINPVIKSFYLRLKQAGKPAKVALTACMRKLLTILNTMLRTNQSWHAPTT

SEQ ID NO: 151295 - protein, 374 aa, unidentified
MEGITFVGLDAHKVWISVAMLMPGRETAIEWQVPNEAAAIRKMLRRIEREAPGEVRFCYEAGPCGYALQRQIIAWSEASCMVVAPSLIPTKPGERVKTDRRDARKLAFLFRAGLLTEVQPPTEADEAARDLCRAREDARVDLLRCRHRLTKFLLRRGIVFTAGKRAWTRMHRQWLYSLRFEHVCDQTVLADYLLAVEHIEQRLTSFVSQLEQLAKDERYAQAVATLRCFRGFATVTAVTIVAELHTFHRFSSPRKLMAFVGLVPSEHSSGQRRRLGAITKTGNSHVRRLLIEAAWNYRHRPRVGTLARRRTGQSPRVIALADRAMQRLYRRYIHLTLKGVPSQKATVAIARELVGFVWAALSPLAPAAELPHAS

SEQ ID NO: 151296 - protein, 360 aa, unidentified
MAKAKLINSPSVVGGVDTHKDLHVAAVVDRNNRVLGSEFFATTRQGYRQMLAWMASFGTVERIGVECTGSYGAGLLRYLQSAEIEVLEVTAPDKMERRKRGKSDTIDAESAAHAVFSRIRTVTPKTRSGMIEALRVLKVCRKTAVAARRIALQMIQMNIVSAPDELRDQIRHLTRMQLIRTLAAWRPDITAYRNVQDAYRIALKSLARRYLELHDEIADLDVMITSIVDELAPELIRRKAVGYECASQLLITAGDNPQRLTSESGFAALCGVSPVPVSSGKTNRHRLNRGGNRAANSALHIIAIGRLRTDTKTQEYVAKRVAEGHSKMEALRCLKRYISREVYTLLRNQNRQINSTQITT

SEQ ID NO: 151297 - protein, 453 aa, unidentified
MPKPTTGGHPDLKMVNPNAAAIDIGSTMHMAAVNPSTCDMPVRAFGTFTQDLHALGDWFLDCGVTSVAMESTGVYWIPAFEILEARGFEVILVNARYAKNVPGRKTDVSDAGWLRQLHSYGLLRGSFRPDAEIATLRAYMRQRDRLTEYAAAHIQHMQKALMEMNLQLHHVVSDITGATGMKIIRAIVAGERDPDVLADNRDVRCKSSPETIRAALVGNDRAEHIFALAQSLDLYDFYKAKIEECDHRLEAAVTALSVKGGEDLPPLPKARIKGRQVNAPAFDVRAALYGVLGTDLTQIHGLGASLALKLVAECGTDLRAWKTAKHFTSWLCLAPGNKISGGKLLSSKTRRSSSRAAALLRLAATTIGRSDTALGAFYRRLSARIGKQKAVTATARKIAVLFYNAVRHGKTYQDQGAAAYDEKHRRRVLANLQRRAKTLGYALAPVLHEPAVS

SEQ ID NO: 151298 - protein, 350 aa, unidentified
MPIVGGFDVHRAQITFDYLDTETGDVCTGQVRPATRDTLRRWLARFAGRGDVAFAVEGCTGWRFVVEELARAGVQAHLAEPADTATQRGRKRRAKTDRADSRLMRELLAGQRLPESWIPPAHVLEVRTLGRLYVALLSERLAWQQRIHAQLFHQGVPPIKGLLTADGRVALREAELSPAGRQLLDTALVAVDSLTAQLVPLRRQLCSIGCRQPGARALQGQYGIGPLVAAIIWAELGDCRRFSNSDQAVRFAGLDITVYSSDGKRSAGRLARQGSPELRWALFEAAKVNARQGSPEHDYYVAVKERLGGKRPALSVARKLVRRCHHILRELGDQAWAEIELNPVPKGKAA

SEQ ID NO: 151299 - protein, 385 aa, unidentified
MLSERRFAHEEDGLAELCGSLVEHGVGRVAIERPEGVLVERLLEAGVVVIPIHPNQLKAARPRFRASGYRAKSDSFDALCLAELARTDNHRFRVLTPDSDQTKALRALTRSREDLVGRRVALANRLRAELEAFWPGAAIMFKEIDSAISLAFLKRYPSPKEASKLGEKRLLGFLRRNRYCGRKSASELLRRLRKKAPQGRAGEAEMEARREAVLALVAALETLVGRIKRLEGRIAEAVRAHPDGEVFLSLFLAHKSTLTAACLLAEIGDRRERYPTNESMAADAGMSPVAIESGKRKVAGFRRACDKRLRKAVATLAESTRHHNRWAKDIYQRARGCDHAHAIRILGRAWVRVIFRMWREGMPYDPARHGGLRRLQSQEGLPQGV

SEQ ID NO: 151300 - protein, 338 aa, unidentified
MVYGAIDLHMRYSQIRIVDEDGAVVRDQRVVTSRERLTQAFASHGPMRILLETGTESEWVAQALEMAGHEVIVADPNYAPMYGELRRKVKTDRRDAAALAEANRRGWYRRAHRSSPAQRETTQMLRSRRFLVQTRSGAVSLLRSLLRQSGHRLGTGSCETVPTRVSRLAVAPELGETLAPLCRQIATLTTEIHALDARLQTRTATDAIVARLRSVPGIGLIVATTFRAFVDRHERFGHAGQVSAAIGLVPREDSSAERRHRGHITKAGPREVRSMLIQAAWVCWRHPGSATLRGWTDRLAARRGRRIAVVALARRLSRILFALWRDETTFDGRTLAAA

SEQ ID NO: 151301 - protein, 348 aa, unidentified
MRQETKVYVGLDVHKEFCQACVMNGSGQVISNERFLSTQEALDGFLDRFEDAEFVLESTGIWEFIYEGIEKRGFEVVLAHPLKVRAIAEAKVKTDKVDAEMLAHLLRADLIPRSHVPPRDIRNLRQLVRHRAYLVRQCTSIKNRIHAELLRRGIRRPDNLKKTFSHKHVEWMRSLGILTIDSSLNCLEGIQGQIKEVESFLLVEYNSRKDAQLIATIPGIGFYGALLILAEIDDIHRFSHPEKLCAYAGLVPTVHQSGSRGHNGSITKNGSPHLRWILIEAVHVHTNYCPESKLSKFHAKVAQRRGKQRATVATARKLLHTIYWMLLNKEKFHCQGFNLVEKAASMNA

SEQ ID NO: 151302 - protein, 407 aa, unidentified
MEVIIENACGMDVHKDSITACAITAKGKEIETFSTKTIYLIELVDWVKKHNCTHVAMESTSVYWKPIVNLLEAEGIEFLVVNAQHIKAVPGRKTDVKDAEWIAKLLRHGLLKASYIPDRNQRELRELVRYRRSIIEERARQYNRIQKVLEGANIKLGSVVSDIMGVSSRDMLRSIAEGNEDLEELTNFARGRMKNKKDELKLALQGYIQEHQRFMIKTIMDHIDFLTEQIDKLDKEIEKRMEDDQEDIDRLDSIPGIGRKMAEQMLAEIGPNIKEQFPTAPQLCSWAGLVPGNNQSAGKRKSSKTMKGNKYLKSALIEAAHSVRGSKNYLGALYRRTASRKGKKRAAVVVAHAMLRISYYLLTRKEMYVDLGEDYFDKQRQQSIVRHSLRRLENLGYTVTLVEPKVS

SEQ ID NO: 151303 - protein, 482 aa, unidentified
MKKKNIYVNQSQELLTLFEEAGNGTKVMCVPIDYAKKDHVVMFCNGNGHILRKPFSIKNSPEGIEYLTEQVTRSCSHRRIDPKHVFFGGEDVGSYAENFVNTLRSGGWIVAGVNAHDAKEQRANIQASTDRLDLMGIASMLLNRRGNCSPAQSGIYRNLRTVVRHRRKLVAMSTEVKNRIHTVVDRLFPGFLDEKKSGICSFSESSLYLMENRFSPHQIRRRKKEKLIGILHRYGTSNPESTAAKLQEYAAHVLNTPDEYISTLQLSLTQHVKHFRCLQDSINQLEHEVAVWLAQTQGAFLTTIRGIGIVLAAGVSAEIGNPHEQEPLNNLVSYTGIIPRVKQTGGPEGKTYTGKVAKRCNRILKDYTVQSGNHMGLHGPEDLMADYKRREAAGQHADFGIGRRYLRMGMCLMRTSQIYMPQRLRNTEVKPEERAGYYLMTWPSLRGKWNKAGALEAAFEKDRPLGQWRSMVQELYGIKLKL

SEQ ID NO: 151304 - protein, 380 aa, unidentified
MKYTQNEKILQVTEKTLVVGVDIAKERHVGRAFDFRGVELGKRIEFENRKEGMEKFLDWANKIMKANGKENVIVGIEPTGHYWLCFEQYLRENGIKVVLVNPFHVKRSKELDDNTQTKSDIKDPKTIAMLVKDGRYTEPNIPEGIYAEMRVAMNIYERLQKRLSVLKNQIINWLDIYFPEFLEVFSDWEGKIAIATLREMPLPCDVVEKEVEGIIEYWCNKVDKRAISRRRAMDLVETAKRSIGKKEGRKLARQEIKYLLSQYELLKKQIEEIEGEMAELLREVPNGEELLRIKGVGVKTAVGFISEVGDIRRYEDARQIQKLAGLNIVENSSGKHKGQTCISKRGRGRLRSSLFKAMITIVAKNEEFKQLHRYYTMRQC

SEQ ID NO: 151305 - protein, 411 aa, unidentified
MEAIYESVCGLDVHSGSVQACVRRLKEGRIRQEVRAFGTMTRDLLALADWLAAGEVTHVAMESTGVYWKPIYNLLEGRFEILLVNAKHVKHVPGRKTDVKDCQWLAQLLQCGLLRGSFVPDRPQREMRDLTRHRSQLVHQAAAVANRIHKILEDANIKLGVVASDILGVSGRAMLRALIEGRQTPQQMADLARRQLRGKIPQLRLALEGHVTEHHRFVLAELMDQLEDLERRIERFTRRIEEISGPFASAIRAVTELPGFDERSAQNVVAEIGTDMTQFPTDAHIASWAGVCPGSNESAGKRKSGRTTKGNRWLRAALSQAAWAASRTKQSYFRAQYRRLVGRRGKKRAIVAVGHSLLVVIYHVLLTGRPYQDLGVDYFDKLDAARIVRSHVRRLESLGYKVTLAAPEKAA

SEQ ID NO: 151306 - protein, 416 aa, unidentified
MEVVHRRCCGLDVHKKSVVACVVLSDPSGPPQREVRTFGTFTHEVLALADWLAEQQVTHVALESTGVYWKPIWNLLEDRFALLLVNPRHIKAVPGRKTDVHDAEWLAELLRHGLLTASFVPDRTQRELRELTRYRTSLINERSAAVNRLQKTLEGANIKLASVASDVLGVSSRQMLAAVVEGTTLEASALANLAHGQLRDKVAQLEHALSGRVGPHQRFLLAEQLAHIDALDASLERLSTEIAERMRPFDELIERLDAIPGVGRTIAEVLLAEIGADMTRFPTANHLVSWAGMCPGHNESAGKKRSGKTRKGSPWLRAALVQAAHAAARAKQTYLAAQYRRLTARRGTKKAAVAVGHSILVIVYHLLTDPDCPYFDLGATYFDQRDPGAVQRRLIHRLEALGYHVQVTPLAESSAA

SEQ ID NO: 151307 - protein, 422 aa, unidentified
MLEATSDREEIIERVAALDIGKAELVCCVRVPGAEGKSRRVQEVTTYPTMTRALLGMVDRLTELEVTRVVMEATSDYWKPPFYLLEAAGFETWLVNAKDVKHLPGRPKTDKLDAVWLCKLAERQMLRPSFVPPPPIRVLRDLARYRADLIGVRTAEKQRVEKLLEDAQIKLSVVATDIFGVSGRQMLAALIAGQRDPQILAQYARGRLRGKLAALEEAFTGRFNDHHGFLLSKMLARIDQVSADLDDLDAAIEGEVAPFAQAAARLDEIPGIGHDTACVILSEIGMDMSRFPTAAHLCSWARFAPGVKESAGRRKGNGTTGHGNSYLARVLGEAAVSAGRTDTFLGERYRRIARRRGKKKAIVAVGRSILVIIWHLLGDDQARFHDLGADFYDTRAGTEHAKRTHIRQLQALGYQVTLQPAA

SEQ ID NO: 151308 - protein, 410 aa, unidentified
MDVLYTRCAGLDIHRDSIVACVRLAEAGGVTRLVETFATTTTDLERLSEWLRGHGVTAVAMEATGVYWKPVWAVLAGDFELVLANAHHVKAVPGRKTDVNDATWLADLLAYGLIRPSFVPSLSEQALRDLTRARKQLTREKASHVQRIDKTLQAANIKLGSVLSNIMGQSGRALLEALAAGESNPEQLAGLVRTKIRASHAQVVEAVRGRLAAHQRLLLRLYLTQVDALDAAIAAIDHELGERLKPVQETVQRLTTMPGLSPLSAAVVISEIGLDMSRFPSAAHLISWAGLCPKNDESAGKRRSTRLRPGAPWLKAVLVQSAWCAVRVKASYLHALFQRLKARRGPRKAIVAVAAAMLTAIYHMLKRGAAYHDLGPDHFQRTERSRLATRLARKLGELGFDVTLTQRAAA

SEQ ID NO: 151309 - protein, 366 aa, unidentified
MKKTSTVRVNGNMIFKGHKLTIGLDLGDRWSFYCVLDEAGEVLLEQKVPTTPEAMKQTFSRISQSRIALETGTHSPWVSRLLTELGHEVIVAHAQKVQLITKSNRKDDRHDARTLARLARIDPELLGPVRHRSVQAQIHLTVIRARAELVSARTALVNAARGLVKSYGQRLPKCDTQQVSRELAAELSTELRDVLEPLLQEVESLNERIKEYDERMEKIAKEVYPEVSLLKQVKGVGTQIALTYVLTIEDPHRFRKSREVGCFLGLRPGRRNSGESEPEKRISKEGDRYLRTMMVQGAHYILGPFGQDSDLRRWGLKLAERGGKNAKKRAVVAVARKLAVLLHRLWVSGEVYEPLRNSHKAMRAVA

SEQ ID NO: 151310 - protein, 350 aa, unidentified
MIIIGVDYHPSDQYIALVDTETGEYEERQLNHSEGEAEKFYRELAARGASVRVGIEATGYSRWFERLLAELSMELWIGDAAKIKTKRVRKQKTDREDARLLLRLLRENNFPRIWVPSPENRDLRQLLWHRHRLVQMRTRIMNQLQALAMNEGQRRKKKLWSEAGRAQLEKLPLAAWAARRRKDLLELLDRMNPSIEELTAAIEREARKWPEALRLMTHPGVGPLTALAFVLIIGTVERFQCGKQIGSYVGLIPCEDSSAGHQRLGHITKQGSSLLRFLLGEAAQAAARCDADWRRRYLHLAMRRQRNIAKVAMARRLGVRLYWMWRKGWEYAEWVKFGSHAGQLGIGNGV

SEQ ID NO: 151311 - protein, 354 aa, unidentified
MLAELVDHVIGVDPDRDWITAAVVDAHTTGVVAKQKFSADATGYNEAISWAEEFTVAGERAWAIEGTASYGRGLTAALSRASEWVIEFDRPREKASKDGAKSDELDAVRAAREALGRDRLHQPRAHDGHREALRVHTVTRAGVVRARTAAINELKALELTATDDLRQELRHLTTKALVKRCASFRDTPQRPIVERCSRNTMRSIARRLICFNDEIALHDTAMKQLIDDAAPQLVAEPGIGYVTAAMFYIAWSHPGRCRNEAAFARLRGAAPLPATSGQSQDRHRLNRSGDRQLNNALFTVALSRARSHQPTRNYRDRRRSEGKTDREIRRCIKRYIARRVWRLLEHPPGTEIVA

SEQ ID NO: 151312 - protein, 423 aa, unidentified
MKNSTARKLRQVPKEYLVMGVDPHKKKHAAVAMTQDFTTHSKFKFNNSRQGFEVALERARAEMMRTGSRGVIFAIETGGHYWRNLVYFLDERGIPFHFINQFTLKRRREGKDLNRMKNDYRDSEVAAQLLCTGEFTDTKLQHGVYAELHAAYNAYRRLVKERTRITNLIKGLLDGIFPEFTQVFKDPCGLTALSVLSICPVPNIIAQMTEEEFVNAIRAKHQGRLLKKRLRALHYTARTSIGIQAGAWSVSSEISFLVEKLCLIRRQIRSIDETLARLVDETEEGKYLLSIIGLNYISVAGLLAELGSFRSYRSAKQLIKMAGSNPTESESGGKRSAHTPMSKKGRPVLRYCAWTAVIPMLRFNSDFRAWAKKLRERPAHANPLSGREVVGAALNKLLRLAFALVKKQTFYQVPQPEVAQVAI

SEQ ID NO: 151313 - protein, 321 aa, unidentified
MQSYHLGIDVAKAKLDCALRLPDGKHRNKVVNNNASGFATLLEWLQKHGGAAAHVCMEATGVYWEEVALYLAQQGLPVSVVNPTQIKAFGASHLVRTKTDRVDAQLIATFCFERSPALWQAPSASEQALRAMVLRLDALQSMRTQESNRLEVAREAVKAGIASHIAWLDKEIKQLAQQIRQHMDNDPDFKGKQELLDSIPGLGERTIACLLAFYGDLQRFDNARQAVAFAGLDPRQHESGTSVRGKPRLSKVGHSFLRKALYMPAMVTLYKTTWGKVFRQRLAAAGKPPMLIIGAMMRKLIHVAFGVLKSHQAFNPTLHGA

SEQ ID NO: 151314 - protein, 371 aa, unidentified
MHRREFGGFKRDRHAMAEWIAGFKPDIVVMESTGIYWKSPYAALEKAGIQATVVNAQHVKKVPGRKTDTGDAEWLAMLARAGLLRGSFIPPEELRTLRQVSRHQQKLTGMRAMEKNRLVKILGDAGIRITAVVSDAHGVAASAMIDCLLDGGTPEQALAHAGQLHAKREDLLAALQGELSPDHVFVAKTIRDHIAFLNAQLADLESHLLDALQPHEAALQLLMTLPGVDRLSAAKLAVEIGLDMAAFGTAGRLCKWAGVCPGNDESAGKRKRGDTAPGNRYVRAVLCEIAWAATRTASQFKGRYQSLVSRRGTKKAIVAIGHQVLKIVFVLLSRKVPYKDPSVDYGELLVKRNAPRWIKALKKFGYLPQAA

SEQ ID NO: 151315 - protein, 433 aa, unidentified
MHDVEDEPLFAERVAGIDIAKAGIEVTIRVPSDTRPGRRQQETRSFGTTRRELMALADWLRIWGVTKAGMEATGDYWKPVYFVLESQGFDCQLYHAAQVKALPGRPKTDRADSVWLARITERGSLPSSFVPPEPIRRLRTHTRYRRHLTQARTAEKARVEKLLEDGHLKLSSVISDIHGVSGRAMLDAIVAGERNPKVLAQLARGTMRGKITRLEEALDCSFLTEEHTTVLRMMLGLIDSYTAQIDELTAKIEVLAEPWLPQIGQLDAVHGTGRISAQDVIAEIGTDMTVFPTAPHLVSWARWCPQVAQSGGKRKGASASGRGNPYLSAALGEISISATRTQSFLGARYRRLVKRMPKKKALVATGNSVLTIFHALLSDPAATYHDLGADYYEQRMSTRRQARNHVRGLERLGYHVTIQAINPDTGELLTTTA

SEQ ID NO: 151316 - protein, 344 aa, unidentified
MQYYVGLDVSVKETSVCIVDKAGKVMREVKVATKPVAILAVLTEEGLAIERIGLEAGPLSQWLYSALAEAGLPVICVETRHMKAALSAQINKSDRNDARGIAQMMRVGLYRPVHVKTLASQKRRMLLTSRQLLQAKALDIENDLRGTLRNFGLKVGMVGTVKFEARIRELVAVHPDLAAIVEPLLIARRVLREQLGVLHRQLLEIVRHDEVCRRLMTTPGVGPVVVLTFRATVDVPSRFTSSKAVGAAFGLTPRRQQSGEIDRMGGISKCGDVMMRKMLFEAALVLMTHSRKWSWLKAWGMKIARHRGMKRAIVAVARRLAVIMHRMWVDGTEFRWTREEAAAA

SEQ ID NO: 151317 - protein, 362 aa, unidentified
MRIIGCDLHARQQTLAMLDTTSGEVVEVTLQHEGDNVREFYSSLPGPVRVGIEATGSMQWFLNLLEELGIECLVGHPAQIRAAEPRKQKHDRRDADLILKLLVENRFPAIWLPSKELQDLRSLLRHRHQWVRMRTRIQNALQSIALANGLRRGTALWSHDGQSRIASLPLAPHTAYRRSELQAMYAKFEAEIEKLNQRVEEQACKRLGARLLMTHPGVGPITALATEVFLGDPARFADSKALASYVGMIPREYSSGGRQRLGGLSKQGNPLLRFLWGEAGAHAARKDPELQRFYRRKLVQKGLGKASVAVARKLGIRLWIMLRDHIEYHEFCRRGQKQQKSSDACAGMPETRYGAKSHRPVD

SEQ ID NO: 151318 - protein, 367 aa, unidentified
MQIRRPPVSFNGTSVGLDVHALSVVAHAFDEETGRVERARLCPDHGEILDWLHRLRGPLRVAYEAGPTGFGLARALTDAQIDCVVAAPSKLIRPAGDRIKTDARDAAHLTRLLRLGEITAVTVPEAEVEAVRDLVRAREDARADLMRVRHRLSKLLLRQGRVYSGGNAWTGVHETWLRRQRFDDPHTRAAFDHHFDAVLSATAARDRLDEQIVAVAASSRWSDPVDRLGCLRGISALTGLALSVEIGDWTRFTGASIGAYVGLVPTEYSSGASRVQGSITKAGNAHVRRLLIESAWHHRAAYRNPGPAMRARWAKVDPALKDRGHAGNRRLHQQWCRFNERKKPHVVANVAVARQLAGWCWSLATLA

SEQ ID NO: 151319 - protein, 320 aa, unidentified
MSVTSVTVGIDVAKAHVDVCVLGAKSSAQRFDNDAEGHSALAAALQPLDVGLVVMEATGGYEAALACALQATGLPVAVINPRQARDFAKSMGRLAKTDAADARTLAELAAVLLRRDDLQRFLRPLADERQQWLAALVTRRRQLLTMLHSERQRLQITPKKLHASIEAIEAAIKAQLDEIEEQMVTHVREHFGELDTLLQSAAGVGPVASATMIAELPELGRLNRREIAALVGVAPMANDSGGSKGRRRVQGGRFEIRRVLYMATLTATRYNPAIKAFYERLKAAGKLPKVALVACMRKLLTTLNAMVRTGKPWDKSLHCA

SEQ ID NO: 151320 - protein, 343 aa, unidentified
MGEVSTIGLDIAKSIFQIHGVDADGAVVIRKRISRAKLLEFFATLPACLVGIEACPTAHHWSRRLQALGHTVKLMPPSYVKAYLKRSKNDANDAAAICEAVTRPSMRFVATKSEQQQSGLMLHRGRQLLVCQRTMLSNAIRGHMAELGIISAKGRNGTAELLKIIADEHDDRIPAAARFSLDVLARQYAVVRAMIVALEKRIHAWHRSCEESRRLEEIPGVGPIVATALVAEVGDWKEFTSGRSLAAWIGLVPRQHSTGGKERLGRISKQGNRHLRWLLVAGAMAVIRYARQHGTKRPWLARLMDRRSIKVAAVALANKIARMAWAMMVRGERFKEPKLLPAA

SEQ ID NO: 151321 - protein, 482 aa, unidentified
MKPKPQEKKKRATNHPTQHHWHEMNRKQRRETMRKIQSEDLTLEVLHPDAAGIDIGNESHYVAVPPSRDTQPVRRCGCTTAELKAMADWLKQCGIRTVAMQSTGVYWVAAYDIFEQAGLEVYLVNARDTKNLPGRKSDVQESQWLMKLHTYGLLRNSFRPSQEIRTMRTYWRQRNDLVQSAGRHILRMQKALTQMNVQLANVLSDISGVTGQAIIKAILAGERDPHKLAQLRDRRVKASQEQIARYLEGNWQEDLLFVLKQEQEAYEFCQQQIAECDRQLAQYLQQREDRSQGAPLPEEKRKGRLKKKRANKPQFDLREGLFRMTATDLTRIDSIDVMTAMTVLSEAGWDMSKWKTEDHFVSWLRLCPDNRISGNKVIGKGRLPTNNPITIALKMAASTLRLSKTYLGAQFRRFRTRLGAPIAIKAMAAKLARLVYRMLRYGMKYVDQGAAFYELQHRQLQVKQLKWKAAKLGFQIVQATAA

SEQ ID NO: 151322 - protein, 343 aa, unidentified
MDHFAGLDVSVKDTSICIVDETGKIVREVKVASEPEVLLTVLKKGGYQLKRIGLEAGPLSQWLFSALGEMGLPVICVETRHMRAVLRAQINKTDRNDARGIAQMMRVGLYRPVHVKTLRSQKLRMLLTHRKLLQSKAIAIENDLRGTLRNFGLKVGIVGSSRFETRIKELVEGLPDLALLVEPMLTVRRVLREQIAILHRRLLAVVRDDEVCRRLMTVPGVGPVVALTYRATIDIPARFPKSKSVGAVFGLTCAKYQSGEIVRSGRISRCGDEMMRTMLYEAAHRMLCLAKWSWLKAWAMQIARRCGMKKAIVALARRLAVIMHRIWVDGTEFRWTREATAAA

SEQ ID NO: 151323 - protein, 349 aa, unidentified
MKIIGCDFHPSYQQIVMWDKATGEMLERALSHERKEEVRAFYAGLQGPVRVGIEASGQSQWFEQLLAELGHEVWIGDAAKIRASCERKQKTDRRDAELLVKLLDEERFPRIWVPTPAERDARQLLLHRHKLVRMRTQLKNQLQALALNQGVQRKWKLWSETGRKQLEALPLMPWASRRRTELLVLLDQLEASIGELDGAAIEQANTRAAVRRLMTHPGVGPITALAFVLTIGPAQRFRRGKQVASYLGLIPTEHSSGGRGQRLGHISKQGNPFLRGLLVEAAQSAVRHEPEMRREYQRLAQRKCRALAKVAMARKLAVRLYWMLRTEVDYAQLIQGSHAGQLESFRGHS

SEQ ID NO: 151324 - protein, 458 aa, unidentified
MYRELQPLRQALSTELRANLPPAGPGIEPEHLLQTYLDRLTLYVGCDVADQTFTLCAVDAAGEDLGHLMDVPNHPVGFERAWNWLDNLRGHHHLRITLLAMETSGIYYWAWWDFLAGCANLARVLFNPRTTQHMTEVLSKRVRNELVDAYALAEQVRLGGTPEATLIEDADLLSARLCSRAARDLAGQINDKKNQLRSLLRAYNPALSLVFPGAKFHHPAVYALLQHYVLPEEFVAAGPQAIAAILRAHCRSAFGQQEADDLVTRCRQTLTHPIQPDVIRYRVQQLTADILTTQKHKKQFLKTGYRLIEDRPETQLLRTATGAGISNTLAMVSETGGSQRFPDGDHLASFLGLTTSKHISGTTLFRSKHITKQGSPNARYAAVNIALHLSQRVPKYQAMYQRIKGRKPPRKGHRIALVAVARDFVTNVLYDMWRSQRPFFIEVEDYRAYRQTHPRTDH

SEQ ID NO: 151325 - protein, 346 aa, unidentified
MLYAGLDLSRQRLDVHVLDEEGRTVAVTAVRPDADALRTLVERTSRQGQQVSAVIESMTGARFVHDTLEHYGWDVAIADAVRAKGLAPLAAKTDRIDARVLAELARRDLVPEIWLPDPEVRAERERARFRLHLIRHRTALKNRIHATLMTFGHPVPVTDLFGVGGRRLLERLAVPEPWATSLLTSLRFVDELTIEIDACERDLRALGVDHPAIPLLLTVPGVGWVLAYTIASEIGDIGRFASPKKLAGYTGLCPLVRQSGGKDRRGPLAKNGPKFLRWALIEAATHAARDPRYRDRYERTKQRLGRQRGAKVARVDLARQLAEAIWHVLTNNEPFAPAGPAISLVA

SEQ ID NO: 151326 - protein, 347 aa, unidentified
MSHYAGIDVSLEFSSVCVVDGSGKIVREGKAASEPEALTAWFAAVGIGLERIGLEAGPLSQWLYAELKRAGFAVELLETRHVRDAFKAMPVKSDRNDARGIAQLMRLGWFRPVHCKSMEAQEVRAVLTARKLVQRKLRDVENNLRGILRGFGLKVGKATVTTFAGRVKELVVGQATLERITDALLAVRVVLRRELSAFDRQVRSMARADTKARLLMSTPAVGPIVALTYGAAIDDPARFTSSKQAGPHFGLTPRKYQSGETDRSGRISKIGDGAVREALYESAHLILTRPIKGCPELKSWAMRIAKRAGMAKAKVALARKLAVILHRMLADNVPFNPKAKAAKLAAI

SEQ ID NO: 151327 - protein, 423 aa, unidentified
MSYNIAGIDVHKKMLAVVVCNVEIDGEFQFERRTFGSNPEQLHSLSEWLFQQEVEEVVMESTAQYWKPVWEALERHWKPRYNQADGLRKAGTLHLAQAESNRGRRGRKRDFDDAERLVKRLVARELTLSFVPNAEQRLWRTVTRKKYQLRRDRIRLQNQLESLLEEAHIKLSSFVSDLLGFSARRMLKALAEGETNPAALAALADKRLRATPEQLCDALGACTELNAVYRRLLKMSLEECRLIDEQIDQLDKEMASLLTEHQHAVQRLAEVPGLGVDSAQQIIAEVGPAAATFPSEKCLSSWVGACPGDKESAGVNYSHRSPKGNRHMRRLLNQAANAAARTKGSLFEIVYRRSIPRLGHNQAIGVIAHRLCRLIWLILHQGVRYEERGPAVTKRSKQLRTWKMIRQLKALGYRIEPGNVQPV

SEQ ID NO: 151328 - protein, 381 aa, unidentified
MKPTKKLTPTSRKQTEATAEVIKLGIDIHKTKYVVIRQIDNQAAQSPQSFSPAEFLVWVQRQRLLAKRVVSCYEAGCFGFVLHRKLAEVGVENFVVRPRNWDEYGSSVKTDARDARELCGHLDRYLAGNDRALCVVRVPTEAQEQERSLSRQRETLAKERKRLQNVGTSSGLYHGVDVPANWWKPKVFVQLCSEIPEFLKLILEPFQHVLEVIDKQLREATAREERKANRKIPVGLGALTASILDQEFVDYTRFTNRGQVSSFTGLCPGESSSGNKRQQGSINKHGNPRIRHMLLEAVWRMIQFQPDYKPIVHWKKRMANEPFGAAKKKKMAVAIARQFAVDWWRIQTGRIRPEDVGLRVDFPSAYATKALREGRVSKVYA

SEQ ID NO: 151329 - protein, 463 aa, unidentified
MAARKPKRMGAQTVEDEDYQLRYERVAGIDVAKGSAMVCLRLPPGPGKVRRTSRTWEVMARVPDIEALAAELKAARVERVSMESTSDYWRIWVVVLEGAGLDVQLVNSSQARNLPGRPKTDKADAQWIARLTEMGLLRGSFVPPPEIRALRQYTRQLVHLSQDRTRYWQRLEKLLESALCKLTSVVSGLAGSASCLAMLEAMIAGERDPQVLAGYARGPMRSKHAALVKAFTGMQFGPEHVFSASSDLRMIKMLDAEITGLEQQVRDHLAAIPAAWGTDADGVTGPGAGTGPDAAVLPAVDRLTEIPGVGPAIAAGLIAEIGLDMSRFPTPHALVSWVGMAPVPNQSGPRKGRGRKGHGSSYARRLAGQAGNGAARTDTFLGQRHRRIRSRPAGGGWKKANVAVGRSIIIIVWHLLKDPAARFTDLGPDHYAKHTDTNRKARNHKRQLEALGYDVILTPREAA

SEQ ID NO: 151330 - protein, 342 aa, unidentified
MKLKRIGVDLAKNVFQIHGVDSHERPVWRQRLPRDRWLQAVLEKIEPGCEIGMESCGGAHHWARQLQARGYRVKMIAPQFVKPYVKSNKNDANDAEAICEAMSRPSMRFVAVKSIEQQDIQATHRIRSGLIEQRTAKANQIRGLVSEYGLVPKELLALRRAIPCWLEDGDNGLTVRFRRLLDGVWNDLRALDARVDELDREIAEIANNEPAAVRLQQLRGVAPITSTALLAAIGDASQFTNGRQLAASLGLTPRQHSSGGKDRLLGISKRGDAYVRSLLVHGARAMIRTAKAKDDGLSRWVIALADRSHPNVACVALANKTARMAWAMLRNNTDYQPERAAA

SEQ ID NO: 151331 - protein, 412 aa, unidentified
MEVLYPCCCGLDVHKKSITACVLWAEAKGAVRKEKRRFGTFTPELLSLADWLHACGVTHVAMESTGVYWKPVWNILEGQFEIVLVNAQHIKAVPGRKTDQKDSEWIADLLQHGLLRGSFVPPRETRELRDLTRYRVSLTEECNRIANRIQKVLEDANIKLASVATDALGASGRTMIQAIIDGEQNPGLLADMAKGLLRNKISELQSALAGRITQHHQFMLAQLMDDLRHAEAKMERVEEEIKRHTFPFGDDVARLCTIPGIDRVTAWGLLAELGQNMNQFPSAGHAASWAGLCPGNFESAGKRLSGKTRKGSAFLRRCLANAAWVVSTKKSSYLSALFRRIAARRGNKRAILAVAHAMLVIAYYLLKRKEDYRELGVNYFDQLNADGLRRSLVRRLERLGHQVTLQPRMVSA

SEQ ID NO: 151332 - protein, 413 aa, unidentified
MKLFVGIDVSLQKLDVCFLDSDQNILDQPSLTNDLNGARAIKELVLKLSSATHYKRVVIGMESTSIYSFHPAMFFHEDPELNALPLDVVTLNPTMIHRYKGLFDEDKTDTIDAFRIADFLRIERYQVPVIKEEKYVALQRLTRTRYQLIHQMTECKQHFLENLYYKCNTLTQEIPTSVFSSSIMDILSDSLSLDEISQMNLEDLAARLNKAGKGRFSNPEKLAKVIQKAIRDSYRIGKVLQNSVDVVLATYARIIAGLKKQIQTLDKSIESLYAIIPEAQSLMSVPGIGPVYTAGLLAEIGQIDRFDNEAQLAKYAGLYWKVSQSGNFQAERTPRTRTGNEYLRYYLIEAANSVKRCDPVYRAYYQKKFNEVPKFRHKRALVLTARKLVRLVDVLLRDHLIYTPKGGGLADNQ

SEQ ID NO: 151333 - protein, 392 aa, unidentified
MRIAVGVDIAKEVHWATALNEVGEALLDRRVPNDPRSLEELIEQLRALDAEITVGLDVVGGIASLAQAMLSAAGLPLVHVPGLAVNRARQGTTGGESKSDPRDARVIADQVRSRRDLRPIAAAEELDTGIRLLVGRRRDLTDEQTRRLARLRDLLTSIHPGLEREVDVTNKGGLWLLTRYVTPAEIRAAGQSRLVAYLRRAGNLRQVEKLAEAALAAARTQRIAVPGEAVAASLIRELAREALATRERLEGLDKELGELLARHPDAALIRSLPGMGAVLTAEFIAEAGTITRFRSADALAAAAGLAPVLRQSGKVRFLRRPAGGNKGLKRVFYQSAFCSLNTPSSRAFYQRKRTEGKRHHQALIALARRRIDVLWAILASRQPFSEEHRKVA

SEQ ID NO: 151334 - protein, 450 aa, unidentified
MARRQKSTQNLPVIEPNAAGADVGATQIFVAVPADRDPEPVRCFDTFTTDLEALADWLEACGIRTVVMESTGVYWIPLFQILEKRGIEARLVNARHVKNVPGRKSDVADCQWLQYLHAVGLLRGSFRPNQEICALRSLWRHRHSLIQMASVHLQHMQKALDQMNLQIHHVISDIAGTTGLAIIDAILAGERDPKRLADLRDWRIRATEETIMKSLVGDYRDEHLFTLRQSLVAYRHYQQLIGEVDEKVKQLLSELPAQVDPAEDPIPKARNPRKTPWRNEPIGLREDLYRAFGVDLTQVPGIDSLTAQRLLTEIGPDLSAFPNVAAFASWLRLCPDKRVSGGKVLSSRTGPTKNRAALALRMAAQSLNRSETFLGEYFRRMRARLGAPKAITAAAHKLARIIYHLLTSRQPYDESIFIVQEIRFRKRKEARLRAQAHELGFQLVPVQAVP

SEQ ID NO: 151335 - protein, 400 aa, unidentified
MLRRACGVDVHRDGFVATVLSSGGCEARSFEKDFEGMEAFKEWLRESRCRAVVMESTGVYWIPLYAALEGEFDVSLANAQRTRKVSGRKTDQSDSEWLAYLLRSGLIEACYVPERETRVLRELTRLRTKMVQNRTDYKNRVHKVLQRCNIRLGSKVRKVFGKAGMRLLEGLMAGRSLDEIVEGSKVLRERRDELEEVVRDGLDEEDVFILRRCLRMIERLDEEIKEVDGRIAMIMGVREEDARRISRVPGVAQVSASAILAEIGEPKRFENGKKIASWAGLCPSVYQTAEKNLTGRIKQGSKNLRRMMIQVAHAAARTRGSRLRLFYLRVAARRGKKKAIVALARKILCIIHHLLVNGEEFVEDGFAKLPRLRFRALARIPLEEMAEALRCAGYVVRAPG

SEQ ID NO: 151336 - protein, 348 aa, unidentified
MEHYAGIDVSLELSSVCIVDAKGKIVREAKVASDPDALVAFFKRLDFSVARIGLEAGPLSQRLHAGLAQAGFEAVLLETRHVKAALSAMTVKTDRKDARGIAQLIRMGWFRPVHCKSPGSQEVRALLMARKQLLGKLLDVELSIRGILRGFGLKMGVVTRKTFETRARELSAGQTTLETVIGAMLVARAALQTEYGKLHKTMLVIVRDDKICRRLMTTPGVGPVVAITFKTAVDDPTRISKSKAVGPLFGLTPKKYQSGETDVTGGITCVGDTMVRTALYEAANILLSRVTRFSALKRWGMEVAKRRGLKRARVALARKLGVILHRMWVDETDFRWTKAESGSGVAVN

SEQ ID NO: 151337 - protein, 444 aa, unidentified
MSRWIGLDLHKRVLEVCIVNDVGAVESRHRVTVTREQLKAFAQDHLHSEDRVAVEATTNTWPVVELLRPFVAEIVVSNPMRTAAIAEAKVKTDKVDAATLAQLLRAQFLPGVWQPDAATAQLRQLTGRRSALVGDATAIKNRIHAILHQRLIPNPSCKLFCQQGKEWLQKVLLELEPDDRVAIERDLHLLEELEAGIAEIEQRIFCIGGADHRLKLLITLPGVDVLCAQTLLAALGDVSRFPDGDHAASYLGLVPSTKQSAAHIYHGPITKAGRGHARWMLVEAAQHVANHPGPLGVFFRRLASKKGRNVAVVATARKLVVLAFELLRRDEPYRYALPRPTSQKLSRLRMRSGGPRRVTGCSKGTRASAKLSTGEPCRTVKPLMTVYADENLPSLPPPPDGERRLQRRAQLAAFVASLAEPQVRPIRRRAATSVAPTSAETVDA

SEQ ID NO: 151338 - protein, 370 aa, unidentified
MDEGITFVGLDAHKASISVAMLLPNAVTPVEWQLANEASAVRRMVHKIEREAPGEVRICYEAGPCGYALQRQITEAGDASCMVVAPSLIPRKPGERIKTDRRDARKLAGLFRAGLLTEVQPPSERDEAVRDLCRAREDARDDQVRCRHRLSKMLLRRGLIYSGRTRWGQAHRLWLRALRFEDPVDQAVLDDYLLAIDHLVDRLKALSQKLEELSRATPYAEPVAALRCFRGIDTLTAMTIVAELHTFGRFTSPRGLMAFLGLVPSEHSSGASKRQGGITKAGNSHVRRVLVEAAWNYRYRPGTAALKKRREGQSPRVIAIADRAMTRLYRRYSRMTSARVPSPKAVVAVARELVGFIWAVLYPMSIPAAN

SEQ ID NO: 151339 - protein, 442 aa, unidentified
MARKPSKQRFTVVHPDCAAIDVGGREHFVAVDPRHENPVQSFTSFTDDLLKMANWLESLGIKVVAMESTGVYWIPIYEILSERGFEVYLVNARATRQITGRKSDVLDCQWIWQLMTHGLLRGAFRPDDLTCCVRSLVRQRASKVKDQAQTLNRMQKAMSQMNIQLANVISDISGVTGMKILRAICAGERDPSQLAELTDRRIKAGKEAVARSLHGNWRREHLHALTQELAAYDFLEQQIADCDDAIKSALEQLPVLQNKPEPSNKPLRSPHRNGAQQTELHQTLWKVLGVDLTAIPTIGVDTALVLGGEIGTDLSRFPSSQHFCSWLGLAPPTRISGGHRLAGGGPKIVNRAAQALKQAASNARNDKGFIGASHRARLTRMDTSCAIKATAHQLARLVYNLLTKKQAYVEQGLEEFEARSQDRQVRALLRKARKLGYQLVAA

SEQ ID NO: 151340 - protein, 346 aa, unidentified
MKVLIGVDPHKASLAVAAVDEAKGELLERASFPQDRAGSRALERWAKRFPERRWAVENAGGLGRHLAVRLAASGESVVDVAPKLSARVRVLSSGNARKNDELDALATALAASRNERLAPVDPESDSEVLRLLSERREDLVAERTRALNRLHGLLRDLLPGGVAAKLSADRAARILRSIRPKGASDRLRRRLASEILRDVRMLDRKVADLNGRIEVEVEASGTTLTEIFGIGPVLAARIIGTVGDAARFPSKGHFASYSGTAPLEASSGEAVRHRLSLAGNRKLNYALHMVAVCQARSDARGGTYYRKKIDEGKSRKEALRCLKRRVSDAVFKSLVVDSQVPSRSAA

SEQ ID NO: 151341 - protein, 342 aa, unidentified
MYYIGLDVHKKTISYCVKDVSGQVHREGQIGATRRELDGWMKPLPQPWTAAMEATIFTGWIYDHLLPHARQVKVAHPLMLRAIAAAKKKNDRIDAGKIADCLRCDFLPACHMASTSIRERRRTLRYRHLLVRQMVQMKNRISGLLMETGVSYNKQRLHKVRYFRELLTTNEEVNESIRPLLRVSRDSIVRLQKTEYALVSSLQRDPLLAERIRRLRTVPGVGPITALTWALEMGEVSRFPSIREAISYCGLCGDEKSSADKMTRTPLSKQRNKHIQRVLVEAAKLAPRQDHDLALVYETAKQKGNGNRATLAVARKMVAYLLAVDRGQRDFVPAEAHRSAAA

SEQ ID NO: 151342 - protein, 458 aa, unidentified
MTTLLYCRRRVKPNAGAINNKKTNIMNTPHPYDLVIGLDRSDKKADLCLIDTRTGQRRAQIIDTAPEALWEWLLELRQQHPQARVGLCLEQPAVHLIAFLESYDWITLHPINPITLQKYREAFVTSRAKDDTKDADFMADLLLNHHAKLPVWAPEDSATRAVQQLVFHRRAVVDERTALSNRLIALLKPYFPQALMLCGEDLWRPLATAFLLKWPSLQAVQKAKLATVKQFYHLHGSRSAKLLEQRLALIAKAVPVTDEKAVIESFVLRVRLVCRQLQLVQHSVSEFDRQIAEAYAAHPDRMIFASLPGAGPVLGPRLMASLGSQRERFGAAENLQHYTGIAPVTKRSGGSCYIHRRYLCPKFHKQSFHEYAKESILWSRWAAAYYLQQRTKGSPHHTAVRALAFKWQRIIWRCWQDRQPYEEQKYEAALQKNGSPLVALFDRVELGKSPFKNPVKKS

SEQ ID NO: 151343 - protein, 353 aa, unidentified
MKKVLKEVAGIDVAQKELVVSLGRLYENLDIEIISYKVFKNTENGIKYFIDWVASNSNNANSVRYVMEATGVYHEKLAYALDESGFDLSIVLPNKISNFFRTLDINTITDKTASQAIMRFGLERKLDNWNRPKEAYRQLKQLTRERDQIVDQRSMVKNQLHAEKAEAVPNERSLKRIAERIKFLNGQEKEIKMDIATLLKDYPDIMERVKNICTIPGVGELTAVIVLAETNGFELIRNKKQLTGYAGLDVREKQSGTSVKGKPRISKKGNRHLRKSLHLPSLSSVKYNKSHRDLYARIVAKSGIKMKALIAVQRKMLELIFVVDKNKTRFDNDHQQKRTLDANAESILLQTSL

SEQ ID NO: 151344 - protein, 377 aa, unidentified
MMYVEHTNAGLHGLLRRLARTGVAEVAIERSDGPVVDALLGGGLTVVVIAPSQLKNLRSRYGSAGNKDDRFDAYVLADVVRTDRRRLRPLLVDTPATTALRQSVRARRDLVVHRVAVANQLRAHLQICFPGAVGLFRDIDSEITLRFLERFPTPERAAWLSVKRLTAWLASIGYCGRTPPETLYQRLTTAPAAATGADADTAAAVTAAFVAVLRTLTTQIEALAARISEQLDLHPDQAIFTSLPRSGRVRAARLLAEIGDARGRFPTADSLACLAGVAPSTRQSGKVEVVSFRWGADRQLRDAICDFAGDSRHANPWAADLYQRARNRGHDHPHAVRVLARAWVDIIWACWTSHSPYDPDRHGALQRILNQDQPAAA

SEQ ID NO: 151345 - protein, 363 aa, unidentified
MKQIKDIEKRVTRYIGLDVHKDSTTAVVLDAQGKVLMQVTLRTEASVLVDFLRGLSGSLHLTFEEGTYSAWLYTVLSPWVEKLIVCNPRQNALLKEGNKSDPIDARKLAELLRLGSLVAVYHGSPGMRTLKELAASYAMLVSDGTRVMNRLKSLYRSRGIRCGGTQVYSPHHRGRWLEQLEVGARQRAKLLYQELDLLLQLRRPARRALLSESRKHPAQKILRTIPGLGPVRVARLLALLQTPHRFPNKRKLWGYGGLGLLTRGSAQYELRGGELVVATKGVRVRGLNPSHNAQLKDIFKGAALAAIQRPGPLREAYQRCLREGTEEHLARLTIARKIATLVLTLWKRGERFDAQRLRREQAA

SEQ ID NO: 151346 - protein, 355 aa, unidentified
MNDAKYIGMDVHQATISVAVRDSRGNLVMEAILETKAETILEFIHGLRGSLSVTFEEGTWAAWLHDLLQPHVTRVVACDPRKNALLKVGNHNDRMDARKLSELLYLNKLSPVYHGEQGIRTLKELARSYITITRDLTRVMSRLKAIYRSWGIPCAGQQVYAPRYRAEWLAKISEAGVRRRAELYYQQFDALAALRQGTRRELLAEARKHPAMRLLRQIPAIGPIRAALLIALIQTPNRFRTKRQLWAYCGLALRTYTSGEYRFVAGQLKRSKKVLAVRGLNINHNHDLKNIFKGAATRAAATAGPFQGFYQDCVARGMKPHLARLTLARKIAAITLLVWKKGDRFDAEHLKQQAA

SEQ ID NO: 151347 - protein, 371 aa, unidentified
MTKEQLTIHVGIDVSKDKLAVAIAGGGVRDEVLSLGTFENTPASVDRLLKKLSGRGLPVSVCYEAGPTGYGVYRQVRSFGFECCVVAPSLIPVRAGDRVKTDRLDAIRLARLFRAGQLVPIWVPDARHEAMRDLVRARESAAEDQRHKRQLVSAFMLRHGRIYHRTKPWTMRYRRWLQSQSFAHPAHQLALQEMLQAERNATERHDRLTGHIEALVPEWDLAPAVTALQALRGVALISAVTFMAEIGDVRRFETPVKLMAYLGLVPSEYSTGKTTKRGGITRAGNSRVRHKLIEGAWTYRLPARPGARKLYILQEQSAEIQDIAWKAQSRLTTRYRKLSQRGKKSTVVTTAIAREMAAFMWDIARRTMPAG

SEQ ID NO: 151348 - protein, 431 aa, unidentified
MEVLHQRCAGLDVHKKNVVAAVRLAEGDKVVTEVKTFTTTIAGLLALSAWLTEHRCTQVGMEATGVYWKPVWHVLADTDMELILANAAHVKNLPGRKTDVSDAAWLADLLAHGLIRGSFVPDGPTQEFRDLLRTRKQLVREQTRHVQRIHKTLEDANLKIQSELSDMLGKSGRAMLKAVIAGETDPARLAALAHPGVKSPKDKLQEALRGRVTAHHRFLLKLHLAQVDQLDSAIATIDSEVEAHLAPFRTAVEIVSTIPGVGSLSAQVIVSEVGTDMSRFPSDGHLLSWAGFCPRNDESAGKRRSTRLRKGAPWLKTTLVECAWAASRKKGSYLQAQFLRLRSRRGPQKAICAVAASILTAVYHMLKNGTLYEDLGGDYFVRRSKTTHAQRLVKRLEQLGYAVDLKPLAARPGLSWGGPGASPGLGPDQVS

SEQ ID NO: 151349 - protein, 438 aa, unidentified
MKTKKAKAFPIIYPNAAGIDISSKEHYVAVNPETSLNPIRAFGCFTEDLKSISDWLKECNVNTVAMEATGIYWVSLYLLLEEAGFEVVLVTAKHVKNVRGKKTDVSDAEWIRQLHSCGLLSASFQPDAYTRKLRTYMRHRKNLIEMSATHVRMMHKALEQMNIKLQHVITDITGKSGQEIIQSIISGERNPLKLASLCDGRINKNKKDSIIKSLEGVWKEEHIFELEQSFTIYHMYHKKIVECDIKIENHLREKSGTTKDPNEKMKAKSNKNNLNFEAKEILQNIIGTDLSEIFGITTSNAIEIISEVGLDMNKWHSAKHFTSWLNLAPNNKISGGKILSSRIPKKKNHAGQIFKMAAYAVQRSKNWLALFFHRIKAKKGAPKAIVATARKIATIFYKLVKEKISFSPIPIEKYSDSFRQQQIKKLKRQAQTLGFQLV

SEQ ID NO: 151350 - protein, 357 aa, unidentified
MTTIAQQPDLRVIGGVDTHKDIHVAAVIDELGRFIAAESFPTTTHGYRRLLVWLRSHGEVMAVGVEGCGSWGKELARHLTARQVKVIEVNRPNRQNRRRRGKTDRVDAEAAARAVLAGEAVVVPKAGIGPVESLRQLRIARSGAVKARTAAANQIHSLCDTAPDSIRAQLRGLSMGKKVAKAIGWRPGPDHGAEAVTKRALGAVARRWRHLNDEIRALNRDIKAILDALAPDLLAIRGVGYETAGQLLITAGDNPHRLANERAFAALCGTSPVPVSSGRFNRYRVNRGGDRHANSALWTITLARMSSHQPTRDYVTRRTAEGRSKPEIMRCLKRYIARELYPHITAIDLDQPTEIAA

SEQ ID NO: 151351 - protein, 408 aa, unidentified
MNTLYVGIDVSSKSNVVYLMLPNGDKHSNFSVANSHEGSTLLVKKIYSALTSHSLDTVLIGLEATSVYGDNLVYFLREDATLAPFNRKIHVLNPKQVKKFHDTYNDLPKNDYVDSFVIADCLRFGRINKEVYMGEYRYKALQNLTRARFFAVQNLVKEKQRFMNVLFKKYSTMTQEKVFSDAFSTTALAVYDEFESAEALANMDLHELTDFIIEKGKNRFPDPDAVAKAIQKAARSSYRLPKTVNNSVNQVLSISITSMKALESQIKEFDKAIKAQMELLPNVLISIPGIGPVYSAGIMAEIGDINRFDNQAALAKYAGLAWKQHQSGDFEAKFTRLISSGNRFLKYYLCEAAFSLVRCDKEYSNFYHLKYKEVNRYQHKCALALTARKFVRLVFRLLKDNRLYSPAK

SEQ ID NO: 151352 - protein, 364 aa, unidentified
MKSMHWIGIDDHADKWTIAHLVNDESRPADEFELVPNEFGYRKLIAFAKSLKGEVRIVYEAGPCGYELYRRLTKARLHCQVAAPSLTPVRPGQRVKTNRRDAAKLSGYLRSNELTFISVPDEARESLRDLMRARKSAQKDLLAIRNQIGKFVLRYGHRYRDGKAWTGRFWGWLNKIKLDGYSQSVLDEMIITHRHRLEQRIRFDAMIEEAAKRPEYAPFVAALAVLRGIDTLSAMTILSELGDLRRFATAPQLMAAVGLVPSEHSTGDKTRRYAITKTGNAYVRHIAVEAAWQYQRRLTTGARIKLRRKNQPKALVDIAEKCDLRLNRKFHRMTSRGKRSTVAAVAVARELVGFIWAIGQIVHP

SEQ ID NO: 151353 - protein, 328 aa, unidentified
MKKSYIIGVDVSKLKLDLHCYGLNESVIVSNNEKGFRSFLKWLKKVVSKNMQSVMVVMEYTGIYTYSLEQFLQKHDIDYVKRPALDIKRSVGIRRGKTDKADARMISQYGWHRREELKPMNPVSDTQQQLQQLMAYRDKMVADKASYEARLKELHGQMGDKLPARIIESTEYVMQVLQIEIKELEEAIENLVENSDLRVNYQLTTSVLGIGFVTAVHLLIVTENFTRFTDPRKFACYSGVAPFEHKSGSSIRGRTKVSQLANKKIKSLLTLAAICAVKFDPELKTKYEQKIKEGKAKMSALNMIRFKLIERVFAIIKRQSPYVLRHAA

SEQ ID NO: 151354 - protein, 326 aa, unidentified
MTMLGIDLAKLSFDASLLLTTGTQHSASFSTSAEGFTQLPAWLAEHSVSELHACMEATNIYWEALATWLQSHTHTVSVVNPARIKGYAQATMQRTKTDKLDSAVIAWFCANHQPSAWEAASEEQRRLRALVRHRDEMLQTQLQQQNRLRDTTDALVKTSLETLLKTIVSEPAAVERQIKEQVAAVTSMRTNLHLLTSSVGIGAVTAAKLLAEFDNLEQYESAKAAAADAGLTPSHYESGTSVRQRPKLSKMGKAGIGAALYWPAITAMRCCRAIKAFADRLAGRGKPKKVIIAAVMRKLVHICYGVLKHQTPYDPAKAFGRFTPAT

SEQ ID NO: 151355 - protein, 391 aa, unidentified
MIFVGIDVAKDKHDCFITNTDGEVLFKPFTITNNLDGFDELYQKIESVMENVSKVKVGLEATGHYSYNLLGYLLDKGLPTYVINPLHTNLYRKSLSLRQTKTDKVDAHTIASMLMSDVNLKSYSDTSYHNEELKSLTRYRFDKVKERAQLKQSISRLVCILFPELEKLVPTLHQNSVYELLYEFPGAKHVANAHLTRLSNLVETASKGHYTKDTAITFREVARTSIGSNMPAKSLELKHTIKLIRELDAEIEEIENEIKIIMDEINSPILSIPGISYRMGAMIIAEIGDFSKFDSPDKILAFAGMSPSTYQSGQLDNCYARMEKRGSRYLRYALYNATAYVCLWDPTFKAYLAKKRSEGKHYYVALSHATKKLIRVIYQLESSGQQYIKAN

SEQ ID NO: 151356 - protein, 257 aa, unidentified
MLVTGRFATDKGGYAAMRRDVGAWPERVWAVEGSNGAGRALAQRLLADGERVLDVPAKLSARARLLDTGHNRKTDAHDAHAVAVVAVRTQGLRVLSYDQQLEALRMLADRREELTRTRVQTVNRLQRLLAELTTGSAKKDITALQAKAILASVRPRGLAGKTRRRLAVEQLAELVPVEKKIKALTPELKQMVKVSGSGLMDLRGVGPVVAARVLADVGDVTRFADRNRFASWTGTAPIEASSGEIVRHRLSRAGNRR

SEQ ID NO: 151357 - protein, 355 aa, unidentified
MVYVGVDLHRKRTQVAVVNEAGEVLANRAVATEGMEIMRVFGEVAPTPTPISVAFEATFGWGWFADLLQDAGVEAHMSHPLATKAIASARVKNDAVDARTLAQLLRTGMLPEAWMAPPAVREARRLVRMRVALVRIRSRIRNQVHALLAEHGVANPVSDLFGKRGREILEQLRLPERSQNRVEACLRLVDDLDKEIEIADIEILGLYETDPRTERLLPIPGIGPTTAAIVLAEIGDIVRFPDADHLCAWAGLTPTERSSADHTRRGHISKQGSRWLRWIMVEAATHALGNRQLGMFFTGIERRRGTKIARVALARRLLTLVFYALRDEGGCRAFPVPHKSRSPRGRARSPRVMAS

SEQ ID NO: 151358 - protein, 388 aa, unidentified
MSVVDARGRQVHRCTVAHSAAGLAELVAVLTRPGAREVAIERPDGPVIDALPDAGVTVVVISPNQLRHLRSRYGSAGNKDDRFDAYLLADTLRTDRARLRPLIPDSDATPALRRACRARKDLVSHRVGVANQLRAHLQRVFPGAVGLFAELDSPISLAFLHRFDCQDRADRLSVKRLAAWLSRVGHCGRVEPAVLHARLGAAPRGAVGEHGAAEAHLTRALLAVLVTPVEQIKALSTQIGEQLALHADAHIFTSLPRSGRVRAARLLAEIGDCRARFPTPEALFCLAGAAPSTRQSGKIRALGFRWVCDKQLRDAVCDFAADSRRANPWAADLYDRARARGHDHPHAVRLLARAWLDVIRHCGQQGVAYDPTKHKVLQTLLAQRAAAA

SEQ ID NO: 151359 - protein, 328 aa, unidentified
MQGKVSSERTAMATVYVGIDVCKEWLDIHLLPLGRSFRVTNDTAGLRRLKRELDALGQMPRSALRIVMEATGKWHRAVQRSLHADGFYVSVVDPLRARLFAKACGFLAKTDRLDARFLAIMGEALKPAQTPPLDQALEALQELVNARSAANGERTALSNRMKTTVTAFLRKELTRRLAALDTHIARLDAEIERSIGADPEMRRRLDILISIPGIGAVTAASLIAGLCELGACSGKQAAMLTGVAPLACESGERAGQRSIRGGRPAPRNAIYMAALSASRHNPDLARFAERLKKVGKPNKVVLVAVMRKLIVLANTLITKNRIWTPNPP

SEQ ID NO: 151360 - protein, 320 aa, unidentified
MRNAVGLDISKTTFDATAIIGGIEKSAKFDNDSKGFEQFKDWLDKLKCPDAHICMEATGNYYEGIADYIGRLYKVSVVNPLKISKYAESRFTRTKTDKQDAKLIAEYCQTAKAQDLVIRKPVLNDGYKLKRLSALYAQLTADSTAQKNRLEAAKDTFVVKICQSNIKHLQRQIKAVKKELEKLTKQPALKDQTDRLATIPAIGRLTAVMLLNYLSGTDFSTSNKFAAFAGLTPQIKDSGTSVRGKPSLTRYGNRRLRAMLFMPAMVAYRIKAFPDFITRLEAKNKPKKVILAAIMRKLAVIAYHVHKKGEDYDPTRYKAA

SEQ ID NO: 151361 - protein, 427 aa, unidentified
MLSERKKVCGIDPHKNMCAAVVIKGNPIETLGKIKFENNRRGLDKLLHLLSETDCNTVVIETTNTFWQGISSALMHMGYTVVPVAPQTVPKKQEKDDFRDASWLAITYMDNRVTQAYFATPKIQKLRSLLRTRYTLIKIRTMLKNRLNAELSRAGLNLKGVVSDIFGKEGKKILQTLAEEGIEGIKELANSEDGTSHKKNKYAMLLDVLSVAFMENFDAQIITILLLGIKNFEKLIERIEGLVNELIHSDMELLGLVNLLMTIPGVGFITAATVVAEVGDFTRFASGKKIAKWAGLTPRMRESGGKRYYGRITRRGSPFVRWVLYEAATAIAKLKKPQKLYTFYKGVAIRRGTKIATVALARKLLVVMHAMVTQGRKYDEIDAYRGTYERKMYLMELNYKKYREGLNQIQNELSELRDKELTLVDAR

SEQ ID NO: 151362 - protein, 362 aa, unidentified
MKIMVGIDLHSNNAVCGLMDTSGHRILHKQLPCDLAAILQLLKPYKKRIATIAVESTYNWYWLVDGLQDQGYHVVLANPAAMQPYSGKKHTDDVSDAYFLAELLRLNLLPTGHIHDRKTRSVRDLLRRRMLLVRQRTTLILSFKSLNERALGQRVPLARVKAMSPEEAQARFAEPADQLLAAEQITLMDHYTDSIAKLEKHILEVAEKSPAYQRLQEMPGIGKILGLTIALETGDAQRFADAGHFASYCRCVKSVRQSNHKKKGENNRKCGNTYLAWAFVEAAHFACRHDERCQRFYARKKQQANPVIATKSLACKLAKAAWHVMVADVPYDAARVFGPGKKDFGETGREPAKGSGRPSQQN

SEQ ID NO: 151363 - protein, 415 aa, unidentified
MKFEKDTRGIKRYIAFDIHKEYALAGGQNAQQEWVMMPRRIGMEKLREWARANLRAGDAVVLETTTNVWDVYDIVEPLVSYVVVAHAGGVRQIAEARVKTDKKDIERLIRLLIADIVPEVWVPPVEVRELRGMISYRNRLVKTSTMIRNRLQSLVHRHNLILPKGMLRDKGWWETQQVSALEKIQIRQELAMLEEIAKHKGEVDAELGRQSLGEVWGQQAMRLLQLSGFGVIVTMTVLSAIGDVTRFESAKKLVGYSGLGAGVHDSGKEHIEKRITKSGRKELRWALVEAAWRAIRISPYWKEQYEKYLRRMRKPNQAIVVIARKLLVVVWHVLTKEETDEHVDEEGLAYKMLVLAWDLDENVRMGLSYKQFAKYALMKLGVENDITRFVRKKVPRRLAPREEVLRRMAELGIAQ

SEQ ID NO: 151364 - protein, 435 aa, unidentified
MGSSASSARTGVNQHRSVAAEGEIMSSSYAYFVGIDWGTENHQVCVLDGAGTRKGERSFRHSGKGLLELVGWITRLCSGVQGVAVAIEVPRGAIVESLLERQFVVFAINPKQLDRFRDRHTMAGAKDDRLDAFVLADSLRTDRCCYRQLLIDAPLVIQLREMSRLDRELGEEVTRLTNRLWDQLKRFWPEILDLCPSAEEPWFWALLQLWPTPEKAALATKRRVQNILTKHRIRRHTSVLVLNTLKAPTLHVAPGTVEAASAYLTMLIPRLQLAGTQRRACEKQLAELLERISEGNDSDHVHDVDVIRSFTGIGTRIAATILAEAPRAIRERDYGSLRAHAGVAPVTRQSGKRARVSFRYGCNHRLRNAVHHWSRVCVQNDERALVHYQALRKRGHNHARALRGVADRLLKVLMAMLTEGSCYDPGRRKPLLQVS

SEQ ID NO: 151365 - protein, 402 aa, unidentified
MNAVGIDVSKGKSMVAIMRPFGEIVSAPFEIKHTASDIHSLVELINSVEGESRIVMEHTGRYYEVLAHQLSEANLFVSAINPKLIKDFDNDSLRKVKSDKADAVKIARYALDKWQNLKQYNVMDELRNQLKTMNRQFGFYMKHKTAMKNNLIGILDQTYPGVNTYFDSPARSDGSQKWVDFASTYWHVDCVRKMSLNSFIDHYQNWCKRKKYNFSQSKAEEIYGKAKELVPVLSKDAITKLIIKQAVDQLNSASTTVESLRTLMNETASKLPEYPVVMAMKGVGTSLGPQLIAEIGDVSRFTHKSAITAFAGVDPGVNESGSYEQKSVPTSKRGSSDLRKTLFQVMDVLIKTHPQDDPVYQFLDKKRAQGKPYYVYMTAGANKFLRIYYGRVKEYLSSLPES

SEQ ID NO: 151366 - protein, 373 aa, unidentified
MNYNTKFVGLDVSKESIAVAVADWGRKPARYWGQIKNTFEEVRKLMERIGEPENLQVCYEAGPTGYELYRFLKNLGIHCVVVAPSLIPTRSGDRVKTDRRDAVNLAQLLRAGELTPVWVPAEEDEALRDLVRAREDAKEDLLRAKHRLSKFLLRHNLHPPKGVRNWSSKYRLWLDSLKFENSASRITFQEYLHAIDEIESRIKRLETETSVQAVASVHAPVIQALQTLRGVAEVTATTLVAEIGQFSRFDNPRQLMAFAGLTPSEYSSGGSRHRGGITKTGNAHVRRVVIEASWSYRYPPALKAALRRRQEGKDPEVQLIAWNAQDRLHRKYMRLLFKGKPTPVVATAVARELLGFIWAIACKVEENNMRITA

SEQ ID NO: 151367 - protein, 350 aa, unidentified
MDTNTPALASIGIDIGKEVFHIVGFGTNGKIAFRRKIKRLALVDTFKGLPSCVVGMEACLSAHFVSRALRQLGHQPRIIPSIYVKPFVRGQKNDYNDAAAIAEAALRPNLRTVREKTQDQLDLQALHRVRSRLVSRRTATINQIRAFLIEQGIAVRTGARALRNSLMAILENRQDEISPRMRGLIADLYEDWVGLDERIETIAGEIETIGEKEANCQRLMSVPGIGPLISTAVVAAIGTGEAFERGRDFGAWLGLVPRQYSTGGRSILGRISKRGSKYLRTLFIQAAKVILMRPHNWERFSFGAWLLNATPRLHRNKLATALANKLARIAWSILRNEKVFDVPRREAMAI

SEQ ID NO: 151368 - protein, 458 aa, unidentified
MAHRKKKIPAQLVEDEEYQLRHERVAGADIAKDKGDVSVRLPPAREGGRRRSRVEENVPARARDILELGSRLLADGVELVVMESTSDYWRIWYYLLESAGLAVALVNSSHARQLAGRPKTDRLDCQWLARLAEMGLLRPSFVPPPEIRALRDLTRARQQLVRDRARAWQRLEKLLEGALIKLSSELSSLARVKTARLILDALADGERDPRALATLALGKLAGRRGDLEEALHGMTAGPHHSLLIRAHLDQVDSLTRSLGAVEDEIAAALEALPAAWGVSAGGEPSPDPGPDAAVPPASARLAEIPGVSLDLARAIIAETGLDMSVFATAGHLVSWAGLAPVARQSGPRSRKPKKGQGNAFLKNLCTQAANGTARTDTFLGARFRRLNARIGGARAHCAVARSILIIVWHLLNDPIARYEDLGADWHDRKASRDKKIRGHLRGLQALGIDTSSLAPTAG

SEQ ID NO: 151369 - protein, 356 aa, unidentified
MKKYIGCDMHKKYSVFVAMDEKGHLEPAVTVSNDLLELRSYLATLPAGTPIAVEATGGWYWFVDELEQAGLEVHLVNPLEAKKRMRGRNKTDKLDAAGLAMLLRNGTLPEVWIPPAQLRDLRGLLRARLGLRNHTTILKNRIHGALRRYGQYEPGEPKNLFAGKGRVHLSVYVSSLPAETRLGTRHEWALVDEVEEHIKALEMRIRLRLGQLGWVRLLKTLPGVGDILSATIYLEIGDVSRFASPERLASYAGLTPTVQASGGKVWLGPTSPVANHYLKWAFVEAANCVVMRKQKYQNTHAVQLYERLRASKNHGKAAVALARHLAEASWWMLSKKQAYREPAPASMSSSKNGSAR

SEQ ID NO: 151370 - protein, 496 aa, unidentified
MEVIMRRCAGLDIHKASVWACVLTLDDQDRSHKTIRKFGTTTHELRNLRKWLSAQGVTHVAAESTGVYWKPIWNVLEEGPFKLLLCNAHHLKQVPGRKTDARDCEWIAHLLRHGLLRGSFVPSRGLRELRDLTRLRVKTTGEKSAAANRLQKVLEDANVKLSSVASDVLGKSGRAMIEALIEGEDDPRKLAQLARKRLRAKLPQLRFALEGVVTEHHRFMLRLLYDQVLHAEAVLERLDERIAELTGSAADGANDRLAEDDQTLPLFPEPPPDADDADDKPPPDGGDSSPAAAPNTPPPLRGRSTSGAAGPPQEPRGAARPAPDGPGLFPAAVSLLCTVPGIGQRTAENVLAEIGDDMSRFPTSAHLASWAGVCPGNNRSAGKQTKRMGKTTKGNRYLKRALNQAAWGAIRVKASYYSAQYKRLSHRRGKKRAVVAVSHSILVTIWHMLSTGQVYKELGSDYFERINADRLTAYHQARLEKLGYDVSLSARDTEAA

SEQ ID NO: 151371 - protein, 353 aa, unidentified
MKKIHVGIDISKEKCNLCYRSGLEIVCEEECANDVKTLKRAFKAALKALDASMEEVLVCAEYTGRYIYPLTVACQELDVFLWMDDPTRIKNSMGLTRGKNDVIDAARIAEYAYRYSDKAVRYCIPDAALVSMKNLLADREFLLIDRKRYQSQLSDQKKYMAPCDFKHKNSRWKKVIKSIDEQIAAIDAEIESLIAANPVLARQKELLVSIDGIGDRIAINMIAITGGFTRFQNARQFCSFAGLTPYKYDSGTSVRSKAKISKRANQTMKALLHMSAVNVATRMKAGEYKDYYERKLKEGKHIMCILNVLRAKLVHRMFSVIKRDTEYTKEYKPACCTNPFRGASAGADGLLMR

SEQ ID NO: 151372 - protein, 344 aa, unidentified
MNNSYTHIVGIDISKETISVRLMILGESPQPVGDIETFPNCEVGYGQLNQWLVRCGVLARTTQVVMEATGVYWEGSALYFYEHGFQVSVVNPAQIKYFARTTLMRGKTDALDADLIARFGVSVKPRIWTPPGESMESLQVFIHQREAYVAMLTQEKNRLHALQHRAHCPRQVITMTKAHIRFLEKRITELEHAFKDLLKKTPAWQRSIDLLTSIPGVGLITAGVLLTETLAFSTLVNARQLAAYAGLAPAPFLSGTSVHRPTRISKIGNARIRQAVYLASLSGIRANPVLKTFYQRLRANGKPAKVALVAVARKLLTIAFALVKSQQPFDPNYVSTKPKAKILT

SEQ ID NO: 151373 - protein, 328 aa, unidentified
MTVHVFGIDIGKTVFHLVGLSKEGHLVQKKRFSRRQLLTHMVNTPACLVGIEACPGAHFLARALAAQGHDVKLMPAEYVRPFVKSNKNDYVDAEAIAEAVQRPTMRFVPIKNETQLDLQALHRVRDRWIGRKTAVINQLRGFLLEHGITVRSGPAHLKRQIPAILEDADSLLSPRMRTLLMELRDEWAKLEEQIDAANREFAQVAKKDDGCRRLLTIPGVGPLTATALTAAIGNGAAFRKSRDLAAWLGLVPRQHSTGGKARLLGISKRRSIPAPALRPRGPGCPRTGETRRASVRRLARSTRSAISSERSHRGDGQQDCTQGLGSSH

SEQ ID NO: 151374 - protein, 346 aa, unidentified
MFVGVDVHKDTHTAVGVSPFGEKVFEYTCGNYEKDFEELMSVVEKKRGTLSPYFGLEDCSGYGERLSSFLVERYPVVQVHSTLVDRARKLQTHPEKSDSLDALGVAKVMMTSIDTLPVYTVSEEGKKAKQLKELSHDRAYLVEERARLKNQLHTILHRIWNSEYKEMFKDTFALKALRYWLENIPECDPFLKKTMERKAKRLIDLFHEINELEKDMTVLLDENYTIHTASGCGPVIAAAIIGEIGDINRFKSPAALAKYAGCAPRECSSGKTIRYRKTSSGNRRLNCAFHRMALSQISRMGNDKARAYFKKKVSEGKSKSQALVCLRRQMVPIVWMMMKHKTTYRA

SEQ ID NO: 151375 - protein, 347 aa, unidentified
MLADELDYVLGVDTHRDEHVMAVVSAPAGGVVAGAAAVANGRGYRELLRVAERLAPGRRAWAIEGSGSYGAGLARFLSEHGEAVLEISRTLRAERRLAGKDDTLDAVRTARGALASETLARPRAGARREALRLLLVARRSAVDVRREALTQLRAVIVTAPEPLREQLRRLSLGKLLDRCRRLRRTTARADELAVRLVLRSLARRVQAATNEADELEREILTHVRTLAPALLDEPGVGPIVAAQLIVAWSHPGRLRSEACFARLAGVAPIPASSGHTQRHRLSRGGDRQLNRALHTIILHRRQHDPATRDYIAKKIAEGKSRRDATRLLKRYLARHLYRLLEQQPLTT

SEQ ID NO: 151376 - protein, 402 aa, unidentified
MNCVGIDVSKGKSMIAVMRPFGEVVVSPFEVLHTDSELSKLAGLLKSLDGETRVVMEATGNYHAPVAWLLHEAGLYVSVVNAMLVHGYGNNSLRRAKTDKKDAVKLANYGLDHWLTLPKYVPEEDTRLMLKTCYRQYQQYSKVQTMLKNNLISLLDTAFPDANRLFTSPPRTDGSEKWVDFVAAFWHCECVCGLSQKAFTAKYQKWCRKHGYNFSEDKALDIYASACGHFGVMPKTDTAKLLVEQAISQLRATSAALAALKQEMQSLAASLPEYPVVMGMFGVGPTLGPQLMAEIGDVRRFHSKKALVAFAGIDAPPYQSGQMEVHSRNISKRGSASLRRTLFLVMGVLLQCAPMDEPVYQFMNKKRSEGKPYRVYMMASANKFLRIYYASVKAYLDSLEHV

SEQ ID NO: 151377 - protein, 350 aa, unidentified
MLIIGCDFHTRYQQIAMMDDATGELLERRLEHENGEAEAFYRGLPKPVRVGIEATGPMHWFERLLAELGHELWIGDAAKIRASEVRKQKTDERDAALILDLLLANRFPKIWVPTPAERDLRQLLWHRHKLVCLRTLLGNQLHALALSQGLCRKRKLFTKKGRAELQSLGLAPWASRRREELLKLLGQVDAPIAELDKAVLEEAQRRQEAVLLMTHPGIGPVTSLAFVLAIGPVTRFPRSKKIASYLGLNPSEESSGGRRRLGAISKQGNTMVRWLLIEAVYPAVRQDVALRQDYQRLKFRRGHAVAKVAIARKLAVRMYWMLRRGAEYAQLVRRQGSPGATLVDASSSLG

SEQ ID NO: 151378 - protein, 408 aa, unidentified
MERYHLGVDWADKFHQIWVSDGQGQKITEKKVGDTVEELAEFGRWLDESRAKGSELWAAIEKPQGRIVDFLLDHGVVVYPVNPKAVDRARDRFRMSSSKSDSFDAYVLAEFLRTDHGHLRPLEPSSQQAQELKMLSRDEHRLVRQKTRLLNQIRVTLKEYYPRPLEVFSDLESKTALDFLKQYPTPQALSELSRRKWNRFAKREHYLGEDRCQEFWEKLCQPQLTVPQHVIRVKAQLLLVLLVQLEALSKAVGTYKEKIKSFFASMPAAELVKTLPGAKTGTIVATLWAEIGDAKSRWESFRHLQAEAGMVPVTKASGKSRVVHFRFSCNKLMRHAAYWLAFVSLNRSEWANHYYRDQRARGHNHHQALRALGAKWLKIIFVMWRDHKPYDENYHLANITRQKMRQAA

SEQ ID NO: 151379 - protein, 352 aa, unidentified
MTTMTYPPAGVVGGIDTHGDVHVAAALDSTGRLLGTASFATTATGNRQLLAWLSTHGELSRVGVEGTGSWGAGLTRYLLERGVSVVEVDRPNRQDRRRRGKSDPLDAEAAARAAFNGAASGAPKSRDGDVEAIRALRVVRRSAMRNRVQAIHQLRALTSTAPQELRDQLRGLNRADLIETCARFRVAEAQDPVAATRFALRELARRIAHLDDELARLDTQIVPLVSRACPELLELRGVGVDTAAILLVTAGDNPDRLRTEASFAKLCGVAPLEASSGRVRRHRLNRGGDRQANHALWRIALVRMGCDERTRVYVARRRAEGLNTQEIMRCLKRYIAREVFRILTERVHDTRP

SEQ ID NO: 151380 - protein, 400 aa, unidentified
MLSIGIDVSKGKSTVCGMKPGGEIVYTPFEIQHTREGMSELVSLLHNSGEEVRAVLESTGSYHCPVVAALLENGIFVSVVNSLRMKRFCSQSIRKVKTDRIDAMQIALYGLAYWQELQPTRLPEDTYRELQLLARQYYQMTSILIKAKVDFNALCDQVLPGMQELMNDHAGRHKLSDFVLRYRHTTHILEMGETRFRKDYCKWAEKKGYRNCERMAVLIFATAQNGIPVLPNAPSTQIVITEAIRVLHTVEASRDAILTQMQALAKTLPEYSLVREMPCIGDTLAPRLIAEIGDVRRFHSKRALIAYAGIDAPPYQSGKFCANNRHISKRGNRYLRKTGYEVMQSYVMHKPANDPIFTFIEKKRGEGKSGKLAMVAGLNKFLRVYYGKVTELYRSLPAIE

SEQ ID NO: 151381 - protein, 371 aa, unidentified
MKTKNDTIPQITIGVDLGDKKHHYCVVDQGGNILKRGKLLNTREAFTHLAAEYSGARVAMEVGTHSPWISEHLLKEGCEVYVANARKLRAIYQNERKCDDYDAEMLARLARVDTSLLKPVTHISQDAMTDRLVLGAREQLVEARKGLIQSVRGSVKSLGYRIDSCSAAVFGKKARGLLGANEAAMRGLEPMLTAIEAMSESIRELDAEVERLGREEYEVTKIFRQIAGVGPVSSLGFALAIEDPGRIGKTRDVGAYLGIVPRRDQSGDTDKALGISKTGNAYVRKLLVQCAQYILGAHGPDCDLRRFGLKLAERGGKAAKKKAIVAVARKLAVLLLSLWKSGEDYDPDHVTTRREKAVKAPEAKLEERLAA

SEQ ID NO: 151382 - protein, 338 aa, unidentified
MNYVGIDHHRQYSHMTMMNQEGQVLRTARVPNLRSEIEKFLEGGETMEAVIETGRSSYTMVDVLEEIGIAVKIAHPNEVKAIARAKIKTDKRDSEVLAHLLRMSMIPEVYRRSQENRQAQRVLRQRAFYVSAMTALKNRVHAFLAQQREEVREEVARETNIFSVKSQKVLLGLDLFRGEKRLLEALLKTYRHLETRIEESTALVEKLYEESREAQLIRTIPGFGKYLAVLVAVEIADLSRFSDAAHLHAYAGVIPSTHSSGDRTHHGKIIRAGNRWLRWAAVEAVWPGIRADFDLRCFYERLARGKGANKAKVATARRLLTIIYRVWKEGRNFIAYRR

SEQ ID NO: 151383 - protein, 398 aa, unidentified
MTNQDHRVGGIDSHKDTIHVAVITAIGQPVTDREFPTTVAGYRRAVAWLIEHGPLSAVGVEGTSSYGIGITTELLAAGIRVVEVNRTRAAEKRKQGKTDPLDAYRAARSVLSGEASTEPKNPSIEPLRALTIARRSAVKSQQAAWRQIGSLLVTTRPALRDRFRDLPETKLIATLRDCRPDQIHDVDDADTLYALRTLARRYLALQDEITALEERMLRRATRANPALMAIKGVGPAVGAQLLITAGDNPDRLRTSASFAALCGTAPIPVSSGRTDKHRLSRGGDRQANAALHHIVKVRMSYDQRTRAYRDTRLANGWTTKEVFRALKRAVAREIFHALAGHTLAPDYSDLRPARHAKNLTLTAAAQHLGVWPARIGELELGRRPNDELATRYRAWLAA

SEQ ID NO: 151384 - protein, 347 aa, unidentified
MNFYTQQHKQYCGIDLHAKAMYVCILDQSGTILVHKNLPTTPEAFLRIIAPYREDVVVGVECIFTWYWLADLCNKEGIAFVLGHALYMKAIHGGKAKNDKIDAHKIAVLLRGGMLPQAYVYPAEMRATRDLLRRRCHLVHKRAELLAHIHNTNSQYNLPEIGKRLAYKANREGVEEHFPDPSVRKTIEVDVSLIDHYDKLLGEVELYITRSAKAHDVQTFARLQSVPGIGQILALVILYEIQDIARFPRVQDFVSYCRLVKCAKESGGKRLGTSGKKIGNVHLRWAFAEAAVLFIRQSQPGKEYFAKLEHQHGKAKALTVLAHKLGRAVYYMLTREQAFDLNRFVTA

SEQ ID NO: 151385 - protein, 319 aa, unidentified
MMRTVYCGVDFHARMQTIAYCDSADGEIHLAQLDHRKDDVRDFYTKLTGQVIVGLESGGYSSWFEAMLEELGHTVWTGHATEIRRRANWRQKNDRRDAELILEIMLKGDFPRVHRHSQESIEVLRMLRYRARLVKMRTMISNNLQAIAINSGLLERSRMLSRAGQQRLKKARMTPAIKHQSDDLITLLVPLNETALGVVHTLEPFNRFTRQRSVVAYVGLEPMERSSAERKRFLGISKAGSRLLRFFLGEAAHVAVRFDPELKQFYERVGKRRGKSVATVAVARKLLIRCWIMLRENIDYAEFRNRGVEARLARTYPRP

SEQ ID NO: 151386 - protein, 431 aa, unidentified
MEQKRHPYLSVGIDIGADFSLMAIALPTQEIIGKPYKILHSSNRSVQGAVERILSTGRAYELPVRVYMESTGIYHLPLYHRLKNAGLDVYVLNPLVTHANQNINIRNIHNDKLDARRIALLGLRPDLKTSIVPADEVAAVKALLREYHAMKKETSMYICRLKNQLRQIFPQYLPLFSKVNGKASLEVLSRYPSPGAVLSAGADALAKLIREASGKGAAMAEKKAEAILSAARESLSFGHGNSGITFLIGHYVEMIRILDEKTAAILKQIKRSVQEQPDSLLARQTRLLESIPGAGFLTAVTIVCEIGDFRAFRRPKQLYSYFGLDPVVRQSGNSAGANLRISKRGSPYARRCFYILALQSVSLRKNGEPKNHVLRTYYLEKCKSKAKMTALGAIMHKLCNIVFAVLRDERPFVLISPQEHRQNYLSLPKAA

SEQ ID NO: 151387 - protein, 419 aa, unidentified
MTSMATTPRRGRVVIGVDTHKFVHVAAAFDDFGAVLDTGTFQADRAGYAELIEWASHPGHILTFAIEGTGSYGAGLTAAVRRSDIGVVEVMRTDRRDRRLRGKSDFLDAENAARAVLGSHATATPKTADDTVDMIRQIKIAKNIAVKARSAAMISLKTVIVNAPDELREQLQPLSKMALIRRYAGLRPAGISTVEAATKHTLRSIARRWQHLNEEITEHEKLLAQLVTEIAPELTAAFGIGADTAAEMLIVAGDNPDRIRIEAAWTKLCGVCPIPASTGKTVRHLLNWDGHRQANAAIYRTVIVGMQHHQPTQAYLARRTAEGKSKAEIIRCLKRFLAREIWASCIHCAPLHKPKNQPLDGYRSINALAETVNGLYKTELIKPGKPWRSIKDVELATARRIDWFNHRRLYEYCGDIPTS

SEQ ID NO: 151388 - protein, 342 aa, unidentified
MKDAVIGVDLAKRVFQLHGASTDGQVIFRKKLSREQFRAFMAQHPACLVVLEACGSASYWAREMQTLGHEVKLIAPQYVRPFVKRQKNDAADAEAIVIAARQPEMRFVAPKTIEQQAKAVLFRSRERLVHQRTELVNVLRAMLYECGHVYPVGITHLKRMEALVEESDCDLPTLILAECQDLLAQIAEKSARIDAKSKKMKALATETDTARCLQTMPGVGPLTALAVEAFAPDMAQFKCGRDFAAWLGLVPRQYSSGGKERLGRVSKAGQRDIRRLLIVGAMSRLNWLGRRTISKGSWLAKMLARKPRMLVAIALANKMARQLWAMLTKNEDYRDPALAAAA

SEQ ID NO: 151389 - protein, 397 aa, unidentified
MYIVGIDIAKRKHEAAVIDGEGTVIIKPFSFTNNCSGYNRLLAMLTKAKLPLDEVSFAMEATGHYWLALFTRLQKEGFRVQVINPVQTNSIRSFYIRQAKTDPRDALLIAEVIRFGHFSESTLHPENIYELRELCRGRHAIVSMQADVKRKVVALLDQVFPEYETAFTNMFGDTSMAILQTCPTPKELSEMRLEELCHLIEVSSHKRFRMEKAQELQALARNSFGFAMAGDVFSTMIRLYAKHLDFLKQQVREMDRKIAEIMETLDTPITTITGIGLTLGAYILSEIGDISRFSSAAKLAAYAGIDPTMRQSGEYNGVRNRMSKRGSPYLRHAIWLAASSAVLHDPALKLYFQKKRDEGKPYMASVGHACRKMVSIIYAVMRDNKAYTPYIPNEISA

SEQ ID NO: 151390 - protein, 388 aa, unidentified
MKNRSDLNQSYAAFDQAITIVSVVELSSKSWLAAGTVPGVKRQPRKKLSANPHELLMQIERWRAEAVKAGHEIKRIVVAFEAGRDGAWLARWLEERGIEAYAIHAASIPVPREHKRPKTDRLDTEMLMRALLGWLRGEPRHCRMAQIPTLEQDDAKRPSREHKSLVNDQTRLVNRMKSTLVMLGITNFNIKLVKARQKLAGLRTPNGEPIPPNTLAGLYRGLERLALIRKQIKAIEQAREQRLKAKPKQGTNPLVLMLAQILGLGLETADLLVHEVLTRNLRDHRAVGRYGGMTGSPDESGKTRREQGLAKAGNWRVRHSSLQLAWRWLKFQKGSALAQWYRQRTADGRGDTRKTMIVALARKILIALWRYVTTGELPAGVVLKLAAI

SEQ ID NO: 151391 - protein, 317 aa, unidentified
MLDAKTGELVQERLPATREALADWATRWAEKLEAVALEATTGWRWVWRELSSRGFEVRLCDPGQARALRGSKRRPKTDRLDAAWLARLLAKEMLPTCWLPPEDIQYLRDRTRLRRALAQDRMRFAQRLHALLTHEGWPCSRGRLLSVSGQRWARSLALPPAALANVEAMFALIAVLDEQLAVIDAELRQRARSDPRLQALCTIFGVGPVLAAHLLAEIGQADRFRRARQVVRVAGLDPVVSESAETRRRGKLSKQGSPELRWALVEAAHHACQRRSPDHSLYLAGKERSGSKRAALTVARKIARRAHHVLAELEQAA

SEQ ID NO: 151392 - protein, 469 aa, unidentified
MKARKVSALPERGLHRLCGAEPQCLEVNSNKERKADTMKTYILRPFDPVERQTPRAKSRPALGPRLGLPVQPTLFIGLDVHSDSIAVGLAPSGSAEVRAYGVIGGSHDDVLKLLKKLGAAHPGWLLKICYEAGPHGYPLCRCLRAHGYDCMIVAPSKVPRKPGDRVKTDRRDALQLARLYRAGELCAIYVPDPQDEAIRDLVRGRFLVCRQQHRARQQLKMFLLRHNIRYTGKTSWNPAHLRYLAQVKMPFPVQQIVFQEMLDVITEASARLERLEQEIARAVPVWRWYPVVQALMSLRGMALLHAATTIAELGDLNRFTHPSRLMSYLGLVPSEDTTGTDRRQGGITKMGNGPARRALIEAAWNYRTAPRISPHLRKRQEGLPKAVLEISWNAQRRLHHRFVHLTRVGRKKSQVAVTAVARELSGFVWAIARLVQPLPPKRTTDPALTPTSLAAVSSRHSSPRGIRRR

SEQ ID NO: 151393 - protein, 322 aa, unidentified
MAETTSSLLVGIDVSKERLDVGLGANGESWTFENSLAGLSTLKEKLRPLKPTLIVLESTGGFESLTLAELYTAGLPVARVNPGRVRELAKSIGQLAKTDRLDARVLARYAEAVRPELSLLPTAAEQELAALVSRRRQLLEMKVAEENRLSTAPKNVHTLIHEHLDWLTAAIRKLDKNLDDFIHGSPLWKEKGDLLRSVPGVGKITAFTLLAELPELGCLDRKEIAALVGIAPFNHDSGRHSGKRHIHGGRSMVRNVLYMATLSATRFNPVIRSFYQRLLNAGKCKKVALVACMRKLLVILNAILCSHSPWRPPLASCQALDI

SEQ ID NO: 151394 - protein, 456 aa, unidentified
MPHYFFGIDVSKGYSNFVMLDSSKRCVEDDFQIDDTFDGHQKLYSILSEFCIRHPKANIFAAVESTGGYENNWFNALTRFQAHLPIRTARLNPCGVHNNSKAGLDRNITDKISAKNVAKYIIEHPEKVRYQQQDPLASLRKQWGFIKMLKKQKTQLLNQLESNLYTANPEILAYCKDSTPAWVLSLLQRYPTASKLAKARKSSVALIPYVTPQKAKKLIETAKHSVASATDEITSQIIKATVKQIRQLSKVIDAQTKAMTDKCSIPEVEQLKTFIGIGDDSAVGLVLEIGSIERFKSAKHLASFFGLHPVYKKSGDGSWGFHMSKKGRIVPRQILYMVAMVAIQSNPLICEIYEKHTEKGMEKKAALGVCMHKIIRIIYGMLKHNEAFNPEIDRKNREKQTTQGEKKICRDKSRRYQAYDAKAPISRRQAKKREERKQSQSDNIAKCGIKVPVLVF

SEQ ID NO: 151395 - protein, 439 aa, unidentified
MRKRELTVMHPNAAGIDIGSANHYASVAPDQSKEPVKEFGCFTEDIEAMADWLIECGVDVVAMESTGVYWIAPYEILESRGLIVYLVNARHVRHVSGRKSDVLDCQWLQQLMSFGLLSGAFRPVGEICALRAISRQRDTLLNEQARQVQRMQKALTQMNVQLTNVIADIVGKTGQDIIRAIVAGERDPHKLAKLRNYRIHASAETIAKSLEGNWREEHVFCLSQALSLFDAYQALIVAVDAKLEEMIKPMRQHQEALAANKNKGRGKNAPTFDARNALYQWVGVDLTRIGGIDVSTALKVLVEIGPDLSKFENAKRFASWLGLCPGTKISGGKKLSSASKRIPNRVAQALKLAAQGLHRSHCALGAYYRRMAARMGVGKAITATAHKLARLIFAMLTKGGEYVERSQEQYENQMHKRTVAYLKRKAAAFGFTMQPINAV

SEQ ID NO: 151396 - protein, 349 aa, unidentified
MVVIGLDAHKRTHTVVAVDGTGRKLAERTVPTTRAGHLELLRWARRWRDRTWALEDCRHLTRRLEVNLLAVGERVVRVPPKLMAGTRRSNREPGKSDPIDALSVARAALREPDLPTARLDGVERELRLLVDHREDLVVDRTGHQERLRWFLVELGIDEPPARSLDRPIILDGLEADLASRTEPVARFARDLLARIRELTAAVNALEAEIRVLAARVAPSLLALVGCGHLTAAKLVGQTAGIGRFRSRAAFARHNGTAPVPVWSGNTVRHRLNRGGDRQLNVALHRIAITQLQREGPGREYLAKRMAAGDTKTEAIRALRRRLSDEVFRRLTTDELDRNKASAASTAAAA

SEQ ID NO: 151397 - protein, 427 aa, unidentified
MRYQIAGIDVHKRMLAVVVANGEVEGDYQFERRKVGTSPGELRALADWLVEREVEEVVMESTAQYWRPVWEALEQHWRPKRRTRDGASLLSGTLHLAQAQSNRGAGGRKQDFPDAERLVKRLVAQELTLSFVPDAEQRLWRTVMRRKYQITRNRVQLHNRLESLLEEAHIKLSSVVSDLLGTSARRMLQALADGETDPATLAALADQRLRATPDQLRDAFGACADLHPVYRRLVKLTLEELRVIEDHLGQLDQQMAALLSHHHDAVHRLAEVPGLGVDSAQQIIAEVGATAATFPSDKHLASWMGACPGTEESAGKNYSHRCPKGNRQMRRVLNQAANAAVKAKGTIFAIVYRRLVPRLGHAQAIGAITHRLCRLIWKILHQGIRYEERGPAVSADAKKVRARKMIRELRSLGYRVELLPAASSSRA

SEQ ID NO: 151398 - protein, 407 aa, unidentified
MATFVGVDWGSGAHAVCVIDAKGMVRGRFEVGHDRAGLATLVTRLQQHGAAADIPIAIERPSGLLVDNLLAAGFVVTPIHPNVVKACRPRYRAVAAKSDPGDALILADILRTDGHRLRALEPQSDAIKALRGLVRGRDDLVGTRVALANQLTALLESFWPGAARIFAAVASPIALAFLERYPTPDSAARLGPKRLAGFLAQHRYCGRRTPKALLERLRSAPDGGAGEAEGEAKGELVRALARTLHALVAEIAKLTSRIEHAIAALPDGQIVMSFPRAGRVCAAQILAELGDVRARFPTENQLAAEAGVAPVTYQSGKSRGVGWRWACNRRLRAALTCMADNSRHQSPWAADLYRRARARGCDHPHAIRILARAWTRVLWRAWTDRLPYDPTKHAAAQPFLKPHTDTG

SEQ ID NO: 151399 - protein, 465 aa, unidentified
MKRHRRRSSPKPRTSSNALERLHPNAAGIDCGSAEHFVAVPPDRDPTAVRSFATFTTDLHRLADWLAGCRVTHVAMEATGVYWIPVFEILEARGFLVILVNARHVKNVPGRKSDVSDCEWLRDLHILGLLRGSFRPTDSIVALRGYLRHRTVLIESAGALVQRMQKALIQMNLQLPLVVSDITGVTGLRILRDIVAGERDPTRLAQHRDHRCHASAAEIVAALTGNYRAEHVFVLQQNLELFDAYQRQLAACDTAVEAHLARLAATAAPPPTPLPPPRRRKKTYQNAPRFDVRTPLHQLTGADLSQIDGIGPYNALRLLSEIGTDMSRWPTDKHFTSWLTLAPHNQISGGRLLRSRTQPSANRAATILRIAAMNLGRTQTALGAFYRRLAFRVGKAKAITATARKLAILIYRTLKDGFVYSDPGAEAYDAHHRTHVIRRLHHRAHNLGFALLNLSTGEVVDGSVS

SEQ ID NO: 151400 - protein, 392 aa, unidentified
MFFVGIDIGKNNHVASMMDDTGKVVFKAFSFPNTSDGGNALFSKLASYSLNPSDFEIGMEATGHYWLSVYSFLFEKSFLLHVINPIQTDGWRRGTEIRKRKNDIIDSLLIADLIRYGQFVETRLADEALFSLRTLTRFRTYLVESISDLKRKVVCVLDQVFPEYQSIFSDIFGKTSKEILLQFSSPIDFESVSSETLAELLAQLSRQKVGAAKAEQLKAAASSSFGVTFAKNSFTFQLKSLIEQISFIEKQVTETEAEISSIMEKLESPITTITGIGTVTGATILSEIGDISKFDSPRKLVAFAGLDATVTQSGEFEAAHNVMSKRGSPYLRKAIFQSALIASFRDPVLSVYYQKKRAEGKHHLTCVGAVARKMCNIIYAVLKNNRPYVPKV

SEQ ID NO: 151401 - protein, 315 aa, unidentified
MESTVWVGIDVSKARLDVALGAQGELFEVANDPRGIAALIARLSRHTLARVVVEATGGLETALVAELGAAGLPVVVVNPRQVRDFARATGQLAKTDALDARLLARFAERVQPPLRALPTAEERELKAVVARRRDLVEMLTAERNRLSSAPKVLHREITGHIRWLEARLKQRDRDLDRQLRGSSLWQEKEDLLRGVPGVGPVLSATLLADLPELGRLDRREVAKLAGVAPLNHDSGRLRGLRTVWGGRAPVRAALYMATLSAVRFNPVLKVFYQRLRSAGKPPKLALTAAMRKLLVILNAMLKHHTPWSPPCPVAH

SEQ ID NO: 151402 - protein, 358 aa, unidentified
MHTQVRNFDFSGQNIYAGIDVHKKNWRVSIYSEQLYHKTFHQPAEPKALQHYLNKHFPNAFYHSVYEAGYSGFWIHNQLQELGINNIVVNPADVPTTDKEKKQKADPVDSNKLARHLRNGDLEAIYVHDTGALEDRSLIRMRSTLIKEIARYKNRIKAELSFFGIEIPEQYQKDYTYWSNRFMQWLGDLKFSRESGTASIKILIDHVNYLRQNLLMVNKKVRTLSRQPAYQEGVELLTSIHGIGLITSMVILTEIQDIHRFSNQQKLCSYVGLTPTSHSSGDSMIHGEMINRGNKYLKKAIVEAAWVAARRDPGLHQDFLAYCVRMKKNKAIIRIAKKLLNRISFVLKNQVPYNDGLE

SEQ ID NO: 151403 - protein, 403 aa, unidentified
MEVLHQKCCGLDVHKQTVVACVLAPRVRETRTFSTMTNDLLKLKEWLLECKATHVAMESTGIFWKPVYNVLEDAFTVLLVNPQHIKALPGRKTDVQDAEWIADLLRHGLVKGSFVPDREQRELRELTRCRRSLLQERNRVINRIQKVLEGGNIKLSSVATDIVGVSGRAILEAMVNGVEDPKALADMAKGLLRKKKTSLEEALKGVMGEHQKMILAAHLRHLDFLDREIARMDDEVGQRTGRFEKILKSLDDIPGIDRRSSEEIVAETGIDMSHFATAAHRASWAGLCPGNNQSGGKRRTGKTHKGNRWLCSTLVQAARGAARSKGNYLSAQYHRLVGRRGDKRAIVAVAHSILVIIYNMLRKDTKYQDLGALYFDKRDREHVLRRALNRIEALGYKVSLQVA

SEQ ID NO: 151404 - protein, 417 aa, unidentified
MSSGVRLTDEELEGKVVAGVDTHADTHWLCVLDGRGRVALSREFDATAEGCAELARAIGGAGGCAAVGVEGTCSYGAQLTDELVACGHRVLEVLRPKRPPRRPGEGKDDARDAERAARDVLAGEGTSVPKLRGGWVEGLRALLNARERCVGACVSARNAALAVARCAPEAERRRWEGLSQAEMMRGCAALPERDATPVERALLALGRTWEAARAEADALEGAMEAMVAANLPSLAAVPNCGAVSAAKLVVAAGENPGRLRSEGAFAMLCGAAPVPASSGKTDRFRLNRGGDRRANNALHMIVAGRMRSDPRTAEYVERRRAEGKSTREIMRCLKRYVAREVYRALTRPGDAPAPPDPAALRAARRSAGLSQRQVAEALGLSQSSVSGAERGVWSNRLAAARYARWVEDGMPMDVAVG

SEQ ID NO: 151405 - protein, 324 aa, unidentified
MTDAILGIDVSKETLDASCARGQRRQSRTFSNSPEGWKMMLAWLKAMGSKQAHACMEATGRHSLGLALALHDAGHVVSVVNPAQIRDFGRTKLGRNKTDKVDAALIREYAELLKPGPWTPPSSAMRTLNELQTVRAGIVGSRTEWKNRSGSGLGDSTATKLAAATIEHFTIQLQAIDKAISETIDGDAELRGRCDLLLSVVGVGETLAALLLAEMPEPGVLRRSGELVAYAGLNPSHHRSGTSIDRPTRISKIGNAALRSSLYMPALSAMRYNPAIAALVARLKSTGRLKPKQIVVAAMRKLLVICFGVLKTGQRFDPALAMPA

SEQ ID NO: 151406 - protein, 401 aa, unidentified
MKTVLSVDVAKNKSMIMLMNSDGEIFIDTKEINHNLEDFEKVKEEIKEINPQNLTVFMESTGTYHLPVERYFKENGFNTLVINSLTTKNNYDTIRKTKTDKKDCYRLAKLFFVNEVEYHELSKKDLYANLKAMTRQYFYLLQNNVSCKNRYKRLINICFPELEKIFKSTRIYDDTALNFIKEFPHAEIVKEKRIDALYNNLYKTNGRNLNFYKKLATTIKTASINSYPGVDKEHEDVKNLSYMAKIVQNNNNIINELREKMIETAKQFPYYKIINSFYGIGDTLTAEILGELGDITRFDSPKEIIAFCGLDPTIKQSGKSINVKGAISKRENKYERYILFNCSQMVVKLGASNYPEHPVYIYYQNKKAEGKHYYESLTACSTKILRMLYSMCKNNKQFLEN

SEQ ID NO: 151407 - protein, 319 aa, unidentified
MNPSVMPTPRVIGCDVGKHTIVACDSLTGRTTELANRPETLTAFLADLPPTCLVVCEATGGYETALLLAAVELGMPAHRADARRVKAFIRSLGRIAKTDRIDAHGLARYGQDRHADLPRWQPACSARDDLRTLVRLRTQLVKQRAALTNQIKAPGGTVAKHRLRTLLAAATEQIDAIEADIANLVERQPAIARTVGVIRDIPGCGPVTAVTVAALMPELGTMTGRQAASLAGLAPHPHQSGQRDGYRRTKAGRPDLKRALFMAAMAARNHNPHLRTVYDRLRANGKKPIVAITALMRKLITIINARVKDALAKHACQLS

SEQ ID NO: 151408 - protein, 411 aa, unidentified
MDVQYERCCGIDVHKRIIVACLKCGKKQEIRSFGTTSEEIRTLVRWLLDAKCQMAAMESTGSYWKPLYNIFELSQLEIMVVNARDMRNLPGRKTDVKDAEWIADLLQHGMLRASYIPKRKQRELRELSRYRKSLIGERARELNRLQKMLEGGNIKLASIVSDINGKSSRNLLQKMLEKDTRLQREDVEASLHGALRHRVEDIVRAVDGFLTPLQKQLIRQVVAHIDDMTKRIGEMDTLVKQYMGEYEEAMEKLDEIPGIGKQSAETILAETGLDMSRFPSEKHLSSWAGLAPGNNESAGKRHSGKTTKGNPTLKTTLIQCAKAAIKKTDSFLYAQYQRLVVRRGKHRATVAVAHTMLIAIYHMLKDGRLFIDLGAEYYNQFNRERKIKSYLAKLKKLGWTLEEATLSGSTT

SEQ ID NO: 151409 - protein, 331 aa, unidentified
MKFKSFIGIDVSKSTIDAYLKINQLHSIFENNEEGHQELVEWVMENSGLVLAKDFLFGFESTGLYSSQLALFLENHALPFYIMSGLELKRSLGIRRGKSDKADSRDIAEYLYEKQEKITPTVLPTQTIQDLKKLFNYRERLVSDRAAFMSRLKEYETIVTKNKLKVYQKSHTTVIACLDKQIETIEGEIDKLLHKDELLLNQYKLINSIKGIGPQTALALIVFTEGFTLFSSWRKFASYAGIAPFPNQSGTYKGKTKTSKLANKRIKTLLTLCASTSIQYSTEMRNYYRRRIAEGKNKMSSLNIIRNKLLARAFAVVNRNSSYVDTLKYAA

SEQ ID NO: 151410 - protein, 450 aa, unidentified
MAQGSGLTRGERNRNRKLEALREAVARDRAVLAVDLGEDKQVAVVMDHECRVLARKVVKAKAHQLAGLLDWGADRAVKAGFAGLTVACEPAGHRWKALMGLADGAGHGFCCVQSLAVHRAREGDDYTLGKTDHRDAYLIGKLAVRLECYLPERADEAWARLRHLGARRFALVADVTSCMQQAGDLLGCAWPAPLGAAARPLESVTWLAGMAVITGRCCGQPRRLRKLGYDRFLAAVRRELPRWGGKYVRHSIVRGLWDALADAGGVAAQRPGALERVHLLLGDWRELRTRLAGTEERMVAVLGKLGLAELVASIDGVSALSGAVILAEAGDLQRFTSGRAVVKHAGLNPSERTSATINGQTRISRRGRPGLRAAAWRAVWGALRHNPVLQAKHAHLTGRHANRLADGQARTACAAALLRWLWAVVITGQAWDARIAAGQIPARPVTTAAA

SEQ ID NO: 151411 - protein, 406 aa, unidentified
MLLVGDDWAEDHHDVEIMDPAGRTLAKARLPEGIAGLARLHALIAGQRGDDAEQVEVRIGIETDHGPWVAALTAAGYTVYPVNPLQAARYRDRHAVSGAKSDAADAHTLADMVRTDAHQLRPIAGDSPDADAVKVVARAHKTLIWERTRQTQRLRHALREYFPAALDAFDDLDAADTLELLAKAPDPTAAVRLTRAQISAALRRARRRDVDTKTTAIRAALRTPQLGRPAVVVAAYAATTRAAVAVLATLNAQITALEAQVGAHFRRHPDAEIILSQPGMGPVLGARVLGEFGDAPGRYADAKARKNSAGTSPITRASGRRKTVHARHVHNDRLVDALMLQAQSALQASPGARAYYDRQRARRLDHNPALRQLANRLVGILHGCLKTRTRYDEATAWSHHNQQTAA

SEQ ID NO: 151412 - protein, 366 aa, unidentified
MKKNSTVATKRKQIFKQAKLTIGLDLGDRTSHYCMLDEAGNVILESNLPTTSNGIRQAFRRIPRCRIALETGTHSPWVSRQLAQMGHEAIVAHARNVRLIGESSRKDDQFDARTLARLARIDPGLLGPVRHRSAQAQIHLTVIRARAALVSTRTALVNAARGLTKSYGQRLNQCGTEQMNRDRSKGLSQELREALDPLLREIESLNERIAEYNGRIEQIAKEVHPEVARLKQVKGVGTLIALTYVLTLDDPHRFRRSRDAGCYLGLRPGRRNSGQSEPQLHISKEGDRYLRTLMVQGAHYILGPFGQDSDLRRWGLKLAERGGKNAKKRAVVAVARKLAVLLHKLWVSGEVYEPLRNNHKVRSAVA

SEQ ID NO: 151413 - protein, 357 aa, unidentified
MSDTIIALDLGRHKSVACVSDRRTGAHAFRELDTTPGALDRLLAAHPGAAVVIEACANAGWVHDRAVAAGHPVKVANTAAEAWKFKHLKRKTDRDDALRLAQLEALGQLPTVAMPDPATRQRRMLIACRQELVGRRVACQNRIRALLAAAGLATPSGHRAWTEAGLRAIGSHAQPLAECAPEELWRGVLQLALAEYAALVGQVAEVERALDALAKCDPATALLETIPGLGRRTAEAVAAHLGDASRFASAKQVGAYAGLVPRQYQSGVTDRKGRITRRGPALLRKLLVECAWCMLRYNGWARAVYARLTGGGQARQKPAIVALARKVLVRCWAMLRDRVPWRDEPDPAAASSGRRAE

SEQ ID NO: 151414 - protein, 363 aa, unidentified
MKHGHQTAQNLQIEYEQLTTQELHKRYRYFIAKDVHKRSTTYNVRDRMGTILDHGETATDYQDLHDRLEPYLDSALIVMEASTSYYKLYQAFLENGYDVVVANTIKIRSLFPKDDNIDARRLSDMLRLGSVPISFIPGPETQHLRKLVRTRHSLMQEKVRWNNRIQALIDLEGLRMPPFNAFTKTWTRALVTYLERPNASYELKHTFTHYTRVERHLEEISKEMLRYIVEHWREEYEFLQTIPGMGRITGCYVIADVLPIERFAVKKGQKSLRRYVGVVPAFSSSGDSVSQGRIPKGSSRKLLRWALVEAANAITRTKTKLAQFYKMKKKQKKCSGKAKIALAHKLSDIIYHVLTTKKPYVAS

SEQ ID NO: 151415 - protein, 328 aa, unidentified
MTDQYIGIDLHKAFLQACAVSATGERLWEGRFPRTPAGFEALTARCTPRSAVAVEASTPTWHFADAVASRVGALRIVDPVKTKLKAGFAAKTDRLDARRLADALRRDSVVGIYYPPLAIREARELCRSRHALVQVRTALINRLRAVLLRQGIADARRLAKTADDGWLTEFALPPRAAASVAVLRRVLATVRTEAARADAEVRHATAADPIAITLQQVRGIGPLLALTIRAEIGDIHRFATGAHLASYAGLVPRVEMSAGRARYGRITKRGSPWLRWALIEAAMHGTRRTDRIGRWGRGLAVRKGALKARVALARVLCEEIHRLWSGIA

SEQ ID NO: 151416 - protein, 425 aa, unidentified
MNSKENTKINQVTEQTLVIGIDIAKHNHYATFVDERGRVLKKAFLVKQTRKGFEQFYQEILEGMKEFDKSHVIVGVEPTGHYWLNLAYFLEDYGIPLVVINPMHVKKVKELDDNLQTKNDKKDALTIARLMKDGRFSYPKLLRDQAANIRSCFTLEQTLIDDRTILKNRIHRWVDKYFPELFEVFSDFGAMVLGVLETTPLPAELVNMTTADLADQCAKASQMKQRRPKIAAKVIEVAQTSIGITVAPWGAKREIQCLIRQYRLLEEELTMIEEEIQSLIVQTADYEYLASFPGISRRTISGLLAEIGSFTDFESPRQLIKLAGLTLHENSSGKHKGMKKISKRGRRRLRAILFRAMHPILRNNPAFMKLHQYYTQRPQNPLRKKESMVVLCSKLLKVLHAMCTKKRKFDGEQMLADLHCLQLVA

SEQ ID NO: 151417 - protein, 461 aa, unidentified
MARKRTRKKKQDALSEIPKLDSLKQLNLNAAGLDIGAEEIYACVPEGRDSQSVRVFSAFTIDLYALADWLQTCGVDTVAMESTGIYWIPIYEILEERGFEVFLVNARQIKNVSGRKTDILDSQWIQQLHTYGLLRASFRPSEDICALRSLVRHRDNLIRYRSAHIQHMQKALNVMNLKLTNVVSDITGITGLKIIRDIVAGEHDPKTLAHHRDFRCKKSQDEIAESLQGNYRAEHIFELRQALELFDFYNQKIKACDAEIEGLYAAFEPQVDIVEKPLPPKKQKHHKPRGNEPYFDLHTYLYQMTGVDLTQIDGINALTAQTIVSEIGLDMSKWKSVKHFSSWLGLSPNNQITGGKVIRRSTKRTTNRAAQALRMSALALTHSDSALGVFYRRMRAKHGAPKAITATAHKLARIIYFMLKRREEYVDPGASYYQEKYRERVVNNLERKADKLGYKLIPSLD

SEQ ID NO: 151418 - protein, 440 aa, unidentified
MREGVACFGPVPSVCPLRRWVVSVVAAPVSSSTVVVAVDVGKNCVALSVTDASRRRLFGPVEFAMTRPALERVLSRVGEVLPADGVVKVGVEAAGHYHLPMITGSAWPAGWEVLELNPAHVGEQRRVAGRRRVKTDAIDLEAITDLVLAGRGIPVTAREEVLSELTAWAAHRTRRVGTRTATKNQLLGQLDRSFPGLTLALPDVLGTKVGRLVAAEFADPARLGALGVTRFIRFAAHRELRVTRPVAERLVTAARDALPTRDAVIARRVLAADLALLADLDQQINQAEAELAALIPASAFRTLTSVPGWGVVRTATYGAAVGDPTRWPGPRQLYRASGLSPMQYESAGHRRDGAISREGSVELRRALIDLGIGLWHSDQPARAYAAGLKAPRETRRDHRLRVGAPREPNRLRPDPRPGHLRPHPLGPITQVSQHISVCPG

SEQ ID NO: 151419 - protein, 425 aa, unidentified
MPVAKVYCGVDRAEAHHDLALVDEHGGLVAKRRITESVEGFEAMLELLAEAGDDPADPIPVAIETPRGLLVAALRASGRPVFAINPMAVARYRERRTVAQSKSDHVDAMTLTNILRTDMHAHRRLPADTELARSIAVLARAHQDAIWRRTKASNELRSLLREYFPAFLAIFAHRDGGLTSRVARAVLAIAPTPAQAERLSTARIAAALRRAGRQRGIEALAMELRDALHIPHLRQEPLVEQAMGTQAQRLLATLDTECTNVDELATAAAEAFAQHPDYAIITSFPGLADTAGARVLAEIGDDRDRFADARALKAFAGSAPVTRASGRSIVITHRRMKNDRLAAAGFVWAFSALTSSTGARGHYDRRRTTGDRHAAAMRHLFQPDARPTPPLPANRTALRRDRRIRRADQPGHLTSNRIGCLFRGS

SEQ ID NO: 151420 - protein, 391 aa, unidentified
MVCVGIDVAKDKHDCCILDSDGTVRADCFTIPNNMDGFKQLLQTIRDCTKKSDKIKVGLEATGHYSYNILGFLLDNDLAVYVINPLHTNLYRKSLSLRKTKTDRVDARTIATMLLSDVDLKSYTDIAYHNEELKSLTRYRFDKVQERAKLKQSVSRLATILFPELEQLVSSIHGTSIYALLGEYPGAKQISEVHLTKLTNLLTTASKGRYGKEKAIQIREAARASIGSVMPAKSLELKHTIKLIQELASEINEIEDSIQKIIDELNPPILSIPGMGVNSAAVILAEIGDFSNFSSPDKILAYAGCSPSTYQSGKLTNCYAHMEKRGSRYLRHALYNATKYVCYWNPVFAEYLAKKRAEGKHYNVALSHAMKKLVRLIYALQKSGKAYLAAA

SEQ ID NO: 151421 - protein, 395 aa, unidentified
MDIHKKDITACIITSEGKELKQFGTMTPDLLKLADWIKAKGCTHVAMESTGVYWKPIYNILEHYDLQEILVVNAKHIKNVPGRKTDRIDAAWIAKLLRYGLLKGSFIQNREQRELKELVGYRKSLVEERAREVNRIQKVLEGAGIKMGSVMTDITGVSGRAMLDAIVSGIDDPTFLAEMAKGRLKGKKDQLEKALVGLVGRHQRMMIAMQLRHIGYLDQEITRLDQEVEEQMHPFEQELALLDGIPGIGSRSAQIILACIGTDMSRFPGAPHISSWLGLSPGNNESAGKRKQARTTKGNPLLRSTLIQAAKSAAKTKDTYLSAQYHRIAARRGANKAAVAVAHSMIVIIYYMLKHHQPFKEMGADYFAKNNAKAIKNRAVKQLEMLGYQVKIEVA

SEQ ID NO: 151422 - protein, 364 aa, unidentified
MDVHLRSTTVCALDAETGEAVTRRFRGNPWGEVAEWMSGFPGPSLAAYESGYLGFAPQRELSGLGVDCVVAAVSKVPRSAADLSSKNDRNDAARMAKAILSHDVTPVWVPSPEIEGLRDLAAAHDAATARLAAAKQRLLAFLARRGYVYGGTTPAGNPRKYWTYGFLRWLDGIHPADDGGIRALAALRNEVEAADETRGALLAEYRAAVAAGPLSAEVEALQSIKGCGFALAAAFASEVGDFSRFRSGRQVTSYFGLAPKQRSSADSVRLGGISGAGNALVRKLAVEGSWCYAQAGHQPKLMPKGSGVPLEIRMHGRKGSERLLRRREEMIARGMPQAKANAATAAELVRWLWALGAMCREGAE

SEQ ID NO: 151423 - protein, 341 aa, unidentified
MKCSVISIDLAKNIFQICVLDEDRKVLFNKKVKRSELLHELRQFEPTLVVMEACYSSNPWGRRIEKLGHTVRLIPPFVVKPFVIGNKNDANDALAIAEASLRPTVRFVAVKSTEQQDIQSLQRIAERLVKTRAGDVNQLRGLLSEYGVVVGTGITTLMNAIPDTVEDANNELTSIARSFVLRIYRNIQRISVQIEAVKIELIDLIKDKDEYALLQSIPGIGPITSAALMASVGDAGAFKNGRQLAAWIGLTPTQYASGETNRMGKISKRGNSSLRKYLIHGARTVLNWCEKKDDVLSCWLKKLKERMHGCKAVVALANKLARIIWSVLTTKQPFDVTKACA

SEQ ID NO: 151424 - protein, 366 aa, unidentified
MKKVSTAAAKQSKNFSQQKLTIGLDLGDRNSWYCVVDEGGQIQLEQRVRTTAKALQEVFGTMPRSRIALEIGTHSPWISRMLSDLGHEVIVANARKVRLIGESRKKDDRLDAQTLARLARIDPELLYPVKHRSAQAQADLTVIRARAGLVRARTGLVNSARGLAKSYGERLRGCNVRNMNPEKAESLSPELQRALEPLLSAIAELSQRICEYNERIEALAQQSYPQVELLKQIKGVGTLIALTFLLTLEDPHRFGKSRDVGGYLGLQPGRRNSGRSEPQMHISKEGDPYLRTLLVQGAQHILGPFGVDCDLRRWGLKLAERGGRSGKKRAIVATARKLAVLLHHLWVSGEVYDPLHNSGMTVAAAA

SEQ ID NO: 151425 - protein, 402 aa, unidentified
MNCVGIDVSKGKSMIAVMRPFGEVVVSPFEVLHTDSELSKLAGLLKSLDGETRVVMESTGNYHAPVAWLLHDAGLYVSVINAMLVHDYGNNSLRRAKTDKKDAVKLANYGLDHWLTLPRYVPDEDTRLMLKTCYRQYQQYSKVQTMLKNNLISLLDIAFPDANRLFTSPPRADGSEKWVDFVAAFWHCECVCGLSEKAFTAKYHKWCRKHGYNFSEDKALDIYASACGHFGVMPKTDTAKLLVEQAIFQLRATSATLAALKQEMQSLAASLPEYPVVMGMFGVGPVLGPQLMAEIGNVRRFHSKKALVAFAGIDAPPYQSGQMAIRSRSISKRGSASLRRTLFLVMSVILQRAPMNEPVYQFMNKKRSEGKPYRVYMMASANKFLRIYYASVKAYLDSLEHD

SEQ ID NO: 151426 - protein, 416 aa, unidentified
MDSGCDSQLGGIQINSVGIDISKGRSTIAVMRPFGEVVILTFKVRHTDSELSELARQLKSLNGETRVVMEATGNYHAPVAKLLHDAGLYVSVVNAKLVHVYGNNDLRRVKTDKKDSVKLANYDLDRWLTLPRDVPEEDTRLLLKNCYRQYRQYSKVQTVLKNNLISLLDTVFSNVNRLFSSLIRGDGSEKWVDFVAEFWHCRCVSEKSEKAFTNKYQLWCRKHGYNFSEAKAHLIHAEASGHIGVMPKSETTKLLVEQAVAQLRATSAALTALKHEMLALAAQLPEYPVVMGMFGVGPTLDPQLIAKIGDVRRFYSKKALVAHASLDAPPNDSGDVTGKHKSMSKIGAASLRRTLFLVMSVYLRSAPLDEPVYQFMDRKRTEGKLYHVYMMASANKFLRIYYATVKAYLESLEHTA

SEQ ID NO: 151427 - protein, 348 aa, unidentified
MNELERCRQAKGTIWIGMDVHKSTSTLAFMDPATGEAEVRRIETSPEAIAEALGRWERPWAVALEATRQAPAVCRWLRQLQVDEMHLAHPQKLEMIGRCLSAKTDVKDALLIRSALADGYLPKCYLAPPEVQDLRALTRGRDRFRRTSTQMRNGIRTALCQAGLACPRTDLCGKAAQAELAKLFAKLDPWARRTAQWMWEILRAAERAVADLDREIRRQARAHPVARELMRLTGIGPVLSLSLVAELGDIARFAAPAHLHSYAGLAPRTEDSDRHHGRRRLPQRCHKRLRHLAVLAAQGAIRAHAPSKAKTVAERVRARCGKRTAKIAAARMMLTEVWEVWRRVAAIA

SEQ ID NO: 151428 - protein, 453 aa, unidentified
MSRERSRSKPSGLPIIHPFAAGIDIGSRFHVAAVSPDLCDEPVQTFQAFTSDLERMADWLVATGTKTVVMESTGVYWVAAYEVLETHGLEVILANAREARAVPGRKSDVNDAQWLQRLHACGLLRASFRPGRDIAELRAYLRAREKHSDYAAAHIQHMQKALTFMNIQLHHVIATITGVTGMRIIRAIVAGERDPDRLAAMRDVRCKESLETIRGALVGNYQPEHVFALKQALALYDFYQQCIDECDVEIERTVAGLNIGKPVPASPLPKAKHRSKLPSDPKFDVRAAMYQLTGTDLTQIHGIGPYLALRFIGECGTDFSRWRTAKHFTSWLTLSPGCKISGGKVLSAHTRKTSSRLTVAIRLAAVTVGRSNTALGAFYRRLAARIGTAKAVTATARKIAVLFYNAMRYGMDYRDPGADHYEQQYRDRVIKQLHRRAAQFGFALQPQESAANG

SEQ ID NO: 151429 - protein, 367 aa, unidentified
MKKVSTRAAAQSRNISQQKLTIGLDLGDRNSWYCVLDETGRIQLEQRVRTTAKALQEVFGGMPRSRIALEIGTHSPWISRLLGELGHEVIVANARKVRLIGESRQKDDRLDAQTLARLARIDPELLYPVKHRSAQAQADLMMIRARASLVRTRTGLVNAARGLAKSYGERLRGCNVRNLDPEKAENLSPELQQALEPLLAAIAEVSARIVEYNDRIEALAQTSYPQVELLKQIKGVGALIALTFLLTLEDPHRFRKSRDVGGYLGLQPGRRNSGQSEPQLHISKEGDPYLRTLLVQGAQHILGPFGIDCDLRRWGLKLAERGGRNGKKRAIVATARKLAVLLHHLWVSGEVYEPLHNSNRITVAAAA

SEQ ID NO: 151430 - protein, 343 aa, unidentified
MEQITTIGLDIAKNVFQVHGIDDEGGVVVRRQLRRRQVLPFFGRLSPCLVGLEACATSHHWARELGKLGHEVRMMPPRYVKPYVKRNKNDAADAEAICEAVQRPTMRFVPIKTPEQQSVLMLHRTRQLFVRQRTMLINAIRAHLSEFGIVAGVGRNGVEVLLELIAKGEDERVPAAARECLMALAAQLELAKRQIRGADRHILACHRSSQVSKRLQAIPGVGPLIATALVASIPDPTVFRSGRDMSAWIGLVPKQNSTGGKERLGNISKAGNRYLRQLLVVGALSVIRRAKQLGYTRHPWLVRLLERRSPKIAAVALANKIARIAWAMMSRNESYRTPLPTPA

SEQ ID NO: 151431 - protein, 419 aa, unidentified
MAANHFKASTLLVAIDISKYRHEVLIGIPGKKHRRRLTITNTLADFQRLVSTLASYDLPVRIGFEATGNYHRTLAHHLGQSGFDLKLVSSVSLARTREALHNSWDKNDPKDAQVILHMLEIGAVQFFHDPLVTGTADIQELSKTHEIVSRSKTELWHRILTHYLPLYFPEAERFYRSSRTDWFLAFLDRYPSPHMISAMSREAFIKDAWQVVGRKVGKEQMLSDIYATAVASVGLPVHPESDAVRMFRLVLAEGRSLIRQRNEIEARAVELLSDLPDYLLLTTIPGIGPINAMTILAEAGDLRRFQHHRQFLKFCGLDLATMQSGTFRGQSKISKYGNARLRRTLWMAGQTAVLKRTNSFRDKFERYISKDRHNAHLRRKAYTAISAKMARTVHALVKHGEPYRPFFEAGGPRRKDLSL

SEQ ID NO: 151432 - protein, 316 aa, unidentified
MMIVGIDVSKASFDAAWQGAGRDEHRQYAYTDEGIEALLEQTPEEAHYVMEATGIYHARLALKLHEAGRAVSVINPLIIKRFSQMQLSRVKSDKADAALIRRYGEQHELTTWSPSTREIQELQQAHGWLDDLIRERTRLVNRQEAHAHHTRPNAFVTKQMTAQSRQLDKQIKACEQHLEVLVKKSFRDLYERLLTIPSVGPKTAIELIIVTDAFSRFEAVKALCAYIGVSPTTFQSGTSVKGKGGIAKLGQGRMRQLLYLCSWTAKSCNPACRALYTRLKAAGKPQKVINIAIAHKLLRQAFAVATTNRPFSVEFA

SEQ ID NO: 151433 - protein, 416 aa, unidentified
MSNSTDSPAAFVGLDWADSKHDIYLRPADGSAASHEIIGAKAEDLQDWILRLRARFAGDGGKVFVCLEQSKGALIYQLREYDFFVLYPINPKTLSSFREAFRPSGAKGDESDADLLCELVQAHRARLRAWQPEAAETRALAAFCQKRRQAVQGSVRLGQQLRSELKTYYPYALELLELHSILACDFLRRWPTQTALPRAKTQTIRQFFYAHRCRRVDALEEILARRPQAVAVTTDAAIIEPAALQVQLLAAQWRAILTALPEFDRQIAQRFAAHPEAELFRSFPSAGPQLAPRLSAAFGTDRERLESAEQMSVISGVAPVRRASGKSCVIQKRWACAKFLRQTFHELAGCSLPQCAWAKAFYDEQRRRNKRHHTAVRALAFKWIRILFACWKQRTPYDDALYHQALQKHGSAFACA

SEQ ID NO: 151434 - protein, 317 aa, unidentified
MSTPLFVGLDVAKAHLDLAVQPTGEQWQAANTPDAFPALVTRLQALAPALIVLEATGGYEAALLSALAVAGLPVVAVNPRQVRDFAKALGILAKTDQIDAAVLAHFADRVRPPVRPLPDEATVELAALLTRRRQLLDMLTAERHRLAQARPTVRRNVQQHIRWLEQRVRDLDDDLTTRIHQSPVWRAKEDLLRSVPGVGPVLARTVLADLPELGRLSRRALAALVGVAPFNRDSGRLRGRRAIWGGRAKVRAALYMAALVATRRNPIIRAFYHRLLTAGKPKKLALTACMHKLLTILNAMIRTGQSWRISLAESTLD

SEQ ID NO: 151435 - protein, 339 aa, unidentified
MTMIGIDPHKATHTAVAVDDDEQVIGEFTVDASNNQVEHLCGWADRFTKREWAVESANGLGYLIGRQLVAAGETVFDVPPVLASRVRLMGSGRSQKNDPNDARSIAIAAFRSGRLATVCPDDHVVVLRLLVKRHRDMARLRNKHCSRLHALLLELVAGGIGGKINTRNASGLLNRISVTDEATRYRTLVAREVVDDIAQLDEKLKTSKKRIAIAVTASGTSLTNIVGVGPIGAATIIGYTKDITRFPTRGHYATYNATAPIEASSGGNKRHRLNPRGNRILNHAIHIAAVTQLRHDTNGRIYFDKKIAEGKTPKEAIRALKRRISDAVYRRLIADSNNQ

SEQ ID NO: 151436 - protein, 332 aa, unidentified
MSVYVGIDVHRKRSQVAVVDQGGQVLANRNVPNGVQPILGVIGGLPPGTPAAFEAAFGWGWLVELLEDYGFDPHLVHPLQCKAIASARLKNDKVDAATLALLLRADLLPEAWIAPPEVRQLRALLRHRAQLVRLRTLLRNRVHAVLADHGHGRPAGCWSGAGRQWLAALELPAISREVINDALALMDALQQPIDRLDAEVRQRAKADPRVTVLTQLPGVGMFTALVLLAEIGDITRFGSARKLASWAGLTPTVRGSDRTVHHGHISKQGPAWARWVLCEAAQTAKRHPDFAPGYQALARRRGKKIATTAVARKLLTRAYHLLTDASAAGEPR

SEQ ID NO: 151437 - protein, 338 aa, unidentified
MTILMGLDQHRAQITAEWVDTSTGEVSRARVAPADPAGVRRFLARFRGQQLEVALEATTGWRFVVEELQRIGAVVHLAEPADTAALRGHKKRAKNDRADARHVRELLMAGRLPESWIPPAHILDLRARVRLRHTLSEERGEWQQRIQSVLYHHGCPQRGDLINQAGLAWLAAQALPACAREQVTAALAMIDALERQLAPLDKELRRYARRQPGCKALMRHYGIGALTAVTILAELGDPTRFSSSREAVRFAGLDITVHASDQRRAPGHLSRQRPPALRWAPFEAAQCARRPNSPDHTYYQEAAKRLGGNRACLSIARKLLKRSYHTLRELGEEALQPA

SEQ ID NO: 151438 - protein, 371 aa, unidentified
MNHVTSIGLDVHARSVTAVALDSITGEVRSQKFGYSPAEIAGWILQLDSPKAVYESGVTGFHLVRELREMGVDCIVGAVSKMHKPASDRRKKNDRNDAEFLARQLMAHNIVEVFVPDVETEGARNLSRALEDVRDDLTRAKHRLTHLLIRWGYVWNEFNEDGKRRGSWTHAHWEWIRGIELPDAAARESLDYYISEVRHIESQKKAIEKRVAQCASGPRWRDRVEALRCMKGIETVTAFALTVEAGVFSRFDSARAFASWLGLVPSEHSSGERVSRGGITKAGNSHLRKLLVEASWHYTRATKERKRSLYDESVPASISNHAAVGVKRLVERRRHLSCELRKRPVVANVATARELACWIWALGRMSEGALA

SEQ ID NO: 151439 - protein, 336 aa, unidentified
MNIKRIGLDLAKLVFQLHGVDHHERVVLRKTLRRSQMLVFFAQLEPCLIGIEACGSSHYWARELTRLGHSVRIIPPQFVKPYLKGNKNDANDAEAICEAVSRPGMRYVAVKSEAQQSMQAEHRVRARLLRDRTALSNEIRGMLGEFGLALPVGLAALRRALPEILSQQEQWDNRFIRLLCELAEELQILDDRLARYDRRLKQLAQDDDRIRRLQEISGIGPVTASALVAAVGDARQFKNGREMAAWPGLVPRQHSSGGKNRLGHISKRGDSYLRTLLIHGARAVLNACGNKEDRRSRWLQSVAERRNRNVATVAMANKNARIAWAVLSREEEYRVM

SEQ ID NO: 151440 - protein, 363 aa, unidentified
MEQYNTELTVGMDLGNKKNEIYIMNSINGNPVETGSVLNDRVSIGNYFQRFIEPKKVRVVIEAGTHSPWIYHLLKDMGFEILVGNPRKLRMIWMSDNKNDQKDAEMLARIGRFDTRLLHPIQHRDMEAHKDLNIIKCRDALVSCRTNLVNTIRGLLKSQGIAVPSSSTDAFAKKIVSILPSELKPIFNGLIKTIEELTLKIKKFDKLITKVCEKKYPEATHLQQIKGVGPITSLTFILTLERHNRFKKSRDVGPFLGLVPKRDQSGNTDKQLSITKSGNSYLRSTLVSAAHYILGPFGEDCDLRRCGLQIAARGGKIAKRKAVVAVARKLAVLMHSLWKSGETYEPLRKSKNSRKNKQLNKAA

SEQ ID NO: 151441 - protein, 411 aa, unidentified
MKIVHKCCAGLDVHKKSVVACRIIRNEQGEEEKEIKTFGTFTSELLQMLDWLQAGGIKHVAMESTGVYWKPIYNLLEGAMEVVLVNARHIKFVPGRKTDVKDAQWIAELLQHGLLKASYIPSLEQRDLRDLVRYRSRLIQDRAREINRVQKVLEDANIKLASVVSDGMGVSSRNMLAQLIAGQDDPSQLADLAQKRLRQKIAELERALEGHVRRHHRLLLSLHLEHIDDLSATIDKLDEEIDRLLVPFDQIEALERLDAIPGVNKTTAQVIIAEFGLDMSRFPDAGHAASWAGLVPGRNESAGRNRGSRTSKGNKYLKSALVQAAHAAGRSKDNYLSALYRRLASRRGKQRAAVAVAHSILVVVYHMLRHGTVYQDLGGDYFDKQKQASIERRLIKRLESFGYKVALEPVA

SEQ ID NO: 151442 - protein, 408 aa, unidentified
MNTLYVGIDVSSKSNVVYLMLPNGDKHSNFSVANSHEGSTLLVKKIYSALTSHSLDTVLIGLEATSVYGDNLVYFLREDATLAPFNRKIHVLNPKQVKKFHDTYNDLPKNDYVDSFVIADCLRFGRINKEVYMGEYRYKALQNLTRARFFAVQNLVKEKQRFMNVLFKKYSTMTQEKVFSDAFSTTALAVYDEFESAEALANMDLHELTDFIIEKGKNRFPDPVAVAKAIQKAARSSYRLPKTINDSVNQVLSISITSMKALESQIKEFDKAIKALMELLPNVLISIPGIGPVYSAGIMAEIGDINRFDNQASLAKYAGLAWKQHQSGGFEAEVTRLIPSGNRFLKYYLCEAAFSLVRCDKEYSDFYHLKYKEVNRCQHKRALALTARKFVRLVFRLLKDNRLYCPAK

SEQ ID NO: 151443 - protein, 388 aa, unidentified
MSFAIDPGFRTETTIRPDHATVFVSLELSRSKWLITALLPCSDKMSKYCVDSGDGTALLDRLARLRARAEPRIGTAVHMVVIQEAGLDGFWIHRLLESNGMESHVVEPASIAVPRRHRRAKTDVIDGEMLVRTLMAFKRGERRVCSMVVAPSPVEEDRRRVSRERRTLIRERIEHANRIKGLLATQGIVGLEPMRKDFRDRVEGLQTGEGQPLRPHLKAEIIRELDRIDLVVRQVGVVEAERDALVKSDNIDTTAPAALLMKLRGIGPEFAAVLWLEGLFRNFANRRQLAAYAGLAPSPWKSGSIDREQGISKSGNPRLRTTMVELAWLWLRYQPGSALSAWFRERAGSERGRSRRIMIVALARKLLVALWRYTTLGELPKGAALKIA

SEQ ID NO: 151444 - protein, 354 aa, unidentified
MSQKLESAIAVIGIDIGKNSFHVVGHDERGAIVLRQKWSRGQVEARFANMPTCLIGMEACVGAHHLSRKLKALGHDARLMPAKYVRPYSKGQKNDFRDAEAIAEAVQRPTMKFVTTKTADQLDLQALHRVRERLVSQRTGIINQIRAFLLERGIAVRQGQRFLRAELPRILATPPDVLSPRMVRVIEDLAGDWRRLDERIEGLSSEIETVARQDAGCERLMSVPGIGPIISSAMVAAIGTGDAFTKGRDFAAWLGLVPKQMSTGDRTILGKISRRGNRYLRVLFVQAAWVVLIKPKIWERYGLKPWIEAAKKRLHHNVLAIALANKLARIAWSVLARGRAFEVRKMDEAANQPA

SEQ ID NO: 151445 - protein, 462 aa, unidentified
MKSKKLQKVKIPKNPTHFQHLHPNAAGIDVGSRSHFVAVPEGADKESVREFSCFTGDLHRLADWLIVCGIETVAMESTGVYWIPIFEILETRGLEVKLVNAHHVKNVPGRKTDVLDCQWIQRLHSYGLLEGAFRPPEQVCVLRAYTRQRMTLVRYAASHIQHMQKALNQMNLLLHNVVSDITGVTGMRIIKEILSGQRNPQILAGFRDPRCKNSEETIARSLEGNYRQEHLFSLKQSVELFEFYQDKILDCDHQIEEQIATFDAQTDGAAPLPKNGKAHKPGRNAPKFNVREDMHRMTGVDLTRIDGIDSYTVLKVISEIGTDMSRWKTEKHFTSWLGLCPGNKVSGGKILSGKTKPVTNRAADALRLAANGLHNSKSALGAYLRRMKARIGAPKAITATAHKLARMVYSMLKNGTQYVDAGQEYYEQRYQSRVLQNIKRRAQELGFDLVKVQTQGSDVVLA

SEQ ID NO: 151446 - protein, 351 aa, unidentified
MSDGIAAGQVVGIDLHLHRSVIAGLDEVGSQLGWVRIDNDPAVLVREVRNAGGRGCPVAIEATYGWYWAVDALLAAGFEVHLAHPLGMKALRKRKRVKTDPADAYELANLLRLGSLPEAYIAPPDLRELRELVRHRRQLVKLATAVKAGIRALLAKHNIRLSATQLESDTATGLLDALALRGTYAVRLASQRRLMLVLADEIAAVEVDLHARLRGHPGYRNLLTVKGIGPVLAATFVAEIGDVTRFPTAGALCCWAGLTPRHYESDKTVHRGHISKEGDPLVRWAAVEAVQRQCEPTVKAVKDEIVARRGKGARNIAKVAAARRMLEVVYYVLRDGQARCLTPGETGGAAA

SEQ ID NO: 151447 - protein, 313 aa, unidentified
MTYSTPIGVDLAKDKFDVYCLHSAECRTFDNTTKGIKNFITWAQAQNPDALVFEPTGAYHRAFEQACFKAELPLVKVNPRQARRFAEALGKLAKTDRIDAENLARMATCIDLQRLPQPAEEIPLLKELLAGRLALVKERVRLRNRLNTLTCQALVRQAEKRLAQIEKDLKEIDEMCHQTLAENKALKARLDHLQSIPGIGETLALSLLIDMPELGTLTNKEVSALAGLAPMTRQSGKWRGAAKIRGGRKTVRDALYMPAMVAMRFNIDLKAFYQRLIKAGKKPKVAITAVMRKLLILANAILRDQRNWNENIA

SEQ ID NO: 151448 - protein, 320 aa, unidentified
MSQSQDLFVGIDVSKATLDVALLPSRESWSVPNTEIGIVDLIARLNQVGAPALVLMEATGGLERQALARLAAAGLPAMAINPRNVRDFARSIGKLAKTDAIDASVLALFADRIRPAWRPLPDEQTQALEALIVRRRQVVDMIAAEKNRLAATPSRRVKKEIVSHIKWLERQLHITDYDIDQAVKNSPAWKEKAELLLSVPGVGRVTAITLLTQLPELGTLGRKQIAALVGVAPFNRDSGTLRGRRSVWGGRASVRGVLYMSTLAATRFNPTIRAFYERLRAAGKLPKVALVACMRKLLTILNAMLSRRTRWNHFTPGVSA

SEQ ID NO: 151449 - protein, 345 aa, unidentified
MQITTIGLDLAKNVFQVHGVDAEGRVVVRRKLRRAKVREFFAGLAPCLIGMEACGTAHFWARELIAMGHQVKIMPPSYVKAYVRRGKTDAADAAAICEAVMRPHMRFVPIKTEDQQAALMLHKARELLVRQQTMLTNAIRGHMAELGMVAPQGSAKIKDLIAVIQDSEDQSIPVLARAALQPLVHQMQTLDGQVEVLDREIMAWHKTNETSRRLATIPGVGVITASAIAATVPDPSFFSSGREFAAWLGLTPKQNSSGGKERLGRILKKGNTYIRRLLVTGATSMLRYARAKTAAAADWVNGLLQRRPARLVTVAMANKVARIAWAVMVKGENFRVPVRPVTEAA

SEQ ID NO: 151450 - protein, 327 aa, unidentified
MHRRRSVVVRMTAEGEKVSCVHLANDPVALSLEVAKAGPDPDVVIEACYGWYWLVDLLEAQGARVHLAHPSALGWEGRRVKNDEIDATDLADRLRMGRLPEAWIAPPAVRELRELVRYRAKLVALRSGLKAQVHAVMAKQGFLPTLDDMFGPGGQRALDEMPFDRVYAVRVESLRDLIEVYDNEVGKLEREIHAWLRDDKGYWAVQAINGVGKTMAAIFVAEIGDVSRFATPDKLCCWAGLTPRHRESDTKVSRGRITKMGSTLVRWAAVEAVARYRGGEPIRPSYERIAAKRGRKIARVAAARKLLTLVYYGLRDGEIRCLAEHAG

SEQ ID NO: 151451 - protein, 467 aa, unidentified
MENNYILYVGMDSSKGKADAAILKVSDRRSVKPKFLRKKLSFKFVKSEVTSFLETVRSYSDDNCTSICFALEVTGIYSTNVYNFIKDSLNDDESIKFLNTDFVNQWRNAHNIAKSDPLDAQTISTIIGTDSDVQYVNDNVFENKNGYQDLKALVHRHYQIKKIYSQEINRLIAQCDCLFPELQYVFEPKSAAFIAVLSSYPTTHDIINASRLEVFNVVYEATKHRCSMDKIDKLFDLCHDTLVPDNISSYGRSIILDLVENIKNIKGQLKMIERYIRDVASLNPAYKLLLTITGCGPLTAATVIAETGDIKRFKNADCFVSYSGTSPRNKRSGTSVETMGKISKRGSRYLRHAIYMIAEFARRHNPVLKHQFERIKNGNKKRHKLANIAIANKIARYIYSIMKNESSFVIFHEHIMKLPEETQNTFFNSISLDFPENTRKQIYQYSDINGEVHRFVYTKSEETMSIY

SEQ ID NO: 151452 - protein, 355 aa, unidentified
MESLKYVGLDVHRDTISIAVLDDAGKLLMQSILATHATTILDFVGGLSGRVHVTFEEGTHSAWLHDLLARRVARVVVCDPRQNALLKAGNKSDKIDARKLAELLRAELLSPVYHGQNSAVTLKHLSRSYAALTEDTTRVKSRIKALYRSQAISSKGKKAYGRRYRGEWLAQLTQAGMHRRAELLYEELDALLLLRREARRELILESHKHSGVKLLCTVPFLGPIRAAVLIARVQTPHRFRTKRQFWAYCGLALETRTSADYRFEQGQLVRAKKPVFIRGLNENHNHDLKNLFKSAATSAGAMPGPFHDFYENLLTKGMQPAMARLTLARKIAAIALCVWKKGEPFNAEYLKPQAA

SEQ ID NO: 151453 - protein, 351 aa, unidentified
MAMRKREDSPEVFPNAAGIDIGGSSHWVAVPKAASDEPVREFGTMTDDLNAMADWLLACSVDTVALESTGVYWIPVYEVLEQRGLTVWLVDARQMKYVPGRKSDVMDCQWLQKLMSLGLLRAAWRPDGEVCVVRAVVRQRELLLTEQASWVLRMQKALVQMNLQLTEVLTDVMGATGQAIIRAIVAGERAPKVLAQHRHGRVKASAAEIERALTGNWRDEHLFVLGQALTMFDSLAQRILECDAKIEALLAPLSRHEVELGGPGKQRSKNAPQFDARAALARWAGVDLTRINGLSVATVMTILSEIGTDLSRFANVKQFCSWLGLCPGTGSAAGRSSALAPVARPTECAKP

SEQ ID NO: 151454 - protein, 355 aa, unidentified
MNQEKYIGMDVHQATISVAVMDGKGKLIMECILETKADTILEFLHGLRGTVSVTLEEGTSAAWLHDLLKPHVAHLVVCDPRKNALLKDGSKSDRIDARKLAELLRGNQLHSVYHEEHGVRTLKELGRSYQTLTKDITRVMSRIKALYHSWAIPCSGTTVYAPRHRAEWLAKIPQPGVRLRAERLYQQLDLLQPVRQEARRDLLRESRKHDAVKRLRQIPSIGPIRAALLVALLQTPHRFRTKRQLWAYSGFAIETHDSGEYRYVRGKVQRNRERITVRGLNDNHNHDLKNLFKGAALSASTQPGPLHDFYTALVEKGMRPTMARLTLARKIAAITLTIWKKGVSFDAKQLHRQAA

SEQ ID NO: 151455 - protein, 414 aa, unidentified
MLKIVYRVCCGMDVHKSFVVACIASTNEYGVTTYKSKRFSTFTGDLHRCADWLSENNCKDVCMESTGKYWIPIYNILEATCNIVLAHPKYVKAIRGKKTDKRDAKWIADIFKHDLVAGSFIPPADIRQLRDLVRYRWKLTNFTTGEKNRAQNCLTVSNFKLDDVFSDVFGKAASAITDRILENPTEKITDVSRFRTKGMKATNEQVLAAVDGEMCVEQAEKLRIIRSHMSSLELCKLNLESLILSTAEKYLPQLNLVMTAPGIQSFAAIGIISEIGVDMSVFLTSKHLCSWAGLTPQNNESAGKKKTTRISRAGAYIKPLLVQCALNAVRAKQFPEVRNRYIALKKRRGHKKAIIAIARMLLTAIYNMLKKNEPYNAELYRKSDRPPAHREVSVEEAVFILQRQGYLVTAPVVT

SEQ ID NO: 151456 - protein, 413 aa, unidentified
MRRVIGIDVHRTFGEVVIWEDGILRHAGRVDMTRTAVEGLGKSLRPTDEVVIEATANSMAVSRVLTPFVARVIIANPLQVKAIAQAHVKTDRIDAGTLASLQAAGYLPQIWTPDAVTERKRRLAARRYQVVRHRTRIKNEVHSILHAHLIPKCPHADLFSTRGRSWLARQPLPDDERAAVDRHVRELDRLAEDLTVLDREIAQAAIEDPAVKRLITITGVNLTVATGIVAAIGDISRFNSPQKLVSYFGLNPRVRQSGLGAAHYGRISKVGRSHARAMLVEAAWAAAKAPGPLHAFFVRIRARRGHQIAAVAVARKLTVLCWHLLTKGEDYLWARPALVANKTRAMELQAGHPQQKGSRRGPAYAYNVKALRDQEMLVATQAERGYERFVAQWEPRRPKDAAHGRASNRQGRK

SEQ ID NO: 151457 - protein, 421 aa, unidentified
MDKERRWFVGIDWGSQEHVVSLCDDTGKKIGQRKFAHGATGLTDMIIWLLKASGGKPGEIHVAIETPHGPIVEALLERGFNVYSINPKQLDRFRDRFTVAGAKDDSRDADVLADSLRTDMRAFRKLSIAEPIIVELREWSRIDEELKVEHVRLANRLQHQLWRYYPQMLELADDVGANWFLDLFEAVPTPEKAANVREKTIARILKDHRIRRFGAAHVLSELRKPALPVAPGTIEAATARIRGLIDRIRLINGQLADAGRQLDRLCKMLSEPVAEQDGETAPGQKNEQRDAAILDSLPGVARTVLAALLAEATDTLRRRDYHALRALCGSAPVTRRSGKSCIVVRRYACNQRLRNATYHWAQNAIQHDATSRAKYDALRAKGHGHARALRSVIDRLLSVACAMLNSGTLFNPEFASKQTTG

SEQ ID NO: 151458 - protein, 408 aa, unidentified
MYNAVGIDASKLKSTITIIQPAGVVIRKPFDVLHTSDELNTLVTYLKSLVGETRAVIECTGRYHEPVVKSLSEAGIFISAVNPKLIKGQKQNTLRKVKSDPADARKIAKYALDNWAELREYSSMDTTREQLKTLNSQFTFFMKQKVAAKTNLISLLDNTYPGVNKLFDSPTRDDGSEKWVDYAYSFWHVDCVRKIGLKAFTERYEAFCKKHHYNYQKNKPALLFEESKQLVAVFPKEKSYKLLIQQSIQQLRLASEHIEIIRKEMNELASTLPEYETVMSMYGVGETYGPQLIAEIGDVSRFTHREAITAFAGVDPGVNESGQFKQRSNRASKNGSTRLRKTLFQVMSTYLQNKPVNEPVYQFLDRKRAEGKPYLVYMTAGANKFLRIYYGKVKECLRNLEQSQIEES

SEQ ID NO: 151459 - protein, 350 aa, unidentified
MAGPMVAPIDRIVVGVDTHRDVHVAVALSRLGTCLGTISVPSTPVGFADLLHWASALGPILSFGIEGTGSFGAGLARWLTAQGHAVLEVDRPDRRARHRDGRSDPIDAETAARSVLSGRATGIPKSGDGTVEMVRVLRVARRSAMKARTQAANQLLALVLTAPPELREALRGRGVPRLVEVASRFRPGPLIDPASAVKQALRHLARRHAALSKEIGELDRDLATLVVEAAPGLLAINGVGVEVAGALLVAAGDNPERLRGEASFARLCGVAPLPASSGLTTRHRLNRGGDRSANNALWRIVIVRMGRDPVTQRYVTRRTEEGLSKGEIIRCLKRYVAREVFTALKGVDGL

SEQ ID NO: 151460 - protein, 482 aa, unidentified
MKPSQQNKPQKASCRPEQGSWQQMNRKQRREMTRKMHAEDLSLEVVHPHAAGIDIGNEAHYVAVPPDRDNKSVRRFGCTTAELKEMAAWLKQCGIRTVAMQSTGVYWIAVYDILEAAGLEVYLVNARETKNLPGHKSDVQESQWLMKLHTYGLLRNSFRPPQEVRTMRTYWRQRNDLIRSAARHIQRMQKALTQMNIQLANVLSEVSGVTGQAIIQAILAGERDPRKLAAFRDKRVKAREEEIARSLEGNWQEDLLFMLKQEQEGYEFCQKQMSECDERLQQYLRQREDRSKGAKLPEENRKERLRKNKTNKPRFDLRTELFRMTGTDLTQIDGIDVRTAATVISEAGWDMSKWRTEDHFVSWLRLCPDNRVSGDKVIGKRRLPINNRLSVAFKIAASTLRQSNTYLGAQFRRLKTRLGPPIAIKAMAAKLARLVYRMMRYGMRFVDRGAEFYEAQHRRRQINSLKRKAANFGLKIIDAPAA

SEQ ID NO: 151461 - protein, 355 aa, unidentified
MTSTKYIGMDVHKESISIAVLNFAGKVVMECVIETKASTILQFIHGLRGDLHVTFEEGTWAGWLYDLLKPHVTELVVCNPRKITLLKDGSKSDRIDAHKLAELLYMNKIKPVYHGEHGLRMLKELSRSYLTISKDLGRVMNRVKALYRGWAIPCAGTQVYAPHYRSEWLSKIREAGVRRRAELYYQQLDALRLVRQQARKELLAEARKHRATKLLRQIPGIGPLRAAHLVALMQTPHRFRTKRQLWTYSGLGLETHDSAQYRVVEGQLQRSKKPVTLRGLNDNHNHDLKDIFKGAAMRASAAAGPLHDFYEALLAKGRKPTMARLTLARKIAAITLIVWKKEVRFDANYLKQQAA

SEQ ID NO: 151462 - protein, 334 aa, unidentified
MCNRVWVGVDLAKASFHAALAPVDTRPDQWARLPHAAFDHTAQGVRALCAWVARQGYAREDIAGVCVEATGSLAWRFVELLEDRLGPVSIVNPAYPHQFAKSVGLRDKTDRTDACVLSLYGGAMRPAPRPLPDERARKLRELADLYADTRRDLTATDNKLGERIVSDFVRKRLKARSRRLTKELEAIEKEMDAITAEDPQAAQDAKRMQTIPGVGPKTARLLLAYLGNLRDYTRAELTARAGLYPRKHQSGSSVNRKPRLAKGGGGAVRAALYMAALNARRFCPHLKAFADRLKLQGLAPMAILGAVMRKLLLLIRRLVISSTHYQPQFTAQTP

SEQ ID NO: 151463 - protein, 341 aa, unidentified
MKLFIGLDVALAKTAICVVSEHGKIVREAEIASEPEPLLAWLQALGGDIAALGLEAGPLSQWLHRGLTDAGLDAVLMETRQVKGALKAMPIKTDRRDAEGIARLLHLGWFRPVHCKSVSAQEVRVILSARKAIQQNMLALEMSLRGLLRNFGLKVGAISRGRFEHRIRELADGNAMLKLTTAPMLRARASLRQELASLERLVRQMAQDDSVCVRLMTMPGIGAIVALTYRSAVDYPARFTSSKNVGPWVGLPLSRNQSGERDVSGGITKAGDVTLRRALCQAATVMMNRGRATWLRTWSAQIAKRRGRKRAMVALARRISVILHRMWVEGKTFRMEAEPIT

SEQ ID NO: 151464 - protein, 367 aa, unidentified
MSKNNTCWVGMDVHADTINVVVYQGDETSPKEEYESQTDARSLGRLLKRLQGLPGEVRCVYEAGPCGYVLQRYLSANRILCEVAAPALIPKKAGDRVKTNRRDARKLGRLYRAGELTMIYIPKEEDESVRDLIRARETAVKEARRVRHYLGKFLLRHGHRYRDGKQWTLKHRAWMKGIRFELSSSRIVFEEYLLALEQAEERVKRLTREIEEIAKEPEREKLVSALMVMRGVQVITAMTILFEMGDLRRFIKAKDFMAALGLVPSEYSSGGKTSRGSITKTGNTHVRRVLVESAWHYRHRPTVGKTIKARRVGKPPELLSIAQKADVRLNRKFRRMTDRGKRSTVAAVATARELAGFVWAIGQQEHP

SEQ ID NO: 151465 - protein, 422 aa, unidentified
MAGSSTGFTCENGKAARVTATDVVWVGIDAGKASHHAAAVDAGGKRLWSVKVANDQRQIEELITRAAGSGAEVRWAVDLVSPAAALLLAILLSAGQKVVYVPGRVVHGMSGVFRGEGKTDAKDARIIADTARMRGDLAELTATDELVVELTRLTSYRADVMADWVRGINRLRDLLTSIFPALEASFDYSTRSALILLTGYCTPAGIRQAGPGGVAAYLREHGAWAKGIDAMAAQAVRAAQQQTVALPGEATTAMLVQKLARQLLGTDREIKDTDKLIASRFRGHPQARIIESLPGMGPILGAQFLVATGGRPLEAFASAGRLASYAGLVPVPKDSGRVTGNYHRPKRFNRVLRQVFYMMALSSIRPEGPSKTFYQRKRDENKLHTQALLALARRMVDVLWALLRDNRTWTPIPPSQIIAAAA

SEQ ID NO: 151466 - protein, 351 aa, unidentified
MESITIGMDLGDKKNVVCVLDNLGRNIESSSLDNNSEALSFFFQRYKGAKIAIEAGTHSPWISRLLSSIGCTVLVGNPRKLRAIWESDNKTDIRDAEMLARIARFDPHLLYPIRHKGEHVQKDMTLLHSREVLVKNRSSLINHVRGSVKSFGARLPSCSTESFHKRVATHIPEGLQSTIHQLLGIIELLSSQIKEFDKQIEQISAEQYPETELLRAVKGVGPLTSLAFVLTLEDPTRFTKSRQVGSFIGLTPRRDQSGEIDKQLRITKAGSPFLRKLLVNASQYILGPFGEDCNLRKFGLRLAARGGKNAKRRAVVAVARKLSVLLHRLWLHGEIYDPLYSRNAQRLAKAA

SEQ ID NO: 151467 - protein, 353 aa, unidentified
MIVIGIDPHKSTHTATALDSATNTDLGSIRIDASVIEYKRLIVWAKAWPDRRWAIENTDGLGHHLALWLLALGEVVHDIPTTATARVRELSRGGRRKNDRIDAAAAASVAALHGDARQVYPETVNDALALLDERRVNLSSSRTRTVNQLHALLRELMAGGAPTSLTPKKAAATIRRFRARTAPDEIRLELAKELITDFARFDEQLASNSRKITRLLDAHGTRLRKIDGVGPVLAARILGRSGRASRFPTAAAYASYTGTAPVQIASADASHHRLSRFGDRQLNSAIHTIAMIQIRMPSSAGRAFYDKKIAEGKSPRSAARALKRHLATHLWRVMLADEKRSIRAVSRESLTAA

SEQ ID NO: 151468 - protein, 351 aa, unidentified
MLIIGCDFHPGFQQVAIFDNRTGEIQERRLPHREEAEQFYRSLSGAVRVGMEACGHYPWFERLLEELGFELWLGDAAEVRAAVVRKQKTDRRDAQHLLHLLLENRFPKIWVPSLEVRDVRQLLVHRHKQVQARTRTKNQLQALALSQGVQKKWKLWTKLGRAELEQLPLLPYAAERRKRLLEALDGLEAELVELNRRVDEEVRKRPEALRLRTHPGVGPVTALAMVLTLGPAERFASGKDVGSYFGLIPREDSSGGKQRLGKISKQGSSFLRFLLVEAGQTAARYDPHLKRFYRRLAMRKNRGVAKVAVARKLATRLYLMLREQWTYPQLCQAVMQVSPSHSVVEQQKPTA

SEQ ID NO: 151469 - protein, 413 aa, unidentified
MEHKTITAVGIDVSKGKSTVAVRRPGGEVVLTPFQVEHDAAGLSGLVRTLQNLDGDIRIVMEHTGMYWRPIALALKEAGFFVSVVNAILIHDFSDNSLRKVKTDKADSMKIANYALSFWAELRDYSPEDETRQMLKMQNRLYLRTKKSSVVLRNGLISLLDQTFPGVNTLFDSQPKRSNGHFKWVDFVKRFWHKDCVADVSLAAFSDAYRKWCTRSGYRFSQSDAERLHAAARNSVATFPKNDSTKLLITQAVDSLNAVYDALYILRGEMLRLASLLPEFDVVMEMQGAGEVTGPQLMAEIGDVRRFTHKGALVAFAGMDAPPFQSGTFDSKSRRISKRGSPHLRKTLFVVASTILQHSDPDNPIFQFMDKKRAEGKHFYVYTVAGAAKFLRIYYARVKAHLMALDAGTSTAA

SEQ ID NO: 151470 - protein, 335 aa, unidentified
MEFTYFIGTDVSKNELDLAVMQGKTLLFHREIGNSQEAIQAFVKELLGLPGFELGKAVFCMEHTGIYNNPLLAYLHKKKANVCLEAATQIRNSMGNVRGKNDKVDAIRIAEYAYRNREGLRLWQPKREAVQRLAHLSATRTRLLTAQKLLRTPLKESIGFVGKKIASQNMQVCSRTLNSIEADLKKAEDAIDGIVANDPELSRLFGLITSVTGIGTVTATQIVISTNEFRDINEPKKFACYSGVAPFARESGLLKGKAHVSHMANKSVKTLLHMASLVAITYNDDLKRYYERKTIEEKKNKMSVINAVRNKLILRIFACVNQNRKYDKTYTNTLA

SEQ ID NO: 151471 - protein, 340 aa, unidentified
MEEVSIIGVDLAKKVFHVHGAAPDGSVVFRKKLSRLQFAKFVEDHPRCVVAMEACGSAHHWGRLIAGFGHEVRLVPPVYAKQYVKRHKNDTTDAEAIAEAASRPTMRFVEVKSQTQQSQAMAYRSRDMLVRQRTQLINALRGHLTEFGVVAPQGIMQLKKLAAAIDAPETELPELVRQLGRDYIDMIGDLTDRITVLDRTLQRVTAADEKTAYMRTVPGVGPITSAAIEAFAPSLESFRRGRDFAAWLGLVPKQHSTGGKERLGRVSKMGQRDIRRLLISGAMAVIRWELRKGDDANPWLARLLARKSRLVAAVALANKMARMIWATVTKKQGYQIPAAA

SEQ ID NO: 151472 - protein, 387 aa, unidentified
MKLFVGIDVSSEKLDVCFLTDDDQLSTLSEISVSNDIEGASLTREMILEFNENYLFDQIIIGMESTSMYSFHPSMFFHEDEELKKLNTLVTIENPFRIKQFRRMFDEDKTDRNDALRIADFLRIQRFTTSPIKEEKYMALQRLTRTRYQLIKQLTRTKQHFLENLTYKCNTLVREMKDESTSLFSATVISLMTEDFTLDELAELPLEAFSDLIQEKGRGRFKQPEKIAKAIQRAIRSSYRLGTVAQESIDIVLGVLVCEMRALEKNIKELDKAIEQLVIVIPEYQCLTSIPGIGKVYAAGLIAEIGQIERFEDQTKLAKYAGLSWKVKQSGNYQSQNTPLTKQGNRYFRYYLVEAANSVKIIFLNIKLFIKASIKRYLNTNTNEHSS

SEQ ID NO: 151473 - protein, 338 aa, unidentified
MKKFSGIDLHSDNSLVVVSDEEDRIVYQRRLPNDLAGIVQALAPHREELIGVVVESTFNGYWLVDGLMEAGYRVHLANTAAIKKYEGLKYSGDAADAAYLAQLLRLGLLPEGYIYPREARAARDLGRKRLQLARCRTAQILAIENILARQTGGRMRSNEIKRLTAEGVEALGFSADVTLALQANLAVMHVLQSQITVLEARLRERVSLHENYALLTTVPGIGQTLATTIMLETGSIARFAKVGHFSSYCRCVDSLRESNGKKKGEGNAKNGNPYLAWAFVEAAHFALRYCPQAKRFYERKKRQRNAIVATKALAHKLARACYHMLREHKAFEVQRCFA

SEQ ID NO: 151474 - protein, 310 aa, unidentified
MDDTIGVDISKPTLDAFRLRTREHRQFPNDRAGCAALIRWIGASTVRVIFEPTGAYHRLFEASLVAAGIEAVKVNPRSSRRFAEATGELAKTDRIDAAILARMGAVLDLEGRPAKSETLHDLRELGVARQALVKDRIAATNREQIAVNPMIKRQLRARLKQIGIQLKEIDAAIAALVDTDPGLSRRRDVLASIPGIGTVTAMAILIEMPELGTLDNKQAASLAGLAPMTRQSGTWSGRARIRGGRRSLRTALYMPALVALRFNPDLKQKYQALKDAGKPSKVAITAIMRKLLVLANALLRDDRKWNAKTA

SEQ ID NO: 151475 - protein, 399 aa, unidentified
MYKPNYGGDTMYLIGIDISKYKHDCFIATETGEIIKDTFSFTNNQQGFSEFLDVLQNLDPNQTKRIGLEATGHYGRNLKVFLDKQGYTYMEFNPFLVKKFATGLTLRKTKTDKVDSKLLSMILLSVEYKVYPVKSYHMEDIKSLTRYYKTLTKKRSKEIVNLTNILDYIFPEFKPFFHNKFSKTALFILENYQTPEKISNMNSKSHEKLNSISRGKFSYARFIRLKILAKETIGSSSLVLNSQLQSSMRVYRVLDQEINTTFDQLLELSKNIDSPVFSIRGIGPISALSIISEYNNFISFNSPAKMLSYAGLEPSVIQSGTMEKTGKMVKRGSGYLRETIMNSAPFFYMYNPKVYDYYHKKRNEGKSHRVALTHVAKKLIRIMFHLVKNNEPFDDDKLK

SEQ ID NO: 151476 - protein, 371 aa, unidentified
MSKEKTKSISLKQQVQPLKYSIGNDISKEKFDACISVIDSEQRVKVIASRTFDNLPWGFKEYYEWASNKCKMPIPVVFIMEATGIYYESLAFFLHKKGCYLSVVLPNKSKKYMQSIGFKSKNDKIDAKGLSRMAAEQCLEKWEAPDETVMNLRSITRQRESLQEFKTQINNQLLAYQCGEFKNPTIINQMESTISLLNQQIKETEVLVNDEINKDEELKIKVENITQIKGVGNITVATVLAETNCFKYFKNSRQLVSYSGYDVIENQSGKHVGKTKISKKGNSHIRRIMHMPAFSVVSNNEPIFKALYERVFKRTNMKMKGYVAVQRKLLELIYTLWKNETKYDRNYLNKTSGNDEHKLLFPLGFEKTVIV

SEQ ID NO: 151477 - protein, 352 aa, unidentified
MERYRDCSAIAEAIWVGIDLHRVRWHVTVRLEAVELFSGSIPGCWESLRPLLERHPSKRVYVVYEAGYFGFWLYDVLTHWGAICTVTPPSLLPQEAGNRVKTDRRDSRKLAFLLMKGLLKGVWVPSPEQRIHRDVLRRRQKLVQDRVRVQSRIKAQLQLYGIHVEAPSGLWSQRYFRTLSSLRWTDQWQHQSFQRLLEQYSFLCQQIKEQTHLVHQLAASPMYAQNLKLLRSLQGVGILSGLEFLVELPPMTQFCRSQQLAAYVGLTPAQYSSGEHVRMGRITGAGRNHLRATLIELAWRVVAKDPGMWSVYERIKHRAGTKRAIVAVARRLLLCMRRMILDQQPYVMHQAA

SEQ ID NO: 151478 - protein, 343 aa, unidentified
MQIHSVGIDLGKTTFHLVALGVAGQVLVRKKFNRKQLLAFTANMSASLIGMEACTGAHFLGRALRKQGHDVRLIAAQFVKPFVKSNKNDFIDAEAIAEAVERKNMRFVPIKTDDQLDLQGIHRVRDRLISRRTAVINQLRAFLLERGMVFAQRPAKLKAAMADVLENAEADLTPQMRNLIDMLWDEWKLVEQQIEKLNLELERISAADAGCTRIRQIPGIGPVVATAIVAAIGNGAAFRKGRDFAAWLGIVPRQHSTGGKAKLLGISKRGNVYLRKILIHGARAAVLRIKRDRAPIGAWLDALDARAPKNVVVVAMANKLARIAWAVLSSGKDYRPLANTSTA

SEQ ID NO: 151479 - protein, 400 aa, unidentified
MNAVGIDISKGKSMIAILRPCGEIVANPFEIRHTSTEITDLVEHIQTLEGDTKIVMEHTGRYYEPMARCLTKAGLHVSAVNPKLIKDFGTNSLRKVKTDKADSVKIARYALDNWSDLRQYSIMDELRNQLKTMNRQFDFYTKQKTALKNNLISILDQTYPDANTFFDSPARSDGNQKWIDFASTYWHVDCVRKMSLSAFTEHYRKWCKRKGYNFQPNKPKEIYSVSKDLITILPKDTMTKMLVMQAVGQSNLVSKTVEELRSQMNQVAAQLPEYPVVMAMKGVGTSLGPQLIAEIGDVTRFTHRGALTAFAGVDPGANQSGTYEQHSVRTSKRGSAQLRKTLFLVMDVLIKTSPVDDPVYAFMSKKRSEGKPYYVYMTAGSNKFLRIYYGRVKEYLASLS

SEQ ID NO: 151480 - protein, 359 aa, unidentified
MINVGVDVHKRICQACLKDERGSIIEEFRFPNNQEGATRLAAIIKKHGDAKVALESTGNLWVKLYDRLDEEEGIDVILTNPKKTRMIAEAKIKTDRMDARVLADLVRADLVARSYVPPKEIRMQRALLRERISLVESRTMIKNRIHALLDKYEIQPTYTDIFGKRGREWLRSLKLPSIDQTILEVNLQRLEELEAHIDAFTSKIAQEAYDKPEVKLLMGFTGIDYYSAMLLASEIGDVKRFPSAKKLVRYAGLAPGTRQSAEKTIHGHIVKEGNKRIRWILVEAAQHASRHDPRLRGFYLRVMKRRGYQRAIVAVARKMLVSMYHVLSKNEAYYGERTELLERKLKRLEWKATHSPQAI

SEQ ID NO: 151481 - protein, 350 aa, unidentified
MMIIGCDFHTRYQQIAMLDEATGELSERRLDHASGAAHKFYRDLQGPVRVGIEATGPIRWFERLLTELGHELWIGDAAQIRASEVRKQKTDERDALLLLDLLLAKRFPKIWVPTPAERDLRQLLWHRHKLVCLRTMLGNQLHALAMSEGLCRKKKLFTQKGRVELLQVGLAPWASRRREELLKLFDQINPPIAELDRAVMEEAQRREDAVLLMTHPGIGPVTSLAFVLAIGPISRFASSRKIVSYLGLNPSEESSGGRRRLGAISKQGNSMVRWLLVEAVYPAVRQDAALRQDYQRLKFRRGHAVAKVAIARKLAVRMYWMLRSGADYAQLVRRQSSPGGTLVDASSSQA

SEQ ID NO: 151482 - protein, 313 aa, unidentified
MNATLVVGIDVSKQYLDVALGSDDPRPFRVPNSPDGIKRLLQRLREREVALIVLEATGGWERPVLRALLEAQHPAARVAPGRVRYFARSIGLLAKTDRLDARVLALYGERTSPSPTVLPSAERQRLEALVSRRAQLIDMRTAERNRLGVTENEQIRQSIADHLDWLGEQIRQVEKDIEAVIAEVEELQAQREILESVPGVGIVTVSVLLAKMPELGKVNRKQIAALAGLAPFNRDSGHKRGKRYIQGGRSDVRSVLYMAALSAIRFNPILRAFYKRLEEKGKPFKVAIVAVMRKLLTILNAMVASRQLWRATV

SEQ ID NO: 151483 - protein, 390 aa, unidentified
MFYLGIDIGKFHHAAALLTHEGKVVATLSSFPNTQDGFQELLTLITCHLPAGEELRIGMEATGPYWIPLAEWLKTKGCPPVVLNPIKTSSLRNYGVRGSKTDNIDSVLIANALRFEGSQPQKVSPKHSEELRHLTRLRADMVKDRTRLVLRVTSQLDRLFPELLCSFSKTISPSCLALLTEAPTPDRVLALGEEKLTALLRKASGGKLGVARAKEILGKAASSIGVSSPALEEVLVLLMEQINLIDRQLKALDRRIADLYDQAGLFFTTIGGVGALTAATILGEFGSVDRFTKATQMVAFAGVDPKLRNSGQHQGQVHISKRGSPYLRRALYLACQGAVRNDGYFKSIFQRHRDNGKSYKEAIVAVMNRFIHVLYAIWRDNRPYSPLTPA

SEQ ID NO: 151484 - protein, 355 aa, unidentified
MDDAKYIGVDVHQATISAAVRDSSENLVMEATLETKAETILEFVHGLRGSLRVSFEEGTCASWLHDLLKPHVTEVLVCDARKNALLRVGNKNDREDARKLSELLFLNKLHAVYHGETGIRTLKELARSYLTITRDLTRVMNRLKAIYRGWGIACAGQQVYAPRYRGEWLAKITEAGVRRRAEIYYQQFDALAALRQEARRELLAESRKHPAMRLLRQIPSIGPIRAALLIALMQTPHRFRTKRQLWAYCGLALRTYDSGEYRFVSGQLKRSKKAVTIRGLNKNHNHDLKNIFKGAATRAAATAGPFQKFYEARIASGLKPPMARLTLARKIAAITLLVWKKGVRFDAEQLKQQAA

SEQ ID NO: 151485 - protein, 359 aa, unidentified
MSKITTIGLDLAKKVFHVHGVDVAGNVVVARRLKRKEVLAFFAKLPPCLVGVEACGSAHHWGREIAKLGHTVRLMPPRYVKPYVKRGKTDPIDAAAICEAVTRPTMSFVPIKGVEQQGLSMLHSARSLLIGQRTQLINAARGHLSELGIVAARGLLGFAELAAIVRDERDRRLPATARAALMVLVRQIEAISAEIASLDSILMKENKASELGSRLDTIPSVGPVIASAFRARVTDAKLFENGRHLSAWIGLVPENDSTGGKLKQKGLSKKGDRYLRSLLVNGAMAVVRQAQKRPDKHPWVTKLLGRMSAKQAAIAIANKTARIAWALMVHGGVYETGHRAPPYRAQACAAARIRGWAMG

SEQ ID NO: 151486 - protein, 339 aa, unidentified
MSKLLKNFVGIDISKTYFDAAVVKADHPSKNMHKQFEQTPDGFKEMVTWLKEQDVLLNDETLFCMEYTGLYNGRLVNFLVKQKAQVWVEMALHIKRSSGFERGSNDKISAMKIAAYAFRYQDKMRLWRPVDSSIEKIKNLIAQRDRIVKAITQLTVPIQELSECGCDSEAKELEKLQINSLNALEKTKKAIEQLIEKTIQQDAEVTKKVQQVKSIKGIGQVTAVVLLVYTRGYISFSTAKQLACYCGVVPFEKTSGTSVRSKSTVSSHANKKLKKLLHMCALSAIQWDKEMKAYYERKIAEGKNKMCVINAVRNKLIHRAFAVIRDDRFYEENYVRKCA

SEQ ID NO: 151487 - protein, 423 aa, unidentified
MNKQMEKIDYAAWIGIDWATDRHAICLQAADSNRIEHCVLEQKPEALNAWFMELQLRFGGRKLAVAIEQSKGAVINFLLGLSFVDIFRVHPKSLKNYREALHPSGAKDDPTDAELILQFARLHQDKIRPWVPEGVDSRLLLRLVEGRRKTVNKRVRLTNEITQLLKEYFPQALDWAGQLSSVMACDFLMKWPTLQKLQKSKPGAVRQFYRAHGCRSRERIDSRIADMRRAYPLTTDPAIIQSSVLMLKALVPQLRAAIEAIAAFDQSIEQVYRNQPDAEIFDSFPGAGAALAPRLQAAMGADRDRFHNAQQVAEYSGIAPVTERSGKTKSVHRRLACSRFVKQSFHEFAGQSILRCAWARAFYESKRAAGMHHHAALRALACKWIRIIFRCWKDHVPYDERIYMTALRRRQPPWLTFLPAAAK

SEQ ID NO: 151488 - protein, 376 aa, unidentified
MTKKHTQTTLDVSIEYSAIGLDLAKYDVSLAAVTLNEGEIICIDRVTYAELYELADKLSPTLFAVEPCCGYSQLAHELEARGHEVSVINGKVVKMWIDTHMSGQKTDINDALALARLTADPDLRPIRAKSLEECRIMTVQGVRQQLIGQRTKTLVSFKGFAQTWGIHMPAGRRNLKKMREAVEAKADMMGDAAVSALTTMLDRVKTLDDQIHQLDKDLEALVSANANGRLLKSVMGVGTQIAARFITVVGDVKRFETSRSLVAYIGCVPKNYITGHVNKPRQKKSSAPDLSSKGQGRISRRGDKLLRSLLMQGAACIYMQYCKRQLPDCQLTKWIDKQLAVRKPYGKKFDIHRAGVPRSVLAAMAVQPSNEAAAAA

SEQ ID NO: 151489 - protein, 491 aa, unidentified
MRFGSKTNPQKPSVTRLYYKAFAESKSCRHARRRTTERKFSNVSTLCSAEEKPSYAARIGLDWANQKHFWTMLTADGKRTRGELEHTPEAIEIWAVELARSFAGRPIALALELKRGALIAILSKYAHVHLFPIHPTKLGHYRKSVCASGAKSDSRDADLILDYLVKHPEWLRCLIPDTVETRSLQFLVEERRKLVDQHTSQLQILIYWLKQIFPQMLEWFDDMSTPLVGDLLKRWPQLPALQKVSQKTLRKFFAQHNCRSEERIQQRLDEIGQAVPATTDAALLKTGDLCIQIALQLLEALRAGTAEFDRQIEAVYQTHADRFLVASLPGAGPALEPRLIAALGTNRERFESASSMACCFGIAPVTESSGNSHWVHWRWACSKFVRQTFHEWANCSIRSCEWAREHYDKQRLKGKAHHASIRSVAFKWIRILFRCWRDRVPYSEQRHLEALRKHGASTSTPVAVVVDSTSMLSGVQWKRCGGFSKLAKVSS

SEQ ID NO: 151490 - protein, 368 aa, unidentified
MIERVHGIDRHKSFSTISVVNRQGEEVQFEGACREFGKYVEGLGPTDAVVLEASTGSFWWADQIEAKGARCFVVDPRKFRIIKDSWNKTDKHDARNLAKALWVHVVTGEFGIPTVNKPAVVVRELRKLFAQYCLLNRQIATHKNNAQAIFVENGVELKRELKRRLFAPESGLGVLKEMNISAASRICLELTLQVLWKVGEAKERLATEILLAGEPLKSQVELLISIKGVTPLIALAFLADVADIRRFRTLRKMNAYLGLVPRACNSGGKDRPGHITRESRKLTRTILTQCVHHVAASSVHLDRYYRELREKRGTGRARIAVIRKLCGMMRRMLISGEQYRWMDQGLYEKKLKQYARVLKRGKEERPAA

SEQ ID NO: 151491 - protein, 403 aa, unidentified
MNSVGIDISKGRSTIAVMRPFGEVVISPFEVRHTDSELSELARQLKSLNGETRVVMEATGNYHASVAKLLHNAGLYVSVINAKLVHGYGNNELRRVKTDRKDAVKLANYGLDRWLTLPRYIPEEDTRLLLKNCYRQYRQYSKVQTVLKNNLISLLDTVFPNANRLFSSPIRGDGSEKWVDFVAEFWHCRCVSEKSQKAFTNKYQRWCRKHGYNFSEAKAHTIHAEACGHIDVIPKSETTKLLVEQAVAQIRATSAALVALKHEMQALASMLPEYPVVMDLFGVGPTLGPQLMAEIGDVRRFYSKKALVAYAGLDAPPNDSGDVTGRHKSMSKVGASSLRRTLFLVMSVYLQNAPLDESVYQFMDKKRAEGKPYRVYMMASANKFLRIYYATVKAYLESLEHTA

SEQ ID NO: 151492 - protein, 334 aa, unidentified
MTTWILGIDISKRKFDAALSMGEKFKTKAFPNTPSGHRALLEWLARYDTDHVHACMEATGSYWEALATFLHDEGHRVSVVNPAQIHAFAKGLLTRTKTDRQDARLIARFCEAMKPGFWQPRPREERELFALIRRLDALKGMRDQERARLQEAHEAVADEIEGHIEGLERAIRELEARIRDHIERHPGLRDKRDLLASIPGVGETTVHQILSRLSVLSLLGSAKQWAAYAGLSPGERSSGQRQAASSGMVRLGDARLRKALYFPAMVAKQHNPVFRRFAQRLRSNGKRPKQIVVACMRKLLHIMYGVLKSGQCFDPSCYGMPAHTISEMRVARTS

SEQ ID NO: 151493 - protein, 368 aa, unidentified
MKYIGIDVHKKICVACIKDEGGTTLTEIKFSNNKEGFNHLFSVVGEKKARAVMESTGNYWLQLYDALEAQGIEVILANPRKTRVIAESNLKTDSVDAAMLADLLRANLIAPCYVPPPEVRDIRALIRERMSLKKECTRVKNRIHSLLAKHELPPFPGSDLFGKKGLQWLEDQKEHLLSVDWIILEIELVRLKTLVGLIEKINGDIAVIAQQTEEVSLLMTITGVDYYTALLFTSEIGDIHRFSSSSKLSSWIGLVPRVHQSADTYYHGRITKQGSPLVRWALIQAAQVAVRWDSHWREVYERISSHAGKKKAIVAIARKLAVTMYCMLTRKEPYRYCNEETYRRKVKKLERIINTTPKNRGEIVLLSS

SEQ ID NO: 151494 - protein, 369 aa, unidentified
MEKNTIYIALDDSKRKLVVAMLRPGATEPEEREIPKDPSPIQRLFRRLQREGPVQACYEAGVSGYDLYRQLTACGVTCQVIAPALTPRRPGQRIKTDRRDARKLVRLFRAGELTPIHVPDEAEEAARDLVRCREAVRRDVVRWRHRLLKLLDRHGRLWVTEKNWTQRHWTWIRAQHFALPALQRAFEATVFALEQALARQAALDHEIEALAQTAPYRDPVGWLRCFRGIGTLSAMVLLAEIVDFQRFRRPRELMAYLGLVPSEYSSGETQRRGALTKAGNTHARRVLIEAAWHYRHRPTVGRALASRSQAQPEEVVGQAWRAQQRLHRRYRHLIGHGKRPPVAVAAIARELVGFLWAAMTRRETRVQVA

SEQ ID NO: 151495 - protein, 344 aa, unidentified
MGEVSTIGLDIAKSVFQVHGVDVAGAVLIRKRISRAKVLEYFGELPSCMVGIEACPSAHHWGRELQALGHTVRLIPPSYVKAYLKRSKNDANDAAAICEAVTRPSMRFVPIKTKEQQTALMLHRTRQLLVRQRTMLSNALRGHLAELGIVSAKGRNGTAELLKIIADGANSRISAAVRGILDVLARQYSAIGIEIASIDKSIMALHRACEASRRLAEIPGIGPVGATALVAEIGDWNTFSSGRSLAAWIGLVPKQHTTGGKDRLGSITKQGNRYLRWLLVVGAMAVIRYARKHGTEKRPWLARLMERRPTKVAAVALANKIARMAWAIMVRNERYKEPKLLLVA

SEQ ID NO: 151496 - protein, 412 aa, unidentified
MADVVAYIGLDWADERHSVHLQTADGRIEHLELEQKPAVLHEWVAQLQQRFGGGKIAVALEQRKGAVIHALLMYDCFVLYPINPKALARYREAFCTSGAKDDPVDSELLLDLVVRHRDRLRAWVPDTVESRTLQALCEQRRKLVNQRVALTNRLTSLLKQYFPQALEWVGDLASVQACDFLTQWPTLAAVQAARRSTVRRFYQDHNCRTRAVIDARLAAIADARPLTTDAAVIEPLSLSVQTYATQVRTVIEGIQVFDARIAAVFAAHADHDIFGSFPGAGDVCAPRLAAAFGTDRSRWDSAAELQAHSGIAPVTERSGKTVWVHHRLACPKFVKQTFHEFADQSIRFSRWARAYYDQQRARGNDHHAALRALAYKWIRILFRCWKERRPYDEETYIDALRRRGSPLAKHFA

SEQ ID NO: 151497 - protein, 351 aa, unidentified
MNYVGVDIHKRYSVLVAVDERGRELGRSRINGNTAFGFAQFFGGLEGKSKVVLEACWNWGRIYDLLSEIGQVEEVVLAHPLKTRLIADAQIKTDGLDAYALATLLRGDLIARAHVPAKPTRQRKEVLRQRLYWARLRTRIRNRIHALIDRQRELKMPQCSDLFGRKGLSALNKLVLSEPDATLLREELGLLELIQGQIKAQEARIVEFNSNDEMTLRLQSIPGMGKILAAVAAAEIDSIERFSSAAKLCVYAGLVPRTHASGGKVYQSHLLKSRNKWLQWAFIEAAWVAVGCSAYFGGLYRQHRARGKNANIAITIIARRMSQICWTLLKERRDFIETFPGRSAVRLTAAA

SEQ ID NO: 151498 - protein, 432 aa, unidentified
MKNNIGQSDPFNYAAFVGLDWGDEKHALSLCAAGHTVVERAILEQTPEALAQWANALRVRFPGGKIAVALEQSRGALLSGLLQYEHLVAYPINPKSLARFREVLYPSRSKDDPIDADLLLDLLVKHRDHLRPWQPDTIETRQLALLNEQRRHFVDHRTRLTNELLSHLKAIFPQAVQLVGADLSSALATDFLKKWCTLQLLQKVKPSALRKFYYGHNSRSEDLISSRLKLVKDAVVLTADPALLAAHSLAIETLAKQLEALRPSIEEHERQIQCLFASHPDATLFDSLPGAGPALAPRLLTALGTDRGRFSNASSLSSYSGIAPVTEKSGKTQNWIHLRWSCSKFLRQSWHEFAACSVRSSVWAAACYADLRKRMDHHEAIRKLAYKWQRIIWRMWQNRESYDELTYLRSLQHRGLKIYAHITLPPAATPCE

SEQ ID NO: 151499 - protein, 375 aa, unidentified
MNNNNTLYVGLDVHKESITVAYAINSEPVELMGKIGTSPTDIQNLCKRLRSKSSQVSIVYEAGPCGYGLYRRLVKSGFDCMVCAPSLIPKKPGERVKTDRRDAIRLVRSLRAGDLSAVYVPGVEDEAFRDLSRAWASARDDLRHARQRLKSLLLVHGVHYVGRADWGPAHRRWLSKYSFESPWRQLAFDEHRRTIEDRQAQCERLESALKEAVTEWRLYPVVEALQAMRGIQFITAVGLISELGDLTRFEHPRQLMSWFGITPSEYSSGGSRHQGSITKAGNSYARKLLVEAAWSYRHPARISPAIQKRQENLPRPVIDRAWDAQLRLCKRYRKLQAKEKNVNITIVAVARELAGFIWDMGRIAMSVAQQPQCHK

SEQ ID NO: 151500 - protein, 355 aa, unidentified
MDNRKYIGMDVHKEAIAIAVLNAAGKLVMESIIETKANTILEFLKGLRGELHLTFEEGTWASWLYELLQPHVKRVVVCNPRRNALLKEGSKSDRVDARKLAELLYTKMLRPVYHRENGMRAVKELARSYVTISKDQVRVMTRVKALYRSWGITCSGKQIYTVRHRASWLGKIKEPGVRRRAEFYYQQLDGLRSVRRQVRRELLLESGKHKASKLLRQIPSIGPIRAALLLALVQTPHRFRTKRQLWTYSGFGIETHDSAEYHYVAGQLQRCKKPQQVRGLNRNHNHDLKNLFKSAATNAVAKSGPLQEFYLALVKRGIRPEMARLTLARKIAAITLAIWKKGVSFDAKHLKQQTA

SEQ ID NO: 151501 - protein, 382 aa, unidentified
MSHTLPHPSASSVASPARIVVGIDPGLDKHGVVALCAGTCQRLDRRMVDNTIAGMQDLAQRLRPWRERSADALTIAIEETGNYGEALETFLSQEGFPVVVVSELKVARFKQALGADANDLIDAEAIARFLLIQPDLSRTPTREAVQAHPHGTQHQQLRQLFRRHLRWTRDRTAACNELHAVLRRAWLADYQRFFSDIHGAAALAVWQAYPTPVEAAQAEPGEIAELLRQASHGNIRQETRQKKARDIHFVARMMVTVLGKKDPNRWSAWAEDIRMLARHLVHLNDALRQTDRRMEEILHAIESPLLSFKGLGPVTAAAIHGETLSIERFPTADRFARYNGTAPREDSSGRQPRFVKNQRCNKRLRQSFLQLALNVSAQQNHC

SEQ ID NO: 151502 - protein, 397 aa, unidentified
MSMLFVGIDVSKDYSSAQGLDREGKKVFYLEFAMNGEGFSQFLKLLKAHCEDLSGVTVGMESTGCYHINLFAFLCSEGMVCVVINPLLISNFARLSLRKTKTDKKDALTIAQFLLAHRSELSQVSYTQSSQDLKDLARERESLAVMMAGLKNDVRRLLQMMFPELEHRCKLFTETMLRFLVKFPSARAVRIAKPKEISKALIHAEGKRKRVFISAAEIIGLAKASVASESVAKELILSEKIETLLYLEEKKGRITEALVGACRSMRVDELDIITSVDGISKITGSTFLAELGDIETFRSYKHVIAFAGLDPSVHRSGQYEGISRLSKRGNRHLRRVIFLMTLCAVRSHNIFREYFLRRKQEGLPPKKAILATAHKLLRVLFAMLTSKSYFRKEVVEV

SEQ ID NO: 151503 - protein, 311 aa, unidentified
MRSKSFVGIDVSKHQLEIFVLPTQENLAVPNTEEGIGSLIPILRSAKPSLIVLEATGGLERPTVESLTSAGIPVAVANPRQVRDFAKAKGILAKSDRLDAQVLAAFGEALRPEPRPPKSPEIQDLEALTTRRRQIVDMITAEKNRLGTTPKRTRLQIQEHIYYLEKALKEITRELNQALKKHPQFREKNQIIRSLPGAGPILSVTLLSDLPELGSLNRKAIGALVGVAPLNRDSGLFRGKRCIWGGRARVRAVLYMATLAATRCNPVIRAFYNRLTKAGKEHKVALTACMRKLICILNTMIKDQTPWRLAH

SEQ ID NO: 151504 - protein, 353 aa, unidentified
METPIKQTAGIDCGMQELVVSFGILTGDGTFICKLTKVFANTAKGFQQLLQWINEVSSKETAVLYAMEATGVYYEKLAYYLVANDCHVSIVLPNKINAFAKTCTSKKQDDQQASKVLCEFGCVKHVDEWQSPHPLFAALKQLTREKHQLQQELVIIKNQLHAEQTKAITASASIKRMKARCRLIEKQIAEVEKEIIDTLNDDAAIKEKINKICTIPGVGLSTAVTVIAETNGFNLIRNARQLVSYAGLDVVQKQSGISVKGRAHISKKGNPHLRHCLHLPSFVAVKYNLPMQQLHHRIVEKQAIKMKAYVAVQRKMLMLIYTLWKKNEAYNPSIKFLEQPVEAALTELDYICS

SEQ ID NO: 151505 - protein, 353 aa, unidentified
MAKSTTGIAGPTYAGLDVSLKETAVCIVDDAGKIVFERMVPTDPKLLAGCLAKHAPGLERFGIESGATSAWLWREFRALGLPVVCLDSRHAHRVLSMKRNKNDRNDARGLADLVRMGWYREARVRSLDAQYIRSMLLSRQQLLQSRRAVENQIRGALKTLGVMTGPTKGRGFMPRVVALRADNDWLGPILDPLIATRTAIAKQLRMVSESVLVAAREDADVRRMMTVPGIGAMTALAFKAAIDDPKRFTSSTKVGPYLGLTPRQYQSGESEWIGGIGKTNDPLLRAYLYEAAGVLMTRVRRDCPLKEWAKRLAKRIGWKRASIAVARKLAVILHAIWRDGTEFSWKAGQPTPA

SEQ ID NO: 151506 - protein, 411 aa, unidentified
MENIFVRCAGLDVHKESVEACVRRIEPNGCVHSETRHWGTMTRDLLEMADWLAAKGVTNVAMESTGVFWKPIFNILEIRFTVLLVNARHLKQVPGRKCDIRDCQWIAQLLQCGLLKGSFIPPRAQRELRDLTRHRTQLVEEKTRTINRIQKVLEDANIKLASVASDVMGVSGRAMIQRLIEGETNPFKLADLAQRQLRGKIPELQKALEGKLTDHHRFLLKLLWKELSQQEELIVDLDSKIEEHTRPFAAEIEHLDTIPGVDHRVAEVLLAEVGPDMKPFPSDEHLSSWAGMCPGNEESAGKRRRRRITPGNRWLKQTLAQAAWAASHAKNTYLAAQYRRLASHRGKKRALIAVGHSILVIFYHMIRSGASYADLGADFFDRLEPECLTHYYVKRLERLGYTVTLESSAAA

SEQ ID NO: 151507 - protein, 321 aa, unidentified
MERMIGVDVSKDYLDVDTLPSSGQRRFTNDPPGIAELVEWARAFRPDRIVFESTGPYQKAAVGALLAASLPAVVVNARQVRDFAKALGILAKTDAIDAAVLARFGQVVPTIVRPLPEPEIQAFQELYDRRGQLVKMLAIEKNHRHAAASAKVIRNIDAHIRYLEKQIEALEDRMDHFVQNCEAFRARDEILQSIPGVGPQVSRTLLAYLPELGQGTRQEIAALVGLAPFNDDSGTQSHTRHIRGGRGKVRVGLYQAAVVAIRHCPPLKDFYIRLKERGKATKVGLIAVARKLLVLANALIRRMEPYDPANSVCLQSPLTAT

SEQ ID NO: 151508 - protein, 331 aa, unidentified
MGRIAVGIDVSSKKLDVAVHEGDEGSFENSPPGHKKLLKWLKKQAKRKGVTVVLESTGYYGLDIALFLHEKKNVDVHYVNPMAAKGYAKAGMVRAKTDKVDARVLARMAHADRSDPWNPPAPHLRALRAYTRRIRTLINNRTREKNRLAALSATGTTPEPIVDDIRDTIGALDARIDKLWAAALEFAKSHADLRSDIELLDTVAGIGERSAVELLGEIRCMPEDLTAKQLVAQAGLDPRARQSGMRDGKRSISKMGSSNLRAALHMVAVTAVRSCPQVKAYYTMLVEQKGKAKLVALVAVARKLLHCIHGMMQTNTPWDPARFYMPRTVSA

SEQ ID NO: 151509 - protein, 391 aa, unidentified
MIYAGIDVAKDKHDCFITNSDGEVLFKSFTIPNNREGFETLFQKIQSVSDDLTKVKVGLEATGHYSYNLLGFLLDKGLPTYVINPLHTNLYRKSLSLRKTKTDKVDAHTIASMIMSDVNLKSYSDTSYHNEELKSLTRYRFDKVKARAKLKSSVSRLVCILFPELEKLVPTLHMVSVYSLLSEFPSAHAIASAHLTRLTNLLSESSRGRYGKDTAICFRDAARSSIGSHIPAKSLELKHTIRLILELTSEIDEIEAEIKTIMDEINSPILTIPGISYKMGAMIIAEIGDFSRFDSPDKILAYAGMSPSIYQSGQLDNCYAHMEKRGSRYLRYALYNATKYVCHWDESFGTYLAKKRAEGKHYNVALSHATKKLVRTIYAMEKSGHAYTNAA

SEQ ID NO: 151510 - protein, 394 aa, unidentified
MIYVGIDVASTKHDIVILNELGQVFKKAFSIRNDLEGYKKLLSEISSAKEFFNDLNVRIGLESTGHYSRNILHFLILARFEVMFINPLLTNMDRKAASVRKTKTDAIDAKAICMFLIRNHNDFKPYTLSSYHIDELKTLVRQRKSLKTQINKEMNLLHAYVIQAFPEYYKIFKKINSKASLEVLSRYASLSEFKRVRLETLKELIRKSSKGRHGIREAQMLKDLNSSSIGIDSSALSFSIKQTIKRIIMLEDQVHHIEHEITHHVDESHTTLLSVPGVGYTTGAIILAEIGDIHRFKTDDQLLAYAGLDPSVYQSGNFEGSYKISKRGSSILRFAIYHVAQAAVKFDPVFKTYYLKKKAEGKRHRVIIGHVTKKILRVIRSILKNNSTYLINTH

SEQ ID NO: 151511 - protein, 332 aa, unidentified
MEHVLGIDIACESFVAHLLAGESDPIPKGNEVTFDNSTNGFTTCLSWLLGCAVHPEETLIVVEATGVYWEALAWFFSERHFHISVVNPAQIKYFSRSVLQRGKSDHLDAGLIALFGARMHPRIWEPPSPISEELQVFMRQRDAYVGMLTQERCRLHAFEHAGHTPQPVIAICQQTIAFLRKQIKELDEGFKNTLRGDPRWAKLYDLLRTVPGIGAVTAGVFLTETRALNEFSSARQLTAYTGIAPVPYSSGTSVHRKPHISKIGNARLRKAFYMAAVSSVRFNPHMRTMYQRLLQRGKPKKVIIIAVARKLLVLCFAICKSESPYRPDYAPA

SEQ ID NO: 151512 - protein, 355 aa, unidentified
MTMLADDYEYVIGGDPDRDTIDLAVLDTATGSPRAHIEASADGPGYARMLQRAERYAPGRRVWALEGTGSFAAGLAAALSQAGEDVVEVGGFRRARGAKNDRLDAVRAARNAMARQLQAGPRARGLRDGIRALSVTRQAVLVSRTKAINELKSLVVVAPEHLRADLRGCSLAKQLDRIEAMTAPDGAAVEHRITIVTLQSITARIRFLSGQLAALDPVLGQLIRQHPAGPALLAEPGVGPIVAAQMLVSWSHPGRVRSEAAFASLAGVAPLEASSGLRTRHRLNRGGDRALNRALHTVAITRMRCHRETRAYEAKRTAQGKTHRDIRRCLERSIARRLYRVMESAARANTPPAAT

SEQ ID NO: 151513 - protein, 394 aa, unidentified
MRFVGIDVGAERHVVASVDAAQAMGLKPTGFTEDAAGYHQLLTLLGPATDTLVAMEATGHYWKNVFAVLVAQGFAVALLNPLRTRRFAAEDLQRTKTDAIDALGIARFAAQKRPAASRLPDPATEELRERLRYRDRLSQDFGDRERQLHRLLDLGFPEFPRQVRDVGSELATAILRAYPTAAAFQGVTVRRLGGLRYAGGQKVGAALAATLLEAAAASVGQHHGAAYRVQVQDICEDLDVLRRRLRTLDRDIEGLLARHEIGTLLTTIEGIGPQTAARLVATFGDFSGMRSGAALACYVGVIPGLRQSGKRTASRASLTPIGAARLRAKLYMPVLRAVRYNPWLRAYYEGLIARCKLPKVALIAAMRKLLHAVYSVATHRRPFVPHVVAQEARP

SEQ ID NO: 151514 - protein, 341 aa, unidentified
MDQVTTIGLDIAKHVFQVHGADAAGHVLFRKRITRPRLIAFLAAQPPCIVAMEACAGAHHWAREIAKLGHDVRLIPPAYVKPFVKRQKNDAADAEAICEAAQRPSMRFVPVKTEEQQANGIVFRARDLLVGQRTQCVNALRGHLLEYGYVFPQGINHVADVVAAVEDPQSCLPESGRIILQLLVDTFTALDGQVAALDAEINRRSKADPTARRLMTIPGVGPIVSTAITALVPAAEGFRAGRDFAAWLGLTPVQRSTGGKQKLGAVSKRGERTIRRLLIIGASAVVRQASRRGAPEGSWLARMLARKPKMLVTVALANKTARIVWALLVKGGVYRVPVAAA

SEQ ID NO: 151515 - protein, 483 aa, unidentified
MKSKPEEQNKRATNHPTQHHWHEMNRKQRREMMRKMQNEDLSLEVIHPDAGGIDIGNESHYVAVPPSRDSQSVREFGCTTAELKAMAVWLKQCRIRTVAMQSTGVYWVAVYDILEQAGLEVYLVNARDTKNLPGRKSDVQESQWLMKLHTYGLLRNSFRPSPEIRVMRTHWRQRNDLVQSAGRHIQRMQKALTQMNLQLANVLTDISGATGQAIIKAILAGEHDAHKLAEFRDPRVKASEEQIAQSLEGNWQPDLLFLLKQEQDGYEFCHKQMAECDRQLAQYLQQREDRSHGAPLPEEKRKGRLKKKKGNAPQFGLREGLFRMTGTDLTRIDGIDVMTATTVISEAGYDMSKWQTENHFVSWLRLCPDNRISGNRVIGKGRLPTNNPISIALKMAATTLRESKTYLGAQFRRLRTRLGAPIAIKAMAAKLARLVYRILRYGMKYVDQGAAFYELRHRELQIKHLKSKAEKLGYRLTPIPAAA

SEQ ID NO: 151516 - protein, 337 aa, unidentified
MNYCGIDLHSNNCVVIVSDENDRIVYQKRLPNELAQIAAALEPYRRELAGVVVESTYNWYWLVDGLTDTGYSVHLAHPAAIRKYEGLKHSGDFADAAYLAQLLRLGLLPEGYVCPREQRSARDLARKRMQLVRCRTAQILSIEGIMIRQTGIRIKSDAVKRLTAAQVNELALPADVALAMEANRAVSEALEQQIELLEKRLKERVSLRPEYHLLKTVPGIGQTLATTIMLETGSISRFAQVGNFSSYCRCVDSLRESNGKKKGEGNTRNGNKYLAWAFVEAANFAIRYSPQARSFYDRKKSRTNRVLATKALAHKLARACYYMLRDQKPFDAHLCFG

SEQ ID NO: 151517 - protein, 358 aa, unidentified
MRKNSKETVRMTIGLDLGDLVSFFHLVNEETGEVRRGNIRTNPAALKKFFGPLAPARVVLEVGAHSPWVSRLLEHLGFEVIVAQAGRVRMIYQNHHKTDVTDAELLCRLGRVDPVLLAPIDHRPEQLQADLAVLRSRDVLVAARTKLVNSIRGQVKAYGGRLPQCSADCLHLRASLIPEPLRAALYPLLLTIGEMTRQIRALNKTLQKLADERYPVVALFQQIPGVGLLTALAFVLVLQDPLRFPKSRTVGAFLGLTPRKDQSGARDPQLGITHHGDSLLRRLLVQSGHYLLGPFGPDSELRRQGLALVARGGRAPKFRAVVAVARKLSVVMHRMWITGEEYRPLRPAGSGSEPGTAA

SEQ ID NO: 151518 - protein, 344 aa, unidentified
MDHYAGIDVSLEYSSVCVVEASGKIVREAKVASEPEALIGWFDSLGFGLARIGLEAGPLSQWLYAAMKKAGLAVELLETRHVSDAFKAMPVKSDRNDARKIAQLMRLGWFRPVHCKSITAQEIRAMLTARKLVQSKLLDLENSLRGILRGFGLKVGKTTRTNFAGRIEELVKGHPNLQTIGEALLRARAVLRTEFNGFEKRVRAMSRLHDKARLLMSTPAVGPIVSLTFACAIDDPFRFTSSKQAGPHFGLTPKKYQSGETDYTGRISKHGDASVREALYEAAHIMLTKPIKRCSELKSWAMRIARRAGTNKAKVALARKLAVIMLRMLKDNVPFNPAAKAATA

SEQ ID NO: 151519 - protein, 314 aa, unidentified
MIHAGLIVGIDVSKARLDVHVHPSGEHWSSANGRAGIAGLAKRLAGLMPAAVGMEASGGYEQALAHALHAAGFDVHILPPARVRAFARAIGQGAKTDALDAMMIARCLEASRDRLVRYAPDPARERLSALGTHRRRLIAERNGLASQLDTIAEPVVRRMIQARLRSIALGLVCLDKAVRTLLAATPHLQRQVDRLCQAKGVGPVLAGALVADMTELGHISAKAAAALIGVAPHARQSGASARPGRCAGGRKALRDILYMATLSAIKARDPILAGFYKRLREKGKPFKLALVAAMRKMITILNAIARDDPAFQTP

SEQ ID NO: 151520 - protein, 450 aa, unidentified
MPTLFVGLDLSLKNIAAAFELEDTTEPIKRFSIPHNPIGVDFLVERIKDVTAKLGIDNVEIGMEATGNLWMQLIETLRSHPGLAHLEANVHNLNARQVKNFKKIYSEIPKNDPLDALMIAEFLRFRRLPEPPPTNEKYLALQKLTRHRFQLAQSLASEKNRFLTNLFLKFSAFRQQKPLSNPFGAASSALLTEFLTVDEIAEMSIEDLASFLMQKSNNSFANPHEVAKAVNQAARNSYRLNKCLADPVNLVLSMTLENVRFFERQIAAVDKAITKEIAAFKSEATILLSVPGLGPVFTAGIIAEVHDIRRFYSDSALAKFASIVWKKSQSGEFDSDDTPMSRAGNKYLRYYLIEAANSLRMHNDEFAQFYQSKYRESTTHHHKRACVLTARKLVRLIFNLLHKGVLYKTPDKRKEDRADNPLPESTTPGELVRHITRRRRAQRALKIHRD

SEQ ID NO: 151521 - protein, 334 aa, unidentified
MQNITLIGIDLGKHSFHIHCQDKSGKALLRKKFTRTKLMQFLATCPPSVVVMEACAGAHFMARRISDFGHETKLISPQFVRPFVKSNKNDFVDAEAICEAASRPSMRFVQPRTESLQAMRALHRVRESLIRDKVKTTNQIHGFLLEFGISLPTGDAVIKRLSLVLAEHEIPEYLSRLLVRLHTHYLYLVEQIAELESELSQSINADDTAQRIMTIPGVGPITASLLSSQPGDGKQFSCSRDFAASTGLVPRQYSTGGKSTLLGISKRGDKNLRRLLVQCARSFMMRLERQHGKLAEWVREQLNKKHSNVVACALANKLARIAWVITTQQKEYQA

SEQ ID NO: 151522 - protein, 358 aa, unidentified
MNTIVAHTRSFVIGVDTHARTHTYAVLAANGEHLDTETFPNTHAGRARAINWVGRRTGGDLGALWVIEGIGSYGAQIARQSALAGYRVAEAARMGRGGRRGIGKSDPIDARRIAAAVLPLPEEQLRNPRMDEGIRAAAQILLTARDELTSERTRAVNALTALVRTADLGIDARRSLGAKKVGEMARWRPREEDLATATARTEAVRLAKRILVLDAEITDNTNRIGELVDASPAAELVEETGIGPVTAATVLVAWSHPGRIRNEAAFAALAGVSPIPASSGNTTRHRFNRGGDRRLNRALNVIAMVRMVHHPQTRAYADRRRTEGKTDREIRRCLKRYLARRLYRHLNNAAAPIGVDGI

SEQ ID NO: 151523 - protein, 437 aa, unidentified
MVPHAGGAVEEEKTMDILHERVSGLDVHKNTVVACARIMTGKETTRECRTFATTTDGLLALRAWLSECQCTHVAMEATGVYWTPVWRILSEGDFELIVANAAHIKNVPGRKTDMNDAMWLADLLAFGLIKASFVPTEPMHELRSLTRTRKQLVREQTRHVQRIQKTLAEANIRLDSVISDIMGASGRRIIEAMIAGVRQPHKLADLAGKQIKATPKELYDALHGRLTDHHRFLLDLHLRQWDGLDTTIRTIDLEIDQRIDRMDKDRAAGEPPFRSLIGNADTVPGVSAVSAPAILSEIGCDMSRFPSAGHLLAWAGMCPGQNESAGKRKPSRLRKGAPWLKTMLVQCAWAAIRKKGSYYQAQFLRLRHRRGPQKAICAVAASILTAIYHMLKDGTEHHDLGADYFDHRSTETKAKHLVARLTKLGFTVQLQPSAKAA

SEQ ID NO: 151524 - protein, 393 aa, unidentified
MVCVGIDVAKDKHDCCILDSDGMVRADCFTIPNNMDGFKQLLQTIRNCTKKSDKIKVGLEATGHYSYNILGFLLDNGLPTYVINPLHTNLYRKSLSLRKTKTDRVDARTIATMLLSDVDLKSYTDTAYHNEELKSLTRYRFDKVRERAKLKQSVSRLVTILFPELEKIVPSLHIASVYALLSEYPGAKQISEIHLTKLTNLLATASKGRYGKDKAIQIRDAARTSIGSVMPAKFLELKHTIKLIRELTSEIDEIEVSIQKIMDELNPPILSIPGVGIQSAAMILAEIGDISRFKNSSSLIAFAGIDPTVRQSGEFNSTHNHMSKRGSPYLRHAIFLAATTCSFHNSPLNAYYKKKRDQGKHHLTATGAVARKLTSVIYAVLRDSKPYEPKSFC

SEQ ID NO: 151525 - protein, 408 aa, unidentified
MDPVIDCVAGLDVHKATVVATVRTPGADGRRTSWTETFGTMTAVLIALRDWLQAYGVTHVALESTGVYWKPIYYVLEDTFQLLLINMLELKHVPGRKTDVKDSEWLAQLLECGLLRASFVPPPAIRELRDITRYQVQQVRDRSQEVNRLCKVLEDAGIKLTSVATDVLGVSGRAMVDALVAGTTDPTALAELARGKLRTKLPLRRALQGRFRRHHAFLVEQILAKIDFLDETLDRITAELDERLAPFAPMLANLDTIPGVNRTTAVSILAETGGDMARFPTAGHLCSWAGMCPGHDESAGKRRSGKTRKANRYLRAALIQGALGASHAKGSALQARYHRVKRRRGHKKAIVAVGHQMLEIAYHLMRDGGTYDELGADYFDRRHTDRTVRRHVRQLEALGFQVTIEKAA

SEQ ID NO: 151526 - protein, 341 aa, unidentified
MKLHTIGIDLGKTSFHLAGLNERGEVVVRKRFTRTQLLRFTANRSVERIGMEACGGSHFLGRALQQQGHEVRLMPAQYVKPYVKTNKNDYIDAEAIAEAVGRPTMRFVPIKSDDQLDLQSLHRVRERWVMRRTAVVNQMRGLLLERGITIRKGRRHLEAALPGILEDAEANLSGGLRFLLAQLRVELDETSQRITEADAAIERAVQENEACQRLATIPGIGPVTATAVVAAIGNGAAFQKGREFAAWLGLVPRQLTTGGKPTLLGISKRGNPYLRRLFVQGARAVLQQKASQSGGLKAWLDPLTARTHHHVACVALANKLARTAWAVLSSGEAYRAPRLAA

SEQ ID NO: 151527 - protein, 475 aa, unidentified
MNIKGTKKKNQVVTANIFEQQELLKKAEVIKENLTASTWRELETNGKFDKNKKLSFISDDMLILGCDVGSETHYVRAIDTRGRELSKSAYSFNNNQEGFRSAKEWAVRIAAEHDKGQIVLGLEPTGHYWFCLATWMIANGISVVQVNPYAVKQTKEVEDNSQLKDDRKDPKLIANLVKDGNFGMPYLPEKIYAELRRLSMFRDQLNEDRIRTINRMHREMKIYFPEYKEALGKVDGAFSLELLKEAPFPDELTALGEEGIRQIWHAAKLRGRGYSRAREILQYAKASVGIKDGSIASKAAVKWFVQKIMELDVELAVIENQINQKCQEIPHTGNVLEISGIGENTLSGILAEMGDISRFDDVKEIQKLSGLGLVACSSGKHKGETKISHRGRKRLRYWLFQAAKSAVAHAEEFKELHMYYTTRADNPLKKMQSLIVIACKLLRIIYTILNTGTFYDPKKMLMDIRRPEKKEAIVA

SEQ ID NO: 151528 - protein, 366 aa, unidentified
MFTERTSVGLDVHARSVAAAAIDGVTGEVFKTRLGPDPQVVLDWIGGLPGPVAVAYEAGPTGYGLARTVRAAGVRCEVVAPSKLARPSGDRVKTDAGDAMHLARLLRLDEYTPVRVPTKAQESARDLVRAREGARSDLMRSRHRVWQAAATRDPLLRREGLDRAARRVAAGQRFDLAGTRAAFEDAYETVVLTTGRGARLDKEIAVLAEQGEYVGVASRLACLRGISTLTSVALAVEIGQWDRFTGSSIGAYLGLVPTEASSGTKRSQGGITKTGNAHVRRLLVEAAWHHRRPYRPTAILRRRWEHATPAAVARAQDGNHRLHRRWVGYAERKKRPVLANVAVARELAVGVSDLGHQREERPAPRL

SEQ ID NO: 151529 - protein, 412 aa, unidentified
MVELLVARCAGLDVAKDEVVACVRVPDGGGGRAQEVRTFLTFTSGLEALAGWLAAEGVTQVVMEATGQYWKPVWYLLEEAGFELLLVNARHVKILPGRKTDVCDAAWLAELLEHGLLRGSFVPPAPIRELRDLTRYRKRLIQAHSAECQRVQKTLEDAGIKLDSVAADVLGVSGRAMLTALINGERDPGVLAELARGRLRAKLPQLRQALRGRFGDHHALLVRLALEHLEHLEGAIAALDRRVEEVIAPFARARDQLATITGVGKRAAETIIAEIGVDMTVFPTAGHLASWAGRCPGNNLTGGKRRSGKPTKGNRWLGEVLIECAWAAARSRDTYLSAQYWRLARRIGKKKAAVAVGHSILVIAWHLLADDCDYADLGGDYFVRRDTQRQQQRAVAQLQALGYQVTLEPLVA

SEQ ID NO: 151530 - protein, 404 aa, unidentified
MSDVPIRYVALDVHQAYVMVAALDAHQTIVLQPHRIPLVQFEAWATHCLHPTDHVVLEATSNAWAIADRVQPLVARVVVANPLKLKLIAASTVKTDRRDTLALARLLAANLVPEVWVPPAHVRELRALIAHRQRLVRQRTMAKNRLRSLLQRHQIVPSVDNPFAATHRAWWDTLSLAPAERLRAHHDLAVLDYLAGLLGEVEAELAQLSGQAPWVTQVPFLLQLPGIGLTTAMTVLSAIGDIDRFPSAKHLVGYSGLGNRVHASGQVERRGGITKQGRPELRTALVEAAWAAVRADPGWRERFEALAARIGQAKAIVALARKLLVVVWHVLRAQCADRHADATAVARRFLRWGSRHRRVRQAGQSRAAFVRAHLDQLGLGAQVTELRYGREVLKLQPRAPCSAG

SEQ ID NO: 151531 - protein, 360 aa, unidentified
MVIMVAIDMHAKSLVCELGCGRDEPRRGTYANNGVGHQRLIDDVTAMKQDLGSGGEVVVAYEASGLGYVLYDRIREAGYRCAVLAPTEMLRSKSGYKKKTDRKDCSYIYETIRAHVLAGNRLPEIWVPSEQLREDREMVRARFDAGQKVTRVKVQIHTLLKKFGIQKHEDLNNWTKAFHRWLVEVLGSKGAGFRIGMETLLRQLAFLEAEQKQLERAILALSKEERYRDQCAELQKVPGVGLITAMTFLTEIGNVMRFENRKQVGSYLGLVPSTFESGKADDRKGRITRDGPYRVRSVLNQALWAHLRCNGQEKAAYDRIAEKNPKRKKKAVVAGMRRLGIRMWHIAKDVEFSKGLRLAA

SEQ ID NO: 151532 - protein, 464 aa, unidentified
MTRKRTGTKKRSAQSKLDLKTVEIVHADAAGIDVGGSEHWVAISPDRDAEPVRRFGSFTADLRDMARWLVEKGVKSVAMQSTGVYWMPVFEVLEQHGLEVFLVNARHTKNVPGRKSDVQECQWLLKLHAFGLLNNSFQPTDEIRIARTLWRQRGNLVADASGTIQRMQKALIEMNVQLSSVLSDLSGVSGMSIIGAILKGERDPWKLAALVQPEVKAAPQAIAKSLEGNWRKELLFVLRQEVELYRTYQEKIHDCDLQLREHLKSFGSVVNLAAQPIGPKPKGKSGSKNAPQFDLRTELYRITGIDWSQVNGIDVLTAQTVIAECGANLSAFPSEKQFTSWLGLVPTNEQSGGKILKRRTRKVVNRAATAFRNAATTLLRSQSYLGAQYRRLRTRLGAPKAITAAARKLACLFYRLIKNGQQYVDKGTEYYETKYREQQVRILAKKAQRLGFQLVTPTPLQPAL

SEQ ID NO: 151533 - protein, 359 aa, unidentified
MRKSSRHSAGGQKPEMTVGIDLGDRFSRYCVVNGEGEVVEEGRIQTTAVALERHFGGQARMRIAMECGTHSPWVSRLLEDMGHEVLVANARKLRAITDSESKNDRNDAEKLARLAAYAARLLSPIQHRSPERQRDLNLLQARDTLVRARTMLVNAVRGLVKSAGQRLPKCSTESFASGVRTAIPSGLEPALTPLLEQVAGLTGQIRQMDKQIEALGKRYPEVMRLRSVPGVGPVIAAAYVLTLDSPAAAENSRSAGAFLGLRPGQSQSGNCDPQLRISKRGNQYLRRLLVQAAQYVLGRFGPDSQLRRWGLKLAASGGKRGKKRAVVAVARKLAVLLHHLWHTGELYRPFPQETPALAP

SEQ ID NO: 151534 - protein, 412 aa, unidentified
MDIVNERAAGMDISKRDAKVCVRIPGARAGTYTSKVTTWGATTHQILELREFLEREHVTVVVMEATSDYWKPFFYLLEETLPVMLVNAKAARNIPGRKTDVSDAAWLAQLAAHGLLRASFVPPEPIRELRDLTRARAIATRDRAREILRLEKFLESSGIKLSSVVSDLTGVSSRDMLEALINGERNPEVLAGMARGMLRSKIPALVDALTGRFKPHHAFMARLHLDQIDAHTRTIDTLTTRIEEAMEPFRDAREALATIPGVSHRVAEVIIAETGADMAVFQTPGRLASWAGVCPSANESAGHIKSSHIMPGNKYLKAALGTAAMSATRSKNTYLAAKYRRITTRAGRNKALVAVEHSILTAAWHMLRNGEIYNDPGADHYTRINPTKAKNRAIKQLNNLGYDVTITPVTAA

SEQ ID NO: 151535 - protein, 607 aa, unidentified
MSTIASLDRIGVGIDTARYGHRVSFLRPDRKPAAKPLTVMENRAGYQALQDRLNQLHEQHTTAYFHVRIDAAGQYAVNLELFLRGLKLPMTISVGEPKRNKDYQKAHFPKRTTDDTESQAMARFAVIELPNATPAPSTPMILLHEVAGRLQSKVKQTTQAINRLHNLLARVFPELATLTEDMSVGWVLKLLDKYPTAERIAQAQIASLEKIPYLSVEQAHAVHQAAKQSVASLRGELAEALVRDLVNQLRLCQKAEQHLHQLLLEAFADLPASPHVQVLTITGIGAATAAALVAKIVDINRFATPNHLVSYFGVFPEESSSGVDKHGKPLPPGTLIMSPKGNDLVRFYLWNAARNAIQHNPAIRALYRRLRAKGKRGDVAFGHCMRKLLHLVYAVWKTDRPFDKEHFPWEGSSDTQPSATTPPSADAGTTPSANEEAVGHKRDLPAEEVVTTADSTLEPASPAVKPASQSAAPRPKVDFACVREHVTMEQVLQHLGYFASLRGRGRQRRGPCPVHSQPTAPERTFSVHLGKNAFQCFHAECAVKGNVLDLWAAIHRLPLYEAALDLAETFQVPRNREEEPVKGTSSPRTATAKTSAPAAATATDGAK

SEQ ID NO: 151536 - protein, 321 aa, unidentified
MADRSTPRQVLGCDVGQDSVVICDSLSGSRRSVANTPDPLRRALAELVPVPGDALLVCEATGGHEATLLSVAWEAGLAAHRADPRKAHNFLRSLRSAGKSDPIDAEGLARYGIERGDRLPLWQPPAPDRQALQGLVRLRADLVGDRADYLRRLKSPSQGLDKRHIQAVVDALAERVAAIEADIDRLIAQSQDLSQSVAIITAIKGCGWKTATSLLALMPELGHLDRHQAAALAGLAPYPNDSGKTEGYRRIRGGRPAVRAALFPAAMTACRHHPQLRQHYQALLSRGKKPIVATLAIARKLITIINAKLRDARAQPAQQLC

SEQ ID NO: 151537 - protein, 355 aa, unidentified
MLADRVDYIIGVDTHTATHTAAVVTPTGAALAHRTVPADADGYLHVYRFAVEQAPGRRVWAIEGTGSYGAGLTTHLLEQGEWVVEVDRPARPARRNGTKTDDLDAVRAAREALGREHLAQPRQRGDREAIRVLVTTRQSAMQARTCAINHLKALVVNAPERLRQQLRALATDQLLARCARLRSHPTQPIEYRATIAALRRTAQRSLALAAEADDLHAELDTLIRQRARWLLAEPGIGVICAAQLLNAWSHAGRLRSEAAFAMLGGAAPIEASSGKVVRHRLNRSGDRQLNRALHTIVLSRMAYHAETRAYVARRIAEGKTAREIQRCLKRYLARRLFKLLEAPPAHAQKEKIATT

SEQ ID NO: 151538 - protein, 319 aa, unidentified
MNTVSRDRIIGIDVSRDWLDIYCLPEGKRARLPNKVEGHEQVALLAREPGALVCFEATGGQEWRLWSTLDAVGITTRQLPPAQIKAFAASRGTRAKTDRIDAELIARFMAFRPDAGRVLPHEKLRRLRALTSKRGQLVETRKRLLAQIKAHGKLGSADMFDAMDTELKDLLDGQIAELEARIEQTMASDDDLAETAGILRSVPGIGPVASTMLIAEMPELGQLSGEQAAALAGLAPIAHDSGAMRGKRAIGGGRRQLRHVMFQAALVASHHNPILKTFADRLRVAGKPHKVVITAVARKLVTIANALCKSRLKWANQTA

SEQ ID NO: 151539 - protein, 374 aa, unidentified
MQKKLRFLGLDVHAETIAVAVAEADGEVRSLGVISNRAESVRKLIRKLGLGEELRACYEAGPTGYVLYWQLAELGVQCDVVAPTLVPTKSGDRVKTDRRDAVKLARCHRAGDLTAVWVPDASTEALRDLVRAREAAKQDQLRARHRLSKFLLRTGQRPAAGLKAWTQLYMAWVRQLRYGQPAQEFTRLDLLHEVEHMAERVRRLEEAIREAVKLAPAAMQAVIRDLQALRGIAEISAVTVVAELGQISRFDSPRQLMGYSGAVPSEASSGKRQQRGSITKTGNAHLRRIAIEAAWSYRLKPGVGPALRKRQEGVPEEIKEIAWKAQLRLHKRYARLAASGKDQRKIITAVGRELLGFLWAIGVKTETARQAMAA

SEQ ID NO: 151540 - protein, 343 aa, unidentified
MFYIGIDQHKSFSQVAVLDSSGQVVKQKKLYHDSPELFRKFFTPYSDGIAVLEANRNWDWLYDLIESEVKEVKMSHPLRTRLIAEAKVKTDKVDARVLANLVRLDYLPEAYTPPRSIRESRGLFRFRVHIVRTRTRLKNRIHALLDRQGIRHSFSDLFGKKGRQFLDQLSMRPCYDFELTSSLFLLDAISGELQKAQKEIRKAMKTDPCGQLLMTVPGIGELLAYLIVYEVGEIERFSSAERFASYCGLTPSVHQSAAKRYHGHIGKGGNHYLKWAFVEAAHVAKKRDPGLKATYARIARKSGKNKANVAVARKLAVSVFYMLTRDMPYRYKKPSGQYLGKPE

SEQ ID NO: 151541 - protein, 354 aa, unidentified
MIIIGADYHPGFQQVAYVDTDTGELQERRLGHREDAEKFYRDLAAQEVKVRVGMEASGHARWFERLLAELQFELRIGDAAEIRTKRVRKQKTDRQDAQLILRLLLENRFPQVWVPSWENRDLRQLLWHRHRMVQARTRIMNQLQAVALNEGLRCKKKLWRDAGREQLESFRLAPWASRRRHDLLELLDRLTPTIAELTQAIEQEAEKCPTAQRLQTHPGVGALTALAFVLIIGRADRFECGKQIASYLGLVPLEDSSGQRRRLGHITKQGNSLLRFLLVEAAQVTVRSDQEWRNRYFHLVLRRGRKIAKVAMARRLAVRLYWMWRKGWDYEQLKNFGSHAGEPGHPDGVQSSTE

SEQ ID NO: 151542 - protein, 309 aa, unidentified
MEHFVGIDVAKDRLDVHLRPSGEAFAVARDGEGLAQLVERLRALVPRLVVMEATGGYETIVASALAAARLPLAVVNPRQIRDFARATGRLAKTDRLDAAAIAHFAEAVRPAARPIADAQALAMGELVARRRQVIEMMVAERNRRRMATQRRVLKAIDRHLALLQAELSELEGDIDGAIRDTPAWQKEAELLDSVPGIGPVTRRTLIAELPELGQLTRRKIAALVGLAPINRDSGTMRGRRTIAGGRSPVRATLFMATLVATRANPVIAPYYAKLRAAGKTGKQALTACMRKLIVILNAIIRDRKPWQTA

SEQ ID NO: 151543 - protein, 345 aa, unidentified
MSQQYVGIDLHRQYVGIDLHRRRSVIVRTDAVGTVLGEARIENDPLALAAEIAKAGPAPEVALEATYGWYWAADLLAECGARVHLAHPLAIKAFEHRRVKNDRIDATLLAELLRMGRLPEAWIAPVPVRELRELVRYRHKLVDIRSGLKSQVHAVLAKEGVRVPMSDVFGVAGTQLLDDLELGDAYLVRVESLRDLIINIDHEVLMLDRRIHERLATNPSYRAVQQIPGVGPVIGAVFVAELGDVTRFRHANQVASWAGLTPRHRESDTKIRRGQITKQGSRLVRWAAIEAARAPRAHSWLKTHYHHLAQRRGKNIAAVAIARKIVTLAFYALRDGELRCLTRTA

SEQ ID NO: 151544 - protein, 361 aa, unidentified
MTNHRTLQPDARKVIVGVDTHKHVHVAVAIDTWGIRLDDRSCAADSDGYQQLITWAERHGRIAACGIEGTGSYGAGLARAVRRAGHQVLEVNRGDRRTRRIAGKCDTVDAETAARSVLAGQSTAIPKTADGAVEMMRHLKVARRTAVKARTSAMITLKQIVVTAPPELRETLHPLADQALLKRCRGWRCGTIDTPTASAKHTLRALARRWFALSDEIVDHDRHLGRLTTQTSPTLREGFGIGADTAAEMLIIFGDNPDRIHSEAAFAKLCGACPIPASSGMTTGRHRLYRGGHRQANAALHRAVIVRMRYHAPTLNYVERRTAEGRPKREIIRCLKRFLAREIFQRVMADSRARQAADLAA

SEQ ID NO: 151545 - protein, 355 aa, unidentified
MSSEKYIGLDVHQATISVAVMDSQGKVVMESILETKASRLLEFFAGLRGSLFVTFEEGTWAAWLYDLLKPHVTEVLVCNPRKIPLLKQGNKSDKIDARKLAERLRLHDLKPVHHGETGIRMLRELARSYLTIVKDLSRVMNRLKALYRSWAIPCAGRDVYYTRHRSQWLEKIPEAGTRRRAEQLYQQLDMLQHLRQQARRELLAESRQHAITAKLRQIPSLGPIRSALAVALIQTPHRFRSKRQLWTYSGLGLETRDSGEYHFVQGQVRRRKKQATIRGLNKDYNHDLKGLFQGAATRASVKPGPFQEFYQRSLAKGIKPTMVRLTLARKIAAITLTLWKKGEDFDIAKLKSQAA

SEQ ID NO: 151546 - protein, 408 aa, unidentified
MSESMALVGLDVHQAQTVAAVLDPLTGELRVERLRGEPAMVVPVFLEELDRPVRAVYEAGPTGFALARVAEERGLDVRVVAPGSIPRAPGDRVKTDRRDAKRLVRLFAAGELSYAFVPSETDEHFRDLVRCIEDARKDLMRSRHRLSKFLLRRGHRFPCKAWTQPHEQWLGKLSFEDAISQATFVDYLCAVQGLVQRRRVLIDALEVAVPESSHAQTVARLRCFRGIDTLTAAGLSAEIGDFTRFAKPALLSGFLGVVPSEHTSDEKRTQGQITKAGPPHARRLLVEAAHHYRHQPAVRLGLQPGRPGPSCRSDRVALPATTARALDAPRGHPRQAHRNRRDRLRTRARRVLLGGRDPELTPRRHTHCSGGCRGAHEQQKAVTSPLNGPANTGYGQPARFHPAGGARS

SEQ ID NO: 151547 - protein, 353 aa, unidentified
MSDRSFSRWFNTEVNRTSTNKVMQFSHYIGVDISKSTLDAAIYASEMKKADTKHVTNDAAGLKELMSWAKTNGVKPKTMVVCAEHTGVYGNALQLFCEKKGISLCLESPLQIKRSMGLVRGKNDQIDAIRIAQYAYDHREKLELFHRPSVNITTLSNLLRERRLYVRQKATLTATQGELGQYETSQSRSRRDCLIDKLSSMTKAIEKQMIDIINKDEDLKRTYDLITSVVGIGPITAIDTIVYTNNFQNFSTPRQYASFIGVAPFDHTSGTSVNGRTRVSQFCRKQQKTSITMAARSAIVNDPWMKNYYRRKMKEKGEQRNQHGVVLNAVKFKLILRMFSVVKSGTPYKVMNY

SEQ ID NO: 151548 - protein, 320 aa, unidentified
MVKMRQYTPSFAGIDVSKAHLDVHLHPAGSHRRFDNDKTGWRALGGWLANADLEGVVYEATGRYHKGLERYLGERGFPIARLDPRRARRFAEALGVNAKTDPVDARVLAQFGAFLEPAVTPLLEPVLEQLKELVAARRGLVRQGTRVANKSKTVTSRLLKRQLRQSGKQVIRQITQIDMECRKIATTDPILAQRLAILMSIPAIGDVTAMTLLAEMPELGTLNDKQAASLMGVAPVARDSGAFRGKRHIRGGRGQVRQAVYMAALVATRFNVDMKRKYQTLIKNGKPPKVALTAVMRKIIILANALIRDNRPWTEFKPCP

SEQ ID NO: 151549 - protein, 398 aa, unidentified
MARKNTLKSLPTDTEFRVVGLDLAKSDVSVAAIPVDDNTPSLVDRMTYADLLDWAGKISPTLFAMEPCNGYSLLCLQLENLGHEIKVISGSTVSMWINTHLSGQKTDLNDAIALARLAVSDAELTPIRHKSITEIRIQTVQAVRQQLMSQRSKSIVSFKALAQQWGIPCAAGHRNLKKLRESIEAKVDLITRPVANAMLFLLDAVKSLDRQIGQLNQTLQELVMSDERGRLLQSVLGVGTQISARVITVVGNVERFNSPRSLVAYVGVAPRNFITGHKNLTKKKHGNCPDLSHKGQGKISRRGDKLLRSLFIQGAACLYMQFCKDQLPECQLKRWILKQLASQKPYGKLIVSLAAKLIRIVWAVLTYREKFNIQKAGMTRSMWSEMALETPLNKEVPA

SEQ ID NO: 151550 - protein, 421 aa, unidentified
MEFERVDYAAWIGLDWGSDKHALCLQAADRSPVECCTLEQKPEVLHHWFMSLQARFDGRKVAVAIEQTRGAVIHFLLGLDFVHIFRIHPKSLKNYRDALHPSGAKDDPTDAQLLLQFVLLHQDKLQAWVPDEPEIRLLLRLVEFRRKIVGKRVRLTNELTQMLKEYFPAALHCAGDLDMVMACDFLAKWPTLEKLQKSRPETIRKFYQMHGSRRSKVIENRLRQIRAALPLTTDAPVIESSVFMVKSLAPQLHLLIEAVTQFDQRIKEVFQKQRDAQIFSSFPGAGAALAPRLLAAMGSDRSRFSSSVEVAEYSGIAPVTERSGKSKWVHRRFACSHFVKQSFHEFAAQSILYCDWARGYYDRKRTEGKRHHAAVRALAYRWIRIIYRCWKDRISYDEDKYVKALRSRKPDLPHSSTPSVS

SEQ ID NO: 151551 - protein, 373 aa, unidentified
MNQDTTYVAFDTSKETLAVAIAESGRRREVRFFGTIASRPEAVRKLVEKLARQHRRLAFCYEAGPTGYGLYRQIRAMGHDCQVVAPSMVPVRPGGHIKTDRRDATTLAALFRAGELTAIWVPDAAHEAMRDLSRGRQAAMEGLRRARQQLLSFLLRPGRAYPTRSHWTRAHRRWLAEQRFEHAAQQIVFEELIQAVDQAQSRRDRLEQQMVALLPSWSLRGVVAALQALRGVASLSAITLMAEIGDFRRFANPRALMAWLGLVPREHSSGATTLRGAITKAGNRRARRVLVEGAWTYRLPARVGLELLRRNRALPETIKAVAWKAQVRLCARYRRLLRAGKPTNVVTVAIARELAAFVWAIATTVMPPFEPTA

SEQ ID NO: 151552 - protein, 339 aa, unidentified
MKHTVVGVDIAKRVFQLHWVDMETGEIVSLQLKREKFLEHFANRAQCLVGMEACGGSQHWARKLQGMGHQVKLLSGKAVKPFVGGNKSDAHDARAIWTAAQQPGLKAVAVKSEEQQAVLALHRIRQQLVKFRTAQINGLRGLLTEYGEVMAQGKSGVRKGIAEALQRLSDRLPAMVIDTLREQYDRIGKLDKQVAEIERRLKVWHKEDQASRRIADIPGVGLLSATAAVATMGDAKAFKSGREFAAWLGLVPRQSGTGGRIRLLGISKRGDTYLRTLLIHGARSVLTHAKEPEPWITELRRRRPLNVAVVALANKMARTIWALLAHERAYQKGFVSQPV

SEQ ID NO: 151553 - protein, 343 aa, unidentified
MELYVGMDVSLKETSICVVDGSGKIVSEGTVISEPAAIAAFIEAKAVGALRIGLETGPTTTWLWHELRALGLPVICIDARHAKAALSMQINKSDRNDAVGLARIMQCGWYKEVQVKSVSCHELRAVLSSRAQLVKIKCDLENQIRGLLKNLGLIIGKAGGTVFTRRVEELLGRHGLLWEAVRPLLEVREKVRREIAGLYRKLLGLARDDVDSRRSMTVPGIGPITALAFYAAVDDPTRFRRSRSVGAYFGLTPRRYASGEVDWSGRISKSGDRMLRTYLFEAAGVLLTRVAHWCKLKAWGHRLWKRIGFKKAKIAVARKLAVLLHRMWRDGADFIWSSKEAAA

SEQ ID NO: 151554 - protein, 363 aa, unidentified
MKKLTIAATNWMEQQGLTIGLDLGDRSSHYCVLDESGRIVVESKTATSPKAMEAVFGGMTGSRIALETGMHSPWVSRLLSQLGHEVIVAHARNVRLIGESRKKDDRLDAQTLARLARIDSELLCPVKHRSAKAQADLSLIRARAGLVRARTALVNTARGLAKSYGQRLRGCNVRNMNPEKAEALSPELQAALQPLLAGIEAVSEQIVEYNERIEKLAQQNYPEVKLLKQVKGVGTLIALTFLLTLEDPHRFGKSRDVGCYLGLQPGRRNSGQSEPQMHISKEGDPYLRTLLVQGAQHILGPFGPDCDLRRWGLKLAERGGRNGKKRAIIATARKLAVLLHHLWVSGEVYEPLHKNRTAIAVAA

SEQ ID NO: 151555 - protein, 391 aa, unidentified
MSMYFVGIDISKYKHDCCIISAADQQIVSKFTVKNDKDGFEHLLTTLNSLSNPEDIKIGFESTAHYALNLELFLENAHHSFMEVNPVLIKEYKKSTTLRRTKTDSVDCESIARWLMTVEYKPHSKGFYHSYSLKSLTRLRDRLIRQRSFYLVKITNVLDHTFPEFKHFFNERLSKTAIYLLENYGSAEKMAHMNSASYDKLRCASRGKFSIQQFLRLKELAANTVGVNNSIFDIELNSLLTLYNSLCKEIKTLEAEITKLIEEVHPHYMSIPGIGPISAAVIYAEYGDISNFSNPGQMLAFAGIEPGINDSGTESHGGRMVKHGSSQLRYVLLNACLPLIRFDITFATYYAKKRAEGKKHRVAITHVAKKLIRVIYALERQDVDFNVQKLR

SEQ ID NO: 151556 - protein, 413 aa, unidentified
MGVVRWSGRAIGLDVHREFCEVAICEDGVVRSAGRVKTTPEALRVLAGSLIATDRVALEVTGGAWEVARILEPHAERVIVVSPDDTGIAQARAKTDKLDSRTLARLLASGELDAVWMPDERCRVLRRRLARREQLVRSRSRAKNEVHAVLMRRLQGKPPCSDLFGVKGRKWLRSLELPEEETETVRGAIRHIEFLDREIVAVERLIAASMLRSQDARRLLTVPGVNLIAAGTFLAAIGDITRFRNARALVAYLGLDPKVRQSGEEPARSGRISKRGSAAARWALVEATWSVVKQPGPLRAFYQRIRARRGHGRAIVAAARKLAMLFWCLLSRGEDYAHQQPSLTAKKLRRLELAAGASVLKGRPTGVWVTNEKMRAAERQLAEQAEASYQRAVRDWQAATPTKVGASVTPGHA

SEQ ID NO: 151557 - protein, 331 aa, unidentified
MDIKEVIGIDVGKKVNEARIHTNQKIFEFENNISGFRVFEKWVMKNVECQKNEILFAFEHTGLYSYPISVYFSEKEYLYVVIPGLELKRSTGIARGKDDKIDAKRIAIYAYEKRNSLKFYKLPQEEIIQIKRLLSLREKLVKQRAGYKGTLGEYKAFFKRKNNKMLFDVHERMINELSKQIKKLEKKLDDIVNNDQQMKQMYELIISIKGVGSQTALFLIVYTEKFTKFDSWRKFASYCGIAPFPNRSGISIRGRTKVSNLANKKIKSLLDLCAKTSIQYNPEMKLYYEKRVKQGKPKMSTINIIRNKILSRIFAVVQRGTPYVDTMRYLS

SEQ ID NO: 151558 - protein, 338 aa, unidentified
MQTYAAIDLHSNNGLLVVADETDRVLRQKKLANKLELFVAELEPFRSTLQGVAVESTFNWYWLVDGLLKHGFPVMLVNTAAIQQYEGLKYTDDPYDARWLAHMMRLGILRTGYIYPREERAVRDLLRKRASLVQQRTANILSVQNLEQRNRGTKISSREVKQLTEERIGELYDNEDLGLALTTTIKVIEALTEQIRCLEKAVLKKARLRDEFKLLLTVWGVGDILGLTIMYEAGDMSRFADVGPFASYCRCVQAQRLSNGKKKGENNGKNGNRYLAWAFVEAAHYAIRYYPEAKRFYDRKAARTLPVVAIKAIAHKLARASYHVLRDQKPFDPKKVFS

SEQ ID NO: 151559 - protein, 350 aa, unidentified
MVVVGADVHKRTHTFVAVDEVGRRLGEKVVKATTEGHRQAVQWARNQFGAELVWAIEDCRHLSARLERDLLTADQKVVRVPPKMMAYARASARTRGKSDPIDALAVARAYLREPDLPVASHDEISRELKLLVDRREDLVVQRTATINRLLWRVHELDPDRAPKRASLDRAKHRKLLSDWLDTLDGLVAELARDELSDITRLTEQINVLATRIGERVRDVAPVLLAMPGCGELTAAKLVGEAAGVSRFKSEAAFARHAGVAPIPVWSGNTAGRVRMTRSGNRQLNAALHRIAVTQIRLDGLGQTYYRHRINTGDSKTEALRCLKRRLARVVFGHLHTDHNNRTQPCQPAAA

SEQ ID NO: 151560 - protein, 430 aa, unidentified
MEEVNEQELHVERVAALDLGKAALEACVRVPHASKPGRRLQEVRGYATTTAALLALADWLHSLGVTRVVMESTSDYWKGVYWLLEAEGFECWLVNARDVKNVPGRPKTDKADAIWLAKVAERGMCRPSLVHPRPIRQLRDLTRYRRSLIQDRTREMQRVEKLLEDAQIKLSSVATDIFGASGRAMLEALIAGQRDPKVLAQLARRRLRAKIAALEEALRGFFSDHHAVILRMMLDSIDRLSEQIAALDTTLEEAVAPFASKVAQLDEVTGVGVTAAQELIAEVGVDMARFASAAHLVSWAKFCPQTHESAGKKKPKGRGRGNPWLAGTLGNIVATAARTDTFLGARYRRIAKRRGKQKAMVATGNSVLVIVYHLLSDPEARFSDLGAEHYDARIDKQRRARNLAAQLQAVTGQRIVIRDGKAVIVQPEAA

SEQ ID NO: 151561 - protein, 394 aa, unidentified
MRFVGIDVGAERHVVASVDAAQAVGLKPTGFTEDVAGYHQLLTLLGPATDTLVAMEATGHYWKNVFAVLVAQGFAVALLNPLRTRRFAAEDLQRTKTDAIDALGIARFAAQKRPAASRLPDPATEELRERLRYRDRLSQDFGDRERQLHRLLDLGFPEFPRQVRDVGSELATAILRAYPTAAAFQGVTVRRLGGLRYAGGQKVGAALAATLLEAAAASVGQHHGAAYRVQVQDICEDLDVLRRRLRTLDRDIEGLLARHEIGTLLTTIEGIGPQTAARLVATFGDFSGMRSGAALACYVGVIPGLRQSGKRTASRASLTPIGAARLRAKLYMPVLSAVRYNPWLRAYYEGLIARGKLPKVALIAAMRKLLHAVYSVATHRRPFVPHVVAQEARP

SEQ ID NO: 151562 - protein, 401 aa, unidentified
MTATHTTNSTVFHAPVLYLALDLGASSWKLAFSVALGQKPRLKTITARSTLSLVLEIRAAKKRFGLPEDAPVVCCYEAGRDGFWLHRFLLAEGIQNQVVDSSSIEVNRRRRRAKSDSLDAVKLVEMLIRWYNGERKVWSTVHVPTVEQEDQRQLHREMLKLKAERTAQGNSIKGLLAGLGLCVIVDETLPTQMQNLRQWDGAKLPPLLHQRLLREFQRWQLIDCQIRELEAERMATIRDDKTPHVEKVRRLLNLKGIGDNGAWLLVYEFFAWRMIKNRRELASLAGLTPTPYASGESQREQGISKSGNRRVRFMITELAWGWLRYQPESELSQWYMRRFGHGNKRLRKVGIMALARKLLIALWKYVEGGAAPAGAEELGWDNKPRFRAAKSRRKQEALQAG

SEQ ID NO: 151563 - protein, 455 aa, unidentified
MAQGSGLTRGDRNRNRRVDALRSAVRLDRAVLAIDLGEDKQVAVVLDHEGRALARRVVKAKAHQLGGLLGWASERAVKAGFSGLTVACEPTGHRWKALMGLADSAGHGFVCVQSLAVARAREGDDYTRDKTDHRDAYLIGRLVIRLDCYLPERADEDWARLRHLGARRLAQVTDVTSCMQQAGDLLGCAWPEPLSAARRPLESVTWLAGMAVITGRCCGQPSRLRRMGYEKFLAAVRRELPRWGGKFVRHSIVKALWEALAGTGGVAAQRPGALERLHLLLEDWRVLRARLADTEERMTGLLDELGLTALVTSIDGVSALSGAVMLAEAGDLSRFTSGRAVVKHAGLNPSEHTSATINGQTRISRRGRPALRSAAWRAVWGALRHNKVLAAKHARWTGRDGNRLADGQARTACAATLLRWLWAVITTRTMWDARIAAGEIPVPCRAAAETIAAAA

SEQ ID NO: 151564 - protein, 364 aa, unidentified
MANPTTRVIGGIDTHKQTHYAAAIDDQGRLLGHREFPARAQGYRDLLAWLRSHGQILTIGVEGTGNFGAALTRHLSAAGEQVLEVNKPNHQARHMDGKSDRLDSEQIARAVLAETGIATPKSKAGPVEVIRTLRVARASAIRARTQAFNLLFHTMISGPSEVRDGLVDLTRRTLVNRCLALEPETENLLDLIVTPDRMVVSSVRFTLRDLARRWKTLDAEVKELSGQIKQLVEHVAPKLVEVFGVSTELAGQFLVTAGDNPERIRNEAAFAKLCGVSPKPASSGRTSGRHRLNRGGDRAANSALYIVTIVRLRHHQPTREYVERRTAEGLTKREIIRCLKRYIVREVFAALPRSEAQIEIDRAA

SEQ ID NO: 151565 - protein, 343 aa, unidentified
MHLPYHFIGLDVHKKSVAFCEMRADGKRIDSGTFSTRQTAIAQWAAQRTQPWIGGMEATLFSGYLYDMLTPHAVEIQVGHPARIKAISTAKHKNDAADAETLANLLRADLFPECHMASKRVRELRRVLRYRNFLVRQAVRMKNKTTGILMETGVEYNAKKIHRQRYFNELLDNLEDVPNSVRELLRMTRSNLEIFQAAQKKLLDALVKLPELRARVERLMTIDGVGEITALTWTLEIDDPWRFANLKQAQSYCGLCSGQHESAGKNKNGPLSKQRNGNLQTILIEAAKLAPRWNAQLRDVHARAMEQEKNHNRATCAVARKLVAYLMAVDKSGKPYEDRSSEE

SEQ ID NO: 151566 - protein, 417 aa, unidentified
MKKDNNSAKKSEPTSKRGKSRGPEQRDAKEVMAEVLEKLTGKLDAPTVSTSAQENRRGSTVRPNLDRLTVGVDLGDRWSQYCILGLEGETLAEGQLRTTQEEVREFFQALTVARVVIEVGTHSAWVQDVITEWGHEVLVANPRLMEGSKRRKRKSDRIDANKLARLGRVDPQSLYPIRHRSREVRQDLVVLRARDALVSVRTELINTTRGLVKSMGTRLPGCSSPSFAEKVKDAIPVEVREALLPLVQLTETVNDCIARYDQRIEELGQKKYGYTTLLRQVKGVGPITSLAYVLTLEDPQRFSSSREVGPYLGLVPKQEDSGDCQPQLGISKAGDRMLRRLLVGSSQYMLGAFGPDSDLRRYGLRLCERGGKNAKKRAVVAVARKLAVLLHHLWVTGDVYEPLHHTGAETRTAPAAA

SEQ ID NO: 151567 - protein, 334 aa, unidentified
MENIALIGIDLGKNSFHIHCQDRRGKAVYRKKFTRSKLIEFLATCPATTIAMEACGGSHFMARKLEELGHFPKLISPQFVRPFVKSNKNDFVDAEAICEAASRPSMRFVQPRTESQQAMRALHRVRESLVQDKVKTTNQMHAFLLEFGISVPRGSAVISRLSTILEDNNLPLYLSQLLLKLQQHYHYLVEQIKELESQLKRKLDEDEVGQRLLSIPCVGTLTASTISTEIGDGKQYASSRDFAAATGLVPRQYSTGGRTTLLGISKRGNKKIRILLVQCARVFIQKLEHQSGRLADWVRELLCRKSNFVVTCALANKLARIAWALTTRQQTYEA

SEQ ID NO: 151568 - protein, 313 aa, unidentified
MTPCGVGIDVSKATLDVAWSTDPTARWQTTNDAAGWTALVAHVRARPPTIIVLEATGGYEIGAATALSMAPLPVAIVNPRQVRDFAKALGLLEKTDAIDAAVLALFAARIPPTPRPLPDDLQADLHALVTRRRQLVDMLTAERNRVPLARGAVRKNVLAHIAWLEKQLGKTDRELRTQIEASPIWRTRDQLLQSVPGIGPATSARLLASLPELGTLSHRQISKLVGVAPLPDDSGRRSGYRRVQGGRGDVRSALYMATVTAITHNPTIRAAYRRWRAAGKLPTVALVAAMHKLLIHLNAMLKQQTLWHPPAMA

SEQ ID NO: 151569 - protein, 403 aa, unidentified
MAVAASRERSWVGVDIGKTHHWVCALDADGNTLLSVKVMNDEAEIRSLIATVTGLAEQLVWAVDIIGAPSALILALLAQAHQSVRYASGRVVAAMSSAYTGEGKTDTKDAYVIAETARLRRDLGVIDQDTDLVRNLAVLTGHRADLIADRVRMINRLRDLMTSVFPSLEREFDYSSCKGALVLLTGYASPERIRRIGQTRLAGWLRQRKVRSYADVAARAVTAARAQVTVLPGQDLTASILAELATNILSLDARLKSLDAQIADNFNQHPQATVIQSMPGFGPILGASLLVAAGDLQAFPSAGHLAAAAGLVPVPNDSGRRSGNLHRPKRYSRPLRHVFYLSAQTSMMRAGPNREYYRKKRDHGSTHSQAVIALARRRVDVLWALLRENRTWTTAPPTLARAA

SEQ ID NO: 151570 - protein, 412 aa, unidentified
MEVLVERAAALDVHKARVTVCSRTPGVAGEREEQVETFSTTVRGLLVLADWLEAQRVTQVAMEATGVYWKPVWAVLEDRFDLVLVNAHHVKNVPGRKTDVGDAQWLCRLVEAGLLRPSLVPPKPVRALRNLTRYRKTQIQDRQREANRLHKILEDTGIKLDCVASDILGASGRAMLDALVAGTTDPDVLADLARGKLRTKIPGLREALEGRFDRQHALIVGHILAHLDYLDEAIAQLSQEIEEQLRPFAPAVDLLCSIPGVQRRTAEVIIAETGGDMTAFPTAKHLASWAGMCPGNHQSAGRRGAGTTRKGSKWLRAALAEAALAAARTKHTYLAAQYRRLSARRGPRKAATAVGHSILVACWHMLQTGQLYNDPGGDWYLRRDPARHTRRLVTQLEHLGHHVTLHQPAATG

SEQ ID NO: 151571 - protein, 358 aa, unidentified
MNRNTGMNAGQIIGTMGGKQVIGLDIAKHVFQLHTVNMGTGEIINVQIKRAKVLEHFVNMPQCLIAIEACGGAHHWARELTAQGHSVRLLHAKIVRPFVSGNKTDATDARAIWLAVQQPGVKLVGVKTAAQQATLTLHRQRELMMKMRTMQTNALRGLLYEFGATFAKGRKALFQDVEQTLEDLSTQLPQMVRDSLREQVARIKAISEDMPAIEKRLGLQLKADPQMQRIAQVPGVGLLTATAAIATMGEPSAFKSGREFCAWLGLVPKQTGTGGKVRLGGISKRGDTYLRTLLIHGARSVLAHAKEPGPWLEQIKTRRPVNVVIVAQAAKMARTIWAVTAKEQSYQRGFKSVRPQTV

SEQ ID NO: 151572 - protein, 343 aa, unidentified
MEHYVGIDVSLESASICVVDGSGRIVREAKVASEPEVLISWFGGLGIAVARIGLEAGPLSQWLYAGMRDVGLPVELLETRHVRAAFKAMPVKTDRKDARGIAQLMRLGWFRPVHCKSLPAQEVRALLAARKLLQTKNHDVEMSLRGVLRGFGLKVGPTTPRTFATRIRELVAGHTTLSTIAEALLAARGTLFEQWQKLEKRVRSLAREDRRVRLLMTAPGVGPIVGLTYASAVDDPGRFRSSKAVGAHFGLTPKKYQSGETDVTGRISKIGDGGVRTALYEAANVILTRPVKGSSLKSWGMRLAARAGMRKAKVALARKLAVVLHRMLADGTTFLAGKAAVAR

SEQ ID NO: 151573 - protein, 430 aa, unidentified
MTKRNPTPPNAVLVAIDMSKHRQEVLIERPEGGRRRRMTVMATKTDYDRLASDLADIGRPVVIGFETTGNYHRTLAHRLLSAGFELRLISSVALARTREALHNGWDKNDSKDAQVILHMLQIGATQRYVDPLAAGINDLQEMSKTHEAISKAKTQTWHRILTHYLPLYFPEIERFAGNSRSDWFLALLERFPTPGSMTRLGQEDFTREAWTLVGRKVSKARLINDIYETACASVALPVDEDSVSITMFRMVIAQARSLIRQRDEIERTAHAMLSENRDYQLLRMIPGIGPINALTILAEAGDLRRFAHHRQFLKFCGLDLATCQSGTFRGRTKLSKYGNARLRRTFWMATQVAIRQRDNSFRDKLGRYVAGHANDPDRRRKAMTALTAKMARVAHAVIKTGTEYRPFLERADTRWKDPSLWSREGAAATL

SEQ ID NO: 151574 - protein, 414 aa, unidentified
MAEEETVSWFAGVDWGSERHQVCLLDAQGTTVGEREFPHSGEGLAELGDWLLSMASAASTVAVAIEVPHGPVVDALIDRGFVVYSINPKQLDRLRDRFSVAGAKDDRRDAYVQADGLRTDQRLFRRLQVADPRLIELRAWSRLAEELGAERVRLSNRMRHQLWRYYPQMLKLTKDLAAPWFLELWAIASTPAKAGRLRKSTVERLLKQYRIRRMDAETVLRILREPAIKVAQGVAEAASIHIRSLVARLRTVNRELREAERKLDELCTAVSEIEQTSGESLQRRDVAILRSMPGIGRINLGTLLSEASGPLSRRDYEGLRTLSGAAPVTKRSGKSLIVVRRYAAHVRLRDTVYHWARVATQRDPKCRTRYTALRKRGHSHGRALRGVADRLLALACVLLQRQTLFDPYFGRSTT

SEQ ID NO: 151575 - protein, 428 aa, unidentified
METPIANRDQRLESLRREPSAGCSKGREIGERGMEVAVDKVWVGIDAGKGFHWAHVLDSSGRELLSRKLENDEAGISEFVGKVVPLAREVVWAVDQPGGSAALLLALLWERGQGVLYVPGLSVNRASDAYRGESKTDARDARVIADQARMRSDLGELKPGEEELAELGILLGRRRDLLVDQNRTITRLGEALLSLSPALERTLDLNRKGPLTLLTRYQSPQRLRRAGHKRIAAYLRARGVKGFDSVAGKALAAAKSQSISLPAEQVAAHIVAELAAEILVLKDRIEEIDEEIERRFFDRPEAEILASLPGMGPLLGAEFLVAIGDLSAFDSADHLAAYAGLVPTANDSGKRVGNNRRMRGGNKNLKRVFYQSAFASLRSSPESRAFYDRKRTEGKRHVQALIALARRRVNVVWAMLRDGTTFEARTAA

SEQ ID NO: 151576 - protein, 297 aa, unidentified
MNYNTVYVGMDVHKETFSLCCYTNEKEQSEYPQKVDAHYSKVLNYLEAMRFHYGDDVMFICGYEAGCLGFMLYHQLTSHNVKCIILAPTTMSKPTGKKKVKTDKRDAALIARCLAHHDYSPVHILTEQDEQVKEYIRMRQDHKLALKKIKQQILAFCLRHNYRYDTTKSHWTQAHLTWLRSLAPEGLYQEILTEYLVTYDQLTDKLERLDQRIEELASKEDYQENVSHLSCFLGVKTQTALSTLVEVSDFKRFASAQQFASYLGLTPGEDSSSGDQNRLGITKAGNSHIRTLLVEAA

SEQ ID NO: 151577 - protein, 422 aa, unidentified
MRRIMFPVCCGIDVHKNKLSCCIVIAHQITDEPVYHFREFSCHQPDLVKLVNWLNKFNCHDVCMESTGKYWIPVFNHLENSGIHAIITHPKYVRSRDGKKTDHNDSSSIADAFQLGQASPSFVPSKEWRQLRDLSRYRFKITCMIASEKNRVQNCQTMSNITLASVVSDPFGVSASDIFAELLTSSEVDETRIRSLLHGRLRKKHKEIMDSIQGYRLESDQSLKALLALNHIQYLDDIKDTVTKEMLNRLKPYQAFIKLACSMPGIGTDSSLTILSETGTDMSIFPSASHFASWIGLSPRSRESNNKKKSVRINHAGTYLKPLLVQCALAAIKSNKDPYFRIKYNKIKKRRGHKRAIIAIARMMAICLYHMFKTGEPFNPSDYEELRNPRPMKPEKDDLQAALELIRSTGQYTITSIEQAAQ

SEQ ID NO: 151578 - protein, 347 aa, unidentified
MTSPLKYAVGLDMAKNKFDACLASIDPTQKVTIKSSKSSVGNTLKGFAEMESWMKKHTAVDVPIVFCLEATGIYYEPLAWYLHEHGYSVSVLLPNKARHYIQSLGLKSKNDKIDAKGLSIMAVQQQLKLWQPVSTQIYRLRQLTRFYQQLQESRTMYRNQLMSFEYSRLQNETVIDPLKEIISFIEVQIKEISIAIEQALREDPLLWKKAENIATIKGLGTISIATVIAETNGFELFENLSQLVSYSGYDVVQNQSGNRVGKTKISKKGNNHIRRILFMPAFNVVKFKVNPFLNLYNRVYERTKLKMKAYTAVQRKLLILIYTLWKRNEAFRNDIHPEMGTRLLSFR

SEQ ID NO: 151579 - protein, 316 aa, unidentified
MGYEDGKTFLWWIDVSKDRLDVVVLPEERFFSVSNDAAGWAELVARIRPLAVSAIGIEPSGGYERGIIRALLAAGLSVRRINPNKLRQFARARGVLAKNDRLDARLIAEYVAIMPTRVVQRDEAVEKLAEVVTMRRQLRDEHVTVENQAAHIEDAMLRRLNKRRLARLEADTRLLDKRLAEMVATNAALAQRYELLTSMPGVGPVLAFTLIALLPELGQMSRKQIAALVGLAPYDFDSGKLRGHRSIYGGRMPVRNVLYMAALSGCRHNPALKAFHKRLAAADKKSKVVIVAVMRKMITTLNAMLRDNVEWQPKSA

SEQ ID NO: 151580 - protein, 403 aa, unidentified
MFYGLDVHKSFIQVCRINGQGRERCDFRIDADHDAISRFAQSLKDSDTLVLEATFHSWAIWSLLQDCGARVVVANPLQVKAIAHARIKTDKVDAHILAQLLRADFIPEVTMPEAKTWELRQLVTHRRLFAKHRTATRNAICGIVHRKLLKAPMKELFGPSGRRWLLAQDYTPLERMMLENNLAHLDAINERIKTVDTTLREIASLERDVKLLMTIPGVNVTVAIGLVSAIGDVRRFASPDKLAAYFGLVPRVYQSAETCHHGPITKQGRSQGRWLAVEAAQSMVVCGAPLTATYHRVRRKKSHNVAVVALARKLVVVVWHLLTHQEPYRYAPTRRTRAKLRRVSPDVAPAKVGCIPDTLEAIYAEVGLPPMSSASAAEKRAAANSRRTITRHRKAHAKAAGHA

SEQ ID NO: 151581 - protein, 359 aa, unidentified
MQTQRKELNFEGQNIFVGIDVHLKSWNVSIYTEHQYHKTFTQPPNAETLSKYLKLNFPNAIYNSVYEAGFSGLHAHYELTNLGINNIVTNPVDVPTTDKEKRRKTDKVDSSKLARSLRSKDLKGIYTPSQDILEDRSFVRVRKSIVNDQSSLKNRLKSVLYFYGIEFPVEFQKSSTHWSNRFMVWLKTVQLKTNSGNMALAVLIKEAELLRTLLLEVDKELKGLSITDKYAKSMELIRSVPGVGLITGMLFLSEIDTIKRFENNDKFAGMIGIVPDCHSSGENEQIGEITPRRHVHLRSGLIESSWIAIRIDPALSKAFSDYCKRMEPNKAIIRIARKLSNRIYFVLKNEKKYETRIVK

SEQ ID NO: 151582 - protein, 350 aa, unidentified
MIIIGCDYHPGFQQIAYVDTETGELQERALQHREEAEKFYRELAAQGLKVRVGMEASGHARWFERLLAELNFELWIGDAAEIRRKRERKQKTDRQDAQHILKLMLKDDFPQIWVPSGENRDLRQLLWHRHRMVQARTRMMNQLQAVALNEGLRCKKRLWREAGRKQLEGFRLAPWASRRRKDLLELLDRLNPTIAELTQTIEREVEKCPEARRLQTHPGVGPLTALAFVLIIGQADRFQCGKQIASYLGLVPLEDSSGSRRRLGHITKQGNSLLRFLLVEAAQVTVRSDPGWRSKYHHLKMRRGRKIAKVAMARRLAVRMYWMMRKEWNYEQLNKFGSHAGQLGTGDGVK

SEQ ID NO: 151583 - protein, 453 aa, unidentified
MSKQRKTATQARPIQRKHAAGIDIGATSIYVAVPLDRDPQPVRSFQTFTEDLHRLADWLQRCRIKTVAMESTGVFWVPLFQILEQRGFEVCLVNAHHVKNVPGRKTDVSDCQWLQYLHSVGLLQASFRPAQQVCALRSLLRHRDSLVQTASTYAQRMQKALDQMNLQLHHVISDITGVSGIAILEGILNGERDPRKLAGLRDYRIKASEETVAKSLVGDYRPEHLFTLRQSLDAWRYHRKLIADCDDEVQRHLAQFTSKADPKEKPLPRARKVSSSKVYSSQPDYDLRTEHYRILGVDLTEIPGINTLLVQTLLAEVGPDLSKFRSAAAFASWLGLCPDNRVSGGKILSVRTRHVQNRAALALRIAAHTLHHNQSALGHYYRRMRAKLGAPKAITATAHKLARVLYHLLTAGQPYQESVFTEREAQHQQRNLFKLHARARALGYQLIPIAASA

SEQ ID NO: 151584 - protein, 341 aa, unidentified
MSESALIGIGLGKHSFHLHGQDKSGREVFRKKCSRPQMMRLFGNLPTCTVVMEACAGAHFVARQLMAMGHEAKLISPQFVRPFVKGNKNDFVDAEAICEAASRPSMRFVPAKTEAQQILSVLHRLRESLVRDRTKTTNQMHGFLLEFGISLPKGSAIMKRLVSILAEHELPVRLTVLLQRLHDHFVYLDEQIKELDKELAGQLADDDLGSRLLSMPCVGPITASLLAVEIGDGQQFACSRDFAASVGLVPRQYSTGGKANLLGISKRGDKNLRRLLVQCARVYLLRLDYQHGALADWVRSLLSRRHSNVVACALANKLARIAWVIAAHHVEFETGPGALVA

SEQ ID NO: 151585 - protein, 485 aa, unidentified
MLWQRSEVEREQSMANRTILPSDLNALPMLPHESIYIGVDIGKFKHVAGFVSKTLLERHQHFEHCPAFLFEQSREGFRAFVERIRIYCPLEQCFIVMEQTGHYHRPLLQYLLELDLPVYVMHVQSRQGGMLKTDKRDALGLANHLYNQLALGVQVENKLQVVRRAVPPSEAALQLKGLMRHRYELATEATQRKNKLTAICDELFPELTQVLKDPNLIIALDLREKFPTPYAVATASLVALREVRRGNCPSEVQLEQLQSLAAQSIGTKNVARQRGLVLEQGLLIKELRLIQEHTQRLDMEVAQIVEHSREGQILLSIPPIYTIYAAAILATIGHIANFEDAGHLKSYFGWAPKRAQTGISFDRVSLTKGGSREMKKVMYLVAWNAIKDETEWASLYKRLVPRLCSYDERTQAYKGRRKAVSHVIGRLITLIYALLKQDDETLSHLAPGTPPPDPVLYDPELHKRHRTGHYQPLKKKLPENRIVQV

SEQ ID NO: 151586 - protein, 435 aa, unidentified
MKRIRKNASGIDIGAKKVFVALENQPVVSYFTFTEDFETLRDYLLENKIESVAMEATGVYWVILYAILEESGIDVWLVDGRETKQVPGRKTDIKDCQWILQLHCYGLLNRCFVADPDIKELRSYMRLREDHIRSASMHINHMQKALTEMNIRLKEVLSQIQGKSGLTIIEAILAGERDKDVLVNLCHGSILKNKKELILKSLQGRYSSTGLFALKQAYEAYLFYNNQIKECDSQVNRVVNRMGDYGNEQLETRSRKPIRHHKPKIEKFGSNMLSIFDGKDATLLSGITDYTWLQLLSETGRDLTKWTTEKHFTSWLGLAPGQNNSGNKRKRPKKKGRPTAGQIFRIIAQSLINSKDIAIGAYGRRLRARKGPSIAIKAMARKLAELYWRTMVKGLDYAEYGVKKYEQQLIAQKMKTTLRLAKELNLQIIDNQVYV

SEQ ID NO: 151587 - protein, 388 aa, unidentified
MLSEGIDYHKRYSQVHVIDERGRTRANARLANDFGTLNGFFARLAEPCRAVVEAGWNWGVMYDWLDLIENVCAVELAHPYRVRAIAATQVKTDSIDAHTLAQLLRTNLIPRAYVPGGETRRLREMVRQRVFLVRMRTMVKNRIQALLARYHVPLPAVSDILGKRGRDYLAKVELPSAAQELLREDLALLNTLSQEIRATEQWLREAMKGDHRVELLRTAPGLGELLATVVALEIDHIERFVSPAKLAAYAGLVPTTYSSGGHTFHGKLMPQSDLDHPSLRGPATGGNVRSSAPYLSLPVFRRPDKGFLGSVGCAPKCACKRSSQIGFASDVIPVEHTLRLLTRQRYRQSTQDASRFPIECHFGSRTMIARTRENDEKTRAAPATSPSC

SEQ ID NO: 151588 - protein, 354 aa, unidentified
MIIIGADYHPGFQQIAFVDTDTGEFQERRLQHREEAEKFYRDLAAQGMQVRVGMEASGQARWFERLLSELHFELWIGDAAEIRTKRVRKQKTDRQDAQLILRLMLEDRFPKIWVPSWENRDLRQLLWHRHRMVQARTRIMNQLQAVALNEGLRCKKRLWRDAGREQLESFALAPWASRRRRDLLELLDRLTPTIAELTQAIEQEVEKCPEARRLQTHPGVGALTALSFVLIIGQADRFQCGKQIASYLGLVPLEDSSGQRRRLGHITKQGNSLLRFLLVEAAQVTVRSDPEWRSKYFHLAMRRGRKIAKVAMARKLAVRMYWMWRKGWDYEQLKKFGSHAGQPGNRDGVQSITE

SEQ ID NO: 151589 - protein, 402 aa, unidentified
MYNAVGIDVSKGKSTVAVLQPAGVIIRKPFNVNHTSSELDELAKYIGSLEGETRVVLECTGRYHEPVVKTLSEAGLFVSAVNPHLIKNFGNNSIRKVKSDPADAKKIARYTLDNWIELRQYSSMDNTRTQLKTLNSQFSFFMKQKVAAKANLIALLDNTYPGVNKLFDSPVRDDGSEKWVDYAYSFWHVDCVRKIGLKTFTERYQAFCKKHHYNFQPAKPAELFLASKDLIAVFPKEASYKLLIQQSIQQLNLASSHVEELRSKMNELASTLPEYATVMGMYGVGKTFGPQLIAEIGDISNFSHREALTAFAGVDPGVDQSGTHNSKSNKASKCGSNRLRKTLFQIMSTLLQTSPENDKVYQFLAKKRAEGKPYYVYMTAGANKFLRIYYGKVKECIRNLEQ

SEQ ID NO: 151590 - protein, 325 aa, unidentified
MKYTPVGVDIAKHVIQIHFINEHTGEVVDKQLRRQDFLTFFGNREPCLIGMEACGGSQHWARELTKLGHKVRLLQARFVKAFVMGNKNDVMDARAIWMAVQQPGKEIAVKTEEQQSVLVLHRTRMQLVKFRTAQINALHGTLLEFGETIHKGRAAMEREFPEALERMKERLPPYLIMVLENQYNRLNELDSLIEDIEKQLTSVARQNETCKRLLDIPGVGPLIATAAVATMGEASAFKSGREFAAYVGLVPKQTGSGGKVRLLGISKRGDTYLRTLFIHGARAVALVAKEPGPWITELKKRRPASVAIVAMANKLASNSMGDNRP

SEQ ID NO: 151591 - protein, 355 aa, unidentified
MDSKKYIGMDVHKESISIAVMNGAGKIVMECVIETKASMILQFIDGLRGDVHVTFEEGTSAAWLYDLLKPQVTKLVVCDPRKNASMREGSQSDKIDARRLAELLRLNHLNPVYHGEHGLRSLKELVRSYITITKDLGRVMSRVKAIYRSWAIACTGKQVYAPRHRAEWLGKIGEPGVRRRAEFYYQQLDALRCLRQEVRRELLAESKKHQAWKRLCQIPSMGPIRAAVLLGILQTPHRFRSKRQLWTYSGFGIETQSSADHRRVDGQLQRAKKPSSIRGLNRNCHHDLKNLFKGAAIVASSKPGPFQEFYAALLTKGMRPEMARLTLARKIATIVLMVWKRGACFDAQHLKPQTV

SEQ ID NO: 151592 - protein, 382 aa, unidentified
MQPIDTVNPTILLAIELSASTWLVAARVPGSEKPHLHRIDGGDTAALLALISSLRARVSRRLDAEIGIVCCFEAGRDGFWLHRLLTAHGVASHVLEPTSILVNRRARRAKTDRLDAEGMLRVLGAYLRGDHQACSMVRVPTPDEEDAKRTHREREKLVQERLRIENRIEALLFTQGIRKRPSLRSWQRDLAVLRTGDGREIPRHLRAELERLRRRLVMTLELIREVEAERDQAAETKPQDQACRKIAALCRIRGIGENFATVLTREVFYRSFDNRRQIASYVGITPMPYQSGGMDRDRRISRAGNPRARTTMIQLAWLWLRYQPGSELAEWFRERVGTLAGRTRRIAIVAMARKLLIALWRYIETGLVPAGVEIRVASVAAV

SEQ ID NO: 151593 - protein, 333 aa, unidentified
MLPPNCGTATPYILRNTVGLDISKLTFDATAIVGNAEYSAKFDNDSKGLDQFSDRLKSLGCQNLHICMEATGNYYEEVADYFAQYYSVYVVNPLKISKYAESRFKRTKTGKQDAKLIAQYCRSAQESELVKRQKPTDEQYRLSRMTAAYAQIKSECAAMKNRHHAAKDEEAAKAYAEIIKAMNEQLEVLKEKIKEQTEKPKCKEGVKRLETIPGIGRMTAAVLFHHLTSSKFETSNKFAAFAGLSPQQKESGTSVRGKGKLTKFGNRKLRAVLFMLTMVAYRIRAFPDFIKRLEEKKKPKKVIIAALMRKLAVIAYHVHKKGGDYDPSRYKSA

SEQ ID NO: 151594 - protein, 360 aa, unidentified
MFKNSMLFVGLDLGDRHSHLVILDQDGDLVEEARLPTTQASLTRRFSTLPASRVAIEVGTHSRWVSALLTQLGHEVLVADARKLRLIYGNSRKRDRADAEYLARLARLDPKLLSPIHHRSPQAQAHLAVIRARDSLVRARTQLINHARGLVKTTGARLPSCSAASFHSRTASAIPQELEPALSPILDTIASLTQRIRAYDRLIQQIADAHYPETRLLRNVPGVGPLTSLGYVLTLEDPHRFRNSRELGACLGLVPRSDQSGDHDPQLHITKTGDAYLRRLLVQSAQYILGPFGPDCDLRRWGLKLAERGGKAAKKRAVVAVARKLAILLHHLWKNGEVYDPFYRSRLARPALAEVAIAIA

SEQ ID NO: 151595 - protein, 440 aa, unidentified
MTVRKREDEVFPNAAGIDVGGSSHWVAVPTRSSDDPVREFGAMTEDLNAMASWLIACGVDTVALESTGVYWIPVFEVLEQRGLKVWLVDARQMKYVPGRKSDVQDCQWLQKLMSLGFLRAAFRPDVEVCELRAVSRQRDILLTEQASWVQRMQKSLVQMNIQLTEVLSDVMGLTGELIIRDIVAGERDPKALARHRHSRVKASTEDIIKALTGNWREEHLFVLGLSLGMYDDIARHLTECDARLNAGLKDLGQKNVELGKPPRSGSKQRKEYDTRQILANWAGVDLTRINGLGLAAVTKILTEIGPDLSCFPTVKHFCSWLGLCPGTKISGGKVLSAKTKRSVNRVRQVLKMAAMSLAHCDSALGAFYRRLCARMDKPSANTAVAHKLARMVYFMLTRGEEFVDQGQQRYEQQQLERSVAALKRRATALGFTITTVASGA

SEQ ID NO: 151596 - protein, 411 aa, unidentified
MQVVYTHCAGLDVHKKTVVACVITPKESGEWHKQIRTFGTMTKDLLNLSDWLTSHNCSHVAMESTGEYWRPVFNILEANFEVMLVNARHIKAVPGRKTDIKDSQWIAELLQHGLLRPSFIPPVEQRDLRDLTRHRSNFIRERVNLVNRVQKVLEAANIKLSSVASDVMGVSGRAMLAALVEGNSTPELMAGLAKGTMTRKHDLLVCALEGRVRPHQKFILAQLLAQIDSIDSTIALFDQQIEEYCRPFDQAIELVDTIPGIARRTAEIIVSEIGTDMSRFPSAEHLAAWAGVAPGNYESGGKKLSDSTRKGNRVLRTILVQAAHALARTKTYLAAQFRRLAARRGKKRAAVAVAHSILVIAYHLIYRQEPYKDLGADYFDKQQPESVKKRLIKRLEKLGYQVTVQSVEVAV

SEQ ID NO: 151597 - protein, 478 aa, unidentified
MTPSKDYCLEAPCPPTPLLPPLPVLSDALQVCNPHAAGIDIGEAEHWVAVPPGRDPQPVRRFGTFTVDLDALADWLIDCGVITVAMESTGVYWIPLFELLEARGLQVFLIDPRQAKRAPGRPKTDRLDCQWLQRLHAYGLLAAAFRPADQICVLRSYLRHRQMLLTYGAHHIQHMHKALQQMNLKLSQVVSDLTGATGMAILKAIIAGERDPLTLAKLRNPHCQHSEDDIAKALQGTWRAEHLFALQQAVELYQFYHQQLTVCDQHIQTHLGTFADKSHGQPLPPKARRHKKANEPRFDARTPLYRLAGVDLTTIEGIEEGTALVILSEIGTDMSRWPSVKHFCSWLGLSPQHKISGGKVLSRRVRPGAQRVALALRLAARTVHKAHTALGAFFRRLRSRLGAPKAITATAHKLARLVYSLLKHGSAYVQQGLDAYESQYRERKVKAMARQAKALGYTLVALGTPEGASLDAVTVPIP

SEQ ID NO: 151598 - protein, 467 aa, unidentified
MSPRSGKQFRTSEQTEDLTVTHRHAAGIDVHAAVHFVSVSAADVPPGFINPDAKLPAGVRKFGAYTGDLEAIAAWLKDCGVKTVAMESTGVYWIPLYDRLAAQGFEVLLVDPRQTKHAPGRPKSDVLDCQWIRRLHSYGLLTASFRPSDEIVRWRGYQRQREMLIRYAAQHVQHMQKVLEEMNVKLPEVVSDIVGQTGMKIIKDIVRGERDPRKLAKHRHETCKKTEAEIASALLGNWRAEHLFALQQALKLYEFYQRQLRECDGQIEDCLRSMKDKSAGRALPVSLRKRKPEKNAPQFGARSLLFRMSGVDLTQIEGISATTALVLLSEIGLDVSKFPHEKNFVSWLGLCPQHRGSAGKIFKRRTRRGANRAARALRMAAQGCHQAKNALGAFYRRIQGRAGGAKAIVATARKIAERVYRLLKYGQDYVRESEQRYEEAYRQRVAKSLARKAASLGYKLVPETMTP

SEQ ID NO: 151599 - protein, 489 aa, unidentified
MSKASQQQQAKKDATLKAQAPKRQARGSHRPQGEGNQRRSQLRITNPDAAGIDIGSQVHYVAVPEERAERTVRSFGAYTTQLEELAHWLKECAVKTVAMESTGIYWIPLYQKLEEAGFEVLLVDARQAKHVPGRKSDVQDCQWLQQLHTYGLLRAAFRPEDSVCRLRTLQRHRKNLVECGGMFVQHMQKALNEMNLHLHHVLSDISGYSGLAIVDAILAGERDPRKLASLADYRVKKSQAQIEAALTGDYRPELLFVLNQSLQDYRQIQQQLAQCDLRIEKQLRQIADCTNPSQDCGPRQQGPESATGKRAKIKPKDALEVSLAGHLKRILGIDLTTIPGLNVLAILTLISEIGTNMAKWRNEKAFVSWLGLSPNNKISGQRVLSSRTRKVVNRAATTLRLAAMVVGHTNTPLGSFYRRKRAQLGAPKAITATARKLGCLIYRLIKNGQAYQAPDLHVYELKYKDQILNSLRKRANSFGFDLVEVPKAA

SEQ ID NO: 151600 - protein, 349 aa, unidentified
MAMTIVEGAQAVTGGVDTHLEFNVAAALDPVGALLGTAPFPTTPGGYKALLSWLEAFGPVDKVGVEGTGSYGAGLSKFLTQAGISVLEVNRPNREERRRSGKSDPLDAIEAARAALGGKAKSIPKTKDGAVEAVRALLVAKRSARTARTSALIQMRELIVTAPDELRSRLQGLRISVLTAEAARLRPARQGDPVLIATKTALSSLAHRVQTLDDELVELDTRIEVLLSRHCPDLLDLFGVGPDTAAALVVCAGDNPERVHSEPSWARLCGVAPKPAGSGQTAGRVRLDRGGDRQANAALWRIVMVRIAHHPETTAYYHRKLDEGRSKADIVRLLKRYVAREVYRHLPRG

SEQ ID NO: 151601 - protein, 430 aa, unidentified
MKSNTQNAKIEAITEKTLVLGIDVGSEMHYARAFDYRGIEYSKKPFKFSNTEAGFATFKEWILDLKERHEKDKVVPGMEPTGHYWFNLGKFLQDNEMKPVLVNPHHVKKSKELDDNNPTKNDRKDPKVIAGLVREGRYMIPYLPEGVYADLRTASNIRFQLQAELTRIQNRISRWFNIYFPEYKTVYGKPDAKSGMLILKAAPLPEDILTLGIDGVNQIWRDAKLRAVGKARAKTLIEAAEHSVGSKEGAVSARMEIRMLLEDYESRNTRLQEVMVLIEELVRKIPMAEKLLEIKGVGIRTVSGFLAEVGDISRFNNPKELQKLAGLALVENSSGKHKGETTISRRGRKRLRYLLFEVAMSLVAKNPEFRELHNYYTTRRLNPLKKMQSLMAIAAKLIRVFYAMLTKGVDYDPKKMVSDIKRPAVYIQAA

SEQ ID NO: 151602 - protein, 318 aa, unidentified
MQLYKNFIGIDIGKLTFVVGEYGSKKTKEYDNTPEGIDHFIKDYHSKLIQGFSVLETTGGYEMRLLLTLCEKGFAVHRANTRKVKNFIRSLGNGAKTDPLDGKALALYGYERHQRLECFKPPSKQSLELYELVQRRQDLKLMLVAEKNRFKGPRTDFIKESCQEMIEALNSQIEALWERINQIIETDAVLKQKKAVLETIPGIGEITAVNLLILLPELGALNRKQIASLTGLAPIANDSGQFKGYRATGHGRAGVKPMLFMAAMAARNSNSWLKSFYNRLVEAGKKKIVALTALMRKLIVIANARIRDFEVGIVASEK

SEQ ID NO: 151603 - protein, 341 aa, unidentified
MKLIRVGVDLAKNVFQVHGVGDHEKAVWRRKLTRASWLKVLLETAEPGCEIGMEWCGGAHHWARQLQAHGFKVRMIAPQFVKPYVKSNKNDANDAEAICEAMSRPHMRFVAVKTVEQQDIQAVHRVRAELTKQRTAKANQIRGLVAEYGLVAPKELEHLRRALPCWLEDMENGLSERFRRLLNGLWGDLQALDERMAELDREIAVIAQNDPVAKRLQQLRGVGPIIATALVAAVGNGEQFANGRQMSAAFGLTPRQHSSGGKERLLGISKRGDVYLRVLLIHGARSVLRTSKDKADRLSQWVTRLAARSHPNVAVVALANKTARMAWAMLKNGTDYQPGTS

SEQ ID NO: 151604 - protein, 338 aa, unidentified
MNIVFLGIDLAKNVFQLCGLNQAGKPVYTKRTGRKELLQTLANIPACLIGIEASTGAFYWQREFEKLGHKVKVISPQYVKPFVRGQKNDGNDAQAIAVALMQPTMQFVPPKSPEQQDIQALHRARQRIVNHRTATVCQIRGLLLDRGIPIGSAVSRARRAIPLILEDAENGLSSRMRRTIAELYDLFNDLERRIHFFDKEIETVFRQSEACQRIAKVKGIGPKTATAVVAAIGKGTEFKNGRHFAAWLGLVPRQHSSGNRQVLMNMTKKGDKHLRTLFIHGARAVVRVATNNNDGHMNQWVNQLKERRGFNKTTVAVANKNARIIWSMLRNDTEYQVV

SEQ ID NO: 151605 - protein, 391 aa, unidentified
MVCVGIDVAKDKHDCCILDSEGTTLVDCFTIPNNMDGFKSLLQTIQDCSQKSDKIKVGLEATGHYSYNILGFLLDNDLPVYVMNPLHTNLYRKSLSLLKTKTDRVDAKTIATMLLSDVDLKSYTDTAYHNEELKSLTRYRFDKVQERAKLKQSVSRLVTILFPELEQLVSSIHGTSIYALLSEYPGAKQISEAHLTRLANILVKTSRGHYRKDKATHIRDAARTSIGSVMPAKSLELKHTIKLIQELTSEINEIEDAIRKIMDELKPPILSIPGMGFHSAAMILAEVGDFSNFNSPDKVLAYAGCSPSTYQSGKLTNCYAHMEKRGSRYLRYALYTATKYVCYWNPVFTEYLTKKQAEGKHYNVALSHATKKLVRLIYALQKSGKAYLAVT

SEQ ID NO: 151606 - protein, 346 aa, unidentified
MMIIGCDYHPSWQQICWLDTITGETGEKKLEHASGEAERFYRQLSAPVLIGMESTGNCQWFVEMATAAGHDVWIGDAAKIRACDVRAQKHDRRDAALILKLLLEGRFPRIWAPSGEEKDLRQLLIHRYKLVRIRAQVKNELQHLAMNQGITRKHKLWSKAGEKVLRELPLKPWASRRREDLFRVRGMLDEQIAPLDQAVAQAAEKNERARLLMTQPGVGPITALAFVLTMGDVSRFQRGKQVASYLGLIPREYSSGEHRRYGSISKQGNRFLRMLLVEAAQRAVRCDPRMRSEYLHRCHRKAKGVAKVAAARKLAIRLYWMLRTNTGYPEVVRVESSSRVPLVSAS

SEQ ID NO: 151607 - protein, 364 aa, unidentified
MKITVIGGIDTHKHTHHASAIDTEGRFLGHEEFAANDDGYQQLLVWMRSHGTIGSIGVESTGSFGAALTRFLTAAGVEVIEVNQPNRLARRMDGKSDRLDSEHIARAVLARTSTAIPKSKSGIVEAIRTLRVTRTSAVKARTQTFNTLWGIMIGAPSPLRDDLVVLTKRTLVNRCLRLRPETTELLSLAGQPERMLIASVKASLRDLARRWKALDEEIKALNANIAALVRAAAPDLLELHGVGVEIAGQFLVTAGDNPERIHSEAAFAKLCGVAPQPASSGRTTGRHRLSRSGDRAANSALYIITIVRMRHHEPTRAYVERRTAEGRTKREIIRCLKRYIAREIYKNLPRASPPPASNNLRHAA

SEQ ID NO: 151608 - protein, 351 aa, unidentified
MKYYTTTTEYNCGIDLHARQMYVCVMDRQGKVLLHTNIQGNDFDYFLKRVEPYRHDLTVVSECTFNWYWLADACDAAGIKFVLAHALYAAHIHGGKNKNDRIDSEKLAHLLRSNLIPPAYIYPAERRPIRALLRQRMSYVWHRAELMTHLSMNQTAQNCVPALKGGHNRDVWQERILAQTPNPYHQLAVRCDMDAIRTYDDLIAKLDGTITLYARQHQSREYTLLQTVPGIGDVLAMTILYEIDTISRFPTVKDFTSYCRLVKGSVASAGKLKGLTGGKMGNAYLRWAFGEAAVICKRSHRLLSPYADRLVAKHGTFKGNAILANQLARAVYFMLQSGQAFDPERVIKASI

SEQ ID NO: 151609 - protein, 371 aa, unidentified
MGITDTNGRTEYKQARFSSFTKGLQKLADWLAKYDCNDVCMESTGKFWIPVFNILEKTCWVTLAYPKYTKPQKGNKTDHKDAKWICDLYMCDMVNPSFIPPPDIRQLRDLMRYRSKLTNIMTSEKNRALNCLTVSNLKLDDVFSDVFGKSSRSVIRYILEHPGETFQVAPFIDRRCKHPVEEIQAVIDGTISHQQAVKLRECLQHLDELEVHKTNVEKEILCLVQQYPYQLELLQTVLGFSGNIMTAIALISEIGADMSVFPSAKHLVSWAGCCPRNDQSSKKVKSTRISRAGVYLKPLLVQVAIQPFTANADKLSAAGALEIRCQICDGRFLSMWAALFIFLGCPLPPCPKNLHVHNGRIVILASVAWIF

SEQ ID NO: 151610 - protein, 413 aa, unidentified
MPNTLIVGIDVSSQSLVVRFMDQDGNGPSKSFSVSNDLEGADKLISDIIAYALKIDASIIKIGMESTSNYAWHLHLHLASSPELLNFNPLFYVLNPSVVKGFKKTYTHLPKTDDVDSFVIADCIRFGRVKPSNLPDFRYAALQRLTRFRYHLIQNLTKEKNRALNLIYLKFSSYVSDNPFSDTFGKASTSLIERFTPDEIASMPIEDIVEFICHQGNNRLKDPVLIAKKLKSLANRAYRLDPNLADSVELTLTMSLENIRFLENQLKKLDKEIEKQLKAFSHTLQTVPGIGPVIAAGIIAEIGDIHRFSNEAALAKFAGLVWNKYQSGNFNTGDTSLAKCGNFYLRYYLVEAANLLRMHVDEYTAFYYKKYKEVNKHQHKRALVLTARKAVRLVFALLNKGQIYRPGGVITIT

SEQ ID NO: 151611 - protein, 412 aa, unidentified
MKDLLEISCGLDVHKEKIVACILTGPLGKPTRSEIREFSTLIPDMIALRNWIVSKNCHHVAMESTGIYWMPIYEILEDAFYGDITLLVVNARHMKNVPGKKTDMRDSEWISTLLRAGLLNGSFIPEKRIREFRDLNRYRKSVIRDITSQKNRIEKFLQSSGFRLSSFISDIFGASGRNIILHLIEHGQIDKTALDSCLKTKTRNRIDEILMSVNGTLSEHQKAFLRILMTHYDSLKKHLAEIETSLEKDMAPFALQVEQLNSIYGISTTASCAIIAEIGIDMKPFKTAEHICSWAGLCPGNNESAGKRKSTSVTKGNPYIKSMLCEIAWVIAGKRNAYLSAWYWRIKQKKGAKKAIVALARKLLVIIYTMLKQGTLFDESCFETRRKHCEQKQLSRYIRELEKHGYHVEAQS

SEQ ID NO: 151612 - protein, 421 aa, unidentified
MSSIENEITKTRNHSRQRGNMMRTVFGIDVSKASSEVAIVINGEKIHGYTMPNDAIGFTRLLDDLKTVQKPEIIFEATGVYSHRLQAFLEENGYAYTQLNPLEAKKQLDSLRVRKTDKIDAETLAISQFVLNRKPTYIQEEVYQELRDLSRFYQNLTEDIVRTKNRLHKVLQVTFPEMENILSTPTREQYWNLVMTFPYKDFVLELSKDELLEGIRQSTSKRISDKRVAYLAQKLAALANQSYCAVKKNSPILEEVRYYAKELLRLSEQRQAVLEQMVELAQPLPEYEILLSIPGIAETTATSMIGELGDIRRFQSANQINAFIGIDLRHYESGNFLVKEHITKRGNPYARKILFKCIHNIAAASHTNHCHIEDFYEKRKRQSQTTSTKPHTIASIHRLIRTMYYLITHNKLYDYTSTQNR

SEQ ID NO: 151613 - protein, 413 aa, unidentified
MKKHSSFLEQLESGKKAKSARRDSREVMSALVAQLTKQLDVESVAVPGEDKDVPDGESPNLDRLTVGVDLGDQWSNYCILGLGGETLTEGQFRTRRQEIAEFFQDLARSRVVIEVGTHSAWVREVIAGLGHEVLVANARRMEGSKRRRRKNDRIDAAKLARLGRVDPKSLYPIQHRSTEVREDLLVLRAREALVESRTKLISAVRGLVKTMGTRVSNSSSNAFSKKAAAEIPQQIRETIQPLLRLIANLSEEIKSYDQRIERLASEKYMHTKLLRQVTGVGPVTALAYVLTLETPLRFVKSRDVGPYLGLVPKQEDSGDSQPQLGISKAGDRMLRKLLVGSAHYILGPFGPDTDLRRFGKKLCERGGKNARKRATVAVARKLAVLLHRLWISGEVYEPLGHPSFAPITHVTAA

SEQ ID NO: 151614 - protein, 341 aa, unidentified
MEEYIGLDVSMKETAVAIRRDGVRVWRGKCASDPHVIAELIRKRAPIVKRVVFETGPLSVWFYHALRAEGLPVICIDARHAKAALDMATNKTDANDADGLAHLAEVGFFREVRVKGFDSMLARTLVAARTRLVHITTELSNQIRGIMKTFGLIVPAGKGSVFEKNVRDLLSSHYDLAHIVLPLLDAWKGLRVRAADLGRQLVAGARQNQACRILMSIPGVGAITATSFATAIEEPGNFRKSRSVGAWIGLTTRRYQSGEVDYDGHISRRGDRHLRGLLYEAASVILTRSSKQSSLRTWGLQLRERIGFKRAAVAVARKLAVIMHTMLKTGEFFNPTAGVAA

SEQ ID NO: 151615 - protein, 408 aa, unidentified
MQVEHPVCCGIDVHKDTLTACLRRVDANGQVNKEGREFATTYTSLLALSDWLVEQRCPVVAMESTGVYWKPVYHVLAGTGEVFIGNAHEMRSRPGNKTDKRDAAWIAERLAHGLIRPSFVPPPDICALRDVTRTRVALVQTRSQSKNRVHKLLEDTNLKLGSVVSDLFGVTGRRMLAALVAGERDPQALASLALGALKHKRPQLELALTGQFTAHHGTLLALVLELIEVLDRQIATLDQQIGALVAPLQAQIAQLDSIPGVDIIAARDILAEIGTDMSRFGDAARLASWAGVCPGNHESAGKRYRGKTCKGNRYLRRVLVQCAWGARKTPTFLGRTFRRLEVRIGKKKAALAIAHKILVIVYHLLTLGTSYEEARYDQYNPRQEARERQRALKALERLGYTVILERAA

SEQ ID NO: 151616 - protein, 387 aa, unidentified
MSQVDDLSRSLAAFDQNTTLTVVVELSEASWLVAGLVPGVDRQPLKKQEPDPRALLRLLERWRAEATKTGRMIERIVLAFEAGRDGVWLARWLRARGIEVYVIHSTSVAVSREHRRAKTDRLDTGMLMRVFLGWLRGERGHCRMVAIPTLEEEDAKRPSRERESLVGERTRIINRMKSALARLGIRGFKPALRKAPQRLEALRTPEDTPIPPNMLDEVRRDMIRLAVVREQIDAIERARLVRLEQAPASGSHPMVRLLARVIGVGIETADMLVQEVLSRKLRDRRAVARYVGLTGSPDESGKRRREKGLAKAGNARVRRGLIQLAWRFLRFQKDSALAQWYRARTEGPKGVRKTTMIVALARKLLIALWRLVMTGEIPVGVVLRAAA

SEQ ID NO: 151617 - protein, 359 aa, unidentified
MKNLKYSIGTDVSMKDFACCISVINDQQEVKVRATHKFANTAAGFGLFLEWVRHHQKEELPTVFVMEATGVYHEQLAWFLHHKNQQLSILLPNRAKKYLQADGNRSKNDTIDARGLAKIGAEKKLDLWTPPSMELYTLRDYTRQHQSLNEMYTATANQLHSIEHSQFRNKDIIKQLKSTLKLLEAHLKEMEAIMAKMIKSDPVLNQHHQNICAIKGLGTLSFAVIAAETNGFALFENAASLVSYAGYDVIENQSGKHTGKTKISKKGNSRIRRVLHMPALCAVRDDQPQFKKLFERVYDRTKIKMKGYVAVQKKLLVMMYYLWKKGEKYDPVFKKEVAPALPGATRDELLKEALIKQQN

SEQ ID NO: 151618 - protein, 446 aa, unidentified
MDVVFTHCAGLDVHKKSVTACRLISDPTGQQAEGIAELQTFGTMTRELLALADWLAEAGITHIAMESTGEYWKPVYNLLEGTFTIILVNAAHVKNVPGRKTDKADARWIAKLMRYGLLQASFIPPAGPRDLRDLTRYRVKLVQERAREVNRVQGVLERANIKLASVVSDIMGVSGRAMLEALIAGQADPAAMAALAKRRMRSKLPLLEQALTGRVRDHHRRLLAMQLAHIDFLDEQITALSDTIHTCLLALNPPTEPPGSSLETSEPPGGSAPAIAPPVTFPRAVELLDTIPGVDQRGAEMLVAEIGIDMTRFGTAPRLAAWAGVAPGNNESAGKQRSSKTRQGNHTLRAGLTQLAHAAVHTKDTYLAALYRRLAARRGKKRAIRAVAHAIMVSVFYMLARNEPYRELGGNYFDERQRHYTVDRLASRLERLGYRVHLEPVAATAA

SEQ ID NO: 151619 - protein, 358 aa, unidentified
MTKMPERTRVVTGGVDTHAELHVAAVIDEVGRVLGIESFEASTWGYGRLLGWMRSFGELANVGVEGTGSYGAGLDRYLSAHGVQVVEVVRPNRQKRRRRGKSDPLDAEEAARAALNGEASGASKAKTGAVESLRALRVARRGAVKARTQAANSITALVVCAPEDLRSRLAGLSTDERAALAARFRPGDLTDPGEATKAALRSIAYRYRQLDAEITELDKAMEPLVVASAPAMLTKPGVGPRVATALLVTAGDNPERMRSEAGFAALCGASPVDASSGKHARHRLNRGGDREANSALWRIVQTRMRCDARTQAYVERRTKEGKTKAEIVRCLKRYVAREIYKTLVSAGTPAGAGLARAA

SEQ ID NO: 151620 - protein, 340 aa, unidentified
MEQIIGIALAKRVFQVNIVSAQGEKKANKMITREKLTAFIVQQPPSRIVMEACGSANYWSRQFRQYGHEVKQISPQYVAPFRMGSKNDKNDAAAIVEADSRPGMRYVPEKSIEQQDIQCLHRVRQRLMKNKTALINQIRGLGLEYGIAIPEGAHKIMAHLPDHLEDAENELTTLSRELFHEMLQELQDNQQRIKALDLRLALISQQNEDTLRLKSILGIGPLGASALTVALGDSADFQNGRHFASYLGLVPKEHSSGGKVRLLGITKRGDGYLRGLLIHGARSVVYRVINLPEERCGGLQRWLKGIIARSGVNKAVVALANKNARIAWALINQKTEYIVK

SEQ ID NO: 151621 - protein, 429 aa, unidentified
MAAGQAVMCPGRTLLVLESSHAAVVAAADPVFVGVDWGNSHHQLCIVDAAGGIVDQGRFAHDVAGLHLLEGRLRRHADIVGVSIERSEGLLVDAPQQQGYRLFCVSPKMSARARERYRLAPVKSDAFDAFVLADSLRHEHRHWRSLAVPSPLLAELRALTRDRERLIWNQRDVENQLRAVVQAYHPTVLHLFSSLDRDISLAFLRDYPTPAHAGRVGPARMAAFCARHGYSGRTKPEVLVERLRDNLLSASSGTTAGKALSAVLFVDQLDLLNSQVRTMSKRIRERLTAHPDAQIFLSFPGMGKITAATMLAEMGEDRMRFPTADVLLAEAGAAPVTQASGRTRRVRFRYAANKRMRHAIDWWTFVSVRENDGAREAYRQARARGQQHNRALRGIAARWTRILWRCWTDHSRYNPELHLNKQPTRPVSG

SEQ ID NO: 151622 - protein, 329 aa, unidentified
MKRIFAGIDISKGWLDFIPMNDQVEILDKAKRVNNDIKGVNEMIQSLTKRYNQDDLWFCFEHTGNYGLLLSSILQSSELTYSAVPALEIKKSLGITRGKSDQVDARRIAEYAAIQKHKVKPSKLPSDELMKVKNLLTFRAQLIKTRTAFINSIKSYREAEKVVDLSYITSNIEDKINLLDQDIKSVEREISITIKQSEELKNNYQLISSVRGIGQVIGAFLLVYTNNFTSFDNPRKFNCFTGLAPFESSSGITKGKTKTSVYRHKALKVLLFNGANSAIQHDPQLKRYYQRKKQEGKEHMTIINAIACKIIYRAFATINRQSPYVILAQ

SEQ ID NO: 151623 - protein, 373 aa, unidentified
MDNSITFAAMDTHKKEHRVALVYPNDEQVIEFSVRNTHPEISKMVKKIKRNAPGQVRFCYEAGVCGFTLQRRIEALGCKCSVIAPSLTPRKPGERIKTDRRDAKKLLGLFMADMLTEVYPPNEQQEAARELTRCREAAQENLKRIRHQLQKLLVRHGYVFTDGEHWTQKHLRWLDAVDFEQPLLQEVFDCYFTEMRHCLQRVKTLDRELEKLAQSDVYREVTGALRCFYGINTLTAMSIIAEVFDFGRFASARDFMSYLGLTPSESSSGEKQHKGSITKTGNKRARRLLTEAAWHYRHAYAVSKALNERRDGQPQWAIDIADRAGVRLRKRYHRLVNRGKLPCKAVAAIARELAGFIWSVLIEYEARKKRKAA

SEQ ID NO: 151624 - protein, 419 aa, unidentified
MAKSKNNDILSVVHPICCGLDVHKDEISACLVTIDEKQQVSSEIRDFGTFTHELVKLRDWLLGQGCPIVALESTGIYWRPVHNILENHLKVVLVNARHVKNVPGRKTDIGDSQWLAGLLRNGLLKGSFIPPKEVRQWRDLTRSRKKIVETVGDYKRRVQKLLESANIKIDSVASDLFGVTGRNLMNLLLSAPQEITLADVERCLRGRIRSKLVELHQSIQGFFTGHHRFLLATLLHIVDSLENEIHGIDQKLDEVMSAHEDLISRMIAAAGVERVSAQAILAEVGPTLEQFDNDAACCSWAGLCPGNNESAGKRKSGKSPVHKHHIKTIMTEVAWAAVKKKGSYYRSKYYRLKARLAAKRAIIAVAHRLFKALYFIIKKGATFKDLGETYLVEHNKASILRRISKQAKILGYQLVALEG

SEQ ID NO: 151625 - protein, 400 aa, unidentified
MLSIGIDVSKGKSTVCGMKPGGEIVYAPFEVQHTREGMLELVSLLRSSGEEVRAVLESTGSYHCPVVAALLENGIFVSVVNSLRMKRFCSQSIRKVKTDRIDAMQIALYGLAYWQELQPTRLPEDTYRELQLLARQYYQMTSLLIKAKVDFNALCDQVLPGMQELMSDHAGRHKLSDFVLRYRHTTHILEMGETRFRKDYCKWAEKKGYRNRERMAALIFATAQNGIPVLPNAPSTQIVITEAIRVLHTVEASRDAILTQMQALAKTLPEYSLVREMPCIGDTLAPRLIAEIGDVRRFHSKRALIAYAGIDAPPYQSGKFCANNRHISKRGNRYLRKTGYEVMQSYVMHKPANDPIFTFIEKKRSEGKSGKLAMVAGLNKFLRVYYGKVTELYRSLPAIE

SEQ ID NO: 151626 - protein, 422 aa, unidentified
MSKKRNKVCGIDVHKRFLVASILDNEGNCETKRFEQDLDELILLKNWILDSGCESVAMESTAEYWRPAYGILNPEINITIGNAYHMKGIPGKKTDVLDSQWIAELELNSLITPSRVFTGDLYELRALTRARNKMVNNCTVFKNKILHQLDVCSIRLCTVLKDVFGKSGYALLKGIVERKTQDEIIKALPAKTRKIAPVFFEQIPEYIPDSAIFLIDSMLKIYDNLQVEIKRIEERIKFYLKDKENELRILMSVPGIGIVIGSNLLAEIGDIRDFPTADKLAKWAGLTPSVYQSANTNYTGPITKQGSKYLRWALIEAAHSAIRRPGKLNDYFNGLLPRKGYKKAIVAVARKILRIVWHLLINNEIFEDGIPKVKTVKIPKFPEKIERVGIAKIIQLLSRGAEIIVQEEGKEIMRINGSSQPT

SEQ ID NO: 151627 - protein, 362 aa, unidentified
MLYTGADLHRRLIVVCTVDENGMVVARSRMKTDPALVTEYFRRWPDQHRAVVECTTGWYWFSDLLRSLGVEVVLAHAKYLKAISYAKVKTDAVDALTLAQLLRMGYIPEAHQLPPEYRAMRDLLRQRMVMEHKRTNIIQRVTSILAQFNITDLPFSPCQPGFADFLNQCSIPDEYRMTLMLYHQQCLQVTEHRKQLEKHFKARLRPTSAVQLLMSLPGIGDITGSIIAMETGDIHRFADAKHYCSYCRLVPGAKDSGGKHSHRSGSKDGNQYLKFAFTESAIKAMRFYPQIKHFAARLERRATKAIARTVVAKELAKISYYVLSLQEEFKTFKGIEINKLRNWPRSRKPVRLTGGAVNPPSV

SEQ ID NO: 151628 - protein, 340 aa, unidentified
MKIIGCDFHPTFQHVCYVDTSTGETGEQRLSHPDQARQFYLGLRGQEVRVGVESMGNLGWFQRLLRETGHELLIGDAARIRAADRRDAALILRLMIEDRFPSIWQAGATEAELSQLLSHRCRLVRLAVRLGNQLDALAKNEGLVNVSSTSITGRKRVEDLPLSSWRAVQRNDLYALYDTVHKRVLELDRSAREAAEDHQQARLLMTHPGVGAITSLAFVSVIGDWHRFPRGKQVASYLGLIPTESSSGLKRRLGSISKQGNSMMRWLLVEAATIAQRQDESWHRQYLRLSVTKHHGVAKVAMAHKLAVRLYWMLRSGKPYEEIIERNRHAGQSECPRGQK

SEQ ID NO: 151629 - protein, 340 aa, unidentified
MKFIGMDAHSRTSTFVVVGKSGKVLRRARAKTQEDELLAFVRSVKGAKKLAFEEGVMSQWLYLTLKDEVDELVVCQPREKRGAKTDEIDAGELADLLRVGRLIPVFHEDSDLMHLRTLISGYGDVVQELTRAKNRYRALYRQVAIPTKVSGFYESEEMLDLLDTDERRYVACTLFEQLALLEEQRRGYVERFEANVRKYKPIKLLTSIPGIGVVRTNRIVGVMVTPFRFPKKYNLFSYAMLTKHNRMSDGKQYGKKRAHGQTVLKEVFKSAALTAIKSDNAFRRKYDAMRESGKTDKAARAAVAKKIAATVLGVWKSGKKYNDKHTEVTRRQRSGCHSGH

SEQ ID NO: 151630 - protein, 355 aa, unidentified
MVGSISEAKSSVSGVTDPYCRTEHCGKIHPYRCDKEVGVLGIDVSKDNLITSRRGKYENNLKGYEKILDMKPCTIVLEPTGVYSIKPSQYFKEKGIRVLQVSPNVLSREKDFREKKTDFYDAEKLENMVDKAKEYEYNVLRELVTLYLFLKDMEVKQKNRLKRALFLVSDNDKINKERLERLASGDFAQEVLYQLEYTPIVLEEVKILAKALFETQEKLKEVKEMIESQVPEDHVLLTIPGVGKLAAGIIIGVVGDIRRFPKPESFVAYCGLDPVVERSGKAVVSKGISRRGNKYLHSLFYFLAQMNCSKNPTLLRFYESHKDKLHGRKLYTALARKLAKVVWSVWYNNKPYEPK

SEQ ID NO: 151631 - protein, 411 aa, unidentified
MRRVIGIDVHRTFGEVVIWEDGRLRHAGRIDMTRTALEGFGKTLLASDEVVVEATGNSMAVSRVLAPFVARVIIANPLQVKAIAQAHVKTDKIDAGTLASLQAAGYLPQIWTPDAETERKRRLVARRYQVVRHRTRLKNEVHSILHAHLIPKCPHADLFNGRGRAWLVAQPLPDDERAAIDRHVRELDRLAEDLALLDREIAQDAIDDSAVNRLMTITGVNLAVAAGIMAAIGDISRFNSPQKLVSYFGLNPRVRQSGLGAAHHGHISKIGRSHARAMLVEAAWAAAKAPGPLHAFFVRIRARRGHQIAAVAVARKLTVLCWHLLTKGEDYLWARPGLVAIKTRAMQLQAGHPQQKRSRRGPAYAYNIKVLRDREMLIAAQAEQSYERLVTQWKPRRPKTGARAPQLGKTK

SEQ ID NO: 151632 - protein, 400 aa, unidentified
MLSIGIDVSKGKSTVCGMKPGGEIVYTPFEVQHTREGMSELVSLLRGSGEEVRAVLESTGSYHCPVVAALLENGIFVSVINSLRMKRFCSQSIRKVKTDRIDAMQIALYGLAYWQELQPTRLPENTYRELQLLARQYYQITSILIKAKVDFNALCDQVLPGMQELMSDHAGRHKLSDFVLRYCHTTHVLEMGETRFRKDYCKWAEKKGYRNCERMAALIFATAQNGIPVLPNAPSTQIVITEAIRVLHTVEASRDAILTQMQALAKTLPEYSLVREMPCIGDTLAPRLIAEIGDVRRFHSKRALIAYAGIDAPPYQSGKFCANNRHISKRGNRYLRKTGYEVMQSYVMHKPANDPIFTFIEKKRGEGKSGKLAMVAGLNKFLRVYYGKVTELYRSLPAIE

SEQ ID NO: 151633 - protein, 416 aa, unidentified
MKLFVGLDVSSEKLDACFMTDDSTCSVLKEASYGNSQLGASQIKEYILEFSQKFEIESLVIGMEATSLYSFHPAMFFKEDLELNQLNLMVSVEQPNKIKKYRDIFEENKNDQIDAFYIADYFRIQRQVNSIIKEEEYLALQHLTRTRYQLIKQLVRTKQHFIENIYYKCNTLSKELKAEGGSVLSATLVTLMTEDYTMDQLAELSLEEFANLIQKLGKYRFKNPEGIAKAISKAIRSSYRLGKVHQDSVDIVLGVLAKEIRSLEKLIKDLDKAIDDLVVVLPEYQCLTSIPGIGPVYAAGILAEIGPINRFSDESKLAKYAGLYWRQNQSGNSEYENTPMAKRGNRYLRYYLVEATNSVRRYEPEYHAYYKKKYAETPKHKHKRAIVLTARKFTGLVDTLLRNHQLYMPPRSVIDK

SEQ ID NO: 151634 - protein, 505 aa, unidentified
MAPVLAIPGMVADGFPIGRSFDPVGEILKPIATGPSLVHFLEKEKEMAAVKMNRKQRKELTRQLRSEDPGLDVVHPRAAGIDVGNGAHYVAVRPDQDREPVRRFECFTADLHRLADWLQACGVETVAMQSTGVYWIPLYEILEERGFEVYLVNARHTKNLPGRKSDVQESQWLLKLHTYGLLNNSFQPTAEIRTVRTYWRQRAEHVHAASTCIQRMQKVLTQMNVQLANVISDLSGLTGQTIVRTILAGERDPKKLAELSHPRIQASREEIAKSLEGNWRPELLFVLKQEVEMYDIYQQRIGECDRELKAHLKRFADNVHQEPTEAGSVSEEQKDKVPAKLTRSGKRAQGNAPCFDLRSELYRISGVDLTRIDSINVVVAQTVISEVGLDMSRWNTEAHFASWLGLCPDNRISGDKVLSKGTRHVINRAATALRIAATTLLRSRSYLGAQYRRLRTRLGAPKAITAMAHKLARLGLTQKQLLTESRTSIISKCLAGRCARRSNPL

SEQ ID NO: 151635 - protein, 354 aa, unidentified
MSSQPTVTVGIDLSDRHSQLCALETASGEILEESRVPTSPKGFERCFSGCEKMRIAIEAGTHSPWVSRLLEGYGHEVLVANARRLRLIYADGRKTDQIDAQKLARLARLDPELLAPLKHRGEDSQVHLALIHSRDALVGTRTKLVNHVRATVKSLGHRLPACSAQGFPKKAAEHLPKPLRPVFEPILQTISALTTQIRDYDRKIEAVAGEPYPETKLLRQVKGVGPLTALAFVLTLEDPYRFRDSRTVGAYLGLVPSKDQSGGRDPQQHISKRGDEMLRRLLVSCAHYILGPFGEDSDLRRHGEKIASRGGKNAKKRAIVAGARKLSVLMHRLWITGEENEPLFNANRYGGEAA

SEQ ID NO: 151636 - protein, 387 aa, unidentified
MARKRTLSTLDTSIAYEAVGLDLAKEDTAIAAFGPDHEGPYLIDRMPYDKLYELLANMAPTLVAMEPCSGAHQIAEQIQELGHEVMMISGRHVQAWVKDHCNGQKTDLNDAFAILNLAYDRWLTPIRGKTREECRLLALQASYRQLKGQRTKTMVHVKATLHAWGFPIRAGSFNQKVLHELIDANREAFGDEVAETLHLMINRVRDLDHDIATVLKLLTEATKRDPRASLLRSIPGFEILTTSRWCAVIGDIARFDSPKQTMAFIGLVPNNRITGHHTETSSGREARGQGRMSKRGDKMLRSLCIMGAGSLCLMVRNDRLPDCPFVASIKERLASPRPWFKVLVYVAAKLVRIATALLKYGETFSFEKAGISKAVLKQWELEQAKAA

SEQ ID NO: 151637 - protein, 324 aa, unidentified
MATTRHTLGIDIAKASYQVSLKRTDGKRRQKSVRNTPAGHAALIEWLHRHADAPVHACLESTGTYAEDVATALIEAGHQVSIVNPAAVKAFAQSQLRRTKTDGVDADVLADFCATMTPALWTPWPVEVRALQGLVRRRDAVQDMLTQERNRQAAGGLTTSVAASLARMIEVLEAELADLDRQIRNHLDQHPTLRAQRDLLSTIPGIGVATAARLLTECRAITAFETARAYAAFAGLVPRDRQSGQRRPRAHLSKLGSPRLRYAMYFPALTAMRVQGPVQTFGARLRAAGKPKMVVVAAVMRKLLHIVYGVLKHQRPFDPQVLGA

SEQ ID NO: 151638 - protein, 405 aa, unidentified
MEIIVEKGCGLDVHKGTVVACIMGVGIKKEIRTYTTMTNDLLRLKEWLQNSGITHVAMESTGVYWKPVFNILEDHFEVILVNARHVKNVPGRKTDVQDSEWLCKLLRSGLVSGSFIPPRDIRELRDLTRHKRKLIQAIVAEKQRVEKVLEDANIKLSSIASDTFGASGKRIVEELIKGKLRAEEMAELSKGRLRQKREDLKQALVGEVREHHKFMIKASLKHIRAMEKILLDIERKIQEKIDRHYKEEYKLLQTIPGVKGEASTLIAEMGVDMERFPSEEHLSSWAGMSPGNNESGGKKKPGSTTYGNKCLKTMLTEFAWVASKTKDTYLRSKYHSLVGRRGKKKALVALGHKILIMCYHILKYRCAYKELGVDYLDKRRKDKIARSYIKRLHHLGYEVILQEAV

SEQ ID NO: 151639 - protein, 389 aa, unidentified
MKIYVGIDIAKLNHFAAAISSDGEIIIEPFKFTNDADGFQLLVSKLESFDKNSIIIGLESTAHYGDNLVRYLVAEFYQVCVLNPIKTCQMRKNNVRKTKTDKVDTFVIAKTLMMQDDLRFITFFDLDMMDLKALGRFRQKTIKQRTRLKIQLTTYVDQVFPEIQYFFKSGLHQHAVYALLKEAPSPKEIASMHMTHLANLLKVNSHGHFTKELAKELRVLAQKSVGANDSAISIQITQTIQQIELLDSQLEKTEAEMTDIMKFNDSVIMTIPGIGYINGGMILGEIGDIHRFSNPNKLLAFAGLDPSVYQSGNFQAKTTRMSKRGSRVLRYALVNAAWNVVRNNATFKAYYDAKRAEGRSHYNALGHCAGKLVRVIWKMLTDEVEFNLE

SEQ ID NO: 151640 - protein, 313 aa, unidentified
MAFLHHQPQLCLGFDIAKDTITVADGTTTRTIANQRRAIRALLKRYKHIDLVVCEPTGGHETLLLEECLRAGIACHRADTLKVKSFIRSFGTHGKSDAIDAGMLSAYGRERWEKLCLWQAPDADETRLRALVRRRQELMAFRGAEKNRLKAPGGRGLAASFKAMIKAVDNQIKTIEADIRELIANSRTLKHRAAICTAMDNLGPIMAAKLLASLPELGSLTRRKAAALAGLAPHPNDSGQKHGYRKIRGGRPDVSTMLYMPALCAAAGKGEFAAFYKRLRANGKKPMVAIAAVMRKIVVTLNARLRDAMIPQS

SEQ ID NO: 151641 - protein, 359 aa, unidentified
MKIVGCDFHPSWQQVAVFDPETGEWTERKLSNGDGEAERFYRELESPALVGIEACGNSQWFIELAEGLGHVVWVGDAAQIRASYVRRQKTDRRDAGHILKLLMENRFPRLWTPTTAQRDLRQLLIHRHKLVEIRTRVKNGLQHLALNKGLQKKNALWGVRGRAELEKLPLAGWTLRRREDLFGLLQELNRTLDELDKAVGQAAEDHPQARLLMTQPGVGPITSLAYVLTIGDVSRFKHSKQVSSYLGLIPREHSSGGKQRLGSISKQGNRFMRQLLVEAAQTANRLDEGFRKQYQARCHHKAKGVAKVATARKLAVRLYWMLRQNVAYPEIARIESSPRVALAGESHAEMLNGRSRTQR

SEQ ID NO: 151642 - protein, 324 aa, unidentified
MSSHEIVGIDVAARKLVVIGERLALTEYENTAAGRSKLAKALSRSPRPVRVVLEATGIYFLDLACELAAAGIAVMVVNPKATHHFAEAILQRRKNDPVDAAMLREFGRRMDFVPWQPPRHELFAFRALTREAQALSKAVAAAKNRLHAITATQLAPDTLIRALERQIAQNQALVDELVAAALAETKTNRELARLVARTDSAPGFAVKAAVLVVGELAVLPPMTARQWVAQAGLDVREECSGTSLARRPRLSKRGNKRLREALFYPALTAARCCPLAGAFVERLVAAGKTRLQAIVALMRKLLHGLHAMWRNDEDFDAEKLFAPA

SEQ ID NO: 151643 - protein, 364 aa, unidentified
MKNTTNKHNSEVRAEPATNPPYEAIYLGADLHKQTIVVTRIIDGATPQPAQRFTWLDFWRFVEKQQPLAHKVYVVYEAGAFGFGPVRRLAQMGIQGYVIHPEKLDPRQRRVQTDKTDSRHLADKLQRYVRGNTKAMTVVYVPTETEEQARLLARHRQHLCQQLRRVQARGRGLLLSQGVFMTTHWWLEANWGRLPKLTPTFRAILEDLRQSIAHYQAQLAVCEKQLVATAPKTLPVGFGARTFVLLLAELCNYQRFPSRRQVAGFTGLCGGVSSSGPYHVDLSINKAGSPRIRGLLIELAWRMIYYQPKYQGLRTWQRLGAGAAGARRRKIALVALARQLMVDIWRWQTGRVTAQELGWEMLAP

SEQ ID NO: 151644 - protein, 316 aa, unidentified
MSKRKSNIGIDVSKQLLEVAVHESDFRYRCLNQPRVFAELLAELIALRPARIVLEATGGLEKPIVAALHATRLPVVVINPRQVRAFAKASGQLAKTDRLDAAVLAHFAAALKPPLRPLKSKEQQELEALMGRRGQLVEMLVAEKNRRHSATSDLVRETIKEHIDWLEEQIAALDEQLQSRLVSSGEWQNKAAIRQSVPGIGPVVSFSLLADLPELGTLNRQRISKLVGVAPLNCDSGQQRGARHIFGGRARVRSMLYMAALTAQRFNPVIKEFYQRLVAKGKPHKVALTACMRKLLSIVNLMVRNQTSWKTDLSSA

SEQ ID NO: 151645 - protein, 347 aa, unidentified
MASIADWHCFVGFDYHDCFVQVCILDAAGEVIGNQRIANDMPRILEYVDNTRDGRIIQGAAVETCCGASRFAEQLRQHDWPVELAHAGICSKMKQSPDKSDLADAHLLADLCRVGYLPRVWLPPRKIRDLRRLGRYRQQLVEQRRDVKLRMRAMLREERIVAPREAGNVWTKAWLAWLKSTESLDGHSRWVMDQHLEDLARLVTKVRAVEQRMEEATADDPVVRKLRETKGVGLVTAVVMRAEIGSFDRFACGKQLARYCAVTPKNASSGKRQADGGLVKAGNLTLRTMLIEAAHRLARYQPTWKQMKERLKERGKPASVAAAAVANRWVRKLFWEMREVEPQSLAA

SEQ ID NO: 151646 - protein, 375 aa, unidentified
MTRRSPVAFRESARWRRFDRKETVVEYVGIDWATRRAAWCALDASGEIIGEGTVSADLDGVLRLVTAVGVEARAAIEMMSGAAWVAETLEAAGWRVQVADSRRARALAPLAAKTDKIDARALAELARRDLVPAVWVPPFADRALLEQLLRRMHLVRLRTSGKNRIFGILTQWGVRMPLNRLRKADGLELLERRGVPEVWRESVREALRTIDYLDERVAELDAALRPLAREDERAQLLATIPGVGPLLALTIASAVGDVSRFRSASRLVGYSGLVPRIHQSGESSRTGQLSKAGSPLLRWAAVEAAQHAWRPQNPWHRLYVDVRRRHGHGNAAKAAVARKVLIACWHVLARNQSFKPAAFVAAPIVPASSSQPLAA

SEQ ID NO: 151647 - protein, 338 aa, unidentified
MQTYAGIDLHSSNNFVGVINDKDKILYGKRHTNRLDDVLRALKPFKNSLQGVVVESTFNWYWLVDGLQEHGYSVHLANPSAIQQYEGLKYTDDPWDSFWLAHMYRLGILPEGYIYPKEHRAVRDLLRRRLLFVRQRTAQILSLQSMISRNLGFKMSNNEIKKLKAEDIEQLFDCNNLMLMATNSWATIEFLKHIIKGIEKRVKSQVKLRKEFEMLLTVPGIGNILGLTIMLEVGDIGRFPKVGDYSSYCRCVGSTRLSNGKKKGENNKKNGNKYLAWAYVEAAQFARRYCVKAQSFYQSKEAKTKPVVAAKALSNKLSKASYYIMRDRVAFDEDKLFS

SEQ ID NO: 151648 - protein, 347 aa, unidentified
MDVSLIASVGIDLGKTTFHLVALDCHAKVILRKKFSRTQLLAYTANLPWSIIGMEACSGAHFFAAKLRNQGHEVKLIPGQFVKPFVKTNKNDFNDAEAIAEAVTRQNMRFVPIKTDDQLDLQALHRVRDRLVHRRTALINQIRGFLLERGIAFPKGPANLRNHMPAILEDSEQNIPPRMRRLLADLWQEWKQLEANITNISEEIEHISQEDQGCRRLRQIPGVGPLVSTAMVAAIGNGAAFRNGRDFAAWLGLVPRQHSTGGKPRLFGISKRGNSYLRRMFVHGARAVLLRVKYDTGGLGQWVHQLEARTTRNKVIVAIANKLARIAWAVLFNQEDYRATAAAAVAA

SEQ ID NO: 151649 - protein, 352 aa, unidentified
MTKALWAGLDVGVETTSLCVVDAAGTPLHECVCRTDLKEVVSQLRFLRRRRRARVGIEAGSGIALARGLRNLGYSVDIYETRQLSKFLRVRRNKTDATDARGIAEAGRIGAFISKVYLKDIECQTLQSWLTIRRHIIRQRVSATNLLCRQIEYYGGRVSRPNNLTRLRGAVRDELKKVFGTSTSEAAAELKFLLSVCEHLMVHEYETDSRLRRLAKSNELCRRFMTIPGVGPICALSFYATVGEPGRFTRSSDVGPYLGLTPQVHESGLTSRKGHISKMGNSATRCLLVQSANLFMRHSQPDCTLRRWVEQLERRRSRGAARVALARKLATIMIAMWRSGEAYQPTWIAIPY

SEQ ID NO: 151650 - protein, 409 aa, unidentified
MEIVIARCGGLDVHKNTVAACVRVQGPSGQITQQVRTFGTTTIQLQALVGWLQEHGVTDVAMEATGVFWKPVWHVLEPHVHLLLVNPRDIRRVPGRKTDVSDAAWIAQLLQCGLLRSSFVPPREIRELRDLTRARATLEQQTTAVANRMHKLLEDANIKLGSVATDILGMSGRAMLRALADGETDPVRLADLAQRKLRAKIPALQEALTGAMTAHHRFLLRRLLTQLAFLEEEIASFDRQIAEATAPFATLLARLDTIPGFARRGAENLLAEVGPDMAPFATAPHLVSWAAICPGQHQSAGRSHGGTIRKGNRWLRRTLGQAAWSARNKKHCYPAAQFRHLAARRGKKRAIIAVAHSLLVAAFYIIRDGVEYADLGAAHFDRLAPDKLTRMLVKRLERLGHKVTLEAAA

SEQ ID NO: 151651 - protein, 528 aa, unidentified
MAFTVRTTHREDRKSTRKSSRRRRSLQKPNGVISPRVQKVGGDKFAIVCIDPAKHRSEWMMADYFGNVLIEPQTVKHQAAFFKLAVEQVRQAQQQHDIQDTIVVVERTGNYYLFPKRAFASAGFETRVVHPFATKQYRTPADPGNKTDETDLYAQHRAAVAGFGLCELELESPYRELQLRSRHRRSLIEKGAALACQIRDHLHLAMPGYANLFHRLFETSSALAIAHRCESPAKVIELGSAGLSQHLREKKIAHRAPTIDKVLSWAAQAVHDNIKDGPLHHAIWTDLHELYQHFHRKIATLEQQLASDVVRTPYVRLMAIPGINVVSAAELAGEMGPITQYANANAITGRSGLYPSRHQSDQKDNSGPLIRQANRRLRGVLMRIADNLACHCSYYRGQAEVDQSRGVNKRASRVKIAKRFSRLALACVAGDEPMRHPCFKQPDSILEKLRRFHHQHKTPIDRLLTDLETTIEQLPYNTRGQEAAVVANVLEQQANRRRGSVAIGEVLPAVLARLGIHATNTNESGDRP

SEQ ID NO: 151652 - protein, 358 aa, unidentified
MATQSLSNLQSFVAPYHAEPFWIGIDVHKRSYHLALLRADAKTFTLVTPAIPEKLVEQLRQIEIKIAGVAYEAGPTGFSLARALQTEEIPVIVAAPSKIPRSISAGAKTDRLDCLKLAQFVSKGLLRPIAVPTPKEEAERALCRRRHQLVDSIRRCKQRIKGFLLYHGFKETESLRRWHTDYPDQIAALPLEAEGRLTIESHLRELTFFENELRSVIEHLEDMNQHPRHQPVIRSLTSVPGVGKIVATTFHTELFRPERFDRAEEVASYLGLAPNVRQSGERAARGHLAPVGQTRLRSLLIQAAWIWRAKDPYAQEVYHRVLSKTGIPQKAIVALARRLAIILWRLSIEQRAYRPLEA

SEQ ID NO: 151653 - protein, 364 aa, unidentified
MNDCITWVGLDDSAKRINGAILVGNEAECREPFAVENNDSGLGRMIKRLKSLPGEVRCVYEAGVSGYHLQRFLHKHKIKCEIAAPSLTPRRPGDRVKTDSRDARKLAGLYRAGELTLITIPAQEQESLRDLVRAREDALEDLQRSRHRLNRYLTRKGLRYLGSKNWTGKHLQWIQSLQFEDPRDKFVLDEYRLSLNEGMTRLKRFDEEILALAKSPEYQPRVSYLMALKGIKELTAMTIIAEVFDLKRYKDARSFMAAIGVVPSEYSSGGREHRGCITKTGNSHLRRIFVESAWHYQSRSVPGRCLQKRRAGIPAAVLEIARKADLRLSKKYWRMVGRGKDSRTAAVAVARELAGFVWAIGQVE

SEQ ID NO: 151654 - protein, 355 aa, unidentified
MSQEKYIGMDVHQATISAAVKNAEGKLLMECVLETKAATILEFVQGLRGTLALTFEEGTLATWLHDLLKPHVSRLVVCDPRKNALMRDGNQNDRVDARNLAELLRTNQVHAVYHGKHGTRALKELGRSYLTLTKDSTRVMNRIKSVYRSWAIPCAGTSVYSRHHRAEWLAQLVEPAVRIRAEHLYQQLDSLKPVRQAARRELLRESRKHAPVKLLRQIPSIGPIRSALLVALLQTPHRFRTKRQLWAYSGFAVQTYDSGEYRFVRGKLQRNRERITVRGLNHNHNHDLKNLLKGAAISAIQRPGPLQDFYAALVEKGIRPSMARLTLARKIAAITLIMWKKGVSFDSKQLQRQAA

SEQ ID NO: 151655 - protein, 383 aa, unidentified
MSTSSSPSILYLGLDVHKEWIVSAVLPADAPATTQVDRVANEPAVLRRYFARLARRGALHACYEASGAGYVLQRAMQAWGYACEVIAPSLIPQRPGHQRKHDRYDAQQLAHLYRSGDLTPVRIPTEAEERVRDLVRCRATFQRELLRARHYVLKFLTRRGVRYLGGKCHWTRAHHAWLEQLPRTGVFVAEDATVFAEYVALMQYARQRREALDTALEALVLSPSLTRQVAQLACFRGLETQAATVLATEIVDWRRFAKPTQLTAYLGLVPREASTGERERRGAITKAGNSHCRHVLIQAAWAYRHPPAVGARLAQRQRGHSPVLLTHAWKAQHRLHTLYRHLAYRKSPHVAVVAVARELVGFLWAAMQMDPAAEAGPAPGRAA

SEQ ID NO: 151656 - protein, 367 aa, unidentified
MKKVSTAAAKASKRISSQKLTVGLDLGDRCSWYCVLDEAGGVLLEQRVSTSPKAVREVFGGMAGSRIALETGTHSPWVSRVLSAVGHEVIVAHARKVRLIGESRKKDDRLDAKTLARLARIDPQLLCPVKHRSAKAQADLTVIRARAGLVRARTALVNTARGLTKSYGERLRGCNPRNMNPKKSEELSPELQTALQPLLAGLESLSEQIREYNERIEELAQESYPQVALLKQVKGVGTLIGLTFLLTLEDPHRFRKSRDVGCYLGLQPGRRNSGQSEPQMHISKEGDPYLRTLLVQGAQHILGPFGVDCDLRRWGLKLAERGGKSGKKRAIIATARKLAVLLHHLWVSGEAYEPLHNSQQSAMPAAA

SEQ ID NO: 151657 - protein, 347 aa, unidentified
MRFYQQQHPFYCGVDLHARTMHVCLVDQAGTVLVHKNIECRPDRFLQLIRPYREGLAVAAECMFAWYWLADLCQEEGLTFVLGHALYMKAIHGGKVKNDKIDSQKIALLLRGGMLPMAYVYPGHMRATRDLLRRRMHLVHTRAEAMAHIQNSVSQYNLPPLAKKLLYAANREGVAEKFSHASTRKMIETDLAMIAAADEQIRSLKLHLTRTAKVDDPIAYQLLRTIPGIGSVLGLVLLYELHDAGRFASERQFVSYCRLVRPSHESAGKVRTGKNHKIGNAHLRWAFGEAACLMLRELPAAESFVARAEKKHGKAKAISILAARIARTAWLMLKRKEAFDVNKFLKS

SEQ ID NO: 151658 - protein, 345 aa, unidentified
MDIMYYIGLDVHKKTISFCVKDASGQVHQEGKIGATRRELDRWIETLPQPRIIAMEATIFTGWIYDHLRPHAQQVKVAHPLMLRAIAAAKKKNDRIDASKIADCLRCDFLPECHMASPEMRDRRRTLRYRQLLVRQMVQMKNRVSGLLMETGVSYNKQRLHRVGYFRELLSSHEEVHESIRPLLKLSRETIVRLQKTEYGLVSSLERDPWLADRIRRLRTVPGVGPITALTWALEVGDVSRFRSIRQAISYCGLCGAEKSSADKVMRTPLSKQRNKHIQHVLVEAAKLAPRQDHDLALVYETEKQRGNTNRATLAVARKMVAYLLAVDRGKRDFVPAGDHRSAAA

SEQ ID NO: 151659 - protein, 438 aa, unidentified
MPNQSSSEPQWAAYVAIDWADREHVWEMQPVEGGPCESGKVEQTPEAIEIWASQLATRFNGRPIAVALEQSRGPVVFSLTKYSHLHLFPVHPSTLAHFREAMVPSGAKNDPGDTRLLLELLLHHRARLRRLQPDTEQTRELQFLVENRRRLVDDRTYFSNRLIAQLKLYFPQILRWFYKPASPVACDFLLRWPTLEAAQKATPRALKTFFAKHNCQDVERRMEEVRKAVCATHDQAVIRSAMIMVQATVRLIQTVHQDISHCEERIEQLTKSHPDFAIFDSLPGAGDALIPRLIAALGTQRDRFASAVEIQSYSGVAPVVKQSGNTKLTHCRQAYPRFLRQTFHEWALHSILKSTWARAYYERQLSRGKKHHTAIRALAYKWIRILYRCWKDRLPYVESFHGDAQKKRSAENVSTQNAVVELQCKKVAGFIKVVAVNY

SEQ ID NO: 151660 - protein, 415 aa, unidentified
MTEQIHVSVGLDLHKKFILATLLSDTGLKKQLRFERTEFGLLALKEWTIENNCEIVACESTSDYWVPVYDMLEGHVTVIVGNARDIKMFSHKKTDKVDSELIAQLALKGMIRPSRVFPREHREFRSLVRLRHKLVQKRTDIKNEIHHILDSELFRLSSVLTDLFGKSGLLILRALVNGIPMDEVIKMLPPNVRKKTDQLIEIVQTTVSPGAIFRLKHCLNLLKCMNEEIDALTKGIFQFANENFNHEMKILKSVPGIGNIAAFTLIAEIGNFSDFSSGDKLASWLGIVPNVYQSADKLRTGSITKRGSDHARWILTQVAHAATRSHNNVFRRFYDRKKPIIGTGKAIIALARKIATLIWHLITNDEFFNHKTDGPPSNLSKMVKVRIPSIVSLEEILKIFKEAAIVLKEPDPGNG

SEQ ID NO: 151661 - protein, 352 aa, unidentified
MVIVIGADVHKATHTFVAVDEVGRKLGERTVRATTTGHEGALRWARGQFGGELRWAVEDCRHLSARLERDMLAAGQEVVRVPPKLMAQTRASARERGKSDPIDALAVARACLREPDLPTASHDDTTRELKLLVDRREDLVNERTRQINRLRWHLHELDPEFDVPVKGFAIVKQRRRTHEWLEGKPGLVAELARDVLADINAGSAKIDELEKRITTLVQDRYPHLLALPGCGPLSAAKIVGETANIDRFRSEACFAMNAGVAPLPVWSGNTRGRVRMSRTGNRQLNAALHRIAITQTRLPGLGQAYYRKRLDGGDSKVEALRCLKRRLARVVFHALPAEQKPQEHTPDLPLAA

SEQ ID NO: 151662 - protein, 475 aa, unidentified
MNIKGTKKKNQVVTANIFEQQELLKKAEVIKENLTASTWRELETNGKFDKNKKLSFISDDMLILGCDVGSETHYMRAIDTRGRELSKSAYSFNNDYEGFQSAKEWAVKIAAEHDKSQIVLGLEPTGHYWFCLATWMIANGISVVQVNPYAVKQTKEVEDNSQLKDDRKDPKLIANLVKDGNFGMPYLPEKIYAELRRLSMFRDQLNEDRIRTINRMHREMKIYFPEYKEALGKVDGAFSLELLKEAPFPDELTVLGEEGIRQIWHAAKLRGRGYSRAREILQYAKASVGIKDGSIASKAAVKWFVQKIMELDVELAVIENQINQKCQEIPHTGNVLEISGIGENTLSGILAEMGDISRFDDVKEIQKLSGLGPVACSSGKHKGETKISHRGRKRLRYWLFQAAKSAVAHAEEFKELHMYYTTRADNPLKKMQSLIVIACKLLRIIYTILNTGTKYAPKKMLMDIRRPENKEAIVA

SEQ ID NO: 151663 - protein, 365 aa, unidentified
MNAIHYIGFDVHKKTISFCVKTADGQIVEEGSLQAERTVLRRWAAGRKQVWHGAMEATLFSAWIYDTLKPYAQQLSMGHPAKMKAITAGKNKSDQIDARTIADLLRCNLLPASYVLPPQLRDLRRLLRYRNLVVQQSVRMQNKMAGLLMESGTAFNKQKLHQKKYFADLMKSLEEVPESVKDLLRMSRGSMEMFQSTQKQLVKRLLSEPALEQRVERLMSIRAVGPITALTWALEIADPQRFASIADAVSYCGLSAAFRSSAGKQQRGPISKQRNAWLQPVLIEAAKLAPLWNPQLAAVHARALERGHANRATLQVARKLVAYLLAVDKSGQPFQIHTPPPPAATTAKKKPARKSKKAVALAPAA

SEQ ID NO: 151664 - protein, 339 aa, unidentified
MKQVYAALDVSDKTTHVCVVDGDGTIVWRGVCATDPEALATVLKKRCPAVIRVVLETGPLSAFLYHGLIERGLPAICVCARHAKGVLSTRVNKSDPHDAEGLAQLARTGWFKAVRIKQEATHIDRAHLKIREQLITSRQAMANQLRGLFKLFGLRLGKVTTPGKRRERLEALFAQKPELRSVMQPLIEGIEALEAQIKRSTRLLAASAEADPVAARLMSVPGIGPFVALTYKSSIEDPGRFARGEDVGAYAGLVPRRNQSGERDYKGRISKAGDAMLRSALYEAANNLLARVKRPCALQTWGKKLAEAKGPKRARVAVARKLAVLLHRLWLSETEFRWT

SEQ ID NO: 151665 - protein, 373 aa, unidentified
MLLPHQRRTLAWGCHSMEHAMSQNQDSMIAVVGIDIGKNSFHVVGNDKRGSIVLRQKWSRGQIEARLANLPPCLVGMEACVGAHHLARKLTAFGHDARLMPAKYVRPYARGQKNDFNDADAIAEAVQRPTMRFVATKTANQLDLQALHRVRERLVSQRTGVINQIRAFLLERGIAVRQGQRFLRAELPGILATPCDVLSPRMVRVIEDLAGDWRRLDERIEGLSSEIGAVARQDAGCERLMSVPGIGPIISSAMVAAIGTGDAFSKGRDFAAWLGLVPRQMSTGDRTILGKISKRGNRYLRVLFVQAAWVVLIKPKSWERYGLKPWLEAAKKRLHHNVLAIALANKLARIAWSVLARGRSFEVSKIEVSAQPA

SEQ ID NO: 151666 - protein, 366 aa, unidentified
MAMTTMTHPPQPTLRVLGGVDTHKDVHVAAALDDTGRLLGTATFPTTTVGYRQLWRWMRSHGEVVAVGVEGTGAWGAGLARYLTAEGADVREVMRPNRQHRRRYGKSDEADAIGAARAVLAGEALGTPKAGTGQVEAIRLLRVARRSAMKARTQAGNQIHAVVDTAPEELRRRLVSRPTATIVAEVARFHRRLPDTPLEAARFTLRSLARRWQYLDDELAALDAQLDELTATAAPTLRAMNGVGPQVATALLAAAGDNPDRLRSSSSFAALCGVSPIDASSGRQQHHRLNRYGDRQANWALHVIIISRLRWHAPTKAYMARRLAQGRTPKMIMRCLKRHVVREVHRAITLDLGHQTERTRAQPIAA

SEQ ID NO: 151667 - protein, 338 aa, unidentified
MKLYGGIDLHSNNSVIVILDEKDETVYKKKHKNDLLEILSCLLPFRDQLQGLVVESTYNWYWLVDGLMEAGFKVHLANPAAMQQYSGLKHTDDKSDARWLAHVLRLGLLPEGYICPKEERSVRDLLRKRSQLVRQKTANVLSIINLFTRNTGKAINLRQVKKLTAEELRNQFGDESLCLAVASNLEVFRCLEAQVKLLEKAILEQVKLRKEFIQLKTVNGIGDILALTIMLEAGEIERFPKAGNFASYCRCVGSQKISNGKKKGKGNTKNGNKYLAWAFIEAATSAVHWNVQVKRFYQRKKAKTNSMIAIKAVAHKLARACYYILRDQVEFDNHKAFG

SEQ ID NO: 151668 - protein, 345 aa, unidentified
MPIVGGLDIHRKQLTFDYLDTATGEVKRGQITPADRAHLRAWLARFAGRDDVAFALEGCTGWRYVAEELARAGVAAHVAEPADTAFARGRKRHAKTDKTDSRHLRELLAEGRLPECWIPPSRILECRALLETYHDLRAEHTAWVQRIHAVFFHQGAPALGDGALRTDRDLEALRAAAACHLSPAGQLQVTTALDMLAGLEARLDVLRHRLLDAARSLTGARVLAERLYGVGPVTGLAMTCWLGGAGRFSSSRQAVRFAGLDVTVWSSDRKGPPGRLSRQGPPVLRWAVYEAGKTHARASAPDHAYYAAVKDRKDGKRAALSEARKLLRQACHILAELGDDALTAA

SEQ ID NO: 151669 - protein, 346 aa, unidentified
MMIIGCDFHPSWQQVSWLDTETGETGEKKLVTAAGDAERFYRQVPAPALIGMEATGNCHWLVDLLAELGHELWVGDAAQIRASYVRQQKTDRRDAEHILKLLVEGRFPRIWMPSAEVRDLRQLLLHRYKLVIIRARVKNELQHLCLNKGVQRQHKLWSKAGQQMLHELPLKMWAARRHEDLLQLLAMLDQQIAPLDQAVKAEAQRDKMALLLETQPGVGAITALAYVLTMGDVSRFPRGKQVASYLGLIPREHSSGGRQKLGAITKQGNRMLRMLLVEAAQSAVRLDPRFRKEYLHRCHQKPKAVAKVAAARKLAVRLYWMLRTQTAYPEVVRIESSPRVPLVGAS

SEQ ID NO: 151670 - protein, 345 aa, unidentified
MKIVGCDLHTRYQQIAMLEEETGELVERRLEHESGEARAFYAALSAPVRVGIEATGHTRWFERMLGELGHELWIGDAAQIRASMVRKQKTDARDAAHLLDLLLSDRFPRIWRPTLEERDLRQLVWHRQKLVWMRNAVGNQLHALAMGEGVCRKKKLFTKKGRVELESLKLGPWASHRRQELLKMLDGLDPSLQQLDRAVQQQAEQNAEAVRLMTHPGVGPVTSLAFVLTIGPVRRFERSKQVVSYLGLNPREHSSGGRQRLGAISKQGNPMMRSLLVEAGHTAARLDAELRQDYQRLKLRRGSGVAKVAMARKLAVRMYWMLRNQASYAQLVRMQGSPRGTLVGQ

SEQ ID NO: 151671 - protein, 388 aa, unidentified
MHVVAAQSEAAIAIRTDLCATFVSLELSRSTWLLTSLSPGAGEKMSKHSVSAGDTAGLFSRFVELQQKARTRTGRMFPIITIQEAGLDGFWIHRLLQGEGIESWVVDPASVLTSRRRRRAKTDKIDGETLVRTLLAYKRGEPRVCAMVKAPTPEEEDRRRICRERKTLTAERVRHVNRIKGLLFAQGVGDYEPLRRNRRGRLKELATGDGRPLPEHLKAQISRELDRLEVILAQLKAVGSERDAMLEPAKEGPPTPALLLAQLKGIGPEFAAVLWSEGLFRSFNNRRQVAAYAGLAPTPWQSGSVAHEQGVSKAGNPRLRTTMIQLAWLWLRHQPGSALSIWFRERVQRNGGRGKKTAIVAMARKLLVALWKYAVHGILIDGTTAKAA

SEQ ID NO: 151672 - protein, 403 aa, unidentified
MNNVAGIDVSKGKSMVSVLRPFGEVVAKPFSIGHTGSELKELADYLKSLDGETRVVMEHTGRYYEPVARFLHDEGVFVSAVNPKLIKDYGNNTLRKVKTDKADSRKIARYGLDNWAELRQHTPMDTIRMQLKTLNRQQSLYAKTKTMMKNNLIALLDQTYPGVNALFDSPVREDGSQKWVDFATAFWHVDCVRNMSLTAFAERYRKWCKRHGYNFSQSKAVEVHTGAQDLIAMLPKDALTKTMVRQAIDALNAVSASLERLKAEMQALAAQLPEYPVVMAMHGVGDSLGPQLMAELGDVARFTHRNAITAFAGVDPGADQSGTHEAKSTRVSKSGPPELRRALFLVMDCLLKTQPQDDPVYRFMDKKRAEGKPYLVYMTAGANKFLRIYYGRVKEYLASLEGN

SEQ ID NO: 151673 - protein, 406 aa, unidentified
MRVVHERCAGLDVHKSSVVACVLLPQGKELKTFGTMTGQLEQLAEWLQGLAVQAVAMESSGVYWKPVFNILEAAGFELVVANARHIKAVPGRKTDVKDAEWIADLLRHGLLKPSFIPGRQERELRELTRYRRTLIEERAHEVQRLQKVLEGANIKLEDVISNVVGLNGRRFLSALVAGEYDPEAVAASANYGLQRKRELLAQSLRGSIGPHQRFLLDQLLSHIDFLEQRITALDEEVKHRTRPFEVAISHLDQIPGVGSRAAQEILAEIGIDMSRFPTHRHLASWAKVCPGNNESGGKRRSGYAGRGNRWLRSILVECAWCASRTKDSYFKAQYHRLAARRGKRRALLAVGHSLLIVIYHLLRDGVLYQDLGATYFDQRDRSLIARHAVRRLEALGFQVALTEGAA

SEQ ID NO: 151674 - protein, 366 aa, unidentified
MKKISTVQVFGNEVFKEQKLTIGVDLGDRWSFYCVLDEAGKIILEQKVSTTPEAMKQTFERIPRSLIALETGTHSPWLSRLLKELGHEVLVAHAQKVELISKSNRKDDRHDARTLARLARIDPELLGPVRHRSAKAQIHLTVIRARAELVSARTALVNGARGLAKSYGERLPKCGTEQVSRELAAKLSAELREVLEPLLKEIESLNERIKEYDARMEKIAKESYPQVALLKQVQGVGTQIALTYVLTLDDPHRFAKSREVGCFLGLKPGRRDSGESQPQMHISKEGDRYLRTMLVQGAHYILGPFGEDSDLRRWGLRLAERGGKNAKKRAVVAVARKLAVLLHRLWVSGEVYEPLRNSHKAMRAAA

SEQ ID NO: 151675 - protein, 325 aa, unidentified
MDDTGRIVREVKVASEPDALLAVLTNPSYHFKRIGLEAGPLSQWLFSALAEASLPVICVETRHMRAVLKAQINKTDRNDARGIAQMMRVGLYRPVHVKTLRSQKLRVLLTHRKLLQSKAIAVDNDLRATLRNFGLKVGVVGTAKFEARIKELVENLPDLTILIEPLLIVRRAIREQIGVLHRRVLAVVRDDDVCRRLMTVPGVGPVVALTYRVTVDVPARFRKSKSVGAVFGLTCAKHQSGENDRPGAISRCGDEMMRMMLYEAAQILLVRSTKWSWLKAWAMKIARHRGMKKAIVALARRLAVIMHRIWVDGTEFRWTREAAAA

SEQ ID NO: 151676 - protein, 430 aa, unidentified
MKSNTQNAKIEAITEKTLVLGIDVGSEMHYARAFDYRGIEYSKKPFKFSNTEAGFVTFKEWILDLKERHEKDKVVPGMEPTGHYWFNLGKFLQDNEMKPVLVNPHHVKKSKELDDNNPTKNDRKDPKVIAGLVREGRYMIPYLPDGVYADLRTASNIRFQLQAELTRIQNRISRWFNIYFPEYKTVYGKPDAKSGMLILKQAPLPEDILTLGIDGVNQIWRDAKMRAVGKARAKTLIEAAEHSVGSKEGAVSARMEIRMLLEDYESRNIRLQEVMTLIEELVNQIPMAEKLLGIQGVGIKTVSGFLAEVGDISRFNNPKELQKLAGLALVENSSGKHKGKTTISRRGRKRLRYLLFEVAMSLVAKNPEFRELHTYYTTRRLNPLKKMQSLMAIAAKLIRVFYAMLTKGVDYDPKKMVGDIKRPAVYLQAA

SEQ ID NO: 151677 - protein, 423 aa, unidentified
MSQNQPEIQYAAFLAIDWADQKHVWSLQDANSSTCERGEVDAMPEAVEAWVAQMSQRFAGRPIAVAVEQSRGALVFLLSKYEQLHIFPVPPAMTANLRKAFYSSGAKSDPTDADLLLDLVQRHREKLRRLSPDTEATRLIQNLVEERRKLVDEKSAQSNRLEAHLKIYFPQIPHWFGDVDSPLVCALLERWPTLEALQTARPGTLRSFFREHHCRKEELIESRIRSIREAMPALKDRAVVEAKVAVVKVSVQLIQVLHEGIEGFNRQIQEAAEAHPDFFIFDSLPGAGAVMAPRLLAAFGSQRERYQNAAEVQTLSGIAPVTENSGKSSWVHFRFACSKFLRQSFHEWAALSIPQSQWACAYYELQCRRGKRHHAAVRALAFKWIRIIYRCWKERVAYDEKVYLAALAKHNSPLVAATKAEAL

SEQ ID NO: 151678 - protein, 349 aa, unidentified
MDKITTIGLDIAKNIFQLHGVDGSDEVIVRKPLRRGQMLTFFGKLSPCRIGMEACATAHHWARTLAELGHDVRLIPPAYVKPYLRRQKNDTADAAAICEAVTRPSMRFVPVKSEEQQATLMLHSARELLVSQRTALINALRGHFAEFGIVVVQGARNVRLLVAIIHDENNLDLSASARLALLPLARALSDIDAQITGLSKSILVAHRSNAVSVRLASIPGIGPITASSLAASIADAGVYKSGREFAAYLGLVPRQHSTGGKPKLGRITKMGNRRLRKLLVIGAHAALYSIKSGKTNTPLANWARSLLAKKPFKLVAVALANKMARIAWAIMTRNTVYQPLFKGTASQVA

SEQ ID NO: 151679 - protein, 346 aa, unidentified
MMEYVGLDVSKEETSFCVKDCSGKVLASGKVASDPQSLFEGLREHCLCPDTIVMETGSLSNWLARELLKLGLKVDVIDARQAHAVLRLQHNKTDANDAAVLADLARTGFCRQIHVKSDEASRMRVLLKAREHMVGQHSSRQNTIRGLLASLGHRLPKGAGKFARRVKAVLENHRDLAVIFDPMLDDMAALQKGIKQLDRAVAAAAKHSAACRLLMSAPGVGPVASVAFAATMDDPVRFAKSRSVGAYLGLTSRRLQSGEMDYSGRISRHGDKMMRALLYGAANSFLSVVRRAHPLKDWARRVKRRSSHKKAVVALARKMAIILHRMLITGEAFKWPQENQKEAASA

SEQ ID NO: 151680 - protein, 366 aa, unidentified
MQKLSTRRVTGNEILKGHQLTIGIDLGDRWSFYCVLNELGEVLQEEKLPTTPDAMKRTFEKLPASRIVLETGTHSPWISRLLAEWRHEVIVAHAQKVQLITKSSRKDDRHDARTLARLARIDPQLLGPVRHRSAQAQIHLTVIRARAELVSARTALINAARGLAKSYGERLPKRGSEQVGRELATALSTALREVLEPLLREVESLNERIGEYDQRMEQIATQAYPEVALLKQVKGVGTQIALTYRLTIDDPHRFAKSRDVGCFLGLRPGRRNSGQSEPQKSISKEGDRYLRTMLVQGAHYILGPFGEDSDLRRWGLKLAERGGKNAKKRAVVAVARKLAVLLHRLWVGGEVYEPLRNTNRAMGAAA

SEQ ID NO: 151681 - protein, 359 aa, unidentified
MSAEKAHERRVIGGVDTHKDLHVAAVVDDRDRVLATASFAATRQGYRQMLTWMRSFGPLRRVGVESTGSYGAGLLRFLQRSGIKVLEVTAPDTQDRRRRGKNDDFDAQSAAHAAFAGTRTVTPRTRDGMVESLRVLSACRKTAVAARRIALQMIHNTIVCAPDALRETLRRMTRMQLVRTLAAWRPDLSAYRDVEAAYRIGLKSLARRYLELHDEIADLDAMIGAIVDELAPDLVARNSIGSNGAAQLLLTAGDNPERLRSEAGFAALCGVSPVPASSGKTVRHRLNRGGDRAANSALHIIAIGRLRTDERTKAYVTRRIAEGHSKLEAIRCLKRYIAREVFTLITRRRQAINQTQIAA

SEQ ID NO: 151682 - protein, 326 aa, unidentified
MDDAGKIVREVKVASEPDALLPMPTNPSYRFKRIGLEAGPLSQWLFSALAEADLPAICVETRHMRAVLKAQINKTDRNDARGMAQMMRVGLYRPVHVKTLRSQKLRMLLTHRKLLQSKAIAVENDLRGTLRNFGLKIGMVGKVKFEARVRELVEGLPDLAMLVDPMLIVRRVLREQIVILHRRVLTIVRDDEVCQRLMTTPGVGPVVALTYRATVDVPARFRKSKSAGAVFGLTCAKYQSGEIDRSGRISRCGDEMMRVMLYEAAQSMMRSKKWSWLKAWAMQIARRCGMKKAIVALARRLAVIMHRIWVDGTEFRWTREQAAAAA

SEQ ID NO: 151683 - protein, 367 aa, unidentified
MRIIGCDLHARQQTLAMLDTTTGEVVNLTLRHEGNSVREFYSKLPPPVLVGIEATGPMQWFLKLMEELGIECRVGHPAQIRAAEPRKQKHDRRDADLILKLLAENRFPAIWLPNQELLDLRALLLHRHQWVRMRVRMQNALQAIALANGLRRGPSLWSYDGQAKIAFLPLMPHAAYRRNRLQAMYKTMESEIDSLNKQVAKQAGNRPGAQRLMTHPGVGPVTALATEVFLGDPQRFANGKALASYVGIIPREYSSGGHQRLGGVTKQGSPLLRFLWGEAGAHAARHDPELKRFYRRKLVHKGLGKARVAVARKLGIRLWIMLRDEIDYQEFCRRGQKTVRPVAGMPETGNGAKSHRPVDEATRLPES

SEQ ID NO: 151684 - protein, 374 aa, unidentified
MLTNEMDSPSPNGIILCQSVVVKKHLKEGEVQMNITTLGIDLAKNTFSIVDMNQHGKVVCRKTISRNKLLPFIAQCPPCLIGMEACSGAHYWAREFEQMGHRVGIIAAKFVEPYRKGGKNDNNDAEAICEAVMRPNIWFVPVKSPDQQAVLCIHRARQGLIKDRTALLNQLRGLLAEFGIVIPKGRYPAQATIPDVLSNMNNGLPMLARNIITDLWERIQKSNKQILSYDRDLAKLVREDSVAKRLMTIPGVGEQVASGVVASVPDPRLFKNSRQFCAWLGLVPRQYSTGGKTRLGRITKHGDKYLRMCLVHGARAVVAALKEKQDHVSCWVRELVERRGYLRAVVALAARNARLIWTLMIKEENYKAIPVMEA

SEQ ID NO: 151685 - protein, 334 aa, unidentified
MNCVGIDVSHKELVVVVSVKGKARKAKSYKNTAAGFITIIQLLAKLKGHVKVCLEATGVYHFDLAVSLSRAENIEVMVINPKVSSNFAKVLLKRSKTDALDAEILAIYCERMPFEAWVRPANENIALRAHSRRMAALSKLKAQNKNQLHALISTEETPELIIEQINELIAVLDQQIGVQRDAALELIKGHTELKARFDLVTSIKGIADTSGIQVLAELMILPPDMSAKQWVAHAGLDPRAFESGSSVSKKPRISKAGNKYIRQAIYMPALVATRFEPHIKGYYLHMINDNGLKKMQAICAVMRKLLHAIHGMLKANKSFEGERFYKFPSEATYS

SEQ ID NO: 151686 - protein, 348 aa, unidentified
MTAGRSWAWICTAGAACWCDGRRLGTAKITNSPAELRGAIARAGKHPRVVLEATYGWYWAADVLAAAGAEVHLAHPLGVKAFTYRRVKDDVRDSADLADLLRMGRLPEAWIAPHEVRELRELTRYRIKLVRLRTSCKDQVHGVLAKLGVAVTCSDIFGVAGSAWLDGLRLPQPYAGKVTSLRHLAGELTTEITMLGEVIASLLAGDRGYQVIQQLPGIGPVLAAVIIAEIGEVTRFRNAGQLCSWAGLTPRHRESDTKVARGHVTKQGSRLLRWALIEAIQRIPRDSVIGAVKDGIIGRRGKEAKNIAKVAAARRLLTLVYYGMRDGQIRCLSRPPAGPPVTETARAA

SEQ ID NO: 151687 - protein, 412 aa, unidentified
MSLDPHEEPAAIQTHIGAIFISLELSRSKWLITSLVPGGGQRMSKHWVEAGDLAGLLARFWAIRDKVLARTGKSYPIVVIQEAGLDGFWIHRSLVKEGIESHVVDAASIAVSRRRRRAKTDKIDGEALLRALLAFKRGEPRVCSMVRAPTPQDEDRRRICRERETLIAERIRHVNRIKGLLFSQGIGDYEPLRRDRRRALEAAHTGDGRALGANLKAQIGRELDRLELLLGQIAAIEAERDAMLARQVEAEAAPRAETVPEAEAAAGVQSVQGAPPRVQKLMDLNGLGGQTVAMLETEAFYRSFDNRRQLAAFGGLAGTPWKSGKIDHEQGVSMGNHRLRQTMIQLAWLWPLHQPNSALTRWYLERTKGATKLQKKKMVVALARKLLVALWRYVDAGVPIEGAVLKRAARAR

SEQ ID NO: 151688 - protein, 410 aa, unidentified
MDLLHSRCAGLDVHRDTVVACVRVQVEGRTSNEVRTFGTKTGELLELSAWLSDREVTHVAMESTGVYWQPVWHILDGEFTLLLANAAHVKNVPGRKTDVNDATWIASLLAHGLIRGSFVPETPIQELRMLTRTRKQLVRERASHAQRVDKVLQDANIKLGSVLTDIMGASGRAMLLAMIDGVTDPEKLADLANTRIKASREDLVAALRGKVTANHRFLLKLHLGQVDALGATIAEVDKEVGERIEPFRDAQRRVTQIPGIESVAAAAVLSEIGVDMARFPSAGHLISWATLCPRNDESAGRRRSTRVRPGAPWLKPLLVQCAWAASRTRGTYLRALYLRLKARRGPKKAAVAVAASILTAIYHMLKNGTEYMDLGPHHFMKDRTRTANQLIRKLDRLGFDVPEIRDRMTA

SEQ ID NO: 151689 - protein, 372 aa, unidentified
MSKSSILFVGMDVHKETIDIAIATNRLNGKVRHYGQIQNRIDAIDKFIAKLKREAGTLKFVYEAGPCGFGLYRHLTRKKHSCEVVAPSLIPKKPGDRVKTDRRDAMRLAQLYRAGDLTPVYVPDVDDEAIRDLSRAREDAMLDQKAARQRLKSFLLRHGIRYEGQANWNEAHLRWLTEVIMPTPTQQIVFQEYVNTVTERTHRVNQLETMLKTQAKDWYFAPVVSALQAMRGMRFINAVTVVCEIGDLRRFDNPRQLMCFLGLVPSQYSSGEHTRLGPITKSGNRHARRNLIEAAWAYRYRAKVSREIQIRQENLPLKIRDIAWKAQVRLCARYRKLIARGKNKNVVVVAIARELVAFMWDIAHHVNLKPIR

SEQ ID NO: 151690 - protein, 366 aa, unidentified
MKKHNSNKQITTKGDQKETFAFYIGIDLGDKMSDVCVLDPAGEVSEQFRLRMKGTDFQAYFTAIPRSRVAVEAGAQSRWVAELVEGCGHQVYVSNTGKVPYIHESDDKNDSGDAYKLAELVHWKPRLLHPIQHRSQQAQADLSWIRAREVLVESRTQMLNAIRGMSKAFGERLRRCSAESFTAQRAEQIPAAIRGAVGPLLEMIDHLNEQINYYDQMIHHVARTRYPKYWLLDQVGGVGVHTALAFMLTIGDPERFAKSRTVGCFLGMRPRKKDSGERKPQLGITKAGVGYLRKTLVNCAHYILGPHRPDSDLRRFGLRICERGAQNAKKRAIVAVARKLAVLLHRLWVTGEVYEPLRNSQTATAA

SEQ ID NO: 151691 - protein, 344 aa, unidentified
MKKVLIGIDFSKEKFDVAIIVKSTSTQEHSLFDNKVSGYRKMIKWINSVVEDIPCSSWLFCGETTGGYSRMMSDWLYAQGYDVWIENALVIKRTFPLKRLKNDTVDAFMIAEYALRFEDRVQLYEPLSQALTELREIFLYRHHLVRHRCSFEVRRIEKRFTQQKSSNKNVISQSARHIITEINKEIAKCDEKIKEYIESDDQLSSIFAIVTSMPGVGTINAVSLMVYTNNFTKFAYNPRKIACYYGIAPFGRDSGTSVHTDPRVGFIANKMLKSLLTQAALASVRTCPQIAKYYQRLIERGKKPMVALNNVKNKMIAIITAMVRTGCMYQPDNICLATQSVIVK

SEQ ID NO: 151692 - protein, 428 aa, unidentified
MSYRIAGIDVHKKMLAVVVSDVEIESEYQFERRMFSSNPEQLRSLAAWLVEQKAEEIVMESTAQYWKPVWGALERYWKPMCEKREGARRKSGTLHLAQALSNRGRRGRKRDFVDAERLVKRLVARELTLSFVPDAEQRLWRTVTRKKYQLRRDLVRIHNQLEALLEEAHIKLSSLVSDLLGVSARRMLKALADGETNPAALAALAHERLRATPEQLCDALGACTELKPVYRRLLKMTLEHLQILEQQIGQLDQELATLLHPHQDAVERLAEVPGFAVDSAQQIIAEVGPAAATFPSEKCLSSWVGACPGEEESAGVNYSHRSPKGNRHMRRLLNQTANAAVKAKGSIFEIIYRRCVPRLGHNQAIGVIAHRQCRLIWLILHQGTRYEERGPAVTKRSRYQRTWRMIRQLRNLGYRIELPNPDASQAQA

SEQ ID NO: 151693 - protein, 451 aa, unidentified
MEAEGLPVVRANVAGIDLGSKQHWVCAPKPGGQGREVKSFGATTPELERMAAWLKERNVASVAMESTGVYWIAPHEVLERHGLEVVLVDTRQLARVPGRKKSDPVDCQWIQRLHSCGLLMGAFRPVEQVCMLRTLVRDKAVLVAETGDWLRRMQKSLDQMNVRVHRAVSDIDGVTGMAMVRAIVGGERDARQLAKFRDPHCHQSEEAMAEQLSGHWRADHLFTLEQTLKMYDAIPERIAAYEQEIMRKLAELEREECRGKEAPKLNNPNKAKAIKKRGEEPLRQALYRSGGVDLTGIDAIGVETVLLVQSEYGTDLSMFPTEKQFVSHLTLAPHKPTSGGKPVKKQKKKRGSASSRVAAGLRMAALSLRNSKTALGAHYRHIAARKDGDVAVFALARKLATLIYRLLRWGQPYLDEGAAAYEKRYQEGRLKRLTATAKDLGYQLTPKAVTA

SEQ ID NO: 151694 - protein, 453 aa, unidentified
MKKEKPKMGIVKMGNGLPVFNAFAAGIDIGDTLHCVAINDGKGGHEVKTTSAFTCDLYEIVDYCKCNGVTTVAMESTGVYWLVLYLLLEEAGIEPYLVNAKHAKNVTGRKKDDTDSIWLQKLHTCGLLQKSFQPDNEIRLLRSYTRQRKNLILLGSDSIRRMQKALELMNIKIHTVISDILGKTGMGMVKAIITGERNPEILCSLCDPRIKASREDIIKSLQGIWKEEYLFMLEQAVENYEFLQMQIKSCEEKIQQQLLKQVAIIKDGDITGLEETPPKKSKAKAKKNQFDFSLLPYLIAIAGVDLCQIPGISEVTALEFISEIGVDMRKWKSSKHFAAWLNLTPNTKISGGKIISSKMMKKNNKAGQLLRQAASCLITNKTAIGDYYRAMRARLGGKGAALATAHKLARIIYAMLLKKTEYNSGIIVDNQEKIKEEKIQKLEKQLARLKQAA

SEQ ID NO: 151695 - protein, 443 aa, unidentified
MIDLDLPKEGYVSEEKSIEIRVSVDVGSRSHSVAIGLPNGEVLEEFEIAHRVEGFKDFFSRIEKHRKQRNCPVAVAMEGYNGWARPLDSMVRQRGYRLYNINNLKLARFKEIFPGAAKSDQIDARKGLELFQLRDHLPLAKEVLQEVAGTPQENEVLKRLSRRRRRLVDERVRVVNNLQADLQAVCPGLLEITKEAGNQWFLNFLVSADSLPKLARQKRTTLLKIPSVGVKYAGLIEDWQKRAHFSEEVEWVSAMIQEDARRILDLDETIKALEVKTAEVAERSTIAKLLRSIPGYGAICTSELAGEIGTIERFSKEGSLALYLGMATLDNSSGKYQGSKRPKHVNTRAKAAMMIAIDRHRKYVPQSQKYYEKKRSQGKAHNQAIRALGRHLCRIIYKMLKEEREYQLRPTKGDTQTKVKSRSSRIGQIRKEKISAKYSTPQN

SEQ ID NO: 151696 - protein, 363 aa, unidentified
MKRVKFVGLDVHAETIAVAIAEQNGEVRSLGVVPNREDSVRKLVRKLGPVEELRFCYEAGPTGYVLYWQLARMGAKCEVVAPTLVPVKSGDRVKTDRRDALKLARNYRAGELTAVWVPDAAHEALRDVVRAREAAKKDQLRARHRLNKFLLRHGRRPPMGVKPWTMKYLEWVKREVHFEQMAQEATLLDYLNEVEHAAARIARLDGAMEEAVKVAPSKMRAVIEALQALRGIAHVAAVTVVAELGELSRFARAKQLMGYGGIVASEHSSGEHTRRGGITKTGNAHLRRVVVEAAWTYRHRPAVGTSLRKRQEHVSEEVKEIAWEAQQRLHQRYKKLLANGKNKGVEWLRRSDASCWVLSGPSG

SEQ ID NO: 151697 - protein, 344 aa, unidentified
MTIVADHYQFITGIDTHSKNHQYAVIDHTGRLIDERNYPATAAGITRAQTWLTKITGGHDTLASIDGAGSYGRPLTLALSHAGIRVVEAPKTRYRPAGKDDRLDARTAATSVLPLEESSLNDAKNGPERDAIQILLTARAELTREHTKAINRLIALTRRFQLGIIIRTKITLAQTRQIAAWRTTRTSDPVDIRTARAEATRLAERLLTLRTDITSNEKALLELTRLVAPQLLDQPGIGPITAAQIFASWSHPGRVRSEAAFARLAGVAPKPASSGDRTRHRLDRGGDRRLNAALHRVIITRARTHPETRAYIERRRTQGRTDRDIRRILKRYLARDLYRLLETP

SEQ ID NO: 151698 - protein, 358 aa, unidentified
MLGLASLQPTPPRHSPHASTGFGIIGRGCCAAEKPVLRRALRRRDMITFFERLAPTRVAIEACGASHHWARLLRGFGHEVQLIAPQLVKPYVKRGKNDAADAEALCEAMSRPTMRFVPVKTAEQQAALMLVKLRDRLIRNRTQLVNAIRGYAAEFGIAGAKGIAHVTTLLARLQADVTLPALARELFAMQAGEYAQVQAKIAVVEAKLLAWHRADPCSQRLAGVPGIGPIGATMLTMKTPAPQAFRSGRQFAAWIGLTPKDHSTAGKARPGVITRAGDEGLRSVLVVGATALIRRVREGRCRDGDRFAAWVEKLLERKPPKLVAVALANKLARVAWKLMITGEAYAVKPASTGAASAL

SEQ ID NO: 151699 - protein, 347 aa, unidentified
MRFSNRQHRHYCGIDLHVKTMYVCLLDATGQVLVHRNVPSTPEALLDVVAPYRDDRVVAAECMFTWYWLADVCAAEGIAFVLGHALAMKAIHGGKAKNDKLDSFKIASLLRGGLRPQAYVYPAAMRATRDLIRRRLHLVRKRGQLLAHIQNTRAQYNLPAFGRRLAYPANRDGVREHFADPSVRKSIDVDLTLVAQYDTLITDLELTIVSEAKRHDADAFHRLRSVPGIGKVLALTILYEIHDITRFDRVQEFASYARLVKCQKQSAGKTLGTSGAKMGNVHLKWAFSEAAVLFLRHTKDGKKLRAVIEKKHGKGKALSILAHKIGRAVFYMLSRGTVFSKEKFRAA

SEQ ID NO: 151700 - protein, 360 aa, unidentified
MSEIIRIGIDTSKSVFVLHGVDGTEKPALRKKLRRRDLVGFLAKLKPTRIGIEACGAAHYWGRTFQALGHEAVLLPTQLVKPYIARNKNDGADAEGICEAMSRPRMRFVPIKTAEQQAAQMLIGLRDRLVRQRTQVSNAIRGYAAEFGLVAAKGLDKIEPLLARIADAPDLPDLAKELFALHSQEYVQLKVRLRQIEAKLMAWHRHNELSRRLAEIPAIGPIGACALAIKVTDPGAFRCGRDFAAWLGLTPKDHSTAGKQRLGAITRAGDEMLRSVLVVGATAVIQQARRQRGKATPWLIDLIKRKPPKLAAVALANKTARIAWKLMVSGERYDPHHQGRGRSNPPSPPAVSVAPGSRGA

SEQ ID NO: 151701 - protein, 408 aa, unidentified
MYFVGIDWADQKHNVTIVDAAGATIVNNLIIPKNPRGFEQLLDQLRGLSQETADFKIGIETPHNLLVDYLLDFDYAVYAMFPGSMKSFRKRYRASSARDDEFDAFVVADVLRTDKACWRHIDFGSELVREIRLYAWHHHQMVADHVALNNSLRATLKEYYPAYLEFFADVTCANALAFLGAYPDFETAAALTPEQVAHFFKEHKLRNHKTVNKIYERLHQPSLKAPAAVIRVKKIKAVSCAKRLLVLTTDIEHYTQQLTEHVARHPDGKIFLSYPGVSYVTAARLLALFGDNRALYADVSELQALTGTCPVTAKSGKNFYAVYFRRACNKFYRDSMHHLAFSSLKEAAWTKAYYQRHKNMGKKHSHALRCLANLHLRLLFAMWKNRISYDENLFLAQRARHLIVNQKF

SEQ ID NO: 151702 - protein, 383 aa, unidentified
MEPTQGKHFTPSEELLAVSLELSKGSWKVALHDGKRDKPSIHTVASEQASKRLSEAAAVIEATKRKWGLPAQTRTVVIYEAGQDGFWIQRALQALGYEVLIVDPASIPVERRARRAKTDRLDANKLVVSLLGWLRGECDRMHVIRVPAEDAEAQRHLARDRGELQKEIGQHRDRMRKLLRTVGCWDSVEGKFAERLKQGAVCSHDGQPLPTQLKARLERECARLELVTKQLAALEESLVEELPEAVRGRIEQLMRLKAIGRVGALRLVLELYWRDFDNRRQVGSCVGLAPQPYDSGESRVDQGISKQGNRRVRALLIEMAWFWLRYQPDSALAKWFVQRTQGSGTNKRGKRIAIVAVARRLAIALWRYLKDGVMPEGAALKAA

SEQ ID NO: 151703 - protein, 344 aa, unidentified
MPSIVGGLDIHRKQITFDYLDLVTGEVKCGHIAPADREHFRGWLARLEDPAGVAFAVEACTGWRYVTEELRRAGIQAHLAEPADTAAARGRKKRAKTDRADARLMRDLLAQGRLPECWIAPEHVLECRALLETYHDLRAEHTAWVQRAHAVLFHQGAPAFHDLSRADAPAQLAELARGHLSAAGQVQVGVYLRMLAALEAELDATRRRLLAAARQMRGAKVLAEAIYGVGPVTALALTCWLAGAGRFTSARKAVRFTGLDITVHSSDSKRSPGHLSRQGPPVLRWALYEAGKTHARSVAPDHGYYAAVKDRKDGKRAALSEARKIVRRACHILTELGDDALATA

SEQ ID NO: 151704 - protein, 412 aa, unidentified
MQDILTCAMGLDIHRDVIVACLAKGELGTDPEIEIRSFSTLIPEMRKLRDWVLEAECRYVAMESTGIYWQPIYEMLEPCFDGQISILVVNARHMKNVPGRKTDMRDAQWIATLLRAGLLKGSFIPDKTFRELRHLTRYRKSIVRDITAQKNRIDKFLQSSGFRFAAFLSDTFGASGRNIIRHLMEYGNISREALDRCLKTQTRKRIDEILIALNGSLSEHQRGFLRMIFGHLEALEQHRHTVEDAITKEITKHEEALSLLCSIPGIDVTAAAAIIAEIGTDMSAFPDSQHICSWAGLSPGNNESAGKRKSAHINKGNPYLKSMLCEVGWVISGKRSLYLSGWYWRIKQRKGAKRATIALARKLLALIYTMLKTGSPYNEDCFEIRRKQSERKRASRMVNELQKLGYFVVAPG

SEQ ID NO: 151705 - protein, 436 aa, unidentified
MDAKYANRLRWFRQFKEQINSSQKTLIVGIDIAKDKHHAFLGTPAGRSIDRRLIFENSIEGFSELLFRIKRYLGDENLEDVVIGVEPTSVYHKPLAEYLINMGYSVVYATNTAIKKNRAILDGRWDKNDTKDSANVADLVSRGRCHFYDLPDINVRDIRNLLSLRKRLKKQEHRCITRIRNNLVAQYFPELDRAWYSCQQENLAIVRFCLSPQKVAQLSFDDFCKMVTRRRRGLRQYQRLRHIHEVAQQSIGCQLGSSVGFEAQLLVENLDRSREQIRQVEEQLYAICESYKEYELLQTIPGFGPFVSAVVLGAIGFAQRFENAKQLLRLAGLDLNANRSGRRSQTAVPVISKVGKADLRYALYQAAMVATSLTAEFKAYFKCILKGREKERGIKTKMRVKVSAKMLVIAWTLMKTMQPYKAGLLVIDEPGQPRGR

SEQ ID NO: 151706 - protein, 448 aa, unidentified
MQETTQHDAVDVFVGVDVDVGKGRHHAVALRRNGKRLYNKALPNDEVKLRALIAELKTHRRLLFVVDQPSTIGALPVAVARAEGVLVAYLPGLAMRRIADLHAGEAKTDARDAAIIAEAARSMPHTLRSLRLADEQLAELTMLRGFDDDLAAQVTQTSNRIRGLLTQIHPALERVLGPRLDHPAVLDLLERYPSPSALAAANEKTLANRLTKLAPRLGKNWAAEIVQALNEQAGIVPGTQAAAIVMPRLAQQLAALRKQRDEIAADVERLVLAHPFWPVLTSMPGVGVRTAARLLTEAAQKAFATAAHLAAYAGLAPVTRRSGSSIRGEHPSRRGNKVLNAPCSSPPSLPYETQSHGPIPRARSSRASATTKHSSRSHGDAATSCLPCCATAPFTQPFTHPSQPLTLDERHRGTRACCAATSPRGAAPVRRMRSRPDVARARPRRYMP

SEQ ID NO: 151707 - protein, 342 aa, unidentified
MKLHTIGIDLGKTSFHLVGLNERGEVIVRKKFSRGQLLRFSANRKVHVIGMEACGGSHFLGRALEEQGHEVRLIPAQYVKPYVKTNKSDYIDAEAIAEAVGRPTMRFVPIKSDDQLDLQSLHRVRERWVSRRTAVINQIRGLLLERGITLRKGRCHVEVALPRILEDADAKLSGALRLLLAQLKLELDQLDTRVEEADAVIQKTAEENEACKRLVKIPGIGPVTATAVIAAIGNGAAFRKGREFAAWMGVVPREHSTGGKQKLLGISKRGNRYLRKLFVQCARAVLQQKTKQTPGLKAWLEKLTARTHRNVAGVALANKLARMAWAVLATGEAYRAPLLAAA

SEQ ID NO: 151708 - protein, 416 aa, unidentified
MSRVVDIVHPVCCGIDVHKSFLVACIATTDERNKTTHQIRRFSTFKGDLQRLADWLMANNCKDVCMESTGKYWIPVFNVLEKTVNVCLTHPKYVKAIKGKKTDKKDAKWISELFKCDLIRSSFIPPPLIRHLRELCRYHAKLTYMNSSEKNRGQNCLTVCNFKLDDVFSDVFNKSATRVIDKLIELGHSDFDVAPLLHKGCKSTPEQVKAAIDGELSEAQSHKLSLIRQHMNHLENLQSTLESTIIRLASPLKPQIDLLLTVPGIGCQFTAIRILAEIGADMSVFETAKQLCSWAGLTPQNNESANRKKTTRIARAGAFLKPLLVQCANAAVKSKKNPWLKDKYQSLKKRRKHKKAIIAIARKLLASIWNILSKNEPYNHELYKKSDSPPANRVLTPEQGLALLRNHGFHIVEPAA

SEQ ID NO: 151709 - protein, 489 aa, unidentified
MSKASQQQQGKKDATLKAQAPKRQARGSHRPQGEGNQRRSQLRITNPDAAGIDIGSQVHYVAVPEERAERTVRSFGAYTTQLEELAHWLKECAVKTVAMESTGIYWIPLYQKLEEAGFEVLLVDARQAKHVPGRKSDVQDCQWLQQLHTYGLLRAAFRPEDSVCRLRTLQRHRKNLVECGGMFVQHMQKALNEMNLHLHHVLSDISGYSGLAIVDGILAGERDPRKLASLADYRVKKSQAQIEAALTGDYRPELLFVLNQSLQDYRQIQQQLAQCDLRIEKQLRQIADCTNPSQDCGPRQQGPESATGKRAKIKPKDALEVSLAGHLKRILGVDLTTIPGLNVLAILTLISEIGTNMAKWRNEKAFVSWLGLSPNNKISGQRVLSSRTRKVVNRAATTLRLAAMVLGHTNTPLGSFYRRKRAQLGAPKAITATARKLGCLIYRLIKNGQAYQAPDLHVYELKYKDQILNSLRKRANSFGFDLVEVPKAA

SEQ ID NO: 151710 - protein, 447 aa, unidentified
MLKNNLAVRPPEVSTAVLQMPVETRGSRRELVKRQRRMQRIEGKTLVIGIDLARERQALTFGSGGEIIGRQRIEMAPQHLGAAIAPVARKLCECHGLDRVVVGLEPAGCYWELAAEGFERAGQDYVLVHTLAVKREREATRYNLEKHDPRDADLIFGLVGDGKFTETRLFDTTERARLNALAREYLLVRKQTAADRTRLTNFWTRVLPEFGELFSDLDGFTALAISRALLPFSELAALTPAAWLERVRAHADGHRVLPSRVAALQQLVRAAHRDPHRRAGEGMPVRIAQAAARHHLLAAQKEQLRERILPLYAKAPEAVWLNSIPDSEPLYNALTLGLVGDFSLYDSPRTLVKLAGSEVNWHESGDWRGKSRISHRGRSRLRAAAYQQARALVRNGNPVYAARFHHLLHRTIRPALTLRQAYTALANSYLRTAHVLVTQQKLWEAPR

SEQ ID NO: 151711 - protein, 361 aa, unidentified
MSTQITASPKIYIGLDIHKKTWTVSIQTDLFFYKTYSMPSKSSDLYDYVEKQFPNHEVHLVYEAGCCGFSVARYFLNLGWNVLVVNPADVKTGDKQKYQKTDSLDARNLSNQLKAGTLVGINIPTEAEDQFTSLARHRTQVTKKLRQTKSHIKSLLLFHGIEVPEQYDNANWSNGFIEWLEKLKFSTVCGDLALQGKIRMFKFIKKEYLEIANQMRAYCRKEHKTDYYLLKSIPGIGGYLAAVIIAECGDLRRFNTEGQFASFVGIVPGMYNSGGGEKCLGITPRSRSQLRSYLIEAAWIAIRKDAELQQYYRKHQGKNVKTIIVKVAHKMARRILSVVKKQTPYQTNVNLVLEKNEKKSA

SEQ ID NO: 151712 - protein, 346 aa, unidentified
MKITTIGIDLAKEVFQIHGVDDHGKTVLRKQLRRCKMAKFFANIEPCLIGMEACGSSHHWARKLSEFGHTVKLMSPQFVKPYVKTNKHDMADAEAICEAVSRPNMRFVPIKNIEQQAILSVHRARQGLVKARTAQANQIRGLLSEFGIVIPKGIHSIAKRVPDILEDAENGLPGTMRHLLKRLNDHLKELSRQVDELELQIKLWHKENEASKKLEAIPGIGPITASAIVATVGNATEYKNGRQLAAWLGLVPKQCSSGGKQLLLGISKRGDTYLRTLLIHGARAVIRFAENKAEPENWLRKLITRRNKNIAAVALANKNARIIWALLVKGSTFHPDHTSAASAAAA

SEQ ID NO: 151713 - protein, 426 aa, unidentified
MLPGVAVSKSSPTQGDVTLSKRAQRHGQVKRQGQVKELPGPVKASKGPIPDGIVVVGLDIGSETHVARFWAAPGEREAARSLANTAAGVAGLLAWLDERTGGDRSKGVVGFEPTGSYWQGFVGRLVGAGVGVRVIAPAHTKKYQELLDNSPNKSDAKDAGGIAELTKRGHGLWLRLPQGAYAELRALNEGYHRATQRMTAVQNQAREVAFGLFPELVAAIDPFTATGRALWAATPTPAAWLAKRQSTRERLVRQASRGRLGAAFVAALTAGARDSLGATEAVAPRVAELSFLLAELDALAAHRAALEAALVATVDACPEGEWLASVPNLGRVSAARILGETGPLADFGSGQAVLKHAGLNLYARASGKRTPDRVVYRITQRGRSRLRHVLFFAAPIGWCSGAGCFTATTAVSWTTTAWSRSAPWWR

SEQ ID NO: 151714 - protein, 428 aa, unidentified
MQDESSRLTLFRATCSEIRGSEKHLVVGIDVGKEKHHAFYGTPKGKTFRRKFVFQNRRADFEDLRALARDLAATHGLEKIVFGLEPTGVYHKPLLEYLIRQEEHVVIVSNVAVKRNRELLDGRWDKNDVTDAANVADLLGQARCLYADDPQEPLRQLRELVGTRARLGKQEHRERMRIRNNLVAQYFPELECGYTQGGGDALVLRVLSECFDPVEIGALSFEQFWKTIVLPRWGKSQHQRAEAIWQASKTSVGCTVSAPVRAEAGNLVRRLTALRADLQEVEREIASVAKTLAGYASVISIPGVGPVISAMILAAIGDPNRFSHPRQVLRLAGMDLCASRSGKSSDRVVPKISKQGKAMLRYGLVQAARLAPIHHPAVRAYFARLLVGRDQERGIRLKMHVKLASKLLVIAWTLMKRGQTFDPKKFTG

SEQ ID NO: 151715 - protein, 368 aa, unidentified
MKQQTSATTETNIKGRNIIDFTGKTIHVGIDVHEKDFQVAKVLGDICLGNHRMAANGQGLIDHLRTHYPGAGFKCVYESCAWGFTLQRQLQQAGIDCIVVHAADVSSSDKEKKRKTDKVDALKLARNHAAHQLTGIHVPNEEIQKQRNLIRFRKKLVGDLNRSKNRLKSLLKYQGINIPEQLGKKNNWSYNFMNWVEEVAKKDVLLQDTLLLMLEEVKLLRQLLLKTERALRKLMQTSYNDKAKLLMSTPGVGRTTAMLFLLEIGDIQRFGPFDRLNDFVGFCPDTDSSGEIDRDTGITSRRHKQLRSALIEAAWEAIRIDPALLDTYQKLTRRMKGNHAIIRIARKLLRRMRAVLISGISYQKGVVV

SEQ ID NO: 151716 - protein, 345 aa, unidentified
MPIVGGLDIHRKQITFDYLDTATGEVRRGQIAPADRAHLRAWLARFAGRDDAAFALEGCTGWRYVAEELAAAGVAAHVAEPADTAFARGRKRHAKTDRTDSRHLRVLLEQGRLPECWIPPAQILECRALLEAYHDLRREHTAWIERIHAVFFHQGAPRLGEGALRTEHGLAALREAAAIHLSPAGQLQVATALDMLAAIEARTDTLRQQLLHAARHLAGARALQARLYGVGPLAGLAMTCWLGGAGRFSSARKAVRFAGLDVTVYSSDGKRSPGHLSRQGPEILRWVAYESGKTHGRASAPGHDYYAAVKDRTDGKIAALAQARKLIRQACHILAELGDDALTAA

SEQ ID NO: 151717 - protein, 337 aa, unidentified
MSIIRIGVDTSKHLFQVHGVDEEEQAVLRAPLRRSAVAKFFTKLPPTRIGLEACGASHHWARVLRGLGHEVMLLPPQYIKAYVKRGKNDAIDAAAICEAMSRPGMRFVPIKSAEQQAALMLLRVRELLLKQRTMLINAMRGHAAEFGVIAAKGPVRVAELLQKARSAEAGVPTLAQHLLALLAEQLAALDDKLKALEAQLLAWHKHDPVSQCLATQPGIGPIAALSFALKVPDPTVFRSGRHFAAWLGLTPKESSTGGRRRLGRISRQGDEGLRKLLVLGATAVIQFAKPGRASAWLINLLARRPKKLAAVALANKMARVLWAMMASGEVYRRAQPV

SEQ ID NO: 151718 - protein, 321 aa, unidentified
MSYIGIDIAKKSFEVAFPVEKGYQMKKYSYDAAGFAALLEHLPAASCCVLEATGPYYVRLATFLYEQGIDVAVVNPLVIKRFSQMRLLRTKTDQADAKLIAAYGALEKPALWKPAATFITELQQESTVLEGLIKQRTALKNQLEAFNQLPHVSPQALQTLEKLLGTLQEQIDMLEQSMAHKARQNTASTLDNLTSIPGIGPKTAIQLLIITQGFSRFSNARQLCAYVGICPRIYESGTSVKGKAKISKLGMGRLRALLYMCAWSACKHNQACKDLYERLLAKGKAKKLALVAVANKLLKQAFAVATKNLKFTENYAPLLVS

SEQ ID NO: 151719 - protein, 324 aa, unidentified
MKNESESFALFVGVDVSKSQLEVFLPDSGVRLTIENSEDAIVSSLVQELKSKPGVLVVMEATGGYESKLVKVLGQHQIAAAVVNPRRVRDFANGIGMDAKTDPIDARVISKYGEVVKPAPVAAKSEAEEKLGALVTRRKQLLDLINQEQNRLQQTTDREIQEFIRKSLEALKKQQKEIDERLKKCVAEDTVNARKVEILSSVKGVGAVTTSTLLADLPELGQLNREEIAKLVGVAPLNRDSGTSKGQRYVAGGRAHVRRVLYMATLVATRRNDKIKGYYRHLLANGKLKKVALVACMRKLLTILNTLIKNNVVWSNEKSVPAAS

SEQ ID NO: 151720 - protein, 315 aa, unidentified
MSAEIMVGVDISKAHLDVAVLPTGEQWQEANELTAINRLAKRLLKLGPKLIVMEATGGLEILVAACLGRAGLPVVIVNPRQVREFARATGQLAKTDKIDARILALFGERVRPEVRPLPDAVARAFEALLARRRQLVAMLAEEKNRSAQAQSRPVATGIQRHIRWLEQEIKDVERDLTKSVRESSVWRAKDNLLRSAPGVGSTTSFTLLANLPELGHLNRKQIAALVGLAPHAADSGTLRGKRIIWGGRACVRQPLFMAALAACRSDPGFRAFHHRLVASGKPPKVAIVACMRKLLIVLNAMLRDGTPWNPAFSRN

SEQ ID NO: 151721 - protein, 340 aa, unidentified
MKQQDYLSVGIDIAARTFHAAWGTAAHEVSQAIEYQQTQDEYKKLVKKLTVTGYTPAQIVVVIEATGTYWMCLARFLYEQGFQVSVINPRQAYHFAQAHLQQAKTDALDARMLARLGLSLSLKVWQAPSAAWEALYQRLVERDNLVEMRQMLRNQLHALRQRTRIDPTVEARKQALIDDMDAQIKAIDRELKAYLRQSEWANMAECLLSIKGIGLLSAAWLLVITTGFSTCDDAEQLASYLGVVPHPQHSGSSRRGYKSTGKSGHARARRVLYQASVSAASFNPAIKIFYDRLRANGKPVKVARVAATRKLVHLAFAIATKEQHFDPLYHLSACQAAPTA

SEQ ID NO: 151722 - protein, 421 aa, unidentified
MQVLYERCAGIDVHKDQVTVAVRTPGRGPGGRDTRVRKFGAFYGVLRDMTRWLAAQGVTHVAMEATGVYTMPVYHALLEPGSFEQVLVCNAAHVKNVPGRKTDAVDASWLAELLECGLLRGSFIPPEDIKAVRDVVRYRRKIVQERGSETQRLGGVLQDAGIKLDSVASSIDTVSGLAMIRALIDGERRGEVLAELARGRMRSKIGDLSQALEGRFDDHHALMCQLHLDHIAHLNEMIAKLDAQVETMMVPFGRQRDLLTTIPGIGLVAAAAIISEIGASPGEFFATAAHLASWAGLCPGNHESAGKRKHGKPRKGSQHLQPLLVECAWSAVRTSGRLKARYHRLVLRFGGYRNPAAKKRAIVAIAHTLAVIIWHVLTTGTTYTDLGPDFYATRSDPAKEAQRLIARLEALGHKVTLTPAA

SEQ ID NO: 151723 - protein, 408 aa, unidentified
MAVSGLPFILDRGCGLDVHKDTVVATIKGSDFDTETKTFLTFTDDLYDLVQWLQSHSITQVAMESTGVYWRPVYAVLEDYFHILLVNARHIKNVPGQKTDKKDSEWISKLLLSGLLKGSFIPAQHIRELRELYRHRRKLIAMRTAEKNRLQNILESANVKLRSVVSDVFGVSAMEMVRSMAKGQSDPLLLASMAKGSLVKKHAELIKALTGKVTDHHRFMLTLILQSIDHINLQIAQSEAQMEQYARIMYRELELLETIPGVSSKVALGIVSEIGTDMTQFATHQNLSSWAGVCPGNNESAGKKYSSRTTHGNKYLKTTLVEAAWVASRSKANPLLAVKHHQIAARRGHKKATIAIAHKILTAAYHVLRDMEPYQLHPQDIKILENRRLKRIDRLQKQLSTLKNTSYK

SEQ ID NO: 151724 - protein, 403 aa, unidentified
MSTYFAGLDWASRSHAVCVIDEHGAVCKQFEVRHDAAGLAELQRHLRASGTPAVAIERPSGLLVDTLIEAGFTVVPIHPNVVKASRPRYRSHAGKSDTSDAYLLADLLRTDGHRFKPLAPQSDEIRALRALVRGRDDLVATRIQLANQLRALLQSFWPGAAAIFFEIDSPIALAFIQRYPTPDSAAQLGPKRMAAFCAQHAYSGRRRPEELLDRLRQAPATTGAKLEMQAKGELARSLAHTLERLVDQIRLLTSRIEHHIAGLDDGRILMSFPRAGRVCAAQILAELGSVRERFDSHEHLAAEAGVAPVTYQSGKSKAVTFRWACNHRLRAALTCLADNSRHASAWAANLYAHARARGCAHPHAVRILARAWVRVIWRAWRDRKTYQPQFHRGAIHLLTAAGG

SEQ ID NO: 151725 - protein, 338 aa, unidentified
MPEITRVAIDTSKSVFTIHAVDVRDRPVQRRNLRRQDVAEFFGKLPPVEVAIEACGASHHWGRMLGAMGHNVRLIPAQYVKPFVKRGKNDRNDAEAISEAAARPGMRTVAVKSAEQQADAMLLSVRELLVRQRTQLINAVRGHAGEFGLVAPIGGKGLAQLRADITTDTTLPAPAVEALTVLGREIDHTEARLAAIDAKLLARHRATPCSQMLAEVPGIGPIGALNMALRVDFTQFKSGRHFAAWLGLTPRDHSTGGKQRLGGITRAGDARLRQLLVLGATAVIRFAKPGRSSAWLLALLERRARKLVAVALANKMARIIWAMMTRGEAYRQTAPAQA

SEQ ID NO: 151726 - protein, 317 aa, unidentified
MTEPVYVGIDVAKDSFAVACRPAGPELSLPNTPEGYRRLLAALKGVAIARVVLEATGGYERPLAAELLEVGLPVVVVNPRQVRRLAEGLGQLAKTDRIDARVLARFAEVVQPAAHPQPSVQEAELNELVRRRRQLVNMHTQEENRLPLVRHGRVRRGITKVLGVLDKQIAEVEELIADKISSQQEYRQKDRILQSTPGVGPQTSAMLLAELPELGQLNRQQVAALAGLAPWTMQSGRWQGKARIWGGRQEVRRALYMAALAAMRWNPTIRTFAQRLRAHGKAFKVVITACMRKLLVILNSMLQRKVLWNPKLAQQNP

SEQ ID NO: 151727 - protein, 457 aa, unidentified
MNANNARLQSASKIGISPLIIVQHYLPMKGGDFVKNFMSTLFVGIDVSSKTNVLCALDFGGNKLLNLKALNNQPGAEAILDSIIDCLNSNSLKYVVIALESTSFYSTHIANFLSSNEELLFFKPLVYCLNPKSVANYRKSFVDMDKTDPLDAFVIADFARCGRITSEPWRGAQFLALQRLSRHRLHLVECITREKAYMVSNIYLKFSELAVLDNNNQPFSNTYGATSAAVLTEFLSLDDITYSSIEDLVDFVSTKGKNRFSDPYETAKLLQKAARDSYRLDKVLYEPLNTSIASSFNVIKAFEDEIKTIDKAITKAIKGINNTEYQSLISIPGIGPVLASGILAEIGTITSFDSHDALAKYAGLTWRINQSGNYSADDTRMTKTGNKYLRYYLIEAANSVKNNIPEYKEFYKKKYGEVTTHQHKRALALTSRKLVRLIFGLLTKNQIYSSDKVGEIQ

SEQ ID NO: 151728 - protein, 365 aa, unidentified
MKKISTVAAKHSRNFSEQKLTIGLDLGDRSSWYCVLDERGEVVLEQRLGTTPKAMQEGFGGMPRSRIALETGMHSPWVSRLLSEWGHEVIVAHARNVRLIGESRKKDDRLDAQTLARLARIDPQLLSPVKHRSAKAQADLTVIRARAGLVRARTALVNTARGLAKSYGERLRGCNVRNMNPEKAEALSPELQRALEPLLAGIESLSERIGEYNEGIEELAEQSYPEVARLKQVKGVGTLIALTFLLTLEDAHRFRKSRDVGCYLGLQPGRRNSGQSEPQMHISKEGDPYLRTLLVQGAHHILGPFGVDSDLRRWGLKLAERGGKSGKKRAIIAVARKLAVLLHRLWVSGEVYAPLRNQRAMPAAA

SEQ ID NO: 151729 - protein, 342 aa, unidentified
MRIIGCDLHAAQQTIAMLDCDTGEISGRTITHEGEQVRTFYAGLPPPVVVGIEATGSMRWFLGLMSELGITCHVGHPAKIRQAETRRQKHDRRDAALLLELLREGRFPAIWMPTPELRDLRALLLHRHQWVRIRTRVMNGLQGVALAQGLRRGAGLWNRAGQATIAALPLAPHAGDHRSALQALYEHLNTQILELDQRVRVQAQERPQSVRLMTHPGVGPVTALATEVFLGDPARFPDGKAVASYVGMIPSEYSSGARQRLGGITKQGNSLLRLLWCEAAIHAERSDPILRRFYRRKLQQKGVGKARIAVARKLGIRLWILLRDQIDYDEFCRRGCARATER

SEQ ID NO: 151730 - protein, 347 aa, unidentified
MNVTTVGIDLAKLIFQVHGVDGHGKAVIRKQLKRTELTRFFANLPACLIGMEACSSAHYWARKLIEQGHTVKLMAPQFVKPYVKTNKNDARDAEAICEAVARPNMRFVPIKNVEQQVLLGIHRARQGFVKARTAQANQIRGLLAEFGIVMPKGVRFIAQQMPGILEDAENGLPHRSRELFAQLLAHFRDLDHQMHELERQIKAWHRQSAQSQRLEKIPGLGPLSASAVVASIGDAKTFRNGRQFAAWLGLVPRQKSSGGKEQLLGISKRGDTYLRTLLIHGARSVLFSLKRHHKSASGWLMRVAERRNPNIAAVALANKNARTIWALLAHGREYQPGYVSSSIAAAS

SEQ ID NO: 151731 - protein, 318 aa, unidentified
MLYAGLDLSRKRLDFHLLDGEGATVERGATPPDADGLQRLSERVAWHGAPVRAAIESMNGARFVHDRLERHGWQVEIADAQKVKGLAPLACKTDRIDAWVLAELARRDLVPAIWLPDPLVRAERERARWRLHLVRHRSSLKQRVHAVLLTHGKPCPVSDLFGVRGRRLLTRLALPEPWQATIEASLRLIDELDREIGECERELRRLGAEHRYVPLLCTVPGIGWVLAYTIAAELGDISRFATPRKLAGYSGLCPRVYQSGERDLRGPLAKQGPRYLRWALVEAATHASTHPAYRDRDPPWVRWRLSYVVATNSLLSVL

SEQ ID NO: 151732 - protein, 350 aa, unidentified
MTTRNKPRNAPVYGVDLDKNLFHVVEIDGAGQPVQKASFRRETLLRFFEQAEPALVGMEACPGSQWLARKLIALGHTVRIIPAQFVKPYVKSNKSDIIDAAAIAEAVTRSSMRFVEVRTPDQIDLQALHRVRDRMVAERTALICQMRAFCLEYGIAIHQGPGKFKMELPRVLADEANDLTPAMRRLVSQAFDDLQHLEKRLAEVNREIAAIAESSDTARRLMTVPGIGPLTATALLAAAGSGRQFRKARDMAAWLGLVPREHSTGGKTTLLGISKRGNRYLRRMLVHGARSCVMHLDRSKDRLGVWIDGLQMRMHVNKITVALAAKIARIAWVILTRPGATYERRDPAFA

SEQ ID NO: 151733 - protein, 345 aa, unidentified
MVMSINVLGIDIAKNFFQLHGVDSIGKAVLKKRLSRIQLAAYVANLPQCSIVMESCGGANYWARVFQRSGHSVKLISPQFVKPFVKTNKNDANDAEAIVEAASRPSMHFVPIKQVEQQDIQSIHRVRSRIVKNRTALINEIRGLNLEYGITVAPGAARVKRSLCAIIADSTNELTPLSRECMQDLYDELVGVEARLKKLDKKIRQLCRQNEICRRILKIPGVGELTATAMVAAVPNAKEFNNGRHMSAWLGLVPRQSSSGDKQILLGISKRGDRYLRTLLIHGARAALSHYKNTDNDYGRWLTGKRARLSFNKAAVALANKNARIIWSLLNTGEEFNCNVQTDAA

SEQ ID NO: 151734 - protein, 394 aa, unidentified
MKLVGIDIGKKHFFCIMDKDSGEVLLQPSSFSNTKDGFDSLIQKLSSYSKDSILIGMEDTGHYYFALLKYLLEKNFTVALINPKTTDYTRKMQNGITKNDKLDTLTICDVLDTPVRKKQYRITKVNSFDLYEQKQLTRHHHNLKEELNVYTNRLQKCIDIVFPEFNSLFSSKYGIIYMNVLKTFGSAENIASTDIRTIRKCFEIKGRGNRISLTAQQLKDSAKSSIGISSAAEVIKIKHLISQIELINEQLAETDKKIEEFSIQNNSPILSIPGISHFSGTSILAELGEISNYSKPSKIIKAAGVAPYHYESSQYDAQHTAITKKGSPYLRKTLYQIILPVINNNNPVFKQYYDLKISQGKGHRCACGHCVRKLLRIIYHLSSTNQQFDDALLR

SEQ ID NO: 151735 - protein, 385 aa, unidentified
MGTQTFIPRDYDVFAGLDVDKKSISVTFTDHQGFLKSLNMPYKVEHLVNYVRKHYPDKKVAFAYEAGPTGYALYDGLEAQAYPCLIASPSMIPKAPGQRVKTNRLDSRGISENLRGGQLKGIHVPTPLYRELRHLTQLRDTLVSEMVRMKQRIKSLLLMEGLEFPPAPAGSQWSFLVKKKLRELPCSSTVRFKLDRLLDSLEFDEKQVLKATREIRRFCQADPELSQCIEYLKTLPGIGWIVASKLLARVGDWRQIKNIRQLPAFLGLVPTENSTGERTERGSITHTGDGRLRSKLIQASWSAIRQDGELREFFRSVAKKHPRHLGSRIAIVAVAHKLSVRAAVVLMKQRPYEVRQKVQSAPLTQEETVPQGTTRRLAVPGETNS

SEQ ID NO: 151736 - protein, 406 aa, unidentified
MVGIDWADKAHVYCLMDDAGTTLSTGTMEHTAEGLEQFMNIVRARVQTPHDVLVALETSHGPLIGALLDQGFTVYAINPKAVERHRDRFRVAGAKSDLRDAWVLATLLRTDRAQYRPLVPDSEVAQELRALTRDRADLVRTRTMLSNQLTACLKAYFPEFLTLFADPDRPVALALLQTFPTRDHLQAVSRADLEAFLRRHHCPHSRKRATAIHERMQAPGFHIAPPIVRAKARLAGTLASQLLALLEHIDAYEREIERILKLHPDGELYRSLPGAADVLAARMVGELGDNRDRYRDPNVAQCEAGTAPVTRKSGSTRTVHIRRACIHPLRETLWTFAFSSLRHCAWAQAYYNQARKRGKKHAEAIRMLGNVWLRIIIAIRRDRRPYDEAVFQKARARHASPGLCFA

SEQ ID NO: 151737 - protein, 287 aa, unidentified
MKTTTVGIDLAKNVFQVCALNRANKVISNRAVKRAALVETVAQLQPTLIAMESCAGAHHWGRTFRALGHEVILVPPQHVKPFVRGGKSDPRDALAICEAASRPGLHPVPIKALTQQDLQSLHRVRQQQVHHSTGIANQIRGIAHEYGVCFPVGLKRLYREVPYALEDAENGLSGAARELLARRFADLLAVREEIKRTSQRIVALAEGLPPWPRLLELHGFGIMVTSSYLASIGDGRQFKRGRQVAAWLGLVPRQHGSGGKVRLYGMTKSGDRYLRTMMLHGARAAIR

SEQ ID NO: 151738 - protein, 315 aa, unidentified
MSEALYVGIDVSKETLDVAMTNRSAPFQVPNDPKGYAALVKHLRQAAVQQVILEATGGYERPVVAELVASGLPVVVVNPRQVRDFSRAVGILAKTDRIDAVVLARFAEAVRPEIRPLPDEQARHLQETLARRRQLVQMRVAEGNRLAQAVTAPVRRSIQALLRAIERQLDDIDQGLDDAIQACPAWRAKEDLLQSVPGVGDQTARTLLAELPELGTCTRQQIAALVGIAPMNRDSGHWRGRRRIRGGRPTVRSSLYMAVLAGIRHNPWVRDHYQRLVAAGKPKKVALVACMRKLLTALNAMLRDQHSWERSLKTA

SEQ ID NO: 151739 - protein, 384 aa, unidentified
MTNQVQGTFIPRDYDIFGGLDVDKKSIAVTFTDHGTMQKSLRLPYSADHLLNYTRKHFPGQRVAFVYEAGPTGFGLHDELRATNHPCLVVSPAMVPRAPGQRVKTNRLDSKKLSEGLRGGQLRSIHVPMQSYRELRHLGQLRDPQVAQLTATKCRIKSLLLYEGIPFPAANGKWSGRVLRQLESLPCSAAVRFKLDRLMDALQFHFESAAVVQKEIRHFCQNDPELRQCISFLASLPGIGSITATHALARLGDWRQISNVRQIAGFLGLVSSEHSTGDKENRGEITRIGDSRLRNKLIQCAWTAIRKDPELRAFYRSVYERQPKKVAARKAIVAVARKLTTRMYAVLKQQRPYVIRPDSSIAPLTAEETVGPRERLDGAQNEQP

SEQ ID NO: 151740 - protein, 328 aa, unidentified
MIYVGIDIAKLNHFVSAISSEGEILIEPFKFTNDADDFHMLASKLDSFDKASTIIGLESTAHYGDNLVRYLVAELYKVCILNPIKTSQLRKNNIRKTKTDKVDTYVIAKTLMMQDDLSFVSFYDLDMMDLKALGRFRQKTIKQRTRLNIRLTTYVDQVFPEIQYFFKSSLHQNSVYALLKKAPSPNEIASMHMTHLANLLKVNSHGHFTKEQAKELRVLAQKSVGANDSAISIQITQTIQQIELPDSQLDKIEAEMTNIMKFNDSVIMTIPGIGYINGGMILGEIGDIHRFSNPNKLLAFAGLDPSVYQSCNFQDKTTRMSKCDSRVL

SEQ ID NO: 151741 - protein, 354 aa, unidentified
MSQTLNSAIAVVGIDIGKNSFHVVGLDQRGAIVLRQKWSRGQVDARFANMPPCLVGMEACVGAHHLSRKLKMLGHDARLMPAKYVRPYSKGQKNDFRDAEAIAEAVQRPTMKFVATKTADQLDLQALHRVRERLVSQRTGMINQIRAFLLERGVAVRQGLRFLRAELPRILATPPDVLSPRMVRVIEGLAGDWRRLDERIESLSSEIEAVARQDVGCERLMSVPGIGPIISSAMVAAIGTGDVFSKGRDFAAWLGLVPKQISTGDRTILGKISKRGNRYLRVLFVQAAWVVLIKPQSWERHGLKSWIEAAKKRLHHNVLAIALANKLARIAWSVLARGRVFEVRKVDEAAVQSA

SEQ ID NO: 151742 - protein, 374 aa, unidentified
MATMRARHNRRERDVERIIERCAGLDVHKTSVTACVRIPHDESEGLHQEIREFATTTRGLLLLRDWLASFEVRLVGMEATGVYWKPVYYLLEDDFECWLLNARHLKNVPGRKTDFKDAEWICQLVEHGLVRPSFVPPKEIRELRNLTRYRKAQIEERTREVQRLEKVLQDARIKLSSVATRVLGALGRAMLDALVSGTTDPEVLAELARGRLRSKLPALRDALEGRFSSHHALMVGKILAHVDYLDESIGDLSTEIERVIAPFSDKVELLDTIPGIDRRTAETLIAEIGVDMSQFPTHRHLASWAGMCPGNEESAGKRRLGKTRKGSKWLRSALTKSAHAAARSKGTYLASQYARLRGRRGPKKPPWRSGTRSW

SEQ ID NO: 151743 - protein, 346 aa, unidentified
MRKSIINLSSVTTVGLDLAKHVFQVHCVDASGRVVVAKAIRRNKLLEFFASLPPCLVGLEASGSAHHWARELIKLGHDARMMPPAYVKPYIRRQKNDASDAAAICEAVTRPSMRFVGVRSLMNQAALMRHKAREMLVTQRTQLLNGLRGHLTEGGVIAPQGLRCARELAELIEACDETIPFEVCEALAPLVVQLRNLDEAIAQLDRIIAKLAQKDETARRLMSIPGFGPITASAMAATIQDTSSFAGPREFAAFLGLTPKQNSSGGKQKLGRISKMGNRNLRKLLVVGAHAVLFHRKPHTDPLRMWAKRLLEKKPFKLVAVALANKMARIAFAILRGKTVYREIPT

SEQ ID NO: 151744 - protein, 331 aa, unidentified
MDLHRTQFTVCTRLENGRTYLRQWLMQELKLFAAELRPEDEVAVEATGNTRLFYDAVVEHVARVGVVNPGQFKVISQSVKKTDKNDAELLALYLAKDLLPEVRMKDKTQRSLGHLAGTRDLLVKQRSALKAKINNLLSAEGINLKREALSSNKALERVLALPLWPLLMAEARVLVSQIRSLSASIAELEGLLEEEGPKLAGHANLMSIKGIGPVSAAVLLSVIGDIRDFADPGKLAAYVGLVPRVQNSNETVHSGRITKQGNKLARTCLVQCALVAKRYSPYLKNFYQRIQRRRGGGKANIALAHKFLGVIYHTLKNNWVFQDFPNFVLAS

SEQ ID NO: 151745 - protein, 453 aa, unidentified
MSKSKRGRQSSRVLPTVHAQAAGLDVGSTFHVVAVPPELCDEPVRTFRSFTGDLHRLADWLRAIGVTTIAMESTGVYWIPVFEILEARGFEVLLVNARDTKNVPGRKTDVNDAQWLQQLHQFGLLRGSFRPHERVVRLRALLRHRERLIDSAATHIQLMQKALMQMNVQLHHVVTDITGVTGMKIIRGIVDGEHDPLTLAKHRDVRCKESVETICEALTGNYRSEHVFALRHALELFDFLQTKIVESDAEIETVLHSLNEDRVPPAVPIPHVRHSRGRNEPQFDVRTALYTMLGVDLSQIHGLGPYTVLRLIAECGDDMRKWPTVKHFTSWLTLAPGNKISGGRVLSSRTRRSSNRAAALLRIAAVNIGKTETALGAFYRRLGARIGKAKAVTATARKLAVLFYNALRYGMRYADPGANYYDERYKQRVLSNLHRRARQMGFLLIEAEANPSP

SEQ ID NO: 151746 - protein, 409 aa, unidentified
MRYYVGVDWADREHAVWVEDEQGAKVEARTVPHTAGGFSEWGRWLDERRAQGIELWAAIEKPEGRVVDFLLDHGVVVYPLNPKALDRARDRFRASGAKSDPFDAQVAAAFLRTDHGHLHPLQPSSEAAQELKLLTRDCQRQIRQQTRLVNQLTATLKEYYPRPLEVFEDLTTPLARDFLRAYPTPDALRACPQRQWQRLAHAHHLSAERTAELWAELQQPQLPVPPHVVRAKARLLQTLVAELEPVLEAVATYRRAVEDFFAALPAAEWVRSLPAGKTGVTLPTLWAELGDAAGRWHSPQHLQAQAGTVPVTERSGRVHVAKFRFACNKSLRHAVDQMAFLSLRQSEWAQAYYRAYRARGHEHHEALRALGAKWLKIIFVMWTHQVPYDEKHHLATMARQHLRQVPQPA

SEQ ID NO: 151747 - protein, 489 aa, unidentified
MATAAQQPRAKNRSNAQRSAPKRKARGRHCPTGKGDRRSSKLTITNPEAAGIDVGAQAHYVAVPAGRAEVSVRSFGAYTAQLQELVHWLKDCGIKTVAMESTGVYWIPLFQMLEEAGFEVVLVDARQAKHVPGRKSDVQDCQWLQQLHSYGLLRAAFRPEDSICRLRSLQRHRKSLVECAAMWIEHMQKALNEMNLHLHHVLSDISGQSGLAILEAMVAGERDPRKLASLAHYRVQKSQAQIEAALTGDYRPELLFVLSQSLSNYRQMQQQIAQCDLSIEKQLASMADCTNPSQHAEPTTPGPASVAGKPRKRKPKGGLELTLAAHLKRILGVDLTTIPGLNVLAVLTLLSEIGTNMAKWRSEKAFVSWLGLCPNNSISGQRVLNSRTRKVVNRAATTLRLAAMLVGKTNTPLGSFYRRKRAQLGAPKAITATARKLGCLIYRLIKNGQPYQEPDMRTYELKYKDQILYSLRKRANSFGFDLVELPKAA

SEQ ID NO: 151748 - protein, 363 aa, unidentified
MFSERTSVGLDVHARSVAAAAIDVVTGELLQSKLTPSHEHITSWVQGLPGPVAVTYEAGPTGFDLYRALSAAGIRCEVAAPSKLQKPPGDRVKTDAKDAIHLAKLLRLDQITSVAIPSVDQEAARDLVRAREDCRGDLMRARHRVSKLLLRHGIVYYDGDAWTLKHDVWLRHEVMAQLGAGATRLAFDSDYENVLAMNARRDRLDTAIAQMAARSEFTPMVHRLGCLRGISTLTGFALAVEIGDWSRFTGNTIGSFVGLVPSEYSSGTSRIQGSITKTGNTHVRRLLVEAAWHHRSRYRVGKTMRDRWQLAPAAARARGDEGNRRLHQRWVRFTERRKKNTIANVAIARELAGWCWSLAMLEE

SEQ ID NO: 151749 - protein, 445 aa, unidentified
MTFRTIGIDLAIRGDHLAQIYDDGRPNGRAIRFRHDQPSLAAFVQTAVMGLRADDHIQAIMEPTGMSWFPVAHHLADAGVTVARVKGKRVKALRRYLSEHAKTDMADAQILAAIPSFGGPRLDPVHIPDPQSHALQRLTKQRSRFQNEIADARRRLLDLIRWASPRLEAVLPDLGTRLSLALLQKWFHPSDVLKARRTTLAKYVAAHAGGNHPRSGPFVETLITGLREAAQYAQNLHGAHIDFSELQFEIATEIENVLKKIQIVGDLEQHIADLYKHLDPQALLLSIPGVGRHLAPTLIGILQNIERFHSEKHLRGFCGLFPRRADSGGVERAGQTLTQGGNNRIKHALYLAADTARKTDPELAELYWRLMTAKGHHHKQALCAVANRIVNRIFSVLKRGKPYEVRDREGNSITLCEAKAIILERYTVGENIRAGRRSNRIEKNS

SEQ ID NO: 151750 - protein, 388 aa, unidentified
MQNIIHRPEGRAAIRTDLGAIFVSLELSRATWLITSLSPGAGEKMSKHVVQGGDIVSLLRRLAHLQEKARGRRRKEFPLVVIQEAGLDGFWIHRVLEHEGIESHIVDSASIMTSRRRRRPKTDRIDGEALVRALLAYHRGEPRVCAMVRVPTPEAEDRRRVSRELKTLTAERVGHVNRIKGLLFAQGVSGYAPLRRDRRARLEELRTGDGRLLPYHLKRQIGRELDRLELLLEQMNAVAAERDALLVPAEEQAAPTPAKMLLGLRGIGPDFASVLWQEGLFRHFDNRRQVAAYAGLAPTPWQSGAVDHEQGVSKSGNPRLRTTMLQLAWLWLRHQPSSALSQWFHQRVGDNGRIRKVMITALARKLLVALWKYVTAGVVIEGATMKTA

SEQ ID NO: 151751 - protein, 401 aa, unidentified
MRCTDQPAQPKAALCEEDSSLFVALELSKSVWLIATSAPGSEKVSKYRVAAADVAALLALLARLKAHAERYRGGPVQVVSIHEAGLDGFWVHRMLEANGVKSHVVDAASIAVDRRSRRAKTDRIDVEKLLRTLMGWARGERRICSMVRPPSPADEDERRLTRERGTLVTERTRHVNRIKGLLATQGVFGFEPVHKNRRQRLQELKQWNGQPLPPRLKTELTRELDRLELVMSQLAALEAERDRALQARRTAVRNTTMKAPSSGTASAGEVGSQLLRLRSVGPQIASVLSLEAFYRNFNNRREVAAYSGLAPSPWKSGGIDVEQGISKAGNARLRTTMIQLAWLWVRHQPGSALSRWFYERVGGKRGKIKRIAIVAVARKLLVVLWRYVTQGVVPEGAEFTT

SEQ ID NO: 151752 - protein, 407 aa, unidentified
MDLLKTVFGIDVSSQKSNVCIMVNGQKVNDYAISNDMVGFNQLLGDLKQVTKPQIIFEATGVYSRRLQAFLDMHELRYVMMNPLEAKRKTKDDLHQNKTDKLDALYLAKLQSEHPQRLAYVQSKEYQELMANNRIYEQASHDLITNRNRLHKAIQLTFPEIEHLMVNPRGKNYWSIVLRFPHPDIVLETKEADIIDFLKGLTGIGKKRANDLAQSLIRLAKVACPAVKKNSAHIRGLKMAINNILSAEEECQTALQEMAKLAPKRDLEILTSIPGIGENTALRIISELGDIRRFNNPSQLNAFVGVDPQVYESGNLTAHLSISKRGTAIGRKVLYLAINQIQSAKKVGNPCHIADYYEKRKRSSETASHKKAAIASIHKLLRTIFALIKNDQLYSYDVAKHNQRLLS

SEQ ID NO: 151753 - protein, 470 aa, unidentified
MAHVGGQLQAQFMARIRGRDLQRCLVVPVDVGKSTAMALVADHYGEVVTEPFEFPLSEPGFALLATAIARSEASRSAEVVRVGVESAGHYHRSLVARLRAGGYEVVELNPAAVKESRAQQLLARLKSDARDLGAMAELMVRGAGRQPALRTDALATQAAWVAHRRRKVTARVALANQVIGELDLVFPGLDACFKDVLRAKAGRVIVAHIADPDRVRRQGVEGLRRFVARRGVALSRPKAAEVVEAARVALRLPGAERAAMGRVLGADLSLLAALEAEIVAAEGALAGVLGDTPAGILLSLPGIAVVRASNYGAGIGDPARFPNAAAAYRAAGLVPTLYESAGRTRGRQHISREGSVELRQAIIELGRGLSQHDPDFKAYRQRRLNEAKEPVVAAVAVGHRAHRLAFAMLRDQSPYDAGKWAKSVAAGRTAMAKTQRARQNDVTCPPPGTSLAQGGEADKNDNPAGRRARG

SEQ ID NO: 151754 - protein, 385 aa, unidentified
MNSKAFVPRDYDVFAGLDVDKKSISVTFTNHQGFIRSLRLPYSAEHLVNHVRKHFPDQKVAFAYEAGPTGYGLYDGIVAQDYPCLIASPSMIPKAPGLRVKTNRLDSRGISENLRGGQLKSIHVPAVLYRELRHLTQLRDTFVSEMVGMKQRIKSLLLMEGLEFPPAPAGSQWSFMVKAKLRKLPCSSTVRFKLDQLLDSLEFHEKQIVKTTQQIRRFCQNDAELSRCIKYVVSVSGIGQIVASQLVARLGDWRELRNVRQLGAFLGLVPTEHSTGERTDRGSITHSGDPRLRSKLIQAAWSAIRKDGELREFFRSVCQSHARPVASRVAIVAVARKLTVLISVVLMKQRPYVVRKKVHSAPLTQEETVPQGTPRRLTEPGETNS

SEQ ID NO: 151755 - protein, 344 aa, unidentified
MAVKTIGIDLAKNLFQIHGVDEHGKNKLKKRIKRSQMATFFANMSPCLIGMEACAGAHHWARILTAQGHNVKLMPPQFVKPYVKTNKNDMADAEAICEAVTRPNMRFVSIKTPEQQSLLSFHRARAGFVKARTAQINQLRGLLAEFGIVLPQGSAAVHRHIPALLEDAENGLPIPFRRLLSSLYENVKQLSEHIETMDIAINDHFKHDELCQKLATVPGIGVLTATAIVGTIGDGAGFKNGRQLAAWLGLVPKQHSRGGKNTLGRISKRGDSYIRTLLIHGARSVLVARKDRLASESWLGQLLERRNKNVAAVALANKNARMLWVLLATDKVFAPEKAMGAAYM

SEQ ID NO: 151756 - protein, 408 aa, unidentified
MAVRAHGPEHRGVDPHKLSATIEVVDDRETVWATGRFGTDKVGYAAMRKHVQAWPERVWAVEGSNGAGRPLAQRLLADGEHVVDVPAKLSARARLFDTGHNRKTDAHDAHAVAAVAVRTRGLRVLSYDEELEALRMLADRREELTRQRVQTVNRLHRLLAELTPGRAKKDITTLQAKAILAGVRPRDMAGKTRRRLAAEQLAELVAVEKKIKALTAELKQMVKASGSGLMDLRGVGPVVAARVLADVGDVARFADRNRFASWTGTAPIEASSGEIVRHRLSRAGNRRMNHMIHIAATTQIRLDTLGRAYYRRKLAAGKTRAEAMRCLKRRISDALYRQLLADARAVPAAGLDAGPGGHRGASHEYSAAGSHPHTDTSDQPLPGPAPTTLPAPSPVRKTNTASHLEPAS

SEQ ID NO: 151757 - protein, 394 aa, unidentified
MVEGRKHQQVIPNRTEEIDLLLTWLQARAKLEGYSNVRVVVEATGVYHELLLRMARMRGMETCLVSAEAASKNRLVLFGDNGKTDKRDPVSIADLAARGVVLRHRDLSDEFLALRSAGALYARAEKSGIAAKNRIHRAMRRVFPDFDFSPSFLFGHSGRAVFQCTGFDPFRIVRSGKKRLTRRLKKIVPRIRHQSIDRLLVTAKMSMASASPPITHELYVLDMKYAWHDLVVAEQRKYEAQVILEDLYDRLCELDSSLPAPQKGLVSKLSLARFVAETGSFSDFGSWREVLKYIGLNLRERQSGRYRGKTRVSKKGRVLARHVLNQMVVPLVKRTRLMGPWYRHLIDVEKKPGPVAITAAARKLVKILWGWSRSDQEFDEARVFTCAGDYKAAA

SEQ ID NO: 151758 - protein, 330 aa, unidentified
MEPQYIGIDLHKASFHACAVASDGTRCWEAVFARTAEGIARFAARGIAGAQLAVEASGPTWAFVDAVTRYGVSVCVVDSRKTKLKAGFAAKTDRLDARRLADALRRQSVVSVYVPAVAIRELRELSRGRQQVVRLRTRLVQAIRALLLRMDGPEPPVRTLTSRAGLAWVAGVHLGPSSEASLRRLERLLHATVVETRAADAAVKAAASDDPIVARLRTRPGIGPVLAVALRAEIGTIDRFARGAALAAYAGIVSRVHASGGQVWRGAITREGSPWLRWAVVEVAQRTMNRPDRRGRWARRLARRKGKKIARVALARRLCDEIVHTWKMVG

SEQ ID NO: 151759 - protein, 344 aa, unidentified
MSKAITIGLDIAKHVFHAHGVDERGLPLFSKRISRGKVLEFFAAQPSCTVALEACGGAHHWARQLIQFGHKIRLIPPAYVKPFVKRQKNDAIDAEAICEAAQRPSMRFVAVKSEEQQAAGLVFRTRDLLVRQRTQLINAIRGHLTEYGWIAPKGPSHVAMLAGLIEEEEMASSLPEAARAMFRLMLELLAGLDGKIVDLDKEIARRAREDEVSRRLMTIPGIGPISATAIAALAPPAETFAKGRDFAAWLGLTPLQRSTGGKQKLGGTSKMGERTLRRLLIIGSSAAVQQASKRGAPKGSWLEQMLARKPRMLVTVALANKTARIAWALLVKQENYRAPVAARA

SEQ ID NO: 151760 - protein, 428 aa, unidentified
MNYNTQNAKIASITEKTLIVGIDVGSETHYARAFDWRNYEYSKKPLEFSNTEAGFLTLKAWVEDIAEKHGKTAVIPGMEPTGHYWFALGKFLQDSGMKPVHVNPHHVKKSKELDDNNPNKNDRKDPKTIAALANEGRFSYPYIPAGIYAEIRSLSNLRFQTQEELTRIKNRTARWFSIYFPEYKNVYKDLKAVSGRMVLKAAPLPEDIIKLGAEGVNRIWRDAKLRGAGMKRAKTLVSAAEHSIGSKEASEAARIELKNLLNDMDVYTARLEELIRSIEEKLKEIPYIDKLMAIQGIGLVTVSGFIAEVGDIGRFDNPKQLQKLAGYAIVANESGKHNGESRISCRGRKRLRYVLYEAAISLIGKNAEFREIHEYYRSRKENPLKKMQSVVAIACKVIRVFYAILTKGVDYDAKKLMGDIRRPQIQAG

SEQ ID NO: 151761 - protein, 380 aa, unidentified
MMLTFSMDALSVRGMRKHHHFGTFDAVRRGHPLHHYAGIDVSLELSSVCIVDAKGKIVREAKVASDPDALVAFFKQLGSRVVRIGLEAGPLSQWLYAGLAQAGFEAVLLETRHVKAALSAMTVKTDRKDARGIAQLIRMGWFRPVHCKSLGSQEVRALLVARKQLLGKLLDVELSIRGILRGFGLKMGVVTRKTFEARARELSSGQTMLETVVGAMLTARAALQSEYAKLHKTMLVIVRDDKICRRLMTAPGVGPVVAITFKTAVDDPTRISKSKAVGPLFGLTPKKYQSGETDVTGGITCVGDTMVRTALYKAANILLSRVTRFSALKRWAVEVAKRRGLKRAKVALARKIGVILHRMWVDGTDFRWTKAELGSGVAAH

SEQ ID NO: 151762 - protein, 416 aa, unidentified
MSVALPPAEFFVGVDWAAEVHAVCVINIEGKVLSQFTVEHSADGITLLVRRLAKFGEPIDIPIGIERPDGRLVDLLLEAGHPVVPVSPNAIKTWREGEVLSGAKSDAADAAVIAEYLRLRRHRLTAAAPYSGETKAVRTVVRTRDDLVQMRVAAVNQLAALLDANWPGAKAIFADLESKIALEFLSRYPTPSAASHLGEKRIAGFCAARGYSGRRPAAELLTRLRAAPAGTNDPHLTVALQDAVLALAGVVKAVNTAVKDLDKSVAARLGEHPDGKIFTSLPRSGQINAAQMLAEWGDCRQAYETPDSIAALAGCTPVTKASGKHKAVHFRWACNKRFRAAITTFADNSRHASPWAAKIYNDARTAHKDHPHAVRILARAWIRVIWRCWHDNTPYEPTKHGAAQALTAQSSANLAA

SEQ ID NO: 151763 - protein, 441 aa, unidentified
MSDIAVTTPEPAWAAFVGLDWGSRKHAWTLEPAGGGKREQGVVDNTPEAIAVWAADLHRRFGGQPVALALEQKRGSVVNLLLPYAHLVLFPVPASMSASYRKTFVPSGAKDDPTDAGWILDLLLRHRDRLRRLQPDEPNTRLLLMLVEDRRQLVDDKTRLSLRLQDCLKQCFPQLLQWFDVDTPLVADLLQRWPDLQHLQHCHDGTLRTFFRQHHCHGNLTDERIAAIRAALPATDDPAVLEAGSTKARHLSESMATLREQITRLERRLDELVASHPDAPIFASFPGAGRATVPRLIAAFGTCRERYQSAFEVECDSGIAPVHIRSGKIDRVSMRHACQDFTRQTFHEFAGQSIPQCDWAKAFYKAHCHKPEQHHAAVRALSFKWIRIFYRCWKDRKPYDEQLYMASLRRRSSFLGLGLASATSVEWKTVAGFSKLSEKNA

SEQ ID NO: 151764 - protein, 351 aa, unidentified
MKSLNNQIKGETLFVGIDLHKHRWHITIRTADVEIFSNSIVGRWDNLRRILDRYKGCRIHAVYEAGCFGFWLFDRLNNYGVCCIVTPPSLVPQEHGNRVKTDRRDSRKLARLLAKELLKCVCVPSEEERFHRQVIRRRHQLVGDRVRTQNRIKSELYFYGIDLPAVRGKWSQVYFTNLQRIKFKNNWMQQSFNQLLEQYEFLCAQIAKQTQLLKRLARLPLYRDRVRILCSIPGIGILTAMEILLELQDISRFRRAEQLAAYVGLTPSQYSSADKIRMGRITGMGKNTVRSALVESCWHLIRKDKAMRRKYEQIKVRAGGKRAIVAVSRKLILCIRRLLLDNRPYVYKPVC

SEQ ID NO: 151765 - protein, 370 aa, unidentified
MNKMSAVNTQTIVVGVDVHKYSHTAVALDCFGSQIGLHEFTNDFLPEYVSWLDAFGNRNNLIVALEDVNGYGVHIVRKLADEGITMRYVPGILTERKRKQSIHREKSDPVDAMRVAKVILTNYEETLPAKESIANREERTTAITLDFFLNERRSLVAEKTILKNQLHAMLHQHMGDHYTDCFSKAFTPKAIGYYLKTVNPKAIHDSEASALVASIRRRLTRLKLLLGQIAEIDKAMKKAAKDSSPVAALKKNISGCGDVTACTLIAEVTSIKRFKTKSQFARYAGIAPVHKSSGNHKRLYTSPYGNRKVNRALHTIALYQISRVDDNNPGRIYFEKKLNEGKTKLWALRCLKRQLSNRVFQTLKHEYNTR

SEQ ID NO: 151766 - protein, 358 aa, unidentified
MTRCIPTDAATITLGVDTHKDAHVGVALDGLGRRQGTLSVPATPEGYKKLVDWASEFGPLEHVGVEGTGSFGAGLARFLKGRGIRVSEVIRPRRRDQYRSGKSDSRDAESAARSVLAGTAIGQPKDADGEVEMIRALRITRRSAVKARAQAANQIQALLITAPEGLKSELCGLSTARLVVRTARFWPGTNPSDVEAATKFALRSLARRYQHLSEEIGELDEQLNRLVAEVAPELVAVEGIGTDTAASLLIAAGDNPERLRNEAAFAHLCGAAPIPASSGKTVRHRLNRHGNRDANRALYVIAVCRMSRDKRTRAYVAKRTAEGKSKKEIIRCLKRYIAREIYRILASPSLHSPSISEP

SEQ ID NO: 151767 - protein, 387 aa, unidentified
MYFCGIDVAKREHTVLVVDDKGQVVQPAFSFDNSRAGFDQLAAVLAKLSEPVAVGLEATGHYWLALYSDLAQQSYPVTVINPLQVAAYRRSGIRKVKTDTTDAFWIADFLRIGNLRPTAQDLPVILQLRELSRFRYWLTAQIGDCKRKILCILDRVFPEYETLFSSVFLNSSRALLKEAVSAQEIADFDLAELTDLLHTASRGHFGQPKAEAIQSAARRSVGVGFLVDAVRVEMHCLLQQIDLLQVQVAQLDDAMTELMDQIPQYITTIPGIGLATGAAILGEIGDVHRFDTVDKLVAYAGIDPTVYQTGQFKASEAHMSKRGSPYLRHALWQAASMAVRYNPDLQAYYQAKRKEGKHHGTVIGAVCRKLLARIYVILREQRPYVIR

SEQ ID NO: 151768 - protein, 420 aa, unidentified
MKSASTTPNNTLPEFPPNDVTAGIDWARDDHAACIVDGRGRKVATITVEHTSTGLADLVGFLRRHGVEEVAIERPDGPVIDALLAAELTVVVISPNQVKNLRGRYGSAGNKDDRFDAYVLADTLRTDRARLRPLVPDREDTIALRRACRARKDLVKHRIAAANQLRAHLRNVLPAVVGLFADLDSAISLAFLTRFNTQDKLDWLTPKRLGDWLSKQGYSGKVDPAVLHQRILQAPRGAHGPHSNSQATITASYVALLGTLTQQIKTLAAQIDRQLDHHPDAPIFTSLPRSGRIRAARLLAEIGDCRARFPTPESLTGLAGAAPSTRQSGKLRTVGFRWACDKQLRDAVTDFAADTRLANPWAADLYDRARARGHDHPHAVRILARAWLHIIWHCWQDHQTYDPAQHRALQRVLATQTQAA

SEQ ID NO: 151769 - protein, 368 aa, unidentified
MGNEAKRFVGVDLSKRTYEAVAINADPQTISRWNGKLDLRGRKCLLDKLYCGDIVALEAGTASFKIAKEIQSKPGITVVVLNAANLAIIHASLKKTDKEDALKLARLVQKYSPGELPVVPIPTDQEMERRALAAHETRFRQDRVRLINRLHAVFLRAGFPDHTKRQLGITASREKLIITELDGFNLVEAMNLHHMITEYEKILDDLDKQISDTVVSCGEDAEILLSLPGFGVKTTMAVLAYAGDMRRFENPSQLVNYIGFSPRLYASGDVERSGSITKRGNPQVRWLLIQSAWCMVKSKAANPLKDRFDSMLKRGKAKSVAIVALARKLLELVFILLTRREKYRFIDPSLYAIKLRRAGFNLVGAESC

SEQ ID NO: 151770 - protein, 415 aa, unidentified
MALKIVYKICCGIDVHKTFVVACIASTNDKGVTSYESHRFSTYTSGLKTLLQWLIDRNCKDVCMESTSKYWIPVYNILEKGCSIVLAHPKYVKAIRGKKTDKKDAKWIADLFKHNLVAGSFMPPSDIRQLRDLMRYRFKLTCFKSSEKNRLQNCLTVSNIQLGNVVSDTFGKSAQAILDKLLENPADTSFDLEPLVYKSLKKKLPELRDAIDGFITPEQAGKLKIIKDHYDNLESRKAELEELILALAAPYQQELTILQTAPGISSNFTAIGIISEIGTNMEAFPSAKHLCSWAGLTPTNNESAGKKKSVRVSKAGCYIKPLLVQCANAVVKSTKHPEMRNRYLRLKKRRGHKKAIITIARMLLTALYHMLKNGENYNPELYQKTDLPPVDREITIEQALMLIRNQGYKIKSATT

SEQ ID NO: 151771 - protein, 372 aa, unidentified
MIQNNQNGFNYLLKYLDTLTNTFMIFESTGIYSRSMVRFCQTNQVNFVEINPLEAKFKTSSLRSWKTDKSDAHKLAMLATNIENQRSSNISNDIYFELRERVRFHLEMESEQTRLKVEIIETLHQTFPGLEKLFKNRYSIIALNIAKQFPHPEIVKKQDLGILVESIFNSTDKGLSVKKAETYAKKLITLANESYPNIEVHSFLIKKVKILIQQLKQSIIQMKQLDEEMIQLAKKLDCFEAIYSIPGIGVLTTAMIIGEIGDITQFNSNKQLNAYVGIDIKRYQSGSTQYRDTINKRGNKNARKLLFWVVMNIIRGQRHYDNHIIDYYYKLKKQPHEKPHKTAVVACMNRLLKTIHYLVTNNKQYDYQMSPH

SEQ ID NO: 151772 - protein, 381 aa, unidentified
MLDQVHNRPISTVYAAIELSKKSWVVAIMHPAKGQPSIHRIKGGAFSDLMVKLRAATRNGERLLVCYEAGYDGFWLARSLQAEGVECRVLDPASLQVNRRARRVKTDRIDVLMLVRALMAVDCGDRHVCAIVRVPSIEEEDARRSHRERQRLVRERTAHINRIKGLLFAQGIRGVEPRLRRTRIDFSTLRTGEGSPLPDRLRAELEREYARLDLVETQLRVAETERDTADAQDPSVERKRDMLIQLRGVGPASAAILAREIFARQFANRRQLGSYLGLTPSPYDSGSTTRCQGISKAGNSFARRVMIEVAWLWRKYQPDSVLAKWYEERAAGQSPRIRRIMLIALARKLIVALWRYVEIGLVPEGAVSCATNGATLDRAAA

SEQ ID NO: 151773 - protein, 416 aa, unidentified
MVGGWELRITTGEEGRVMAVVVGIDVAKEFHWAEVKVAETAEVLLSRRVENSPPAIQELIDDIAGAVENHGSATVGIDVLGGIAGLVQAMLLEAGLCVVHVPGLAVNRARRATVGGERKSDPKDAKVIADQVRTRDDLRQVTPSSELDAEIRLLVSRRRELVRDQTRRLGRLRDLLTSIHPDLERSLDVTNKADLWLLCRYVTPTEIRHAGLGRITRYLQRAGGLRAALINKLVDAALQAAHTQQVTIPGETVAADIVRELAAEALATRKRIKDLDTRIEGVLEVHPDAALIRSLPGMGATLTAEFLAEAGGTDRFPTGDQLASAAGLAPVLRQSGKVRYLQRATAGNKALKRVFYQSAFCAIQKDPTSRAFYDRKRTEGKRHHQALIALARRRINVLHAILRTRQPYRTNHPTAA

SEQ ID NO: 151774 - protein, 347 aa, unidentified
MNFYTQQHKHYCGIDLHAKAMYVCILDQSGAILVHKNLPTTPEAFLRIIAPYREDLVVGVECIFTWYWLADLCSKEGIAFVLGHALYMKAIHGGKAKNDKIDAHKIAVLLRGGMLPQAYVYPAEMRATRDLLRRRCHLVRKRAELLAHIQNTNSQYNLPEIGKKLAYKANREGVEDHFPDPSVRKTIEVDVSLINHYDQLLGEVELYITRTAKTHDVQTFTRLQSVPGIGKILALVILYEIQDISRFPRVQDLVSYCRLVKCAKESGGKRLGTSGKKIGNVHLRWAFAEAAVLFLRQNQPGKEHFAKLERKHGKGKALTVLAHKLARAVYYRLSRKQAFDLQRFVAV

SEQ ID NO: 151775 - protein, 357 aa, unidentified
MTSTEKYIGMDVHKESISIAVMNSTGKFVMECVIETKASMLLQFIDGLRGDVRVTFEEGTWAAWLYDLLKPHVSEVVVCNPRKNALLKDGSKSDRIDARKLAELLRGNQLKPVYHGEQGLRTLKELARSYLTISKDVTRVMNRLKALYRSWGIACAGTQVYAPRHRSEWLGRIREAGVRRRAEHCYQQLDVLRLLRQQIRRDLLLEGKKHQAWRLLGLIPGIGAIRAALLIALIQTPHRFRTKRQLWTYSGLGLETHDSAQYRVVEGQLQRSKKPVTLRGLNQDHNHDLKDIFKGAATRVSSSSNGPLHDFYEHLLSQGRKPTMARLTLARKIAAITLIVWKKEVRFDASYLKSQAA

SEQ ID NO: 151776 - protein, 354 aa, unidentified
MKRTTKYVALDVHQATTSASVREESGRVIARSVLPTDGAAITEFVRGMRGAVHVALEEGTQAQWLHDLLAPLVDRVVVCDRRGAPRQGNKADQVDADQLSEQLRRGGLRAVYHGSVDRTTLKELTRTYRNLVEDATRVMLRLKALFRARGIPASGKRVYHPRARAQWLAQLQNPGARLRAEALYAELDVLRHLRPTAKAAMVTEARRDPAWLVLRTIPFFGSVRVALLLATMQTPWRFRTKRNLWAYAGLAVVTRSSADYALVAGQAVRRRRPPLTRGLNRNHNRVLKDVFKGAATAATARPGPLQDFYHSVIARGTREELARLTLTRKLAALTLRLWKKGERYDPTKLTTPAR

SEQ ID NO: 151777 - protein, 387 aa, unidentified
MSQTVAALIPAAVDYERTLILAVEVSNKSWVLAAQVPGLPHTKAKRTIDPEAEALLTAVSGYRARAAATGRSIERVIAVYEAGWSGFWLARWLMRHGVEVYVVQPSSVPVDRRIRRAKSDGIDSELLLRTLLAWLRGEPRVCSMVPVPHEADEDARRCVRERSELISERIGLTNRIGAILATLGVSDYNPLLRNRGRRLAELRTALGEPLPANAHAKIKRLLARLELVLTQIAELERERDAVVETEASDGASKMIQQLTALRGIGVQSATVLVREAFVRRFANGKALGSYAGLASSPYSSGGIDREQGIGKAGNRRVRTVMVELAWLWTRYQPGAAQVCWFRERVASTGRRVRKIMVVALARKLLIALWRFVIDGVLPEGAVLKPAA

SEQ ID NO: 151778 - protein, 339 aa, unidentified
MNDIKLMAVDLAKNVFQVCALDKHNKLLFNKKLRRSQLIEFMSKQNSSPIYMEACYSSNYWARRFNEMSHQSFLIPAQHVTPFVRGNKNDHNDALAIAESSRRPHIRFVPVKTEQQQQIIAVHRIRRRLVKNRTQITNQARGILADFGLIVPQGNKAFKELMRQIQSKEQLSSEFRQNILLLEQEFDFISENIKCLDETLKLYFMDNQNCRIVSSIPGYGVTITTLLVAMIDKGQAFSKSSDIAVWVGLTPKQYASGDKSKLGGITKRGDRYLRSLLIQGAHTAINWAMKRDDQYSLWIRQLVLRMGRKKAAVAIAHKMIKLAWVLLQKQEMFQTQQMH

SEQ ID NO: 151779 - protein, 367 aa, unidentified
MTTIDEEAVLKRMTEEQVTIGVDTHKHFHVAVALSAQGARLGELTVAADPGGYEQLLDWARSVGAPWCFGVEGCGSYGQGLVSYLRRHEQRVVEAGRPDRRDRRERGKSDPIDAENAARAVLAGTATGVPKSADGTSEMIREIKIARDTAVKARSQAIITLKALLVTAPDELRGELQPLSKAKLRERCAGLRPGRLESPLAAAKHALRALARRWQSLDREIKEHDRLLDTLTAQAAPALREAFGIGVDVAAEMLILAGDNPERIRSEAAFAKLCGASPIPASSGATQRHRLNWAGHRQANSALYRSVIVRMRFHPPTIAYVKRRTAEGKGKREIIRCLKRYLAREVYRHISQATPVLKPASVGDLSP

SEQ ID NO: 151780 - protein, 381 aa, unidentified
MDILYPCCAGLDVHKRSVQACVRRRAADGQLTAQSRRFGTMTADLLELADWLAAQGVTHVAMESTGVYWKPVYHLLEGRFALLLVNAQHIKRMPGRKTDVTDAGWIAQLLQHGLLAPSFVPPPEVRALRDLTRQRAQLVRERAAVVNRIQKVLEDANIKLAGVATDVLGKSGRAMLRALIAGATDPAALAALARGSLKKKAPALRQALQGRVTDHHRFLLGMLLEQAEHLEGQVARFAARIAALMAPFAADAARIQKAPGIGSQAAEVVVAEVGTDMTQFPSSGHLSSWAGLCPGNHESAGKRHGGRTTKGSQWLRTALVQAAWAASHTKGTAFAAAYRRWVKRLGKKKALVALAHKILTVIYTLLKTQTEYREPGVPEAA

SEQ ID NO: 151781 - protein, 351 aa, unidentified
MTPQTTAEPKLFIGMDVHKKSWTVHFKTDLFDHKTVTMPADPLQLYNYVSTHFPDHETSCCYEAGCCGYWIARTIQQYGWKVLVVNPADIPRKSKQEWTKTDKIDSRNLSEQLKSNTIHGIGIPTEEQEQLRSLFRRRIHLAKQLRTIKSHIKSQLLYYGIYLPEQYDNPNWSHEMKAWISNIQWEYSTAASAMSSRIKQLDFLWYEILNVSTELRAYCRKYHNKDYYLLKSVPGIGGITAAAILAELGDLRRFKRLDELASLVGLVPGIYQSSNTNINLGLTRRSNRQVRSLLVEASWIAVRTDMALQSYYRKYAAKEPNKAIIKVAHKLLNRIRAVIISEVPYQIGLIK

SEQ ID NO: 151782 - protein, 346 aa, unidentified
MTYYAGLDVSLKEVSICIIDDDGEVVARGTAPADPEGVSGWFRNRSLTPKRIVHESGQLSIWLQRGMVHLGLPAICIDARKAHKSLSARLNKSDSADAEGLAQPARMNWFTPVHIRSEESDRLRALVGGRERMIRLRKDLEGHIRGVLKAFGIRMTGIGQAQQRQGFRDQLAAAGETDPVLRTIADGFIAAHITLCKATADFDAALRAKSKSNPITRRLMTIPGVGPIVSLSFAALVDDPNRFSKTSDVGAFLGLTPRRHQSGEMDWSGRVSKCGDAGMRGLLFEAASCVIRQVKRFSALKSWAVRLAGRRGFRKAAVATARKIAVLMLTLWKSGTDYQWTQEATA

SEQ ID NO: 151783 - protein, 410 aa, unidentified
MEVLYPHCAGLDVHKATVVACVRHMTGGKVKTEVRTFSTMTGTLLELSAWLATEQVTHIAMEATGVYWKPVWHILSDGEFQLILANAAHVKNVPGRKTDVKDAEWLADLMAHGLIRPSFVPDEPTQQMRDLLRTRKQLTRERSSHTQRIQKALEDANIKLDTVVSNILGLSGRRILQQLIDGETLPQALATLAHRNLQASRDELEAALRGRVNHHHRFLLKLHLDQIDAIDSAIASIDKEVEGNLEPFRQAQQLLSAIPGVSQLSSCIILSEIGLDMGRFETAGHLVSWAGLCPRSDESAGKRRSTRLRKGAPWLKTILIQCAWAAMRTKGSYFQAQYYRLRSRRGSRKAICAVAASLLTTVYHMLSNGACYQDLGANHFDQMAKAKHVQRLVTRLQNLGYDVKILPIAA

SEQ ID NO: 151784 - protein, 340 aa, unidentified
MKSKRYLGVDLHRNCWTVCTLREDGQSQLREWALKDLQAFARTVQASDEVAVESTGNTRLFCEALRARKCRVVVVNPHQFQVISKSVKKTDEHDAQLLATFLSKDMLPEVRMKEPHQARIASLAQTRDKLVKLRTMLKNKINNLLAARGILLRKESLASERGLETVLRAPVEELERVELEILVGQIRHLNEGIARVEQVLHAEGPKLPGYQNLTSIKGIGDVGACILLSTIGNVADFADEGKLAAYFGIVPRVANSNETERSGRITKRGNKLGRTALVQCALIAARYSPYLQTYYRRIAAARGSGKAIIALARKFLGVIYRTLKNDWVFEDFPRFVLVKA

SEQ ID NO: 151785 - protein, 345 aa, unidentified
MLYTGIDLHKRFSHFTTVDEKGNIVKQEKINNEPVHILDYFLSMEDDHKAVVESTLGWYWITDLLHANGLDIVLANPRLLKAISYAKVKTDQLDSTTLAQLLRTNYIPEAHQLNPDLREKRDLLRSRLTLVQQKTRAINNVHGLLDKFNLTNPNDLKGLYKFQFQQYDQQVSFLAKQVKELEKTIYPLIIHNNDVQRLLCLPGIGKISAFTIYLEVGDFARFPTEKHFFSYCRVVPGASNSGGKCKHNTKVSKAGNKYLKIIFNDAAVSAYTHYPVVRDFYNRKCRKKNKHLARNLVAKELARIAYHIITKNCDYDYTFKGKELTRKKFWRWARSSSPRMRLVAV

SEQ ID NO: 151786 - protein, 375 aa, unidentified
MKEKVRFLGLDVHAETIAVAVAEPDGEVRSLGTIPNRAESIRKMIRKLGTAEKLRACYEAGPTGYVVYWQLAELGVQCEIVAPTLVPVKAGDRVKTDRRDAEKLARCYRSGDLTAVWVPDEGSEALRDLVRAREAAKQDQMRARHRLSKFLLRSGQRPPTGVRPWPRPYLIWVAQLRFTQSAQESTRQDYLHEVEHMRARVARLEQAIMEAVKLASPALQQVINDLQALRGIADISAVTIAAELGQVSRFGSARELMGYCGSVPSEDSSGKRIRRGGITKTGNAHLRRIVGEAAWSYRRPPCIWYGLRRRQESISEEAKEIAWKAQHRLHKRYMRLGAAGKPQGKIITAVARELLGFIWAIGIRAETTVSQRVAA

SEQ ID NO: 151787 - protein, 343 aa, unidentified
MQAVKTIGLDIAKSGFQVHGVDADGQVVFRRQLKRRNVLAFFQKVPSCLVGMEACATSHHWSRELQALGHTVRLMPPAYVKPYVKRQKNDATDAEAICEAVTRANMRFVATKTPEQQSGLMLHRTRHLFIRQQTALINAIRAHLAEFGIVAPVGRNGLEQLLNVVADAGDKRLPEVARTCLMALGTQLRALKAKLLELDRMITAWHRSNETSKRLDAIPGVGHVLATALVASIADPKVFRSGRDFSAWIGLVPKQHSSGGKDRLGSISKQGDRYLRSLFTAGALAVIRYAKIYGTKHRPWLTALLARRPTKVAAIALANKLARMAWAMMSRGERYKEPVALAA

SEQ ID NO: 151788 - protein, 344 aa, unidentified
MSKLPTDLSCVTSIGLDLAKHVFQVHAVDAAGKVIVARALRRRDVLPFFASLPPCLVGMEACGSAHHWGRALMALGHAVKLIPPAYVKPFVKRQKNDANDAAAIHETLSRPGLRFVKVRSIENQAVLMQHKAREMLVAQRTQLLNGLRGHLAEIGVIAAQGTGNMRSLGALIHEGHVDIPEAVRASLMPLVSQIAHLDEAIKAIDADIAAQAKADPVSNRLMTIPGIGPVTASALVATVGDPSSFSGPREFAAFLGLVPRQHSSGGKARLGRITKMGNSYLRKLLVVGAHAVLHHQARHNDPLRNWARKLLATKPFKLVAVATANKLARMAFALMSRNTRYAAA

SEQ ID NO: 151789 - protein, 340 aa, unidentified
MRALYAGSDLHGNNNLLGIIDEEGKRVFKKKVPNDPQLVRDVLEPYKGEIVGIAIESTYNWYWLVDMLMEEGYQVHLANPSAIQRYSGMKHADDKHDAFWLAEMLRLGILPEGYIYPKEERPVRDLLRKRGHLVRLRTSLVNSLQNILSRNLGLSVVANEVKRLREDRITPLLGESEDLAMAGRVSKETIDFFTHQIRRIEAMVEKRMLLKEGYRYLLTLPGVGKILALTIMLETGPIVRFETVGDYVSYCRKVPSEWTSNGKKKGSGNKKNGNKYLAWAYSEASDFARRFYPEPRAYYNRKMQKTNPAVAHSALSHKLARAGYYIMKDQVPFRPEKLFG

SEQ ID NO: 151790 - protein, 367 aa, unidentified
MNYKLKAAPTAVSKEQNSQKEPKANRIAIGVDTHLKSYQAARKIDKGAVGVAQTFRSKEALLLYLEKQREQSKEVVVLYEAGPLGYTLYRELKAKDIECLVCAPRSGEQKRKRRKNNAIDARSLTSELSNYLNGNEQALQLVRVPSEAQEQARVESRQHDALVQERKRIGAIGNALLLSQGYGSWSNWWRPKAFERLSRVVAGWVLKQLQRWVKVLGELDQQIQQAKVELSQQWKGPRPKGMGAPSLAQLKAEVLDYNLYSSGRKIGCLAGMVPSEWSTGNSQRLGSITKVGVPAIRRILTEMVWRMILFQPEYKAVQKWREVLEGSNRGLKKKAVVAIGRQLMVDIWRLQTGRISAQALGLIMIEG

SEQ ID NO: 151791 - protein, 508 aa, unidentified
MKRFVGLDVHKKLVEACVIDAAGQVLLRERCDCTREGLQAFARQHLTRQDTVALEATFHTWSVVAVLKPFVGEVIVSNPLRTKAIAEAKIKTDKVDALVLAQLLRCDYLPRVWEPDATTQRLRRLTHRRASLVADRTAIKNRLHAVLAERLIPLPVSRLFSSQGLAALRTLELDEDGRQILDSDLRLLTVVEQEIVEIDAILNRLGYSEDRVRLLMTLPGVGVAVAQTVLAALGDISRFRTADHAASYLGLVPSTRQSADRSYHGPITKHGSGHARWMLVQAAQHLASHPGPLGHFFRRLAKKKNRNVAVVAVARKLVVIAWHMLRNNEPYRYAQPQLTQTKLAALRVAATGQRHTSGPAKGTPRSGNYGTGRGIRRVPALAEIYDQEALPAVTPLQALPPGELRNLRAAAALGFVRDIQQPRRKPKAASQPKTPPTPSQDQSTDAPSARRSRLPSLRSAAAPALTPASGRGARSRSEGGERAAQERNRPSFHPTPNRINSPTSRNGG

SEQ ID NO: 151792 - protein, 347 aa, unidentified
MLHAGLDLSRKRIDICLLSDDGEQLDQLVVPPDVDSLRTLASRIDEVHAEPVCAVVESMTGARLVHDTLEGCGWDVEIADAQRAKGLAPLACKTDRTDSLVLATLSQRDLVPAIWLPDPEAREVRELARFRMHLVRHKSSLKNRVHSTLIQFGRACPVTDLFGAEGRRLLERLDVPEPWCGNITASVELIDYLEGQIADINRRLRGEHADHPYVPLLVTVPGIGRVLAFTIAAEIGEIERFPTPQKFVGYTGLCPRVVQSGERDRRGPISKHGPTYLRWALIEATMHALRHPAYAERYQRTKKRLGKQRGAKVAQVELGRRLARAIWHMLTRNQEFAPRGATFRLAA

SEQ ID NO: 151793 - protein, 337 aa, unidentified
MVYKVIVGIDQSKLRIDVGLMQVSNPAQLMMEQFENNSKGFMQVIRWIKKQSSCLMSEVLICTEHTGLYSYPLCVFCQENGIALWMESALQIKQSLGIQRGKNDRADARRIAQYAFAQRHKVCLYELPAKTLLALKQLLSYRERLVESRKSFQTPKKELKEFKADLSGMIIKESDSLLKTIDRKIEKVNETMLQLVKADATLNKQYELINTVPGIGTITAIYLLVYTNGFTRFRTWRQFACYCGIAPFDYSSGTSIKGKTRVSHLANKKLKSILTLCALAMIKTDNELKQYYERRKAEGKNSMSVINVVRNKLVSRVFAVIRRDTAYIPATEYYQAA

SEQ ID NO: 151794 - protein, 351 aa, unidentified
MKTQTKTASKLWIGIDFHKKTWRVHFRSDTFSGNPFSMEPDPDALHKKVETEFSGYEVEIVYECGCFGYWAHRKFVSYNWISIVVNPCDIPRISKQKFTKTDSIDARNLSKLLKAGLLRSVTVPDVEREQLRSLFRRRVHTVMYTRSIKVRLKAHLLYYGIKIPAEMDNAAWSKNFREWVREIEWKYETGKQMMLSNIKQVEYLHYETNEISNQLRKYCREKHKKVYNLLRSIPGVGPLTAICFISEVGDISRFKNFKQLACLVGMMPTTYQSSETNRTQGLTPRALRIMRSYLVEASWQAVRIDPILREYYKKHTGKKPNDIIVKVARKLLSRMYGVLRTETEYKIGLVK

SEQ ID NO: 151795 - protein, 385 aa, unidentified
MQQNDLSRSHVPFKQDNTLATVLEMGSKSWLLAGLVPGVTRQPLKKLSTAPEQLLAQLHRWRDEAVKAGHTIERIVVALEAGRDGFWLARWLQARGIEAYVIHASSIPVPREHRRAKSDRLDTGMLMRALLGWLRGEPRHCHMVAIPTLAEEDAKRASRERESLVDEKTRLTNRLQSILVALGLPKVNIKLRKTAKQLADLRTPEGEPIPPHTLAELRRGLERLAVIKAQIDAIEKARLEQLKAEPTKGTHPMMLMLAKVLGVGIETADRLVHEVLSRNLRDHRAVARYAGLTGSPDESGTKRREQGLAKAGNARVRRAMLQLAWRWLLHQKNSDLAKWYRARTADGRKDTRKIMIVALARKLLIALWRYVHTGEVPGGVVLKQA

SEQ ID NO: 151796 - protein, 339 aa, unidentified
MVYVGLDVSVGRTAVCIMDAAGHVIREQSVASTPEAIATVIRAHGVPIERVGLEAGINSAWLARGLLEAELPAIVIDATHAAAALKTGFRNKTDKNDARGLADLMRVNKFRAVWVKSPAAQRDRALLTVREQLRRQSLDARNTIWSILQVEGLKPPKLTSPTFQALVVQALEDEVLAPLLRPLVAVAEHLDREVAGLDKVIAARAKASAACQRLMQVPGVGPLVALTYAAGVDDPARFRDSRTVGAHFGLTPRRFQSGTMDWSGGISRAGDAGVRRALYQAANVLIHHSRGWCALKSWAVRLAKRRGLGKAKVALARKLAVVLHRIWTTGEDYRLKAAA

SEQ ID NO: 151797 - protein, 317 aa, unidentified
MTYVGIDISKSWFDSFDNSSNSHQQFANNLQGWHAFTEHLPQDSWVVMEASGPYYLGLACWLADHKIPVSVVNPLVIRRYGQMLLSRTKTDAKDAQLIARYGAEQPVERWTPPSKTRRAMQQLMRLSEGLIRQRGIVLGQQEAFGNSPFADELAVDVLSEQLSRITDALTRVDQRLKQLTLTHFRACYEAVTTIPGIGPKTATLLICMTDGFSRFDTGRKLASYTGICPRIYSSGSSTNGRGSICKLGVSQVRKALYMCSWTAKRCNPTCRAMYQRMKEAGKPEKVIKVAIAHKLLRQTLAVGKSQQPFDEKKALAA

SEQ ID NO: 151798 - protein, 339 aa, unidentified
MSSLHILGIDLGKHCFHLVGHDSAGREVLRKKLNRSQLILFISKLCPTTIAFEACGGAHWLARKCLELNHQVKLIPPQYVKPYVKGNKNDFIDASAIAEAACRPSMRFVAVKSEEAQIIATIHRVRDGFIKERTACMSRISAILLEFGLSLPTGHAKMKSLFQWLADQKQPLPPFFTRELQALHEHYSYLNEQIKRQDKKLSQYVETNELAQLLKSVPGIGDLTASLCLADISSPTNFTNGRNMAAWLGLVPRQYSTGGKPKLLGVSKRGNKQLRTLFIHGARAVLARPDKTGKAFGQWLIDLRASKPFNVVVVALANKLARIAWAVMYNRQAFRMTTI

SEQ ID NO: 151799 - protein, 344 aa, unidentified
MKLTTVGIDLAKQVFQFHGIDEHGKVLVKKQLRRDQMATFFVNLPPCLVGMEACGSAHYWARKLQAMGHTVRLMAPQFVKPYVKTNKNDAADAEAICEAVGRPNMRFVPIKNIEQQAVLALHRVRQGFVKARTAQANQIRGLLGEFGLIVPQGIGYIATRVPELIEDAENELPGSFRLLVQRLLDHLKELGQQVEELEAQIQAWHRNSDLSTRLAQVPGIGPITASALVASIGDAKNFEGGRQLAAWLGLVPRQHSSGGKSNLLGMSKRGDSYLRTLLIHGARSVIYRAGQKADPCSWINAVVQRRNKNVAAVALANKNARIVWALLAHDRRYETGYRKAAEVA

SEQ ID NO: 151800 - protein, 356 aa, unidentified
MPSSDHATQYQLFVGVDIAAATATVAWQRPHQKPSKPLTLEQTPEGFSLLHQRLISAGVRPEQILVVMEATGIYWLAFATFFARQGYAISVVNPSQAHHFAKALLKRAKTDAVDAHTLTQLAALLQPALWTPPPSIYEELEQRLSQRESLLLMRGQLRNQLHALTHNPVVVTQVRQRMEALDQTLTAQVAEIEAELAALVRPEEEQTATGTMAEVTPEQAWAKSIARLQTIPGIGLLTALWIVVTTMNFTLCASAEQAAAYAGLVPMPRESGTSVYKRPCIGHTGNGRLRTALYLATLSAARYNPIIQPFYERLRLAGKPMKVARCAAARKLLVLAYALVQHQKDFDALYQQPHAA

SEQ ID NO: 151801 - protein, 356 aa, unidentified
MGTISLGVDLAKCVFAVCEMDGSGRVLRRRDLRREAFAVYLAQLPAGTVVAMEACSGAHHWARRCIEYGLVPRLMAAQFVRPFRKNPLTKNDANDAEAIVTAARQGNMRFVPVKDIDQQARLSWHRVREGYKAEHLAIGNRLRGLMAEFGIAIPKSDVALRRALADLDAYAELPGEFKELLRALAAHWVQVRAAMAACDARIERHAREDVRCTRLRALVGVGPLTADAMVASIGNAREFKNGRQLAAWLGLVPTQHSSGGHARLGAISCRGDGYLRTLLIQGARSSLERAKRASPDKATPEQVWIRSLACRMPFGKVIVAIANKHARQLWAMLANDVDYDPHAYIHHPLQQHAAVT

SEQ ID NO: 151802 - protein, 402 aa, unidentified
MDGATPARVAGLDWASRLHMVCVLDPDGQVRARFQVPHTGKDLRGLTRRLAKLAVGRVAIERPDGPVVQALLDAGFEVVVLPSRQVKHLRGRYGSAGNKDDRFDAYVLADVLRTDGHRLHPLRPDSPETAGLRAVSPARKQLVDQLANQLRANLEVAFPGAAGLFAEVDSPIALRFLAQFSSAERAAWLTQARLGGFLRRVGYCGRVPTAELYQRLVHAPAGLQGSHGDACAAVTLSLVATLRAVRAQIEELDGEILERLAAHADGHIFTSLPRSGRVRAAALLAEIGDCRQRFPDPTALECLSGAAPSTRQSGTHTTVTFRFACDKKLRQAVMDFAGDSRHANPWAAHLYNQARARGHRHPHAVRILARAWLRVIWRCWQDGTAYDPARHGAYQRLIAKEA

SEQ ID NO: 151803 - protein, 438 aa, unidentified
MSNKVFFNPDELFVSVGIDVGADFSWMSIALPNQQFVGKPYKILHNSMDSLTAAVSKIKEAEELYSLESRIFLESTGIYHYPLFCFLRDKGFNAAVINPIITKNSTNMNIRKVHNDRFDSRKAALIGLKPDLKVSLMPSDLALNCRNLCREYYDLMDNRSAYVNKLQGELRMAFPQYLGIFSKVTTNTSLTLLETYTSPSAFIEAGKQEMIDTIRSTARFGLTYAKNKHNAIIRAAKEAQTFGYMIDSNIKRIRLYISFIRKYDEEIKGILDSLHELVNANEGTDFVKQIHLIETFKGAGFLSAVSLMGEIGDFFAFSKPKQLFAYFGLDPAVKQSGKFEGTKTKMSKRGSAIARRVIHTLTLQSIGISRTGEAKNPVLRDYYLKKCESKPKLVAMGAVSHKVCNIIFAILRDNKPFKIIKPEEHIKQFNAAKCDIAA

SEQ ID NO: 151804 - protein, 368 aa, unidentified
MSNHTHYKVGCDAHKYFSLFAVLDRHGKVIQRTRVNHEPGAIQAFLSQLPPGTPVALETVGNWYWIVDEIEAARCVPHLAHAAKAKAMMGYVHKTDKLDADGLGILLHNGTLPSVWIPPGELRDERELPRTRMAFSKIRTKLKNRIHATLAKYALSLDTDSDIFSPKWRPQLLALLQRLPAETCRCVQQELELLDLVQAHIGRLEARILERVRRTPSIQLIQSIPGPAEILSIVIDREVGSIDRFSCPKHFAGYAGTVPKVKSSGGKTHYGRMIKQCNNYLKWAFIEAANVVVRQQNHPAWRRKHVVRLFDSTRHKKGHSVAVGAVARYLAEATYWVLKKGEPYREPLPRHPAGSKSLVPPRQGRARA

SEQ ID NO: 151805 - protein, 330 aa, unidentified
MKNYKEVVGIDVSKKTIDAYCYHGQSHKTFANDIGGYKSLVKWVFKVAKTTELFYCFENTGYYSLKLALYLTSQNIIYVEESPLKIKRSSGIVKEKTDVLDACLIARYGWLYREELNPSTVKSSSQLELGRLLALRDQLVRNNAGLKGTLKDMKVLLTSPTTDTGCIGLKRSIDYLEKQVKSIETRIKVILSEDSSMEKNYELLTSLRGVGLVVACQLIYHTGNFTRFDSWRAFSSYCGTAPFEHRSGTSIHRRKQCHYLGDRKMKSLLSMASVSAIQHDSELRLYYKKKLAEGKDKMIALNNVRNKLISRAFAVVKRGTPYVVLQQHAA

SEQ ID NO: 151806 - protein, 342 aa, unidentified
MKITTIGLDLAKNVFHIVCFDERFKERSKKMLRRHQVLKYFANIPACCVAMEACSSANFWARELYTLGHEVKLIPAQHVKRFLPGNKNDYNDARAIAEASTRDNIRKVAVKTIKEQDIQALHRIRSQCKRDRTALVNSTRGLLSEYGIAVAKGISSLRRAIPELLEDADNGLSDYFRELLARRYSQLIELDGHIKFYTQKLEQYAQQDEACQRLQTIPGFGPIVSSAFLGVIGNGQQFSKGRDAAASLGLVPHQHGTGGKTILLGISKRGDKYLRSMLIHGARSVITHSLGKDDPLIRWVNRVHERRGKNKAVVALANKMARIGWAVLRHGTSYQVQSLVPA

SEQ ID NO: 151807 - protein, 320 aa, unidentified
MESVDLYQSAMGIDVCGERLDWQRLPQHSSGSHPNTPDGIKALVADLKQSAVDIVVIEATGGLQRQAATALASAGMAVAVVNPRQVRDFARASGQLAKTDRIDALVLARFGLRMQPQPRCLPDEAALELADKLARRSQLIEMRVAEKNRRYRASTVMKRSIDRHLAFLDQAIKSLDQDLDDTLRGSPMWAEKVELLEAVTGVGPQTLRRLLIDLPELGKLDRHGIAKLVGVAPLNRDSGTFKGKRMIWGGRVNVRNTMYMAALSASRFNIPLKAFFQRLKAAGKPHKVALVAVARKLLTILNAMLRDRSVWNPQRAATRA

SEQ ID NO: 151808 - protein, 345 aa, unidentified
MKIVGCDLHTRYQQVAMLDEATGELVERRLEHESGEARAFYTELAGPVRVGIEATGHTRWFERMLAELGHELWIGDAAEIRASMVRKQKTDARDAAHVLELLLSGRFPRLWRPTMAERDLRQLVWHRQKLVWMRNAIGNQLHALAMGEGVCRKKKLFTKKGRAELEGLPLDRWASRRRQELLRLLDQLDASLKEFDQAVAEQAEQNQAAVLLMTHPGVGPVTSLAFVLTLGPVERFARSKQVVSYLGLNPREHSSGGRQRLGSISKQGNPMMRSLLVEAGHTAARLDAELRQDYQRLKLRRGGGVAKIAIARKLAVRMYWMLRSQASYTQLVRMQGSPRATLVEQ

SEQ ID NO: 151809 - protein, 375 aa, unidentified
METIYIGVDFHARQQSICYLTTETGEFVTHELKHQAKDEVRTFYSQFGGRVIVGLEASGYSPWFEQLLEELGHEVWLGDATEIRRRARWRQKNDRRDAELILDLLIHDEFPRLHRPSLESREILRMLRYRHKLVKMRTIIKNSLQALALQSGLSRRTKLFTKAGRQELRAAPMSPVMKQQQEQWLELLLVLNQRIVETTLWLKQQSLNDARIRLLRTHPGIGLLTSLGLVHTLDPISRFRNQRKVTAYAGLEPMERSSAERKRFLGISKAGSRLLRYLVIEAAHTAVKKDDDLKRFYRRLQERRGRPKAKVAVARKLLVRSFIMLRDEIDYAEFQRRAVAARLARQSSRPSVPDRLIGQPASSESQERVLSAAKK

SEQ ID NO: 151810 - protein, 453 aa, unidentified
MEREDIRLEQFRRLRKEIRGSEDYLIVGIDVGKDKHNAYLGTPRGKTLYRRLIFENSREGFEKLMFQVQAIRVQQSLNQVVFGMEPTANYDKPLGEFLINQEHQVVLVSPEAVKQNRKLLDGRWDKHDGKDCANVADLIAQGKCLYYEYPLPALRDLRNLLSLKRKIKKLEQGLRLRIRNHLVAQYFPEMDQYCNWGEQEGLALVRWCLDPAVMARLSEAELLSQLHNQSRTLAQRRRLSALREKAPSSIGCRFGISVEFEGQSTVKLLKEVRQTISETEEKIDQVCLRFKEYPCLLSIPGFGPSLSAMVLGAIGNPWRFQNGAQVIKMVGLDLSASQSGKSQGPPSISKKGKAEIRYALYQAALVASSRDKHFVAYFTDQLRGREKEKGIKTKRRVKLAAKMLMIAWTLMKKQELFDPRYLSPQAEPINARKTMKPENRGIPEVQRGSDRGL

SEQ ID NO: 151811 - protein, 353 aa, unidentified
MMFHVGLDLSRSRVDVCVLDAATGVVAYTAAVPDADGLRGLVGRVQEMGSPPVRVRAAIESMTGARYVRDVLTDHGWEVLVADAAKVKGLAPLACKTDRIDAAVLAELSARDLVPAIWLPPLLVRQRREQTRYRTHLVKHRSMYKHRIHSTLMTLGVPVKVSDLFGVAGRARLAELDLPEPWAGHITTSLALIDGLGRDIDGCEAAIAEWAHTDPAVRRLRTLPGVGDILGATIAAEIGDITRFATPARLVSYTGLCPRVYQSGRKDRRGPISKTGPEQLRWALIEATTHACRHPAFAARYQRTKTRLGRHRGARIARVQLARELATAIWYMLTREEDFDPKPAAGAAIDLAA

SEQ ID NO: 151812 - protein, 345 aa, unidentified
MGETTIIGLDVAKQIFQVHGVSADGKVTVKRQLRRSQMIGFFGKLTRCVVGLEACGGSHFWAREIRALGHDVRLIPPAYVKPYVKRGKTDAVDAEAICEAVSRPTMRFVPIKTAECHAALMVLKTRDLLVRQRTQAINALRGHLAEVGIVEAKGAAKVEMLFEIIRDENDGRLPPAARTALKMLTEQIEALTERVDTLERKIVAEVRRDDTMRRLTTIPGIGPITAATIQALVPDPGAFTSGRHFAAWIGLTPKMHSSGGKERLGKISKMGNPALRSLLVVGATAVSRQVRRGATISPWLTALLARRPAKVAAIALANKMARIAWALLTKGGEFIRKNPVAEPAT

SEQ ID NO: 151813 - protein, 319 aa, unidentified
MVDSVGIDISKKTFNAHIIGERGESKKSFPNSDVGFRQLEQWARNRKAVKPRFCMEATGSYWERLALHLVDKGYSVSVVNPARIKAFAKSELLRAKTDEVDAALIARFAKAQQPDLWVPPPREIRELQGFVRQLKHLRAARAGEMVRLQNEEILDAVRRSIESVIETLDEQIRSLEKLIDQHIQRHPDLRSKRDLLTSIPGIGELTAATILGEIPHIEEFRSSKAVGAYAGLSPRTFLSGTSIRGRGAICRTGNSRLRAALYMPALSALRYNELFKAFAGRLKAAGKPMKVILVALMRKLLVLAFSVLRSRRPFCVPVS

SEQ ID NO: 151814 - protein, 388 aa, unidentified
MPAAETPVAYLGIDVGKSSHSACALDAEGGVAFRAELANRPDDIDRLLERAGSGALVVVDQKRNIGALVLARAHAHGNPCAYLPGYAEKQARGMFPGTAKTDAIDAEVIARTALGVPRALRPAPEEPEGAASLRILSSQREFASSARTRAKNRLRATLLEADPALEGAVDPSSRWQVSMLAEFGGAAGCSAAGWRRFSSAARRAGAPAAGARRLWEALLASSRSGRRLPAGEDVAVRILAREIASLDADIEELDSLVADSLAGDEVYECLLTVPGIGPKTAAALVTSIDISAFRGHDELASYCGVAPSDRRSGSSIRSTSPQHGGNRQLKNLLIFSCNSLIGTDNRFGRYYGECRARGMRHSKALKAVARKRLKVIYAIMRDAVPYAA

SEQ ID NO: 151815 - protein, 343 aa, unidentified
MDYFAGLDVSVKDTSVCIVDEAGKIIREVKVASEPDALLAVLNNLAYHFKRIGLEAGPLSQWLFSALAEADLPVICVETRHMRAVLKAQINKTDRNDARGIAQMMRVGLYRPVHVKTLRSQKLRMLLTHRKLLQAKAIAVENDLRATLRNFGLKVGAVGAVKFEARIKELIDNFPDLVALVEPLLVVRRVLREQISILHRRVLAAVRNDEVCHRLMTVPGVGPVVALTYRATVDVPARFRKSKSVGAVLGLTPAKDQSGERDRPGAISRCGDEMMRTTLYEAAQVMLLRSAKWSWLKAWAMKIARHRGMKKAIVALARRLAVIMHRIWIDGTEFRWTREAAAA

SEQ ID NO: 151816 - protein, 351 aa, unidentified
MRYYVGVDHHKKFSYMSVMDEKGEVVKEGKVVNTKESVSRFLGEEYSKDTSAVLEAGRNWTVMYDWLEDELDEVKLAHPMKVKAIAEAKIKTDKIDAKTLAHLLRCDLVPEAYVPDKDTRIVKNILRQRMFFVKLSTMVKNRIHTIIDRHPEIRNQIDPSDLFGKQGMEWLKVVTLPKDERRILDGELELLEYVKDKIHSSDQWVMQLGKNDPRVNLLMTIPGIGKFFALLIVTEIGEISRFSNKNKFASYAGLIPSVHSSGGRTFYGRIIRHGNKYLRWALIEAVWPAIRKDLSLREYYESLKVRKGANQAKVAVARRLSVIVYSVLSQNRTYKINYSGCPHIILAEATV

SEQ ID NO: 151817 - protein, 482 aa, unidentified
MKKRNIYQNRSQELLRLFEEAGNSAKVMCIPMDYAKKDHVVMFCNGYGDILRKPFSVKNSPDGLKYLVDQVTRSCRRRGIKKDHVFFGGEDANSYSENFVSTLRSKGWIVAGVNAHDAKKQRANLQASTDQLDLMGIATMLLNCRANCCSAQSGIYRNLRTLVRHRRKLVVMSTEVKNRIHGVVDRLFPGFLNEGKTGIVPFTSSSLYLMEDRFSPKQIRRRKREKLIEILKRFGTSKAEETADRLQQYAAQVLHTPADYVDTLQLSLAQHVKHLRCLHQSVEQLEREIAVNLAQTQGAFLTSVRGIGVVLAAGVTAEIGDPNEQKPLNNLVSYSGIIPRVKQSGGPDGKAYTVSVAKRCNRILKDYVVKSALHLGLHGPQDLMSDYKRRDASGQHADFSMGRRYLRMAMCLMRTSQIYLPSRLRKADATLQERAGYYLMTWPYLRGKWKKLGALEAAFTKDRPLGLWRQIVQELYDVKLKL

SEQ ID NO: 151818 - protein, 412 aa, unidentified
MTAKDQFAAHVGLDWADKKHDVCVQFKNGDRMFHVIEHTPEALDIWLNELHQRAKGRIAIAVELKKGPVVYALQKYPFVTVFPVHALSLARYRQAFWPSGAKDDPQDAELALDLMLRYPHKIKAIEADNPDIRLLQQLVEQRRLLVEDKRRFVNQLINTLKQYYPQPLEWFSHRDSSLFCELIIRWPSLQQLKRARSDTVRHFMNAKGGPAVAYTEQRVASIASAIPLTTDKTVIEANALMATALASQIKLTGDLIRTYDERIESLFDTLPDAELFKSLPGMGPCMGPRMLAALDDNRNRFNSAEEIQNYAGIAPVTERSGQKSWVHWRWQCAKFVRQTFVEWTAKTVNSSYWARLYYQGQREKGKSHQSALRALALKWIRIIYRCWKTRTRYDEAKYLLALEARKSPLLKP

SEQ ID NO: 151819 - protein, 414 aa, unidentified
MEQKMLYVGIDWADDHHDIVITDDSAKTLDQFRIDHTCDGFALLHSHIANHQTSSSLVLIAIETSRGLLVHELLQKGYTVYAINPKAVNRYKDRHVLSKAKSDVLDALSLGHLLRTDRHLFRPLEPLPEDYRLLDRLCGDLRKAIDEKSRIINQVISCSKEFYPKALEMFSLNSQIFIDFLNAFPDHDALSACKKKTLLAFLRKHRYSYPAKAEELWKTIQSPSLQPDKITARSGRLRLGMLLGQLENLKKHITHYEREIQHILDHLPESTPVKSLPGVGERLAPELVAILGPNSKDGHHRFQAAAEIAKLSGCVPVVRESGKWRTVSLRYACVKPFRRTFRDWAFTSISRSRWARAFYDYHKQRNQNHSTILRNLGKKWIKILFALWSQGTTYDEMVHIQNLKAKKVPWAMAL

SEQ ID NO: 151820 - protein, 363 aa, unidentified
MLLVGDDWAEDHHDVELQNEAGRRLARARLPEGGAGVARLHELIGEHLAGDGDPGQVAIGIETDRGGWVQALIAAGYTVYAINPRQVARYRERHGTSGAKSDAGDAHTLADMVRTDRHQLRAVAGDSAQAQAVKVVARAHQTLIWERHRHMLRLRTALREFFPAALEAFADLTAPDALELLARAPDPVSAARLSRPQISAALKRARRRQAEDKAAAIQGALRTVHLAQPPAVAAAYAATVRSLVSMITAFNAQIAAMEEQVNTCFGQARDAEIYLSQPGLGQVLAARVLGEFGDDPHRYATARNRKNYAATSPITRASGKKKTVLARFIHNDRLVDALHQQAFCALTASPGARAYYDQLRRRG

SEQ ID NO: 151821 - protein, 372 aa, unidentified
MERYYVGLDVHSRESVFAIQRHDGELVARGALPTTALGLARLRDEHSLPPRTPVALETGTAAFFVARELARLELAPVVIDAHEVRRKAHRPLQKSDRRDALALCEGLRRGYYQSVVHVPSPEIGELRTTLSRRRHFIRIQVAEVNAVKRLLRGAGRDSACRGRMRTDAHWERLLASGHIPGDLEDHVRHHYAVWRQAAERVRALDLTLGTKAKKLRDVVKRLETVPGVGPIVALTTIAVFAEVGRFASAKHAASYSGLVPSTFQSGERDAHGHITKRGSAELRTMLCEAAHHARRPTHPLNPHFARVAVRRGHKTAVVAVAHRLCRILFAMLRDGSDFDPARIGVEEGHFTRAVTYKYRLTPKPAGRLPAVG

SEQ ID NO: 151822 - protein, 422 aa, unidentified
MHMVCVPADRDANPVRQFGANTADLHEIAAWLKKCRVRTVALESTGVYWIPLFELLESEGFEVKLVEPGQLSRCGARPKTDVLDAQWIQRLHSYGLLRGSFRPPDSILALRAYWRQRQMQVRYAASHVQHMQKAMEQINVKLAEVVTDITGLTGMSIIEAILGGERDPVKLAKLRDERCHSSEDQIALALQGTWRPEHLFELRQAYELYQFHHQQITECDNQVQAELAGLPNRAGEKTRTHKPRKRGRKSNDLRFDATGPLFKALGVDLTLIDGIDVGTALVILGEIGVDVSRFPTEKHFASWLRLCPPQDESNNTKKRRRRRKNTSRVATALRLAARSVGKTMTPLGLFYRRIRSRIGALGAVKATAHKLACLIYRMLKYGHEYVVQSMEEYEAKTKANMIKVLQRKAMAMGFQLTPIPTQ

SEQ ID NO: 151823 - protein, 339 aa, unidentified
MKQLNTIAIDLAKNVFQVHINDSRGHKLSSRQVRRAQLLNYLIKQPVSLVAMEACGGAHYWAREILKLGHEVKIIHPAYVKPFVQLHKNDQRDAAAIAEAAVRPSIPAVSVKSVEQMDLQALHRVRERVVKERTAIGNELRGVLLEAGVALAQGSATLRTKVPEILADADNGLSPRLRLLIQDLLEEWYQRDERAQRYKEELERVATTNPLCKLLLKLPGIGPINATLLVSHAGDAKHFKSGRHFSAYLGLVPKQHASGGKEQLDGISKHGNKHVRKQLVHGARSAYRSLLKNPEGSRLGRWVARMEGKHPNKIIVALANKLARIVWAVLSKNATYQPN

SEQ ID NO: 151824 - protein, 318 aa, unidentified
MSEPIHVGIDVAKDSLEVAFGPQAPTQSFANDDEGHEALVGALNAHKVELIVMEPTGGYETPCACALQAAGFAVAVVNARQARDFAKAMGYLAKTDRIDARVLAALAAVLAQRPERDKVVRALPCEEQQQLHAMVLRRRQLVQMLVAERNRLAMSHRVARRSIEALIKAIRKQITDIEGELTSHIERYHADLAQVLQSAKGVGPNTCMVLIADLPELGKLSSRQIAALVGLAPFNRDSGLMRGKRMIFGGRAQVRCALYMATLVAMRHNPVIKAFYARLLAAGKPKKVAIVACMRKLLTILNAMIRTGKQWDDTYHFA

SEQ ID NO: 151825 - protein, 367 aa, unidentified
MFKNSMLFIGLDLGDRHSHLVSLDQGGEIVEEARLPTTQASLARKFSGIPACRVAIEVGAHSRWVSALLARLGHEVLVADARKLRLIYNNPRKHDRADAEYLARLARLDPGLLSPIHHRGPQAQAHLAVIRARDSLVRARTQLINHARGLVKTTAARLPSCSAASFHTKTASAVPQELLPALSPILATIGSLTQSIQAYDRQIQQLALDHYPETRLLRNVPGVGPVTSLAYILTLEDPQRFRKSREVGACLGLVPRTDQSGAQDPQLHITKTGDSYLRRLLVQSAQYILGPFGPDCDLRRWGLKLAERGGKSAKKRAIVAVARKLAVLLHHLWKNGEIYDPLHRSQSAQRPAELARPSAQEAAIAPA

SEQ ID NO: 151826 - protein, 344 aa, unidentified
MEISTIGLDLAKNVFQIHGVDAKGKAVIRKALRRSQMLPFFEKLQPCLVGIEACDTSHYWARELLKFGHEVRLMPPAYVKPYVKRGKTDAADAEAICEAVTRPTMRFVPVKSEDQQAVLSMHRTRDLFVKQRTQLINMMRGLLAEFGIDIPQGVNRALEKARAIVDGEAPDVPIDAVRIVQRLSQQALDIHAQVREIERDLIEWQRQSDVATRLMTIPGIGPIGATALAASVNDPSEFRSGRQFAAWLGLTPLQKSSGGKERLGHISKMGDRYLRKLLVVGMTAVVRNAKRKPEAVDPNVLALLARKPARVVTVALANKTARIVWAIMARGEVYRERHVPALAA

SEQ ID NO: 151827 - protein, 430 aa, unidentified
MKSNTQNAKIEAITEKTLVLGIDVGSETHYARAFDYRGIEYSKKPFKFSNTEAGFATFKEWILDLKERHEKDKVVPGMEPTGHYWFNLGKFLQDNEMKPVLVNPHHVKKSKELDDNHPTKNDRKDPKVIAGLVREGRYMIPYLPDGVYADLRTASNIRFQLQAELTRIQNRISRWFNIYFPEYKTVYGKPDAKSGILILKAAPLPEDILTLGIDGVNQIWRDAKLRAVGKARAKTLIEAAEHSVGSKEGAVSARMEIRMLLEDYESRNIRLQEVMGLIEGLVNQIPMAEKLLEIKGVGIKTVSGFLAEVGDIRRFNDPKELQKLAGLALVENSSGKHKGKTTISRRGRKRLRYLLFEVAMSLVAKNPEFRELHNYYTTRRLNPLKKMQSLMAIAAKLLRVFYAILTKGVGYDPKKMVNDIRRPAAYAQAA

SEQ ID NO: 151828 - protein, 348 aa, unidentified
MIIIGCDYHPGFQQIAYVDTETGELQERALQHREEAEKFYRELAAQGLKVRVGMEASGHARWFERLLAELNVELWIGDAAEIRTKRVRKQKTDRQDAQLILKLMLKDDFPQIWVPSWENRDLRQLLWHRHRMVQARTRLMNQLQAVALNEGLRCKKRLWREAGRQQLEAFRLAPWASRRRQDLLELLDRLNPTIAELTQAIEREVEKCPEARRLQTHPGVGPLTALAFVLIIGKADRFRCGKQIASYLGLVPLEDSSGSRRRLGHITKQGNSLLRFLLVEAAQVTVRSDPGWRSKYHHLMMRRGRKIAKVAMARRLAVRMYWMMRKGWNYEQLKSSVRTRDNSYQAMV

SEQ ID NO: 151829 - protein, 339 aa, unidentified
MLIIGCDYHPSFQQIAWLNKETGEGGNGRLEHNDEAAAFYRSLRGQAVVVGMEATGGTGWFRQLLSECGHGLQVADAAQVRARATRRQKTDARDAELLRELLLDAKFVWLSLPTAEQRDRRQLLLHRHRLVQMRTRVKNQLQSLAMDQGVRQQKKLWSAKGRTQLQALSLPPWTALRRGDLLQLLDDLDQRLVGLDREVRQQAFGSPEVRRLMTHPGVGPVVGLAFQLTILDPARFASSRKLTSYLGFNPSERSSGGKQRLGHISKQGNALLRGWLVEAAQVAVRRDAQWGRQFRRLAMRKNRSIAIVATARKLAVRLWWMWKRGLDYGQMVQSGSHVE

SEQ ID NO: 151830 - protein, 339 aa, unidentified
MKKVFIGIDFSKLKFDAAIYSVDTKAIVATEVFENEQSGYVDFLQWVKGNTRSQKSGMLFCGEHTGYYSGNLSVFLYESGYDMWLVSGLEMKLTQGIKRNKTDRVDACKIAEHAYRYQDKVILFQPVSKALEEIRELLSYRERLVETRKVLTTSAKEMKRVKDNGSCDYIYQDSLEYIKSLNASVRNCEKRIEALLKQDISLNTNYKLVSSVVGIGLVNAALILVATANFTLFDNPRKFGCYCGVVPFEHSSGSSVRGKTRVSKMANKHLKTKLTLAAQNAARFDPELKEYYQRKKSEGKNNWLVLNNVKNKLIHRIFAVVRDGQMYEKQYVHPLKQAA

SEQ ID NO: 151831 - protein, 413 aa, unidentified
MEKVSETVPTVQFEQLINRGCGLDVHEKSVVATIDGEGLVRETRTFDTYTSSLNDLRDWLLGYGISHVAMESTGVYWKPVFNILEEDFKVILVNARHLKNVPGRKTDKKDSQWICKLLLAGLLKASFIPEEKIRQLRDLNRYSTKLTQQLASEKNRIQKVLEDANIKLSSVVSSTSGVVATGIIEGLMAGRTDLEALIDELYHGKLKVSKAELLQAITGRMTDHHRFMLTQIKHHMAYLESQIAVLQQEVERLLEEDWESIALLKTIPGINTVMAVKMLAETGTKLEETFGNPKRLAKWTGICPGNNESGGKKMSGRTTHGNKYLKSLLVEAAWAATRTKGTYLRAKYDSMAARKGRKKALLIIGHKILNAAYIVLTARLSYMAYSVEEFERKRNQKRITYLQTELKGLGMSV

SEQ ID NO: 151832 - protein, 331 aa, unidentified
MSNIIGIDVSKASLDCAYLRDPDQKKTKRLRCDNDMNCFASLVAWAETRSELPVGSLAFIIEPTHVYHEQLVQFLYNSGATVYLVNPGKVRKFAEGIGILSKNDLVDADLLVRYGLLAKKLNAYAPVAQEVNDLRSLLNRLEVLERNLRSELNRQEKVGKTMVFHRLEQQSIARAVKRLKAEIITFKRAIRECINSAPSLRQNFDLLQTIPGVGAKTAWIMMVILGSRSFRSAPEVASFLGLNPIEKRSGKSQYRRPRLSKSGSRHYRQQLYFPAIVATRKNPDIKALYERLLAADKTKMCALGAAMRKLVHICYGVVKNQTPYTAQSIPS

SEQ ID NO: 151833 - protein, 348 aa, unidentified
MLADQVDYVVGVDTHRDEHVLAVVVASTGAVVAQRSVPATSRGYARALAFADEHAAGRRVWAVEGAGHYGAGLARHLSGRGETALEAGRGSRNERRLQGKDDQLDAVRAARTVLSTETLALPRKGQRREALRLLMVARRSAVDVRREALVQLHSVIVTAPDELRAELRGLPQTRLIERCSRFRRSSSRTPAADATTLVLRTLARRVQAATEEAAELRTEILAHVRALAPRLLDEPGVGPIVAAQLIVSWSHKGRVRSEAAFARLAGVAPIPASSGQTTRYRLSRGGDRQLNRALHTVILHRRLHDPATRDYIARRVADGKTRRDATRLLKRYLARHLYRILNSEPTMT

SEQ ID NO: 151834 - protein, 364 aa, unidentified
MKRKVYVGMDVHKETIRIANLTNNTKEIVKEQQIKHNEVQIKKFVNKLKSEWNEIHSCYEAGVTGYPLYRYLKSLGVNCILVAPGKIPRQSSDKIKTDKRDAIKLAKLLRSGELESIHVPSEEDEAVRDYLRSRDSLRLDLGRNRQRLMKFLLRKGITYSATKYWTVSHNKWLNNLQFNNEILQETFNDYYSRVRVQEENLKAMDKRIQEIAESEPYREKVGILRCFRGVDYLTAMFLLCEVCDFKRFKTAGSFMSFLGLVPGEYSSGSKRKQTGITKTGSPRLRRILTEAAWQHRFPGTGSKIVTARRSGQPALVVALAEKASLRLHKKFRNLQQRGKTPQVMITAVSRELSGFLWAAMNLVA

SEQ ID NO: 151835 - protein, 364 aa, unidentified
MKKSIKKPQAKETKPNRTMGIDIGDRWCHYCWLNEDGEAVETGKIRTREKDLREFFEGEKRMRIAMECGTHSPWISRLLEALGQEVIVANARKIEAITGSESKNDDHDAEQLAVFAHFDPRLLYPIQHRSAERQRDLSLIQARRTLVQARTMIINSARGLVKSMGGRLPQCSSESFGQKARAAVPANLVGLVTPLLEQVTLLNQQIKRMDQQIEELEKRYPEIIRLRSAPGVGPLVAAAYVLTLNGAHSITHSRQAGAFLGLRPRRKQSGDSDPQCGITKTGNNYLRALLVQSAQHILGRFGPDSALRRWGLKLAASGGKRGKKRAVVAVARKLAVILHRMWASGQNYQPFPPATAGTQTVTAK

SEQ ID NO: 151836 - protein, 351 aa, unidentified
MSLVMVGVDPHKESHTATALVTGSHQQLATLRVPASPSGYRQLLEWAGQFPQRRWAIENARGLGCHLTQWLLAHGETVQDVRTTATARVRELSRGRGRKTDALDAAAAAAVAALQGDAEQLQPEDETVVLAVLEERRSNLVGQRTRSVNQLHALLRELIPGGAPRKLRADRAAALLRGLRPLTAADRARKQVAWDLVAEVRGLDRRMAMIGKRIQDTVAALGSRLPETVGVGPVIAGRLLGRTGRASRFPTAAHFASYTGAAPVEVASGEHARHRLSRAGDRQLNHALHIIALVQVGTPGSAGYDYFRRKLAEGKTTREAMRCLKRRIADHVWRVMLSDEQARNHRQPQAA

SEQ ID NO: 151837 - protein, 334 aa, unidentified
MKKVKEITESIGIDVSKATLDVFIHTKQLHKQFLNNRKGFTELLKWVAKEKVNAEETIWCFEHTGWYCILLSHFMYSNKFYYCCVNPMEIKRSMGLKRSKTDKQDAQEIARYAWLRRNELESSIPMPLNLVDLQRLVSLREQLVKQTTALKNLNKGFKVTVEKESTDFGMKTIKQTLKQLESQIRKVEKEMTQLIKQDGDMYHNFKMSKSVKGVGDVMAIQMLLHTHNYSRFGTWREFSSYCGLVPYPYQSGTSINRKPTTHSISDQKMKSLLTMSAISAIQADKELKQYFKKRVEEGKPKMVVLNIIRNKIVSRIFATVKRGTPYVEMYKFAA

SEQ ID NO: 151838 - protein, 378 aa, unidentified
MRFYNQPHRFYCGVDLHARTMYLCILDQAGAVVLHQEVSAEPAAFLEAIAPFRDGLVVACECLFCWYWLADLCQAENIAFVLGHALYMKAIHGGKSADDRIDSQKIAQLLRGGNLPIAYVYPKGLRETRDLLRRRMYLVHKRAEVVAHVVNTNSQYNLPSFGKKLIYARNRQALKITDRFADASVRKSIELNLRLLDALDDLLGDVELYLERTVKLDDADTFYRLRSIPGVGKILALVFLYEIHDIHRFASEGMFLSYARLIRPRKTSAGKVKGGGGAKIGNAHLKWAFSEAACLLARESDQAKRFLARQQKKHGKPKALGILAARLGRAVYQMLRQKKAFDPKRFWNGEPGVTPAQLHKAAVQRPRRAKGSSCVLEA

SEQ ID NO: 151839 - protein, 311 aa, unidentified
MEHSLFVGIDVAKERLDVHLRPTGETFSIGHDEAGLVALTERLVPCAPAIVVLEATGGYEVTVAAALASARLPIAVVNPRQIRDFARATGQLAKTDALDARVIALFAEAVRPVARPLPDAQAQVLGEFVARRRQLVDMLGAETNRRRLVRDPQLQRRIATHIRWLERALRDLETDLHDTIRSSPVWREAEDLLRSVPGIGPVTAFTLIADLPELGRLTRRKIAALVGVAPFNRDSGTLRGRRMVTGGRAPVRRVLYMATITAIRRNPPIAAFYQRLRAAGRPAKVALTAAMRKLLTILNAILRDHRSWQRA

SEQ ID NO: 151840 - protein, 315 aa, unidentified
MTSSLDIDTPAACAQHDTMFVGFELGKAKWKVGIVLPGSSKLSQYTVAGGDAEAALRLISKARQKAEKQAGGRVRVVSCYEAGYDGFWLHRWLEERGIENRVLDAASVQVNRRARRAKTDRLDLERLMSALMRHDWGDRLACRVVHVPSVAQEDDRRTGRERARLVKERVGHVNRIKGLLHGQGVRDALPRAKTFCAWLAEVRTGCGHELPSHLVAELKREHGRLLLVQEQIAEIEAQAMAARQAAEPDTLASKINQLIELKSLGPVSSQTLVGEVFFRDFKNRRQVGGYFGLTGTPFDSGGSRREQGISKAGTN

SEQ ID NO: 151841 - protein, 344 aa, unidentified
MQIAILGIDLGKNSCSVVGLDDSGRIVVRRRMHRVSVIKFASSLTPCVVAMEACCGAHHLGRLLRAQGHEVRLMSPEYVRPYVKAQKNDDRDAEAIAEAATRPTMRFVELKAEEQLDMQTLHRVRDRLVGERTALLNQLRAVLLERGIAIPQGRRKLEQRLDAMLGAPEWSGVASRMRSLLQDMRAEWRGLDRRIEAFDEEFAVRARTDPDARRLATIPGIGALNATALVAAIGNGQTFARGRDLAAWLGLVPRQATTGGKPRLLGISKRGNKYLRKLLIHGARAAMPSLARSATALGGWLRGLLARAHPNTVVVALANKLARIVWAVLRHGREFERANVVVSA

SEQ ID NO: 151842 - protein, 412 aa, unidentified
MQVLHQICAGMDVHKKDVKVCLVTRDSQGQRQEEVRSFRTMTRDVLAMRAWLQGQGCTIIAIESTGVYWKPIFNLFEGDFTVLLVNPSHIKQVPGRKTDVKDCRWIAELLEHGLLRGSFIPPVEMRDLRDLTRYRRQLVNTHSAEVHRLQKVLEDANIKLASVATDVMGVSGRAILRALLAGVVSPEALAELAKGRLRKKKQDLQAALLGRFRPHHTQLLTHILAHIEFLEESIAECEAQIEALCRPFAEVIALLDTIPGVSQRTAQDLIAEIGVEMAWFPSAKHLCSWAKLSPGNNESAGKRKSGRTGKGNKWLRALLVECAHAAGHTKETYLGTKFRRFASRKGKQRAAVMVAHRILEAAYFIIRDKVPYRELGEQYLDAQHREHVIRHHVRRLESLGLHIDIRELPLTA

SEQ ID NO: 151843 - protein, 326 aa, unidentified
MSAITFLIAVGIDIAKAHFEAARLGADGKYKHKRFDNTPGGFAQFAEWLAGFGAEPAHICMEATGAYSLPLADFLAARGLHASVVNPARIAAFAKSELSRAKTDKADAKLIARYALAMRPPAWTPPPAEMRELQALLRRLENLLEMQRMEENREATADPAVTGSIRTVLATLDEEVQTVREAIRSHIDRHPDLKQRAGLLETIPGVGSATAAWLLTLLASHRGFDGAKQAVAFAGLAPRLRQSGKWTGQTKLSKTGDPMLRKALYMPMLSALSCNPAIRTFCQRLKANGKPGKSYLCAAMRKLIHIAFAILKSGKPFDPDYKIKPA

SEQ ID NO: 151844 - protein, 414 aa, unidentified
MFAVGVDVSSARSTVAVLQSKTKVAIKPFEVQHTAEGFAALVGKLNELNGETRIVMEHTGRYYESFAMSMHQAGFFVSAINPLAIKDYQDGVTVRKVKTDKADAVKIARFALDNWEILPQYTPMDTIRYNLKTMHRQFQLSSKTKTALSNNLIALMEQSYPGAYKYFDSPVRPDGSQKWVDYIDTFWHVDCVTKLSQKAFVERYQKWCKRHGYNFSEKKAVELYTDAKQKFALVPKSDTCKLLVKEAVSQLNAVSRTVETYRTEMDRLASQLPEYDTVMGMTGVGKSMGPQLMAEIGDIRCFAHQKSLVGFAGTDPIKDDSGDKVSDSKPSSKRGSPYLRKTLFVIMTILLQLQPQEDPVYQFLDKKRSEGKKYYVYMTAGMTKFLRIYYGKVRDCYIKKGLWDRPKMNETKPD

SEQ ID NO: 151845 - protein, 342 aa, unidentified
MEHFAGLDVSVKDTSVCIVDETGKIVREVKVASEPDALLAVLTNPAYHLKRIGLEAGPLSQWLYSALAEPGLPVICVETRHMQAVLKAQINKTDRNDARGIAQMMRAGLYRPVHVKTLRSQKLRMLLTHRKLLQSKAIAIENDLRATLRNFGLKVGIAGKVKFEARIKELVENLPDLVVLVEPLLIVRRVLREQIVALHRRLLAIVRDDDVCRRLMTVPGVGPVVSLTYRATVDVPARFRKSKAVGAVFGLTCSKYQSGEVDRNGRISRCGDEMMRVMLYEAAQSMLRSKKWSWLKAWAMQIARRRGMKKAIVALARRLAVIMHRIWVDGTEFRWTRETAAA

SEQ ID NO: 151846 - protein, 342 aa, unidentified
MKKKVFIGIDFSKLTIDVTFFYGESPDLFYYQMFENSEDGCKKMIQWIKKMHPLTSDWLVCGEFTGIYTMTLALVLNEQNIDLWLENPMQIKLSSGINREKNDQVDSRQIALYANRFEDRVKLYKPQGEVLLKVRELVGHKDRLTKVKTQLKVPAQELKRVRKDRDIAACINRSSQEIIQVIDSEIKDMERQMMFLLKSDPELKRLYKLVTSVVGVGMQTAIYLLIHTSGLTSFAGPRQLACYCGVAPFAKRSGSSIKGKTQVSHIANKKLKTLLHMCALNAIKFDPILKQYYERKLKEGKHKMNIINNVRNKLIHRIWAVVQADEEYDKNYHFVETIDNAA

SEQ ID NO: 151847 - protein, 358 aa, unidentified
MNYFGIDVHSTYHKVVGLTADGKPLEFDIPNTREGKEKLQELMLEHSPCAVSMEACTGAYILYDLLEPVVERLRLLHPADFKKAFGKKCRKNDRLDAQALCRAAKLEMEGIWVPDEQVRQRRQLSTKRVSLTKRSTASKNSVRSTFREYHISIAKDPWTVKGMKALRERLNKLPATVALTVEIELKLIETYAGCIEELDRRMAELAWGNEQIELLMSVPGINYYSAFVIMAEIGTIERFSSAKQLVSYAGLCPSINQSGKSATRHGSITRAGRSRLRWIMVECGHIAGRFAPKLQRLKWRIKKRSGVTNIATVAVARKLLELCYHILKSGKPYSESIPEKHEAKLRKLEGKAKVREVA

SEQ ID NO: 151848 - protein, 466 aa, unidentified
MGNCAGVDWASEKHDVRVCDAAGDPLLASTFAHDEAGLRSLCGVLVQMKVELVAVERPDGVLVDRLLDAGLRVLALHPNQVAAARARFRASGGKSDQFDAFVICELARTDSHRFRVLEPDSDQTKALKALTRAREDLVTARVALVNQLRAELERFWPGPAGLFSNLDSLISLAFLRRYPSPVDAQRVSVARLAAFLRSQHYSGGKTPEKLLVKLRAAAVGCAGETETHAGREIVLALVATLETLGKQVKQLDRQIALAVRAHPDGAIFLSLFKGADTVLTASVLLAEIGDCRPRYPTRESLSGDGGQSPVAVQSGKHKVAHFRWACNKRLRDAFCTLADSTRHWHPWAQAVYARAIAKGHDHQRAIRTLGRAWSRIVWRCWQDRVPYELARHRAALQYITVTIPNPSGDRVDVPATQRMAGDALAPSLDAGSDQGSLRAAQPSPQTERSGGGQSRAARQGRAQRAA

SEQ ID NO: 151849 - protein, 338 aa, unidentified
MNLSRIGLDLAKQVFQVHGVDRHEHVVCRRQLKRAQVRDFFRQLPPCLVAMEACGSAHYWARELRELGHTVRLIAPQFVKPYVKGDKHDAHDAEAICEAASRPSMRYVPVKSAEQQAVQSVHRVRSRLVRARTALCNEVRGLLGEFGLIATRRGRAATMALLETVTATEPASLPAPMGELLRELKDELQTLEARIARLERQIQAHVHGDARIQRLLAVDGIGPISASAVAASAGDARQFRTGRQFAAWLGLVPRQHSTGGQQRLGNISKRGDTYLRTLLIHGARAVVRCCANKTDARSRWLQGLLQRRPANVVAVALANKNARILWALLSRETCYRPG

SEQ ID NO: 151850 - protein, 369 aa, unidentified
MAKSITYIGLDVHKDTIAVALAEAGLRGEVREHGKIPNAPAALKALAMKLASAGRELRFCYEAGPCGYGIQRQLAGMGHDCAVVAPSLIPRKPGERIKTDRRDAINLAKLHRAGELTPVWVPDQAHEAIRDLVRARQAAVRTLRQARQQLSGFLLRHGYHYHRPAWTQLHRRWLASLRFEQAVHHIVLEDCIAAVEAATARRDRLEAHIEAALPEWPLAPVVQALQALRGVGLVAAATLLAELGDITRFTNPRQLMAYLGLVPSEHSSGRTRRQGGITKAGNGAARRMLIEAAWSYRFPARISREQLLRQERLAKPIRDIAWKAQERLCRRYRKLARAGKLATVITAAIARELAGFIWAIVRQAQSTTP

SEQ ID NO: 151851 - protein, 451 aa, unidentified
MPPRSGAPGWNRTSDTRFRNDGRRLCHRGIAGTVDHAVASRRCELATSASIVGRDEGGTAVPDVRSSVSAKTTETWVALDVHKDSIAAGIMSAEGGPPEVVQFENSERAIRRFLRRLGDPQALGVCYEAGPCGYDLYRLLTSIDVACDIIAPSLTPVRPGDRVKTDRRDAVKLVRLYRAGELSFVCPPTPVQEGLRDLVRCRDDLRCARTAARQRIGKQLLRYRRIFREGRGHWTQRHGVWRRAQRLDDPLAQTALEHTLCHLGALDAQLLAIDAQLDEIAREEPWREAVEALTCFRGISTLTALSLLAEVGDFHRFASARELMSFLGLTVSEYSSGARRTRGSITKTGNRHARRLLVEAAWHYQHPPRLSARIRAHEGRVAPEALARAWQAQIRLHHRHRHLTGRGKPATVATIAVARELCGVLWATMTDQPVRADRPEERRPSKEVLVA

SEQ ID NO: 151852 - protein, 338 aa, unidentified
MEFKRIAVDTSKAVFTLHGVDLAERPVLRRDLRRAGFEAFFAKLPPTEVALEACGASHHWGRRLTALGHRVRLIPPQYVKPFVKRGKNDRNDAQAISEAAARPDMQTVPVKSAEQQAEAMVLSARELLVRQRTQLVNAIRGHAAEFGVVAAQGIARLEGLLAAVHSDDAIPQAARDMLAFLAAQVTQLDSQIAQLEKQMKRLHKANPLSRMLAAVPGVGPIGALSLALTVDATRFTSGRHFAAWLGLTPKDRSSGGKQRLGKISKAGNERLRQLLVVGAIAVIKVAKPGSRIASAWLLKLLERKPRKLAAVALANKMARIVWAMMTSGEAYRRQPVAG

SEQ ID NO: 151853 - protein, 439 aa, unidentified
MSKSKSSTNGLPVINERAAGIDIGSRFHVVAVPSNLSDEPVQTFQAFTADIQRMADWLKTIGVETVVMESTGVYWVPVFEVLESAGIDVIVANARETRSVPGRKSDINDAQWLQRLHACGLLRASFRPGRDIAALRAYLRHRERLLDYAAAHIQHMQKALTFMNLQLQHVVQDITGVTGMKIIRAIVAGERDPQVLAGFRDVRCKSSIETIQGALVGNYQPEHIFALTQSLALYDCYQARVDECDVQIEQALAVLKADKPEPEQPMPKARHRTKQPNAVNFDVRTALYQLIGIDLTQIHGIGPFLALRLIAECGTDLSKWRTAKQFTSWLTLSPGCKISGGKVLSAHSRKSNNRLTAHLRLAAVTVGKTNTALGAFYRRLAARIGKAKAVTATARKIWLKHNKMIQKAWANKSSMEQAFCLRRALDCAHLCSIGFRSGE

SEQ ID NO: 151854 - protein, 386 aa, unidentified
MPQLNDLSRSLVILEQDATLIAVIEMGQSSWLVAGIVPGVERSPLKKLAVDESALLKLLNRWREEAEKAGRRVERIAIAFEAGRDGFWLARWLRARDIEAHVIHASSVAVSREHRRAKTDRLDTELLKRAFLGWLRGERDHCKMVAIPTLAQEDAKRPNRERESLVGEQSRIVNRMKAALARLGIRGFNPKLKKAVERLDGLRTPEGEPIPPNTLAELKHDMERRRLVRSQIRDIEGTRLERLVQGHGEGPHVMVRLLARVIGVGVETADMLVQEVLSRNLRDRRAVARYGGLTGSPDESGKKRREKGLARSGNARVRRGMIQLAWRFLMFQKDSALAHWFYARTKNAPQTRKTMIVALARKLLIALWRLVREGAIPEGIVLRPAL

SEQ ID NO: 151855 - protein, 337 aa, unidentified
MEYFAGLDVSMAETHVCVMNRDGTVTYEVKVPSTPDDIAGALEQAPACERIVFETGRMAPMLYHGLGLLGLPIVCIESRQAYQALKSLATHKTDRNDARGLAHLARTGFFKPVHVKSLSAHALRSLIVARKKLVGQRVTLENQIRGLAVVFGVRLPRALTAAFIRQALRASEGIPGLSAAMRGLMAARTAVLAAVAAIDADIRRMVRASEACRRLMTIPGVGQLTALAFTAAVDDPRRFRRSRDIGAYLGLVPRRYQSGEVDYTGSISKCGDRRVRTLLYEAANVMLTRFKGSLKLKDWAFAIAKRSTMRKARIALARRLAIIMHAMLRHGTEFKPA

SEQ ID NO: 151856 - protein, 328 aa, unidentified
MDNPLYYVGIDIAKAKFDVAIKLQNGKHKHKVFKNNPEGFQSLMQWLNTFGETFHCVMEATNIYHEALADFLFQQQITVSVINPKCSANFTKTDNLRSKTDKIDAKMLADYADEKRHKLPIYQPISPAQRELLRKNRQLDHLKKQLAQEKTRLTMLLDSDCIASTQQMIAFIKAQIKALEKTIKQCINADNTLKNNVKLLCTIPAIGFATAVQLIAHLGDGNRFKNAKAAATFAGLTPMIKSSGKSLNTVIGISKIGQSDIRKALFCPAMNFAFGSYKNSVYRSFVLRLLECGKPKMVIITALMRKLVTIAQAVLQKQTAFNLDTFMK

SEQ ID NO: 151857 - protein, 387 aa, unidentified
MTCNQQSRRTAAIRGDDAVLLVSLELSCASWLVTSLSPGSETMSKHSVAAGDGAALLQMLSRLRAKAEQKKGCPVRVVVIQEAGLDGFWVHRLLEAGDMESHVVDPASIAVSRQRRRAKSDRIDGEALLRTLLAWRRGEPRVCSMVAAPSVQEEDRRRLVRERQALVASRTQETNRMRGLLATQGISGYNPVRRDRRQRLERLTTGDGRALPPYLMAELARALDRIELLLRQLAAVEAARDALVQAMAPAQSAPAAPLLLRLRGVGRELAAVLYLEGFFRSFANRRQVAAYAGLCPSPWRSGGIDHDQGISKAGNPRLRQVMVELAWLWLRYQPDSALSRWFRRRVGEQGGRVRRIAIVALARKLLVALWRYVTQGVVPEGATLKAA

SEQ ID NO: 151858 - protein, 422 aa, unidentified
MTRGQDTAILRVMHEVCCVLDVHKEMINACLIITGENGQEHSELRVFQTFTDDLIRLRDWLVECNCPIVAMESTGIYWRPVHNVLEGLFEVILVNARHFKNLPGKKTDMSDCQWIGGLLRVGLLRGSFIPPKMVRQWRDLTRHRRSLVEALGDAKRQVHKLFESANIKIDSVASHLFSRSGRNLMELLVQEEHSLTLDEVRKCTKGALRSKAEQLYRAVQGFFEEHHRWLLKGMLAHIDHLEHFINSIQSRLRDLLEPYEDLVDRLAQIPGISFIVAYAILSEVGPTLCAFAVAACLCSWAGVCPGNNESAGKRRSGRSPVRKSNLRTILIEAAWGAVRTKKSYYRAKFFSLRARLGPKKAIMAIAHRLLKAIYHVIKHGAEFKDLGENYLNDLHRKSKINYLVRQAGKLGYRLMPCPSHEE

SEQ ID NO: 151859 - protein, 343 aa, unidentified
MDQYIGLDVSLKETAISIRQDGKRIWRGKCASDPKLVAEMIRKHAPHARRVVFETGPLSTWFYHGLTKEGVPAICIEARHAQKVLNETLNKTDANDADGLAHLAEAGFYKAVRVKAFDSMLTRTLVAARNQLLNISTQLSNQIRGVMKTFGLIVAQGKGRVFDNNVRKLLDGNDGLAMIILPLLEAWRGIRMRAADLGRQLVAAARESQATKRLMTIPGIGAVTAVSYVAAIEDPDNFKTSRSVGAWLGLTTRRYQSGEVDYDGHISRRGDSHLRGLLYEAATVILTRTSARNESSLKSWGLKLRERLGFKRAAVAVARKLAVIMHSMLKTGDVFNRSADAPA

SEQ ID NO: 151860 - protein, 336 aa, unidentified
MKNYVLFTGIDVSKDKLDICYVDKNGNVLGSKVIDYKPKNIKSIVKDLERLGYNLTQTLICFENTGVYSIKLGEVFSELNAYYSEVSALEINKSKGITRGKDDKTDAKMIALYALRNIDKIVLSKVTDEAIQELKLLFAEREKIQKSITSLKMTQENEGRVNSKAYESVQKINQQTRVALKNSLKAIENEIERVFKEHPELKKNRDLLKSIKGIGTIISAYLVMITHNFTKFKNSRKFACYSGIAPFEHSSGKSVRGKTQVNHFANKKVKALLSMAVQSAKKYNSQIKAYFEKKKEQGKHILLISNNIKFKLVNIAFAVIKRGTPYVDIYKYATVA

SEQ ID NO: 151861 - protein, 320 aa, unidentified
MDAVLGIDIAKAKFAAALLRPDGKVRHKSCANTPTGFADLAAWLRRQQVTCVHATLEATGTYGEALALWLHDAGHVVSVVNPSVIHAYARTQLARSKTDRIDAELIARFTASHQPAPWTPPVPEIRQLQALVRRLDALQGMRTQELNRLASGVTIAEVRVSIETVIASLDAQIAHVHQLIRDHLDRHPGLRAQRELLTTIPGIGEATAAVLIAELFDKRYASARQAAAFAGLVPRLVESGTLRGRTRLSKIGPGRLRKALYMPAVAALRWNPTIRAVRARLHAAGKPPMVIIGAAMRKLIHLAYGVLKSGRAYEPTCAHP

SEQ ID NO: 151862 - protein, 399 aa, unidentified
MDRNRTVAGLDIHKDSIYLCIMRHDETIIFENKYGVLTPDLRQMCNDMVERGVTEAAMESTAVYWVPVWNELCESMKLKLVNPYFIKQLPGRKSDVKDAQWIAECLLKNLIKGSFVPEPIVQDMRKLNRRIMDLNEDMTYNCNKLDAAMQRCGFRLSNYVNTIKSRSYQKVLVAIIGGTARPDELVKMVHGRTINKHGRDTIKAAVTGTFSETDITIFRQIKEVIDMIERQIEECQKELTALCEQHFPEQFRRLQTIPGVKERAATAIIAETGVDMKMFATAACLVGWCGLKPRNDVSNGRYKSRKVTHGNRYLRQILIEIAWGASRTRNCFFSYFSYIQTTVKKKSKMKIQVAIARKILVAIWHMLSKEQDFIDIYLKRLEENRKMEEQLKSLESKMA

SEQ ID NO: 151863 - protein, 356 aa, unidentified
MSRDIKYIGMDVHKEAVVIAVRNSTGQLVMESIVETKASSLLQFIHGLQGELHVTWEEGTWAAWLYDLLKPHVYEVLVCNARRNALLKEGSKNDRVDARKLSDLLRTGMLRPVYHGEHGLRTLRELARSYQTISQDLNRVMNRIKALYRGWGIACAGTQVYAPRYRQEWFEKIQHAGVRRRAELLYQQLDGLQGLRRTLRPELLAESRKHKASKLLRQIPCIGPIRAARLLALMQTPHRFRSKRQLWTYSGLGIETRDSAQYRFVRGQLQRAKKPQQIRGLNRNHNHEMKEIFKGAATRASCGVGPLRDFYEALLAKGMKPEMARLTLARKIAAIALTLWKKEERFDAEQLKPQAA

SEQ ID NO: 151864 - protein, 372 aa, unidentified
MNNTTIFVGMDVHKESFTLCGYQIETEKASHFRHMPADYKEVLRYLEFLRTIYGRDTIFVCGYEAGCLGYTLYHQLTNHNVNCVILAPTTMLEKRSGKRIKTDKRDAELIAKCLAQHNYSPVHIPTATDEETKEYLRMRDDHKLALKRIKQQILSFCLRHNYRYEGKSHWTVGHVKWLKNLNPEALYKEILDEYLLTYTTLSDKIERLDKRIEELAAKDEYRDSVKKLCCFIGVRTHTALSVLVEVGDFKRFPSAEKFAGYLGLVPGENSSGDSTTRLGITKAGNRHVRVLLTEATQGYTRGAVGYKPKALKARQKGNTPQVIAYADKANERLKRKFFKMVLGKSKKHNVAKTAIARELACFMWGMMTDNIA

SEQ ID NO: 151865 - protein, 374 aa, unidentified
MEGAPMLDTTTFVGLDVHARSIKAVSLDVMTGEVRCATFGYDAGAVAGWVRSVDPKARCVYESGVTGFDLQKRLSGLGVDCVVGAVSKMIKPSADRRRKNDRNDAEFLARMLSVGNVVEVWVPDDECEAARDLTRALEDARDDLSRAKQRLSKFLLRHGLAFDERTPTGRRKGNWTRAHWSWIESIRFAEGADNDVLAYYVDAVRRAAEEKARLEGLVEAEARKPRWRRRVDSLRCLKGVDTASAADLVFEAGEFSRFGNARSFAAWVGLTPSEHSSGESDRRGAITKAGNKHLRKALVEAAWHYLTCSGRPKDLAKGQAPDRVARRHAAKGVRRLVERREALLARVHNNKANVATARELACWVWAVGLMAEEA

SEQ ID NO: 151866 - protein, 457 aa, unidentified
MNPKRSKPKNDRTMPMIHPNAAAIDIGATMHTAAVRADRMPEPIRSFGTFTTDLHRLVDWFAECGVETVVMESTSVYWIPIFELLDARGFAVFVVNARDAKHVPGRKTDVSDAQWLQRLHSYGLLRASFRPKGQIAELRAYVRQRERLLEYAASHIQHMQKALTEMNLQLHHIVADVTGATGLRIIRAILAGERDSKVLARLRDYRCHSSAEAIEKALTGNYRAEHLFALEQALALYNVYQDKASACDARIEAVLKELSISRGRDAGPLPSPRRRLHGKANGPDFDVRAALFKLLGKDLTQIDGLGSYLSLRLIAECGDDLSAWPSAKHFTSWLCLAPSNKISGGKVLSSRTRRSGSRASALLRLAAVTVGRTDTALGAFYRRLSARIGKAKAITATARKIAVLFYNAVRHGMEYVDPGSSYYETRYRTRVVENLHRRAKAFGFVLLPLESKAGAVS

SEQ ID NO: 151867 - protein, 379 aa, unidentified
MEGFNSFYNTIVELMQKSELEEALVGIEPTGHYWFDLGQFMGEKSIKFVMVNPHHVHKTKELDDNSPSKNDRKDPRVIAGLVRDGRYFYSYMPTGVYAELRNASNRRFVLVEEQTRAKNRLQKWIAVYFPEYKGIYTHIDAKGGMLVLKKAPTPEEIVRLGVEGIIKIWKDAKLRGNGHKKAMLILAAAMRSIGLKAGLTEARMEIQDLIEDYELQTKRLERVNDLIKGLCQQVRYADKLLEIKGIGITTVAGFIAEVGDITRFDSTKELQKLAGLELVADSSGKHNGKTKISKRGRKRLRYLLFEAAISVVGKNEEFKEIHRYYTTREKNPLKKMQSLIVVACKLIRVFHAILTKGIRYDASKMLKDIRHPGEQLKAA

SEQ ID NO: 151868 - protein, 394 aa, unidentified
MGKLYVGIDISKDRSSANGIDEHGRSCFGISFDMNSTGFAELLQAIEANSDGHKDVVAGMESTACYHINLYSFLSAKDIEAVVINPLLIANFAKLSLRKTKTDKKDAKTIAQFMLAHRESVKQLAVSQDQQDIRDMARERESLCHQMSAAKVEIRRLLNTTFPELESMCNPFTKVMLHFIQRFPSARLVSMAKPNLIAKTLKEKPCSCRIQFTPSELINIARKSIATVSPGKEIILSGKIDTLSHLQKRRDELTKALTKYCESSIVEDLKILTSIDGIGNNTATTFLAEIGRIDNYESHKNLIAFAGIDPTVYQSGKYEGASKISKRGNRHLRRVIWLMTVRVINHNPIFRKYYFKKRSEGQPFKKAVFATAHKLVRVIFAMLSHRTYFQEECI

SEQ ID NO: 151869 - protein, 465 aa, unidentified
MKSKPAKAKKQNKKISVDAVWEPVNLHAAGVDIGSREHWACAPRAAAPQNVRKFGTFTADLEAMAEWFKECGVTSIAMEATGVYWIPLFQILERRGFHVLLVNARQTKNVAGRKSDVQDCQWIQRLHTYGLLQGSFRPEDPYCVLRTYLRYRDELVVARGTQGQHMHKALLQMNVQLPQVLSDVTGVSGLAIIDAILKGERDPGKLAALVDRRVRAGQQTIQAALRGDYREEHLFVLGQAFELYHTYEARLAACDGQIVRALATLPARVEPKPQPLPARKPGRKPYLDKMAGVDLRPELHEIFGVDLTGIEGIGVLTGLVLLTEVGPNVSRFRSEKQFCSWLGLCPDNRISGGKVLSSRTRRVVNRAADALRLAASTLERSQSALGGYARRMKARLGAAEGITATAHKLARILYRLIKHGETYVRQGLEDYEQKFQAGKLRALQKTAHAMGFELIQKQTVPGGVS

SEQ ID NO: 151870 - protein, 478 aa, unidentified
MGKPTSVNIRGLRGERRAKELEGLDLSRVLILAIDPARDFPKALICDYFGMVLEKPFFFAVNSEGILLLHTKLQHWVSCVKAVRVFVGIEVAGCYHDAIGKALAKYGYDVELVNAYTTSSNRKMMLDYSKTDDKDLLAIAQAMISNNGVSPKRITGIYEQMQAVCRTRRQLVKEASVVKTQIRQLMSMVFREFQGLVDTDTLTQQKVFGSFWSPKSRLIMSCFPLPSQILDLGEAGLKELADFKGFRFSEREIELLLQAARRDLMSSSAELTHFNGEQIKFRLNQLTFLEKQIEALSFEMEKMLIATPAILLLSIKGVSVVTAAEFIAEVGSMFKYTYNRQLVKLAGINPVMSQSGGKKGKAYQISRQGNPALRYIVTLIGKNLCSKNCHNGYFIEYYERMIQRGKMPTQIYAAAGNKFLRIAYAMLKEQRLFLVPGYEQCTSDITGKLSNKETKEIAGQVLALLRAETASEKKAVAL

SEQ ID NO: 151871 - protein, 419 aa, unidentified
MSFKILKFNCCGLDVHKTWIYACIGITDSNNRTEYKQARFSSFTKGLNELCDWLAKYNCTDVCMESSGKYWIPVFNILEQHNLWVTLSHPKYTKPMKGNKTDRKDAKWICDLYMCGMVKPSFIPPADIRELRDLVRYRYKLTCMIAGEKNRAQNCLTVSNLKLDDVFSDVFGKSSRSITEQILQHSGEKFDVAPFVYGHCKTPIEEIQAAVDGAISKEQAVKLRQCLDHIDELNKHISEVEQEILCLSDKYEAALNLIRTVPGFNKNPMTAIQVLSEIGCDMSVFPTDKHLVSWAGCCPRNDKSDRKIKSTRISRAGSYFKPVLVQVANALIKSKKHPEFTNRYKRIKARRGHKKAIIAICRMILTAIWHILSDLKPYTPEGFLESRPVKEDKILSTSQALNLLRQRGYVIKDEPLAVS

SEQ ID NO: 151872 - protein, 363 aa, unidentified
MFTERTSVGLDVHARSVAAAAIDGVSGELLQAKLTPSYDHIRSWLTGLPGPVAVTYEAGPTGFGLYRDLIAAGIRCEVVAPSKLQRPAGDRVKTDAKDAIHLAKLLRLDEITSVSIPSVDQEAARDLVRAREDCRGDLMRARHRLSKLLLRQGIVFYGGRAWTGKHDIWLRHDALPQLTARATRLTFDNDYETVLSTKARRDRLDAAIEEMATDSEFTPVLRRLGCLRGISTLTGFALAVEVGDWHRFTGNTIGSFVGLVPSEHSSGDSRTLGSITKTGNAHARRLLVEAAWHHRPRYTIGKTMRGRWDLATAAARVRGDEGNRRLHHRWVKFNDRNKKSTIANVAIARELAGWCWSLAVMEE

SEQ ID NO: 151873 - protein, 376 aa, unidentified
MKKIRFVGLDVHAETIAVAVAEPDGEVRSLGTIPNREESIRKLVKKLGPPHQLRACYEAGPTGYVLYWLLTSLGVKCDVVAPTLIPVKAGDRVKTDRRDGQKLARLHRSNDLTAVWVPDEAHEALRDLVRAREAAKQDQLRARHRLSKFLLRHGRRFPEAGKTWTLKYMTWIKQLHFAQPAQEFTLLDYLHEVEHMNERVLRLEQAIEEAVKLAPAWMQEVVQALQALRGVAKITAATLVSELGEISRFDNPRKLMAYSGAVPGENSSGERVRRGAITKTGNAHLRRVVIEAAWSYRLRPGVGPGLRQRQKGVSEEVKEIAWKAQHRLHKKYQRLSAAGKDPRKIVTAVGRELLGFIWAIGRATETRCRQQSAMTA

SEQ ID NO: 151874 - protein, 354 aa, unidentified
MSEKLNTAIAVIGIDIGKNSFHVVGHDQRGAIVLHQKWSRGQVAARFANMPPCLIGMEACVGAHHLSRKLKALGHDARLMPAKYVRPYSKGQKNDFRDAEAIAEAVQRPTMKFVATKTADQLDLQALHRVRERFVSQRTGIINQIRAFLLERGIAVRQGQRFLRAELPRILARPQDVLSPRMVHLIENLAGDWRRLDERIESLSSEIEAIARQDAGCERLMSVPGIGPIISSAMVAAIGSGEVFTKGRDFAAWLGLVPRQMSTGGRTILGRISKRGNRYLRVLFVQAAWVVLIKPKSWERHGLKSWIEAAKKRLHPNVLAIALANKLARIAWSVLAHGRDFEARTNTNGTAQAA

SEQ ID NO: 151875 - protein, 366 aa, unidentified
MKTSITPIGTPVGVDVHKRRCKVVEFDHGDIKVRKPIANTREEWLEMLSELPPDAEIGLEVSTAGYYAMSVLEEAGWRERAHWVHPAGIDSNRRQKNDRLDAERLARKLAAHHLDPLPEAWFPPPEIRALRLRVRQRCWLALLRTQTKNHLQSLLQMHGLLLPGSDPFGAEGQAWLAQQKLPLPLTESIPQIQHLLKLLGEELEISEQHLAAVRKQFPQLVLLQTIPGIGSLLGAVIWSEIGSIERFASAKALANNTGLVASYYDSGEVQVSGPITRQGSRWLRWALVTAANVAVQHRNPFADRYHRLRRKKKPNVAKAAVAHSLARCVYGVLKHGCPYGEDRWGRKVGALEQEARGSQRSTKTVP

SEQ ID NO: 151876 - protein, 361 aa, unidentified
MDGTKYIDSTKYIGMDVHKETVSIAVMNSAGKLVVESIIETKTATILQFIQGLRGDLQVTFEEGTWAAWLYDLLKPHVTKIVVCDPRRNALLKEGNKGDKVDARKLTELLRAGLLRPVYHGESGLRTLKELSRSYLTISKDLTRVMNRLKALYRGWGISCEGATVYAPHHRSEWLGKITEAGVRRRAEFFYQQLDALQALRQQVRRDLLAESRKHSARKLLRQIPSIGPIRAALLMALIQTPHRFRTKRQLWAYSGLAIETHDSAQYRYVAGQLQRSKKPQQLRGLNRNHNHDLKAIFKGAATKASSGAGPFHDFYEALLSKGMRPSMARLTLARKIAAITLIVWKKGAHFDVEQLKPQAA

SEQ ID NO: 151877 - protein, 331 aa, unidentified
MQIELYVGVDVSKPTLDVFIHDLRVHRQFKNNQSGYVSILDWVGTCTKQSLDRVLICFEHTGIYSMPFAVFLEMHRIAFAMVSPLEIKRSMGIVRGKNDLVDAKRIAEYAYRFRDKIILTKLPAKDITKLHFLLTLRDKTARNLAGYTTAKNEICRAVNADEMPELFSSYDTMITMLKAEIKRLETAIKQIINDNSELNATFKLITSLKGVSLIVGAYLIVYTCNFSKFDDWRKFACYCGIAPFECRSGISVRGRTQVSPIANKQMKKLLHLAAVNASYYDPELHEYYCRRLSEGKSGMTVLNIIRNKLVARVFAIVKRASPYVNIKQYKA

SEQ ID NO: 151878 - protein, 391 aa, unidentified
MARRDLIGAWHRPSKPCPPGCPPPMEEVGTKAMMVLGADTHKGSHSIAAVSAATAEVLGDKTVRVNDAGFVALLDWARGLDEQRVWALEDCRHVSGSLERFLLVSGERVIRVATKLMASERRGARDRGKSDVIDALAVARAALREGIESLPAAQLAGVELDIRLLVDHRERLVRQRVAMNNDLLWHLHDLWPELKLPGSALVSKKWSTKISRRLARAEQTARVRIARDELRRLRELTAAADALEGELAQLVAQVAPQLLSEPGFGPLTAAKLIGEIAGAGRFSSDAKLARAAGVAPIPASSGKTNRHRLDRGGNRQINSALTGSRSRGPAAIPRPRTTSPANARKARPNAKRSAASNATSSAASGTSSNRPTRTIAASPNQTFLDIGAAKR

SEQ ID NO: 151879 - protein, 345 aa, unidentified
MEQITRIGMDTSKHIFQLHGVTAAEEPALRKKLRRKEMVRFFEKLAPTVIAIEACGASHHWARLLQSFGHSVKLIAPQLVKPYVKRGKNDTADAEALCEATSRPTMRFVPVKTAEQQAALMLVGVRDRLIRNRTQLANAIRGYAAEFGLTAARGKAHLDPLLERIQADESLPALARELFAAQAKEYAQLQAQIDEVDARLMSWHRADECSRRLAKIPGVGPIGAVLLKMKTPEPELFRSGRQFAAWIGLTPKDHSTAGKVRLGVITRAGDEGLRSVLVVGATAVIQHVRRGGRSSPWLTELLKRKSPKLAAVALANKMARIAWKLMVTGENYTAKSTPAALAGVA

SEQ ID NO: 151880 - protein, 415 aa, unidentified
MMNTTQEDQMYWVGIDWGEQKHTIAICDDQRSIVSSFKTETTLEGLNMLVTRLHEFVGVVGVAIETPRDPVVVRLLEEGYTVYPINPKLSHNWRKCTSVAGVKSDEYDAGMLALELSRRHESLTAIRPKEASAQEFLGLCDALRFLIDQRTSHLQRLRAVLRRYYPAALNFWEDITAPSAWAFIKQFSTPSVLAKTRKDTLIKFLRAHRIGLRPCWLERIDKSRQAAAWPASPTATGDELMALACVAQLQALEPRIKMLEKEIAEKGKGFEALNLIESLPGAGKSLAPAITAIVVNLEEGDDTGKQLRCMAGVAPVKDESGKRVKTVIRRRCNKRWRNIFHLFAWCSIRRSTWANAFYKLCRERGDTFATALRKLADKWIRIITCMIREKRPYDEKEYIESLRKGGSPIYERLCG

SEQ ID NO: 151881 - protein, 371 aa, unidentified
MTAYHIGIDLHKLVAQVCVLDAQGEIHRERRLRLETREMCDHLLDWLEGFGPQARLAVEALGCNRWFVLGCRARNLDVQVVDATQLDLKRLGKKTDRRDAMEIARRLYLGDLDRHARTYFPTEKEYARRKLLRIKHSLTQQRTSLLAQVRGPLNAYAIRPPYGSLYTGPAIAWLREQDFGDEDFNAGFQALVDILEFTQRRIAQLVARIKRSAQQEETAACMMKELPEVGPQTALTLLAEFGDATRFTCPRSVASYGGVVPRITASADNAHHGRITHRGNRELRYILGQWAVRLLTRNDRVKEWARPMLRRMNKNKVRVALARRLLISVWVLLARGEVFSLERCLGLFEDYCVVTASVKEGIAVNVEVLRD

SEQ ID NO: 151882 - protein, 327 aa, unidentified
MTRTHETDVVIGIDVSKNKFDLALLRNGKLRHKSFPNTAAGHAALIDWLKAQDIVAAHACMESTNVYGEALAECLHDHGYAVSIVNPARIKGFAQSELSRTKTDKADAGVIARFCAALKPAPWTPEPVEIRELRALVRRLDALMDMRQQEINRLHVAPAVVAETVKAHIDFLDRSIRETKQRIRDHIDNHPDLKHKKDLLATIPGIGEATIAVALSEFANIERFRSAKCLAAFAGVAPRERQSGSSVRGRTALSKMGRGKLRKAFFMPALVALRYNPLLKAMKERMLAAGKAKMAIVGAAMRKLVHLIYGVLKSGKPFNANYATAQA

SEQ ID NO: 151883 - protein, 362 aa, unidentified
MLMVVLGIDAHKRTHTVVAVDEAGRQLGVRVTQSTSTAAHLELVRWAGRFGPGRVWAVEDCRSLSRRLEADLLAAGEVIVRVPPKLMAGARRSARTYGKSDPIDALAVARAALREPGLPAARLDGPEREVRLLADHREDLVAGRTRMMNRLRWHLHELDPSFDPGPRTLTRDKTIATVCALLAGRDGLVARIAADLAARISELTATISALQKHITVLVRPLAPALLALPGPGALTAAKIVGETAGIDRFRSQSAYARHDRTAPLPAWSGNQTRHRLSRTGNRQLNCAIHRVAVTQIRCHLRTQDFMAKRTSAGDSKPEALRALKRHLSDKIYQAPWLTPRLQQPPTSARQLDIRGATRVGEC

SEQ ID NO: 151884 - protein, 304 aa, unidentified
MGAYYVGLDVHSRDTVFVIQDEAGAIIGRGTVPTAPEAFARVCQQYELPTGTPVALETGTSAFYVARALAALGLKPIVIDAHEVRIKARRPSQKSDRRDAFELCDGLRRDQYRSIVHIPSPAISTLRTALSRRRHFIRIQTAEINATKRLLRGAGWLVGTRGSLRSASRWEHLINALAVEPALQAHTRLHYAVWQQAGEQVRALDHLLGDLGRGFRDDVRRLETVPGVGPIVALTAVAVFADVERFGSAKHVASYAGLVPSTYQSGDRDRHGHITKRVRPSSVRCSARPLITRGDPRICFIRIF

SEQ ID NO: 151885 - protein, 403 aa, unidentified
MNAVGIDVSKGKSTVTIRMPGDRVILKPCDFRHTQSDINSLIGIIKGLDGETKVCMEHTGRYYEPVAAWLSEAGIFVSAVNPILIKEFGDVSLRAPKTDKADAKKIARYALDRWTSLKQYSLMDEIRNQLKTMNRQFGFYMDQKTAMKNNLIAILDQTYPGANTFFDSPARSDGRQKWVDFIYTYWHVDCVRGRSLEAFTEHYKNWCKRKGYNFSAAKAEKVYNASSDLIAVFPKNANTKMLVHQAVAMLNLASVTVETLRAEMDKTASNLPEYPVVMAMNGVGSTLGPQLMAEIGDVTRFEKRGSLTAFGGVDPGKNDSGQHIQKSVHTSKKGSPHLRKTLFQIMDGLIQRSPADDPVYAFMAKKRAEGKPYYVYMTAGANKFLRIYYGRVKEYLTRHPESE

SEQ ID NO: 151886 - protein, 346 aa, unidentified
MLHAGLDLSRKRLDFHLLDERGETVEVGSAPPDADGLRGLTRGLERHGQPIRAALESMNGARFVHDQLELGGWEVEIADALKVKGLAPLACKTDRIDAWVLAELSRRELVPAIWLPDPAVRGERERARWRLHLVRHRSSLKQRVHAVLVAHGKPCPVSDLFGVSGRALLTRLALPEPWSGSVQASLRLIDELDREISACESELRRLGVEHPYVPLLLTVPGIGWVLAYTIAAEIGDIARFPSARKLVGYSGLCPRVYQSGESDRRGPLAKQGPKYLRWALVEAALHARTHPAYRERYERTKRRLGKQRGPKVAQVDLARRLAEALWHMLTRNQPFAPAGAAKPVAA

SEQ ID NO: 151887 - protein, 443 aa, unidentified
MKTLAVINPHAAAIDVGSEQLHLSIGGDEPVIFGTVTDEVYRLRDYLQSQQVTSVAMEATGVYWLYAYSVLEAAGLEVVVVNGRHVRNLPGRKTDMADCQWLATLHAHGLLRGGFVPPAAIRRLQDYQRLRADHVVGASSQVQKMQQALERMNIKFHDVISDLNGVSGLKVIRAILAGERSPVALLGLCDPQIQKRKRERVLQSLKGTWAVEHVFALGQALAAWEFYQKLLAECDQQIEGVLKELAGPPPSDAGPSASAGKPQGKNCPQIDQLHQLLVRLCGGRDVTTIGGIGDHLLLQLLAETGTDLKAWPSERHFTAWAGLAPGSYQSGKRKGSVKRQRNRTGRLFCAGARSLVKSVDKALGGFYRRLAARKGGLVAMKALARKMAQLYYRVLRYGLAYAERGLQAYEQKYAETQQRILARLAAKQGFKLVSLQTIAQSLP

SEQ ID NO: 151888 - protein, 344 aa, unidentified
MEQYAGIDVSLEFSSVCVVDAAGKVIREARVESEPSSLIAWFAALGVVVARIGLEAGPLSQWLYAEMKTAGLAVELLETRHVRDAFKAMPVKTDRKDARGIAQLMRLGWFRPVHCKSLPAQEVRALLTTRKLLQSKRHDVEMSIRGVLRGFGLKVGPTTPKTFEHRIRELVENHGTLSLIADALLKARAALGLEFRAIDKRLLTIARADKRVRRLMTTPGVGALVALTFSAAIDDPDRFRSSRMVGAHFGLTPRKYQSGETDVTGRISKIGDHEVRVVLYEAANVMLTRPVKGSTLKSWALAVAKRAGMRKAKVALARKLAVVLHQMMRSGAAFSLTGQPAAAA

SEQ ID NO: 151889 - protein, 377 aa, unidentified
MSKIRFIGLDVHADTIAVAVAEPDGEVRSLGMIPNRLESIRKMVAKLGPAKQLKACYEAGPTGYVLYWQLTALGVACEVVAPSLIPVKPGDRVKTDRRDATKLARSYRAGDLTAVWVPDADHEALRDLVRTREDARQDQQRARHRLGKFLLRHGCRPPEDVKKNWTNKHMDWIKRQVRFDQPALQAAFLDYVHEVEHAADRLQRLEKAIDDAVAGAPAGIQEVVRALQALRGVGQLVAVSVVAELGSLSRFRNPRQLMGYSGLVASEHSSGNRIQRGGITKTGNAHLRRLIVEAAWAYQHKPWIGGWLAKRQQELDEETKAIAWKAQWRLCTRYKKMAARGKNKPQIVTAIGRELLGFIWAIAVRTESKFQPDREAA

SEQ ID NO: 151890 - protein, 344 aa, unidentified
MEHYAGLDVSLEQTSVCVVDAQGQVVREAKVASEPEALVHFLAREDLEIARVGLEAGPLSQWLHAGLIAAGYEAVLLETRHVKAALSAMTVKTDRRDARGIAQLLRLGWYRPVHAKSASAQEMRALLTARKLIQSKLLDIESGIRGVLRGFGLKVGAISRGRFETRIRDLVEGQTMLATVVGSMLAARAALQAEFARLHRALLVLVRADPVCGQLMSVPGVGAVVAITFKSGVDDPTRFRRSRDVGPHFGLTPRKYQSGELDVTGSISKVGDRMVRTALYEAASVMLTRTVRMSPLKSWAMGVARRRGAKKARVALARKLAVILHRMWVDGTDFRWTRETPAMA

SEQ ID NO: 151891 - protein, 429 aa, unidentified
MNESLRSRPVLAKGRAVVGIDVGKRKHAATALTPQGEVIAQLASFPNTRAGIDLLEQEILRKAGGPSKVLVGMEATGHYWMCLYHELARRGYACVVLNPLQTNARSRASIRKTRTDKIDSGTIARLILSGEARATRVPDPKTTELRLLVRHRHRLLCAAGAMERYAHTLVDRIFPEYADVFCKPFLPSAQKLIREIGLAPAKLVEQADQVRELLRRTGRGRIASETIDQLLEAAKQSIGTRQAEELAESQLRSIFDYLKTVRQQIADIEKQLDQRAEELDSPLFSLGITGPLVAAIHAESDPIGDFAKPEQYVAYTGLDPSLHDSGDTIHRRGKISKRGSPLLRHTLYLAAFVVYRRHDYFRRIYRKHRKLGKKHSNALVIVARRLARVIWRLLTDGRPFAKRPPKSACPTAKPHKSAKSNRKTVCSHA

SEQ ID NO: 151892 - protein, 385 aa, unidentified
MGSHTFIPRDYDVFAGLDVDKRSISVTFTDHQGFLKSLRMPYSVGQLLSHVRKHFPDKKVAFAYEAGPTGYGLYDGLEAQAYKCVIASPSMIPKAPGQRVKTNRLDSRGLSENLRGGQLKGIHVPSPVYRELRHLTQLRDTLVSEAAAMKQRIKSLLLMEGIEFPPAPAGSQWSWLVKEKLRKLPCSNPVRFKLDQLLDSLAFAEKQVLKTTKEIRRFCQTDPELSQCIKYVMTVSGIGWIVASQLLARIGDWRELKNVRQLGGFLGLVPTEHSTGERTERGAITHTGDGRLRSKLIQASWSAIRQDGELREFFRSVAKTHPRNIAARVAIVAVARKLSVRIAVVLMKQRPYVVREKVQSAPLTPEETVPQGTPRRQAEPGEQSS

SEQ ID NO: 151893 - protein, 346 aa, unidentified
MRFYTKQHKHYCGIDLHTDKMYVCILDQEGNIVLHRNMKTMPKTFMRSIEPFRDDIVVSAECMFAWYWLADLCEDENIPFILGHALYMRAIHGGKSKNDRIDSHKIAALLRGGLIPQAYVYPRKMRATRDLMRRRNHLMRKRAELFTHTQNTATQYNLEPLGRIAKPQNRTNLVDYFDNPCVQMSIAANLDMIDAYDRVIPVLEQDIVKSAYGHDPVAYALLKTIPGVGKIIALNLLYEIENINRFPRVQNFVSYCRLVKCAKESNGKRVGSAGKKIGNAHLRWAFSEAAQLFLKGNEPAQKYLQKVTNKHGKGKALSILAHKLGRAVYHILKNQRAFDMDKFLTA

SEQ ID NO: 151894 - protein, 428 aa, unidentified
MNEEDRTRLEEFRQFRKEIRGSTEYLLVGIDVAKDKHYAFFGTATGKVLFRRLVFENNLDGFRKLLVQAEAMKVQEGLKKVVFGLEPTGNYHKPLGEHLIRCGHQVVLVSGVAAHENRKTLDGRWDTNDTRDAANVADLVSQGKCLFYEFPVGALQDLRNLLSLKRRWKRQEHGYRVRIRNHLVAKYFPELDRYFEQSEKTSLAVVRWCLDPSVIAGLEYPKFVEMVSSGQRRLSQEKRLRAIWQMAVASVGCEAGPVVEFEAQVMVEGLKQIRESIQEIEEKIHEVCSQFPEYEFLLSIPGFGPDVSSKVLGAVGDPFRFQNGKQVLKMAGLDLSAERSGKNSDLARPVISKKGKAELRYALYQAALIASIRDRHLIVYFTNQLRGREREPGIKTKMRVKLSAKLLIIAWTLMKKKEPFNPDYLNLE

SEQ ID NO: 151895 - protein, 354 aa, unidentified
MSEHYAGRQIVGMDLHRRRSVLVRMTDTGERLETVRISNDPEYLKAVMARAGEAPEVVLEAAYGWYWAADTLAELGATVHLAHPLGVKMFSYRRVKNDQRDAADLADLLRMGRLPEAWIAPPATRELRGWVRHRAKLVGLRSSLKCQVHGVLAHAGVWVPMSDLFGVAGQQLLAELSAGDRLSIESRSRLDSALRVIGALEFEIELFAKLVNGRLRTDPGFRALQAIPGVGPVLAAVFVAEIGDITRFHRPEQLASWAGLTPKHHESDTTVHRGRITKQGSRLVRWAAVEAIQRVSGHTRLGQHRDRVAARRGRNIGVVAAARELLTLVFYGLRDHHIRALDTPAAPVASTPAA

SEQ ID NO: 151896 - protein, 451 aa, unidentified
MSACTGVTSHRGRSSAPGEEGRHAVAIGGAYEWFVGIDWATQAHQVSVLNGHGHQVAERSVTHAGGAIGEFVDWLGQVTGGEPERVAVAIEIPRGAVVETLVERGCHVYAVNPKQLDRFRDRYTVAGAKDDRRDAFVLGAALRTDPGAFRRIRLDDPVVIELREYSRMDEELREELARLANRLREQLHRFFPQMLALVPAADEPWLWALLEAVPSPPAGGRVRRAQIAKVLRAHRIRRVDADAVRAALATAPLPVAPGTAEAARAHVALLVPRLRLAHEQRLRCGRQIDALLTRLGDPGPSSGPPGPPSDVRILRSLVGVGTRVAATMFAEAAQLLGDRDYHALRAHAGIAPVTRQSGKRQQVVMRYACNRRLREAIYHWARVSVQHDARSAGLYAGARRRGHTHGRALRGVGDRLLRILVAMLKSRTVYDPEFVRQPVADVLPLAAEVAP

SEQ ID NO: 151897 - protein, 357 aa, unidentified
MAEYISFDSHKRYTLAERENVTTGRTHQHRIAHQRGAIEAYLRLYEPGTAVAVEATGNWYWIIDEIEAAGDIPLLVNPHKAKAMMAMTNKTDKLDVHGLNRLQRNGTLPTVWIPPGELRDYRELTRTRMFVSHGGTRLKNRIHATLLKFGLQPPELSDLYVGKGRQWIDSNLIHLPSQARWCTELLLEQLHVIRSHLALYEQRIRQLVKQTPEMTLLKTIPGIGDILTSAIYLEIGQIGRFPTAQNYCSYSGTTPRVHSSGGRTRFGSLRPDVNHFLQWAYIEAANAVCLNQKNWSDRHAVHLYQKVRARRNHCKAIGAVARHLAESSFYVLTRGVPYRDPALATRSSQGGVSAVPS

SEQ ID NO: 151898 - protein, 335 aa, unidentified
MEPKFIHFAGIDISKAKIDVCVIVNTARSDLLHSVFEQTRKGFGELRKWLQKLIGRRKDQILICIENTGLYDDALLYFLTEQGYSVCLENAALIKKSIRDTRAKNDHLDARRIALYALRHCDEMELWEKPRQVIDKIKQLLAYRSNLVESLKRVKQAQKELEHFKWAKIKKTKTYAGGMKGLEKDIRQIEEDIWDLINNDKALLTMFSLLISIPAVGKITACHFICYTNEFKRVKSGKHLASYCGVVPFEQESGAFKKPARLSKQANKVLKRLIHLCAVTAIRLKGEFAQYYEKKIAEGKHVLQALNSIRNKLVLRIAAVIKNQKPYDEKYIYQP

SEQ ID NO: 151899 - protein, 402 aa, unidentified
MNCVGIDVSKGKSMIAVMRPFGEVVVSPFEVLHTDSELSELARLLKSLDGETRVVMEATGNYHAPVAWLLHDAGLYVSVVNAMLVHDYGNNSLRRAKTDKKDAVKLANYGLDHWLTLPRYVPDEDTRLMLKTCYRQYQQYSKVQTMLKNNLISLLDTTFPDANRLFASPPRADGSEKWVDFVDAFWHCECVCGLSEKTFITRYQKWCRKHGYNFNENKALDIYASACGHFGVMPKTDTTKLLVEQAISQLRATSAALAALKQEMQSLAASLPEYPVVMEMFGVGPTLGPQLMAEIGDVRRFHSKKALVAFAGIDAPPCQSGQMDIHSRSISKRGSAALRRTLFLVMGIYLQSAPLDEPVYQFMDKKRSEGKPYKVYMMASANKFLRIYYASVKSYLDSLEHD

SEQ ID NO: 151900 - protein, 430 aa, unidentified
MISAAIERCAGIDVGKKFLAVCVMVGPLQGEPQVEIRQFGTIRSQLEALRDWLKQQGVTHVVMESTGSYWKPVFNALEDTVKVYLANPQEVKNRKGHKTDNKDGWWLAHLLRHAMIHPSFIPPRAIRELRDLTRRRKRLLGAGTSERNRVQKVLEDANVKLGNVLTDLFGVSGQLMLEALLKGQATPEEMAQFAKGRAKKKIPQIIAALEGHQMSDHHRRMIRYGVDHMHFLEEQIEQLDQDIMTKIQEAGLEPEWRLVQSVPGVRETSAAAILAETGTDMTQFPSGKHLSSWGGICPGNNRSAGKNRSSHTTGGNRWLRGTLTECAWAAAAKKDCFLKDKFWRITTKSGGRKAPAVIAIAHSLLILTYEVLSTGQAYQEKQAPISDPRHKQRMIRHHIRRLGKLGVRVYGHDLSHDLGSPPTATSPTES

SEQ ID NO: 151901 - protein, 375 aa, unidentified
MTDYSAFVGLDVHKDTIAVSVADAGRAGEVRFWGEIANTPDAVANMLRKLGGRHPRIHFVYEAGPCGYGLYRQIMATDHHCEVVSPAQTPRKPGDRIKTDRRDAIILARLSRAGELTPVWVPDETHEAMRDLIRLRQAMVKDLRAARQRVKSFLLRHGRVFKGTSWKRSHRIWLGNQSFEHPAQQIAFQSYLNAVDQAQARRDEVDVQIRQFAADWSMAPVVEALQALRGVAFITAVTVVCEVGDIRRFAKPRQLMAFLGLVPGEHSSGETRRQGGITKAGNMLARAVLIEAAWSYRSPAKIGAQMMLRQEGIPQAAKDIGWKAQVRLCGRYRRLMARGKKSALAVTAVARELVGFIWAIAHTTEPGGPEVAAQS

SEQ ID NO: 151902 - protein, 342 aa, unidentified
MTQPAPARITVGVDTHAEVHVAVAKDNFGRRLDAISVPTTPAGYGELLGWARRLGQIEGWGIEGTGSFGAGLTRFLHRHGQVVVEVNRPDRQTRRRRGKSDPLDAEAAARAVQAREGAIPKAGDGQVEMIRSLRVARATAMKARTQAINALKGLLVTAPDELREQLHALSAVRLVQTAAELEPGPVTTPAAAARLGLRSLARRYQALSAELTILDTELDRLTVTAAPKLLALFGVGSDSAGALLVAAGDNPDRLRSNACFSMLCGASPIQASSGKTQRHRLNRGGDRQANAALYRIVIARLRHDQQTKDYLDRRIREGKSKKEAIRCLKRYVAREVFAALQP

SEQ ID NO: 151903 - protein, 346 aa, unidentified
MLYAGLDLSRKRLDFHLLDADGGTVEVGAAPPDADGLRGLTERIDRHGAPIRAAIESMNGARFVHDRLELAGWQVEIADAQKVKGLAPLACKTDRIDAWVLAELARRELVPAIWLPDPTVRGERERARWRLHLVRHRSSLKQRVHAVLLAHGKPCPVSDLFGVRGRQLLARLDLPEPWQGTLEASLRLIDELDREIGDCERELRRLGADHRYVPLLLTVPGIGWVLAYTIAAELGDISRFSTPRKLTGYTGLCPRFYQSGERDLRGPLAKQGPRYLRWALVEAATHACTHPAYRDRYQQTKTRIGKQRGAKVAQIDLPRRLTEAIWHMLTREQPFAPKGATDPLAA

SEQ ID NO: 151904 - protein, 393 aa, unidentified
MYLVGIDIGKLKHSFCLLEKETGEILVEPVFFENSRDGFNALLSSFKHLPQKDILIGMEDTGHYNLALLKFLLDRNYQVALINPVATNLTRKMQGGISKNDKLDTLTICDVLSSSQRVKSYRISKYSSFDLYEQKLLTREHHNLKEEENQLTNRLQKCIDVVFPEFNSLFKSKYGIVYMNILKEFGSADAIAHADIRTIRKCFDTGRGKNIALTAQELKEAARNSIGFPSSSEATQIKHLVARIELIKEQIAEIDKKIEEFSIQNNSPILSIPGISHFSGTSILAELGDIHNYSKPSQIIKFAGVAPLTYESSQFTAQHTAITKKGCKYLRKTLYQIITPVIQYNPVFRKFYLLKIAQGKGHRCAQGHCVRKLMRVIYHLLSTGTQFDPALLR

SEQ ID NO: 151905 - protein, 368 aa, unidentified
MNTVKFIGMDVHKKTITIAIADEGRQNQPRIYGTIANDLDALNKFCRKMVSTSTQIHFVYEAGPCGYGIYRHLNKKGFDCMVAAPSMIPKKSGDRIKNDNRDAVMLARLHRAGDLTAVFVPDAQDEAMRDLSRARGDAVLVAKKAKQRLKAFLLRNSVVFNGRSQWSKAYFSWLADIAMPHPAQQVALQEYIDAVHESLDRVDRLTDQIRQMAAGWRLAPMVKALQTARGVSLIVAVTVLSELGDLSRFKKPSQLMAYLGLIPSEHSSGPNIKKGGITKTGNGHARKALVEAAWAYRMQARVSRLLLKRQQGVPQQICRIAWKAQLRLCARFRRLAAKGKPKQKVVTAIARELSAFLWAIAKQVPSVV

SEQ ID NO: 151906 - protein, 370 aa, unidentified
MSVRRILAKTIDTDLEYEAIGIDLAKNCVSAALLTTDGEVVCIDRLDYSELEKSAQALSPTTFAMEPCTEMNYLVQKLEAWGHRCLVIGGKNVQNYVENHYSGQKTDLNDAQALAFLAQDKQLRTIKAKDIEQQKYASLTTLREQYIKQYRQTIVSLKGICQAWGLNISKGISGKARLKDLIENHAAFPEELKESLVDMVTHAQTAQKALNKITKTLEELAKSDKVCQLIQTIPGLGSICSCRLRATVGDIKRFKSPKDFPAYYGLVPRSIATGHNERKGKITHRGDRTMRSLMVQAAGSLVNMATKGKLKSKQLTKWILKKQKEKMPWGKLVCAVAAKLLRIVRAVLISNKPYNSKIAGVAKCSLPKGS

SEQ ID NO: 151907 - protein, 417 aa, unidentified
MKTYILRDPKSVQPQKPQFLDTPEPQTEAWVEQIVSAAKGPALYTGLDVHTDSIAVSLAPSDSTELRRYGLIGGTHDDVLRLAKKLQAAHPGLTLKFCYEAGPHGYPLCRCLRAHGLDCILVAPSKIPRAPGERVKTNRRDADQLARLHRAGELTAIHVPEPEDEAVRDLLRARWQTAKHQHRARQQLKSFLLRHNFRYAGTKAWTQKHLNYLATVKLPFAEQQFVFQEMVNLISEAGARLERYEAELPRVVAGWRFEPVVRALMSLRGLALLNAATLAAELGDLHRFGTAPQLMGYLGLVPSEDSTGDQRHQGGITKMGNGIARRALIEAAWNYRAPARISRQLLKRQEGLSQGIKDIAWEAQRRLHHRYKYLTGVMHKKSPVAAAALGRELSGFVWAVGQRVQPRPAKPQPQARG

SEQ ID NO: 151908 - protein, 403 aa, unidentified
MNSVGIDISKGRSTIAVMRPFGEVVISPFEVRHTGSELSKLAKQLKSLDGETRVVMEATGNYHASVAKLLHDAGLYVSVVNAKLVHDYGNNELRRVKTDKKDAVKLANYGLDRWLTLPRYIPEEDTRLLLKNCYRQYRQYSKVQTVLKNNLISLLDTVCPNANRLFSSPIRGDGSEKWVDFVAEFWHCRCVSEKSEKTFTNHYRRWCRKHGYNFSEEKAHTIHAETCGHIGVIPKSETTKLLVEQAVAQLRATSAALAALKHEMQSLASMLPEYPVVMGMFGVGPTLGPQLIAEIGDVRRFYSKKALVAYAGLDAPPNDSGDVTGRHKSMSKIGASSLRRTLFLVMSVYLQTAPLDEPVYQFMDRKRAEGKLYRIYMMASANKFLRIYYATVKAYLESLEHTA

SEQ ID NO: 151909 - protein, 341 aa, unidentified
MDKELYIGVDVSKQTLDLAYYDGESIDWKKAHIKVSNNNAGFKKIGSWVAKVSKGFDIVLFCMEYTGLYTQNFRLWLEEKHYIYRMVEPRKMHRFEPDLDDDQRSLDRIKTDELDAFRIAIYCEQNHKKILRNPSKLPSPVYLKLKRLLVERKQNTKQSTLCKQQLHDTCAYDTDLSVERKKLLLKNMQENQKAIDKEIDSYIQEDASISKNYELLTSIPGIGRIIALETIVLTENFTAISNPRKYACYIGIAPFKKESGTSVRKKTGVSKKGFSEAKADLSIAVLSAITYNPAIRDYWIRKKKEKCGGIVLNAIKFKLVLRMFAVIKRGTPYVETDAYKN

SEQ ID NO: 151910 - protein, 402 aa, unidentified
MTSYSYFAGIDWASQSHSVCVLDAAGGVELRLDVPHNKEGIERLIRQLRSFAGIVIAIERPSGLLVDALVEAGLRVVPIHPNVLKASRPRYRSAGKSDPGDAYMLADILRTDGHRFRALEPQSDEIRALRALVRTRDELVDSRVALANQLRSLLESFWPGAAEIFYEIDTPIALAFISRYPTPQSAAHLAEKRLAAFLAQHSYCGRRPVAALLERLRAAAIGRAGELEAEAKGELARSLASVLGPLVAEIAKLSARIEHTVANLADGQIIMSFPRSGRICAAQILAELGSVRERFPNQEQLAAEAGVAPVTYESGKHRSVAFRFACNHRLRRALTCFADQSRHANRWAADVYQRARSRGCDHPHAIRVLARAWARVLWRAWFSRTPYQPHLHRSAAAFAATG

SEQ ID NO: 151911 - protein, 409 aa, unidentified
MEVLHPRCAGLDVHKKQVTASLRVAEGRKVRKELREYGTDTASLLQLRDWLESEKVTHVAMEATGTYWKPVWHVLEDSFTLVLANARDVKNVPGRKSDVKDADWISDLLAHGLVRSSFVPPQPIMELRDLTRTRKQLIRERGRHVQRIQKVLEDANIKLSSVVTDVTGLSGRKILVALIEGERDPDRLAELGSPWLKASKNELRAALHGFVREHHRFMLRLHLDQVDALDGAIEDVEARTERCLDPFRGVIERLDTIPGVSAITAAVIVAEIGVDMSRFPTPNDLVSWAGLCPGENQSAGKHRSRKLKRGAPWLKTTLVQAAWAAVKKKDSYFHAKFLRIKRRQGSKRAIVAVAASMLTAAYHMIQRDEDFHDLGAGYFDQFDRQKLARRLVRRLQDLGLDVEVRSQAA

SEQ ID NO: 151912 - protein, 430 aa, unidentified
MKTSRYTDAQSIAIKRQAEGGVPVAELCRKHGMNNALFHKWRAKYGGMDAAMVSQMNAMDRAIGTPLMEWMAPAPGVAMRHSGDIESPRAKEPSMGEIITIGLDLAKSVFQVHAVDEAGRVVLRRQIKRAQLLAFFADLSPCLVGMEACSGAHFWARELGKLGHDARLMPPSYVKPYVKRGKTDAADAEAICEAVARPNMRFVPVKTEEQQSVLMMHRARDFLVRQLTQVSNALRAHLGEFGFVVPKGVQNIERLLTLAEAGNLPANALNSIRLLAEQFRDTKVKIEDVTAEISSASDTDSTARRLKTIPGIGPITSSVLAATLPDASGFKTARDLAAWLGLTPKPHSSGGKERLGKISKMGNRYIRRLLYLGAMGVIAARRRRPAGDDWLWQLLERKPVKLVAIALASRNARTVWALLKSGESYQVARA

SEQ ID NO: 151913 - protein, 405 aa, unidentified
MMYNAVGIDVSKGKSTVAVLQPGGTFVRKPFDVKHSSRGLKDLVGYISSLEGDTKAVLECTGRYHEPVVRALSAAGIFVSAVNPHLIRNFGNNTIRKVKSDPADSRKIARYTLDNWASLRQYSGMDTTREQLKTLNAQMDFFTKQKIAAQTNLISLLDMTYPGVNDLFDCPTRSDGSQKWVDYAASFWHVDCVTKIGLSAFTDRYQAFCKRHGYNFQPAKPKELYDAAKELAAVFPKEKEYKDLILMGIKQLNATAASVEQIRHEMDRLASTLPEYSTVMSMRGVGPTLGPQLIAEIGDITRFTHREALTAFAGVDPGVNQSGQFSTRSNRASKCGPPRLRKALFLVMDCLLKTKPADDPVYQFLDKKRSEGKPYHVYMTAAANKFLRIYYGKVKAYLASQAKAE

SEQ ID NO: 151914 - protein, 340 aa, unidentified
MRRLYAGSDLHGNNNLIGIVDGEGKRIFKKRLPNEPPLILEVLKPYKEDMVGIVVESTYNWYWLVDALMDEGYQVHLANPSAIEQYSGLKHADDKHDAFWLAEMLRLGILPKGYIYPKEERPVRDLLRKRGHLVRLRTSLMISLQNILSRNLGRKMNVNDVKAVKEDRVSPLLEKNEDLALAGRVSKEAMDHLTHQISKIEWVVEKKIQLKPGYQYLPSVFGVGKILSLTIMLETGPISRFPTVGDYVSYCRKVPSQWMSNGKWKGSGNRKNGNKYLAWAYSEASEFARRFYPEARAYYQRKMHKTNAPVAHSALAHKLARAAYYVMRDQVPFQPEKLFG

SEQ ID NO: 151915 - protein, 343 aa, unidentified
MNSTDYIGFDVHKKTISYCIKHMDGSIQEEGIIEASRPGLRDWLAQHQQSWIGAMEATLFTGWIYDELKPHAAALKVAHPAMLKAIGASKKKNDQVDAEKIADLLRCDLLPECYMAPTEIRELRRMLRYRNMIVGEAVRMKNKIADLLMETGTIYNKKRLHAEGYFGELLESLEEVPESVIQLLKLSRGALEMFRSVERQVRRRLRHDRRLKERVELLKTIPGVGEVVALTWVLEVGEVNRFSSIANAVSYCGLCSAQRSSAGKDQRGPISKQRNRHLQTMLIEAAKLAPRWNVQLAAVHEHELKRGNRNRATLAVARKLVAYLMAVDRSGKPFQLKVAAQMA

SEQ ID NO: 151916 - protein, 476 aa, unidentified
MATPDEKPDKPTNPDKPTKPNPSRKRSLPVPVPVSAAALDVINPDAAGIDVHSDMHMVCVPADRDANPVRQFGANTADLQEIVAWLKKCRVRTIALESTGVYWIPLFELLESEGFEVNLVEPGQLSRCGARPKTDVLDAQWIQRLHSYGLLRASFRPPDSVLALRAYWRQRQMQVRYAASHVQHMQKALEQMNVKLTEVVSDITGLTGMAIIGAILEGQRDPIQLARLRHERCHHSEEQIALALEGTWRPEHLFELRQAHELYQFHHRQITECDQQVQAELANFPNRAGAKTHTVKPRKRGRKSNDVRFEATGPLFQALGVDLTLIEGIDVGTALVILAEIGVDVSRFPTEKHFASWLRLCPPQDESNKTKKRRGHRKGTNPVTLALRMCARSLGKTMTPLGLFYRRIRSRIGGLGAVKATAHKLACLVYRMLKYGQEYVKQSMEEYEAKMEANVLKALKRKAAAMGFELSPLPPQ

SEQ ID NO: 151917 - protein, 387 aa, unidentified
MYFVGIDISKYKHDCFICTETGEVIESNFSFPNTSDGFEQLLNLLKSIDNFKEIRIGFEATGHYGMNLKLFLEKNNYSFMEFNPKLVKEFISGQTLRKTKTDKKDAYQITKYLISVDYKPHPKQFYHKYSLKSLSRMREKLVKQRSYYEVALTNVLDHIFPEYKSFFNNTFSASSIFILSKYKSPDKIKNMKDYDSIRKISRGKFTSAQFFLLKDLAKNTIGTSNEIFELELETLLILRSQIEVEIKKLESNIEEIIKEFNPPILSIKGIGYILGAGIVSEYGDVSRFKSADAMVAFAGIEPSICQSGTESHTGHMVKHGSGHLRYYLLNAADCIFLHEPIFTEFYYKKRNEGKSHRVALNHVAKKLIRIIYKLETENITFDSSKVK

SEQ ID NO: 151918 - protein, 313 aa, unidentified
MTSRAVVQLLAWVGPWSARRWAVEGATGLGHTVAQQLVGAGEVVVDVPAKLAARARLLGTGSARKTDRTDAASVAAVALAHRRLRQVAVEDHTMALRLLTDRRDDLVAERTRTLSRLHVLLRDLHPGGAERNLTAQRAAALLGWLRPVARVDRERKRIAHELLADVRRLDQRITAATKAIGEAVTSSGTTLTEVFGLGPVLAAKILGHAGDLTRFPDRDHFASYTGTAPIEASSGDVRRHRLNRGGNRQLNTALHLIAVCQIRDPSPGQVYYQRKLRQAKTPEEARRALKRKLSNVVYRHLVADHRHRHAPPS

SEQ ID NO: 151919 - protein, 332 aa, unidentified
MYVGIDLHKEHAQVAVMDDTGEIVEETRVRNASLEDLAQRYAGAQAAIEATSNYYHIQRTLSEHLDVTVANPNDLGSITQSDKKTDRVDAKQLARLARLDALPDSYVPSEEIWKCRALVRGRQSLKQTRTEYANRVQSVLNQHGLTRNVEPLTESGRDSIRQLDLPLIWTELVETSLNTIETLTEQINRLEEVIQERAASLPETQLVMSIPGVSHLSALTVVAEIGEIDRFDSHKELVSYVGLNPVIRESGDSRFEGSISKNGSGHVRWILVQSANVAVHTCEDEYLTQFYDRLESRKTSQEAIVATARKLLVSMYYMLDRGEVYDPPGVSG

SEQ ID NO: 151920 - protein, 412 aa, unidentified
MEVIHSRCAGMDIAKRDAKVCIRLAGSGRRRTVETVTTWGATTRQILALREHLVAERVTCIVMEATSDYWKPFYYLLEDLVGVEVMLVNARHVKNLPGRKTDVADATWLAQLGAHGLVRGSFVPPAPVRQLRDLTRTRTAVTRERGREIQRLEKVLEDAGIKLSSVASDITGVSRRAMLEALIAGNSDPTAMADLARRRLREKIPALTEALTGRFTGHHAFLTRTHLNLIDQHTAAIDELTARIEVVIEPFRRFRDLICTIPGIGGNTADVIVAETGADMSRFPSAEHLASWAGTTPGNNESAGKVKSSRTRPGNPYLQGALGIAAISVSHTKHTYLAAKYRRIASRRGPLKANVAVQRAMLIAIWNMATTDTAYLDPGADYFTRLNPEKARTKAIRQLEAMGYHVTLEQAS

SEQ ID NO: 151921 - protein, 386 aa, unidentified
MPKPADLNRCLAPLDQDHTIIAVIEMSQSSWLVAGIVPGIARHPLKKLAPDQDALLKLLHRWRAEAGQAGREISRIAVAFEAGRDGFWLARWLRAHGIEAHVIHPTSVAVSREHRRAKTDRLDTALLKRVFLGWLRGEPEHCHMAAIPTLEDEDARRPTRERECLVGERTRIVNRIKAALVRLGVRGFKPTVRNALEHLDALRTPEGTALPPNTRAELHRDMARLHFVTEQIQQIEAARGERLEQAGAGPNAMVRLLAQVVGVGIETADMLVHEVLSRNLRDRRAVARYAGLTGSPDESGSRRREKGLAKAGNARVRRGMIQLAWRFLLHQKESALAQWYRARTADARGSTRKTLIVALARKLLIALWRMVTTGEAPTGVVLRPAA

SEQ ID NO: 151922 - protein, 427 aa, unidentified
MSMTLFVGIDISLRKATCCFLHQNGKVLGKKFETDNNIPGFEKLTEQIESLIPTNDFSLVCIGLEATSMYGFHLLDYFSSTAFKYPVEVRLYQVNAKYVSKFKKAFPEKEKTDMVDSKVIAEYLRFGRLPAEYKPECLFLPLRRLVRYRYHLVKHLEQEKKIYMANLFLKFPGWVQNKPVKHLGKTSLDVTGEFTLDQLAEMSLDKLALFVAKAGKNRSPDADAIASEIQKAARESYRIRPELASSVTFVLASISKTIFALKENLKQVDKAILAEMKGFINPLISIKGIGPVYSAGILACVGDVKRFASHNQLARYAGLVWKRKQTGNTESEEKHIVRECDKYLRYYLVEAANSLRVYNETYQIFYKKKYQEVPKHQHKRAIVLTARKLVRLVFALLSNNQLYDQFRDTQSPRPVLNQNCQRANSQV

SEQ ID NO: 151923 - protein, 367 aa, unidentified
MKKHSSKQGSLSSTDVELCTTICVDLAKQVFQLAGEDATGRVIYEDRIKSRQAFHDFLLRLPATVTVLMECGPGAQAWARLLQAKGNAVRILPAQRVAEHRSGAKNDRNDTHAILRAGRDTSIASIPIKSTTALAIQALHRIRRGNIKRHTALGNQIRGLLLEHGVSMPQGDAAISKHVPRSLEDASLPLPDLLRELLDELLTDWLSLGERIAGLSRRLETTAQQDKVAQRLITIRGVGPIIATAIVAKQTEPSRFASGRMYSAFFGIVPDQHSSGNKVRLGRMSKRGDGYIRSLMIQGAHAVLSQLRPDSDQPDDRRLLRWLSRLGRKEAAIRLANRNLRIIWVLLQNDQVYQHKPNSNSEAAMSL

SEQ ID NO: 151924 - protein, 346 aa, unidentified
MLYAGLDLSRKRLDFHLLDAEGAIVDVGASPPDADGLRGLSERLNRYGEPIRAAIESMNGARFVHDRLELAGWQVEIADAQKVKGLAPLACKTDRIDARVLAELARRDLVPAIWLPDPRVRAERERARWRLHLVRHRSSLKQRVHAVLLTHGKPCPVSDLFGLRGRQLLARLGLPEPWQGTIEASLRLIDELDREISECERELRRLGADHRYVPLLCTVPGISWVLAYTIAAELGDIGRFATPRKLAGYSGLCPRVYQSGERDLRGPLSKQGPRYLRWALVEAATHACTHPIYRDRYQQTKARIGKQRGAKVAQVDLARRLSEAIWHMLTRDQPFAPKGATDPLAA

SEQ ID NO: 151925 - protein, 316 aa, unidentified
MDDNNGVYGVDVSKAKLVIAQYDVLTLAEVDNRPESIAAWLSGLPKGAVVAMEATGIYHRLLAHLAHAAGMRVYVLNPQTLKHYAQAIGRRGKTDNCDARMIARYAVHEQAKLRRWQPPARAADRLSQLLERRHTVVGVRQTLAQSLSGLPMLKAARQSLLASLERTVRRLDILIRHEIARLPGAAALYERLKSIVGIGPVVAAQLVAVFSTLSFARAGAFIAYTGLDPRPNDSGVHRGRRSLSKHGPPLLRCQLYNAGMAAANSKVFKPVYRQLRERGLQTTEAIVILARKIARIAFALYKSGEVFDAQKHLKMA

SEQ ID NO: 151926 - protein, 342 aa, unidentified
MPHYAALDVSNAETAIHIIDETGRTVWRGKRASDPEALTTALRRHAPELVRVGLETGFLTPWLYHSLKALGVPVVCLEARHAPAATALQRNKTDANDAETLAQLVRTGWYREARVKSFAAHAVRHLVGARAQLKGVSVDLSNQIRSILKTFGLMAGKGAGHAFATRVRELLEGRPMLAAIIDPLLAAWQAVRDQIAVLDRHLIGLAKGDPTCRLLMTSPGVGVIVATSFAASIEAPEHFRRSRSVGAYLGLTPARHQSGETDRTGGISRRGDRLMRTYLFEAAASLLIRVRQNSALKTWGRDLAKRMGFKHAAAALAGKLSVVLHAMWRSNTPFQPWPAQAR

SEQ ID NO: 151927 - protein, 417 aa, unidentified
MDVHRDFCEVAILDHVSGRRTRGRVASKLENLQLFAQSLAPDDRVALEVTGNAWEIARILEPHVARVIVVSPGDTGIRQARAKTDRLDALALAKLLAAGSLDAVWVPDERIRVMRRRLARRRQLVGACTRAKNEIHAVLMRRLKGRPPASDLFGIKGRKWLAEQQLPVEERETVDAGLRHIAFLDAEIAEVERVIALDALAWPDVRRLMTVPGVNVIVAATFLAAVGDIRRFPGSRQLVGYLGLDPKVRQSGTSPATHGRISKQGSSTARHALVEACWSTVRAPGPLRAFYQRIRARRGHQVAIVAAARKLACLFWCMLTRGEDYAYGQPSLTRRKLRKLELTAGAPRHKGTTGLWAANKAMAQAERELAQQAELAYKNTVRDWAASAPAKAGASATPGHASQGPSKGHVARQTTSP

SEQ ID NO: 151928 - protein, 423 aa, unidentified
MNTAENNTSLQSSPIVWIGLDWGDQEHAFALQEATGKSEMGTLPHSAENLHAWLKTLGERYGARPVALAIEASRGPVIHALLEYPWLRIYPINPITSARFRSAFTPSGAKDDLPDAKVLLELVRDHAAKLRVLESQDPATVKLAGLVEARRKLVDRRTQLILQVQSLLKSYYPQALEVAGDLKSEVALAFLNRWPDLISLKSAKPATIKRLYYLHQVRSQDLVKQRLALIAQATALTTDAARVEVAVLHLRALLDQLKVFRQHIPRLDDAINQAFAGHADRALFSNLPGAGRQLAPRLCVAFGTLRSLYPDPASLQKYAGVAPVREKSGNQVWTHWRWQASTFLRQPFVEWAGQTVHYSEWAKIYYQRMLKKGKKHAVVLRALAFKWIRVLWKCWQDRQPYDEARYLKQLLHRKSPNAVPAKS

SEQ ID NO: 151929 - protein, 385 aa, unidentified
MGRVKKRGPGPSSLLVTPDHAGNVVGIDPHKRTLSATVLDARAGVLGSAHFRVSGEGHRELEAWARQFGQITRWGVEGSASWGRHTAMFLAGRGHDVRDVCANRTPRADRARQRGKSDPLDSERIARETLAHPLLPKAFKRAGQEQGPDEPHQLLALWNNRRRSILTGRQHLVNEAEYLLCELPLELREQLPDTKTVRPRLAALARRNRRRRYDAPTRLRLQLLDDYRAQIKALDTQERHAVTQLQALVDNSGSTLGELCGLSTRSVAELLVEVGDVRRFTEGGFARFNGSAPLPASTGEGPGEPIRHRYNPGGNRRINAILYRMAVTQLRCEPRAQRLYANARAGGHTKKEARRILKRHLSNVIYRRMIRDLETQLADQSLLAA

SEQ ID NO: 151930 - protein, 392 aa, unidentified
MDARTVNSLPPAATHDGTVRCLMAIELSKKSWIVGVNVPGSEKISRYTLKGCDGKGLLELIEKIRTRVHRELKQPVEVICCYEAGYDGFWLHRLLEEHGVRNYVVDPASVQVNRRARRAKTDNIDVAQLLRSLMAYLRGDPKVWSVVQVPSVAEEDDRRLHRERERLINERVQHVNRIKGLCAVHGIYDYHPLRADRLRRLEQLRTGDGRGLPPRLKAEIRRELQRLELVLQMIKTIEKERNVMASGKAPSTHGNAKKVQDLVKIGSIGAEIATVLVGEVFYRQFNNCRQVGGYVGLTPSPFNSGKMTRDQGISKAGNPKARTIMLELAWLWVRHQPNSPLTIWFRERVGTAKGRIRRIAIVAVARKLLIALWRYLETGVVPTGAKLKVSKC

SEQ ID NO: 151931 - protein, 269 aa, unidentified
MTFCPHALHLKAELFVKSSRVHVRDDGFTRCNFHLKFFIMVSRGIDISKSSFVAAYPSTNGNPTKTFPNTTARMRELIGTLAVAEHHCVMEATSNYGCCCTCYIRTVLPSVLPPPKKQIKHFSRMMMPVTKTDEKDAYMIAMYGEKMNPPIYKMPSQATIRILTTEGFTYFDNAKQLSRFIGICPTYQQSRTSVNIREHINRNDDERLRSLLYIAFWTALRYNSRECYIRLKANEKPFKVALIAVTNKLVRPVLTITTINSIYRWICPG

SEQ ID NO: 151932 - protein, 338 aa, unidentified
MSSIKVIGIDLGKFSFHLIAHDSSGRINCKHKFNRSKLLLFLSTLEPTLIAMESCSGSHWLAQKCQSLGHRVKLIPPQYVKPYVKTNKNDFIDADAIAEAATRPSMRFVSVKTKEAQVLSVIQRIRSSYIKERTACMSRIGAILLEFGMAFPKGHSRMKSLFQWLADNGEPIPPLLMEELITHHEYYKHLNSLILEQEKKLKRIVDKDDRATLLQTIPGIGNLVASRCLSDISNPHDFKNGRHMAAWIGLVPRQYSTGGKNTLLGISKRGNKQLRTLFIHGARALMSKPDLVEKIFGSWIVELRQRKPFNVVVVALANKLARIAWSIMTTQKPFTALG

SEQ ID NO: 151933 - protein, 342 aa, unidentified
MKKLEADENELLKLLERWRKEAEKAGHKINRITVAFEVGRDGFWLARWLRARGIEAHVIHAASVAVSREHRRAKTDRLDTEQLKRAFLGWLRGEREHCKMAAIPALEEEDAKRPHREHETLVGEQTSIINRMKGTLARLGIRNFNPKLKKAPERLEHVRTPEDKPIPPNTQAELRRDMERLRLVREHIRQIEKARLEHLKQAPKQGPNAMVLLLARVIGIGIETADMLVHEVLSRNLRDRRAVARYGGLTGSPDESGKKRREKGLARSGNARVRRGMIQLAWRFLEFQEESALAKWFRARTEKARGLRKKMIVALARKLLIALWHFVRHGLVPEGVVLRPVH

SEQ ID NO: 151934 - protein, 405 aa, unidentified
MGEFSVEAIVQRSAGLDVHKKIIVITILLEQMDGSVTEETREYGTTYKACEELSDWISHNNIQLCVMESTGIYWKNIYAALEKKGLRVSVVNARHVKQVPGRKTDVKDSQWLARLARYGLVRGSFIPPKDLRELRIIARYRTKLRGTLSGEKNRLHKTLDDAGVRLGNVVTDISGITATKIIEGLVKGKSMEELLACTRGKLNKKKEALKAELEAELSPRHLFLLKKIQEHIVYLQNELNDLDAYLFDAMQPYQKQWEILQTIPGIDAVSAALLIIEFGIDMQQFGSREQFCSWAGMCPGNNESAGKKKSGKTQKGSKQLRYVLCEAANAAARTDCQFKHKYKSLMIRRGHKKAIVAVGHKMLRVIFSRLKEGEIYQDPQISYEELVVKKNAPRWIKMLNKYQQI

SEQ ID NO: 151935 - protein, 412 aa, unidentified
MLFVGDDWAEDHHDIEIVNEEGRRLVRRRLPEGLDGVTRLHALIASVMPEQWADLPAGEATARVKVGIETERGPWVTSLVAAGYEVFAINPMSTARYRERHSTSKAKSDPGDAHVLAEIVRLDRDHHRPVAGDSAHGEAMKLVARSHQSMIWDRTRHVLRLRSALREYFPAALTAFSDLDAPDALAVLAAAPDPDLAARLSIARISTALRKANRREVPAKASEIQAILRAPGLRQPPAVQQAFAAIVVGQVRLIEALNAEIDALGEVVAEHFGRHPDADLYTSQPGLGVILGARVLAEFGDDPKRYADAKARKNYAATSPITRASGTKKTVLARHVHNDRLTDAVHQWALGALRGSPGARAYYRAMRARNIGHHAALRQLSNRLVGILHGCLKTRSCYDETKAWAHHMPAVS

SEQ ID NO: 151936 - protein, 348 aa, unidentified
MENVSRIGMDTSKSIFVLHGVDASDQVALRKKLRRKEVVEFFRKLRPTRIGIEACGASHYWARQLSALGHQVLLIAPQHVKPYVRRNKNDAADAEAICEAMSRPRTWFVPAKTAEQQAGLMLAGTREAFVRRRTQLSNTIRSYAAEFGLVSSRGLDKIEPLLARIAADDDLPTLAKEMFADLGEDYALLQKRLEIIERKLRLWQRNDEQSRRLAEIPGVGVVGAALLAMKVPDPKAFRSGRDFAAWLGLTPKDHSTAGKQRLGVITRAGDETLRSVLVVGATALLRQVRMGRSHHSRWLADLLRRKPPKLVAVALANKTARVAWKLMVSGESYDRTRVGIAACEAAPA

SEQ ID NO: 151937 - protein, 348 aa, unidentified
MAIAVLGIDLGKNSCSVAGLDEAGRVVLRRRLIRDGVVRLAAALPACVMAMEACCGAHHLGRVLREQGHEVRLMPPEYVQPYVKAQKNDERDAEAIAEAATRPTMRFVELKSEAQLDAQILHRARSRLVGQRTALINQLRALLLERGIVVAKGRRQLEQRLAQMLDEAAEAPTSLSPRTRLLIEDMGLEWRELDRRIAALSAEFVARAREDQAARRLATIPGFGALNATALVAAIGTGETFRRARDLAAWLGLVPRQATTGGKPRLLGITKRGNTYLRTLLIHGARAALPALSAAATPLGEWLRGLLARAHKNIVVVALAGKLARIAWAVLRSGESYAARTGLRPATA

SEQ ID NO: 151938 - protein, 388 aa, unidentified
MHVYVGVDIAKELHYAAIMDSDGVVSKPFSFENNDKGFNLLLSHLAPYDKESILIGFESTAHYQENLAYFLKSLGYRTAEINPLQTAALRKANIRNTKTDSVDARLICLALMNHHIQGDQRDSARLDDLYQLCKMRMDTMKKRTTCKIQLVAIMDRIFPELASFFDNNLHTNTIYRLIESFPLPSQIKKTRIDILTKLLHKASRGHFKKEKAQKLKDLADISVGIPSDIFAFQAQQLVHQIEFYTDQIQTIEERINTNPDVMSSPLMTIPGIGTFCVACILSAIKNINDFGAPCKILAYAGLDPVIRQSGKFTASHTRMSKRGNSLLRYALVWSAGNVVKNNHTFAEYYRHKTEDQGKSHYQALGHCAKKLVKSIYHMLKYNESFNLD

SEQ ID NO: 151939 - protein, 400 aa, unidentified
MNAVGIDVSKGKSTVAVLRPFGEVAASPFDVIHNDSDLKQLAELIKTLPGESKVVMEYTGTYFEPIAQFLHNNGIFVSVVNALLVHDYGGNSLRKVKTDKKDALKLASYALDRWTELDEYIPADEQRKTLKLLNRQYNQSIKIQTMMKNNLISLTDSVFPGINKLFTSSERQSDGHEKWVDFLKAFPHRDCVAKLYLSVFKIKYKSWCSRNKYKYSESKAEEIHAYAKSVIAVLSMNDSAKLLVTQAVSQLNTILETLSSIRDEMNRIASSLPEYDTVMSMFGVGKVYGPQLIAEVGDTRRFRNRRAITAFAGLDAPPYQSGQLDVSSRHISKRGSAALRKVLFQITEVYILNKPEDEPVYQFIDKKRSEGKHYYSYRIAAANKFLRIYFAKVNQGLNSQ

SEQ ID NO: 151940 - protein, 421 aa, unidentified
MTEDIEWFVGFDWASQTHVVCLLDRNGETVGERKVAHGGADLSELCDWLVARSGAPPARIGVAIETPHGPVVETLLERGFAVFAINPKQLDRFRDRFTVAGAKDDRRDGHVLADSLRTDRRAFRRLAVDDPTLIELREWSRIAEELSQERSRLANRIRQQLWRYYPQMLQVADDLTAENFLALWELAPTPAKAARIDEAGLAKVLKDHRVRRIGAAETLRILRQTPLEVAAGATEAAAAHIKIAAERARLVNRQIKEAEQKLEALCARLEQKDDGEPESEPGQRSRQRDVTILRSLPGVGRTNLATRLAEAAEPLRRRDYQVLRVLSGVAPVTRRSGKARLVVRRSACNERLREAVYHWARVAMQTDPESRKRYAALRRRGKSHGRALRTLGDRWLAIACAMLRKQTLYDPNHETASLAAA

SEQ ID NO: 151941 - protein, 336 aa, unidentified
MTIIRIGLDTSKHVFQIHGVDENEQPGVRRQIRRSEVAKVFAKLAPTRIGLEACGAAHHWARVLRGLGHEVMLLPPQYIKPYVKRGKNDKIDAEAICEAMSRPTMRFVPVKNTEQQAALTMLGVRDLLVKQRTMLINAIRGHAAEFGVTAAKGPKQVTELLQRLASGEGVPALAREMVGMLASQLGGLDIKLKAIEARLMAWHRQDQTSQCLATIPGIGPIGGVSFALKVPDPKAFRSGRHFAAWIGITPREDSTAGRQKLGRISRAGDEDLRRLLVIGATAVIRAAKPGRAAPWLLALLARKSKKLAAVALANKMARIVWAMMVSGETYRRPVQA

SEQ ID NO: 151942 - protein, 404 aa, unidentified
MAVIIGIDPHKGSHTAAALDKTEGVLGELRVRSAATQLEHLLAWAVRWPERTWAIEGAGGLGYLLAQQLIAAGERVVDVQPKLAARVRLLATSSTNKNDPNDARSVAIAALRSPEAKEVQAEDHAAVMKLWAKRRHDLVSARTRVVCRLHAVLCELVPGGFSGQLYASRAAKMLDQLEPENAVAAARHELGRQLLEDLRRVDEQMLETKKRIALAVAASKTTLTEIFGVGPIVAATVIGYVGDVTRFASSDRFAAYNGTAPIEVSSGPRKIYRLSRRGNRRLNHAIHMAAVTQIRNLHSEGRTYYDRKVAEGKTGKEALRALKRRISDALFRQLLIDTQQARKSIMGPGGQTGNDSVACVTDSHPDGRLFGEATPEPGTTLRPAATAIRSKRSRTASRKIERAS

SEQ ID NO: 151943 - protein, 345 aa, unidentified
MKLHTIGIDLGKTVFHLVGLDLRGEVVVRKKLSRKQLLHYTANLHVDLIGMEACGGAHFLGRALREQGHEVRLMPAQYVKAYVKTNKSDFIDAEAIAEAVARPTMRFVPIKTDDQLDMQSLHRVRERWVMRRTAIVNQIRGLLLERGITLRKGRKYVDEALPSILEDATTKLSGAMRILLAQLKLELDQMAVRIDEADAVLNQTARESAACQRLLAIPGVGPVTSTALIAAIGNGAAFHKGREFAAWMGIVPREHSTGGKQKLLGISKRGNTYLRTLFIHGARAVLQHSAKQTSGLSAWLAQLSARTHPNVTVVALANKLARIAWAVLAKNEVYRPQVLIGPTAA

SEQ ID NO: 151944 - protein, 343 aa, unidentified
MKNTTIAVDIAKDIFEIALSHKPGEVNEKHRVTRKKLLSFFVNQPPTTVVMEACGSAHHWAREVNKLGHRVVLLPPHMVRPYVQRNKTDQSDAKGMLEAYRNKDIKPVPVKSISQQSITLLHRVRSSWAASRTARLNMIRGLLRELGIFIPVGARKVVPRVLELLEDADSQLPDAVRHTLHEVCLEIRDYEQRMRDVEKQLEALSKQIPTVTLLRTVPGIGLLTSTALFAFVGDIQRFRSSRHFAAFLGLTPRLRGSGFAIHLGPISKQGDRYLRMLVSHGARSVLLRAKSMNPPDRLRAWALTVHSRRGHNKATIAIANKLARIVWAVWKHDTEFQSYPKAA

SEQ ID NO: 151945 - protein, 359 aa, unidentified
MRMASRSMAQSDRGVIVGVDTHGDAQVAAAFTSDLGRPLGHLTIATTPAGYRRLLEWAHELGSDARFGVEGTGSYGAGLARFLAAAGCTVIEVNRPNRQTRYARGKSDPVDAEAAARAVLSGEATGLAKVDTDHVGMIRALRVARRSAVKMRTQTFQQMKALIVTAPAELREQVRSLSRDRLVDAASCLRPGPVTTPVAAVQLALRCLAQRHQLLAAELATLDRDLDRLVAAAAPTRCALQGVGTDVAGAVLVAAGDHPERLRSEGAFANLCGVAPLPASSGKTSGRHRLNRGGDRYANCALWRVVIVRLATDAPTKHYMARRTQEGMSKPEIIRCLKRYVAREIYRELTPRPALAAVA

SEQ ID NO: 151946 - protein, 359 aa, unidentified
MSKGSGRMGNVKSLALREGDAVVVGLDVHKKSVHAAVRRNGAEVGTWVCSMDVEAITRSLLPMKPFLKKVVYEAGPTGYGLARALQKAGLPIEVLAPGKIEREPNPGSKTDRLDCRKLAEYAEEKKSLKAVAIPTEEEEADRQVWRLRDQLVTQQRRVKQQIKSLLLQNGLTEPEGLSHWSEAALEALKRMRLRHQLQLSLQVLIEELEKIIALRQRVERHLVWVGQRKRHRQAQRVLRSHPGVGPLTAMAFCVEVYRPERFADAEQVACYVGLAPRVRQSGQTRREGPLIKAGRGALRSLLIEASWRWVRQDARAATLYQRLVRNTGSAQKAIVGVARHMAVNLWCMVCRNEKYRAAA

SEQ ID NO: 151947 - protein, 317 aa, unidentified
MAMQVDRLIVGVDVAKAELVIHHDDRDEIIRLKNSKLEIRRWLKQQPLNTAIAVEATNIYHLDLVELAHGLGFEVYVIDGFQLSNYRKSVAGRVKTDPSDARLLSRFLKNEGQDLRRWSPPPAVYGKLQSLLRRRAALVTARTAMTQSWANETLLKAAFETFVASIDRLDQLIQKKIKEVLREAGLQEQVARCQAVEGIGFLTATALVMAFVRGEFKSSDSYIAFLGMDLRVNDSGQKNGRRRLTKRGCSEIRRLLHNAAMAASRSAAWKGLYEQHRSTGKATTQALVILARKLARVAFALMKNQDEYVTKRAKLAC

SEQ ID NO: 151948 - protein, 369 aa, unidentified
MEHSTEVFVGIDVSKLRNAIAVADGERGGEVRYLGEVDASEESMRRFVKKLATRHGRLHFCYEAGPTGYGLHRLITELGHSCMVVAPSLIPRKPGDRVKTNRRDALALAKLLRADELTAVWVPDEGHEAMRDLVRTRSAAVESLRVHRQQVSAFMLKHGRVYPRKKGWTMRYLRWLQEQRFEHPAHQIALQEMVEGVRIAKERVTRLESAIAEFVSSWSLGPVVTALQTLRGVDLIVAVTFVAEVGDVSRFESPRQLMGYLGLVPSERSTGDTIRRGGITKAGNGRVRHMLVESAWTYRHPPKIGAAKLYKLEAAPPKVREIAWKAQSRLTARYRALIGRGKKTTVVCTAVARELVGFMWSVAREARAA

SEQ ID NO: 151949 - protein, 469 aa, unidentified
MIRGASKKSCRSEPFRGLRVTNPHVAGIDVHAKEHWVAVSPEDALPARVDQPAHLPRHVRKFGTCTADLEMLADWLQACGVTSVAMESTGVYWIALFELLERRGFEVYLVDPRQTRHAPGRPKTDVLDCQWIQRLHSYGLLTASFRPADQVVVLRSYLRQRQMLIGYAAQHIQHMQKALEQMNVKLTEVVGDIMGVTGLAIIKAILRGERHPRELAKLRDERCHHTEAEIARALYGNWRDEHLFALKQALASYEFYQRQVEECDGRLVAHLQTFADRSGGRRLPAKPKPGLRRSGNRPAFDVRQSLYRASGVDLTILEGIDDSTALVLLCELGMDMSPWPTVKRFVSWLGLCPQHQGSAGKIRSRHVRRGCNRAARALRLAAQGCHHAKNALGAFYRRLQARAGGAKAVVATARKIAERVYRLLKYGADYVRQGIEEYEAKYRERVLTNLARRANELGYELVPVAAATQ

SEQ ID NO: 151950 - protein, 370 aa, unidentified
MNSIIYVGMDVHKASFTLSCFSVTTQETFATVKISPNAKAIKKYLDGVSLSRSEECEFVCGYEAGCLGYTLYHQLTDMNIRCVIMAPTTILRNGKRVKTDRIDAENLARCLAYGGYKSVYIPTAQDEAVRDYLRMRDDHKLMLKKIKQQINAFCLKHNKIYPGNKSKWTQAHVKWLNVLEFDGYLQDAFNEYMITYRELADKVERLESQIEQLAELEEYRDKVKKLICIKGIKTHTALSLIVETGDFSRFQSAERYASYIGLVPGEHSSSEDQKRLGITKAGNRHMRMLLIEAAQCYSRGVPATKSKDLKSRQKGASPEVIAYADKASIRLRRKYIRMELVNKKKANVAKTAVARELACFIWGMMTDNIA

SEQ ID NO: 151951 - protein, 262 aa, unidentified
MTVVTVGIDLAKNVFAVHGVNAAGKAVLVKPLVRRAKLLELIATLPACLIGIEACTGAHYWAREFQKMGHTVRIMAPQLVSPYRMGGRHGKNDAADAAAICEAVTRPNMRFVPIKSVEQQGQLFVHRAHQGYVSERTALINRIRGLLSELGIVLPQAFKAFLSGVAQVLEDLPGYCNQVIGDLLNELYHIEEKIKNSEKLIQQLARDNSAAQLLMQFRGIGPMTATAIVASIGNGHDFKNGRQFSAWLGLTPRQQSSGGKHG

SEQ ID NO: 151952 - protein, 390 aa, unidentified
MRALCPRPDEHAAIRTDLKAIFVSLELSHSTWVITSLAPGGGEKMSKHAVPSGDIAALLARLSQLKEKARARTGQVFPIIVIQEAGLDGFWIHRVLQTEGIESYVVDPASIATSRRRRRAKTDRIDGEALVRALLAYKRGEPRVCAMVKAPTPHEEDRRRISRERETLTAERVQHVNRIKGLLFAQGIGDYEPLHRNRRERLEELITGDGRPLPECLKAQIRRELDRLELVIEQVKAVEAERDALLAHAQASPGVPAPATQLLALKGIGPEAAATLWSEGLFRTFSNRKQVAAYAGLAPTPWQSGSVHRDQGVSKAGNPRLRTTMIQIAWLWLRHQPQSALAVWYRERIKRKGGRLGKTMIVALARKLLVALWKYATAGVLIEGAILKQA

SEQ ID NO: 151953 - protein, 343 aa, unidentified
MKITRVGVDLAKKVFQVHGVDQAGRRVWQRQLKRSSWLSVLTEAVEPGCEIGMEACGGAHHWARELKSRGFEVKLISPQFVKPYLKSLKNDVNDAEAICEAMGRHHMRFVAVKTVEQQDIQAMHRVREGLMNHRKAKANQIRGLVAEYGLVAPRQMAPLRKAIPCWLEDAENGLRPAFRVLLHGLWQDLQSLDVRLKVLDKEIFALSENHADAKRLKQLRGIGPLIATAMVAQFGDGRHFKRGRQASASVGITPRHAGTGGKNYLFGITKKGNPYLRSILIHGARSVVSQAKHKDDRLSRWVTELARRKHPNVAAVALAIKTVRIAWAMLRNGTDYDPELAVA

SEQ ID NO: 151954 - protein, 344 aa, unidentified
MDYYVGLDVSLKSTHICVMDRDRQVVWRGSADTQPLMIAERLKRWKGHLAKVGLETGSLTPWLYHALKDLGFPIICMDARRAADALKARPEKTDKADAQALAEMLASGWYSPVHVKTMESHRLKALLGAREQLVNVKRQLYGQVRGLLRPFGIKISARAGGKRFDEEVRSSCNQHDALYICIAALLDTLARVEVELAGLDKKVRQITAASKPCWHLMSVPGVGPLISLAFVATVEDPQRFGTSRSIGSYIGLTPRRYQSGDRDVTGSISRQGDEMLRHYLYEAAGCLLTTVTASSALRSWGLRLAKRLGPKRERTAVARKLAVLLLGLWKREDHFRAEPGAKGL

SEQ ID NO: 151955 - protein, 413 aa, unidentified
MDVIHARCAGIDISKKDAKVCVRIAGDNKRDKAQETVTTWSSMTNQILALREHLAQRQVTCVVMEATGDYWKPFYYLLEDLPGVDVMLVNARHVKTLPGRKTDVADATWLAQLGAHGLVRGSFVPPEPVRELRDLTRTRTAITRERSREVQRLEKLLEDAGIKLSSVATDIMGVSGRAMLQALIEGQREPVVLADLAKRRLRNKTPELVEALTGRFREHHAFLARMHLDLIDRHTAAINQLTERIEVVIEPFRGFRDLICTIPGISTLVADVITAETGADMTRFPTAGHLASWAGVCPGHHESAGRIKSTKTRPGNPYLKGALGTAAMAAGRSKDTYLGARYRRLAARRGKSKAIVAIEHTILIVIWNMAHTGALYDDPGADYYTSIQPQRTKRRAISQLEAMGYHVTLDRTG

SEQ ID NO: 151956 - protein, 311 aa, unidentified
MQDTIGIDVSKGTLDLHRRADGANVQLGNDTLGFKRLLKWTGPSAAALIVFEATGACHRSLEKFLNLHRLPYVKVNPKQARRFAQAVGKLAKTDRVDAEMLARMGSALDLQAQEQPHESLHDLKELLTARRALIKDQTAAKSRLATATVPLLRRQIKRRLAQIARDIAQLDIGMREQADKDEAIAERMDILASIPGVGRLTAITMLVDMPELGTLEAKQVAALAGLAPITRQSGKWQGTARIQGGRPWIRRALYMPALVAVRFNPDLKAKYTQFIDAGKPPKLALTAIMRKLLVMANTLLRDHRMWSEVQP

SEQ ID NO: 151957 - protein, 362 aa, unidentified
MTAQPIVAHSYPFVVGVDTHARNHVYAIINTSNGALLDTQPFPVTSAGINRAINWVSRRTDGNADTLWVIEGAATYGAILASTVAAHGFPVAEAPRMSKKQNRGVGKSDALDAHRMAMASLPLPVDKLRRPRLNEGIRQGLRILVAARSSMTKDRTRAVNALNALVRSNELGIDARKKLTGTQISEVSRWRDREEELSLRIARSEAVRLAQHVMGLDQQLAANEQRLDELVKVSEAAPLMGESGFKAITVAKCFVAWSHEGRVRNEAAFACLAGVNPIPASSGNTTRYRLNRGGDRSLNAALHLAAVTRMTYDEETRIYVEKRRAEGKTDREIRRCIKRYLVRRIFKIFSASAMVEDALVAA

SEQ ID NO: 151958 - protein, 352 aa, unidentified
MRHLKRQKVTGEDLFVGIDLHKARWHVTIRSADVELFCGSIPGQWEALWRLLDRYEGNRIQAVYEAGCFGFWLYDQLVEHGVECLVTPPSLVPQEYGNRVKTDRRDSRKLSSLLAKGLLKHVWVPSQEERYHRQVVRRRRQLVRDRVRTQNRIKSELQFYGISLPAPKGRWTHIYFNNLTRIRFGNRWMQHSFNRLLEQYELLGKLIDKQTKVLQDLAKTESYRKRVEILTSIPGIGVITAMEILLELQDVARFRRADQLAAYVGLTPSQYTSADKVRMGRITGIGKDSVRTTLVESSWWLIRKDKAMRAKYEKIKARAGAKRAIVAVARILILRIRRMILDGQGYTFSEAC

SEQ ID NO: 151959 - protein, 450 aa, unidentified
MSPLALDVVTKTDKTPVLGRMLSKYVGRKTSSIENGITKARNHSRQRGNIMRVVFGIDVSKASSEVAILVNGEKVHGYTIPNDAIGFNRLLGDLKTVHQPEIVFEATGVYSRRLQAFFEDNSYTYTRLNPLESKKQLDSLRVRKTDKIDAEKLAMSQFILNRKPSYVQEALYQELRDLSRFYQNLTEDIVCAKNRLHKVLQITFPELENILSAPTGEQYWNLVITFPCNSFVLESDDATLTAIIRQSTAKRISEKRVTYLVDKLTKLANQSYCAVKKTSPVIEEVKYYAGELLRLSEHRQGVVEEMVTLAQSLPEYEILLSIPGIAETTATSIIGELGDIRRFHSANQINAFIGIDLRHYESGNFLAKEHITKRGNPYTRKILFKCIHNIASASHTNPCHIADFYEKRKRQSQVTSTKPHTIASIHRLIRTMYYLITHNKLYDYTSIQNR

SEQ ID NO: 151960 - protein, 485 aa, unidentified
MQKHKSSTFERLSRGPLNRRERRNLQRRLLSDNPGLTIVHPNAAGIDVGNESHFAAVPPDRDPQPVREFGCWTADLIRLANWLKGCGIETVAVQATGVYWIPLYDTLVQHGLKVALVNAHHTRNVPGRKSDVQESQWLMKLHTYGLLRDSFHLQDQMESVRTIWRLRDRHVKEASQAVQHMQKALTKMNVQLANVISDISGVSGQAIIAAILKGERDPYKLADLKHERVRASREEVARSLEGNWREDVLFELQQAVDSYKFVHRLMQECDQQLQKYLATLPARNIACDSPSAVQTQAVVKKVKRVPKPRGNAPAFDLKTELRRIAGVDLTTIDGIDLMTAQTILSEVGPDLSAFPSENHFAAWLGLSPSKDISGGKVIGPSRRKVKNRVAMSLRMAATTLLNSKSYLGARYRHLRKRLPSYSAAVKAMARYLALLVYRLLTKGQAWVDQGAALFEKKSQHREIAILTTRAAAMGLKLVPVAGNPR

SEQ ID NO: 151961 - protein, 387 aa, unidentified
MGHVVIGMDPHKRSATIEIIDDRQKVLSGGRFGTDRDGYRAMLAAGRKFGDRIWAVEGCNGIGRHIAQRLVADGEPVVDVPAKLSARARVFSTGQGRKTDPAGAHSVALAGLHSPGLRVITADDAMVALRLLADRRDELGVARSQTVNRLHRLLLELLPGGAKKFLSAAQAKDLLATVRPRDIAGKTRRRLAAEMVTELTRIDKRIKTADTELKELVTATGSSLLQLHGIGPSGAARLLGDVGDIARFADKGRFASWNGTAPLDASSGDQVRHRLSRAGNRRINRTLHIMAIVALRNDTEGRAYYRRKLAAGKTTMEALRCLKRRLSDVVYQQMRTDAKRLAAGPGGHTGASSQSSAADSHPGIGTSDKSLPGPATSKLRTRLPTAS

SEQ ID NO: 151962 - protein, 343 aa, unidentified
MEYYVGLDVSLKQTSICVVDQSGSVVREGVVDSDPEAISVYVRSKAPGAVRIGLETGPTSTWLWTELKRLGLPVICIDARHAKAVLKMQINKSDRNDAIGIARIMQTGWFKEVHVKDIDSHSVRALLASRALLVKIKRDLENHVRGLLKNLGLVIGRAKFNVFAVRAEELIEGRPELIAAIRPLLEARTAVEQQVSELDRKVMKLARHDAQVRRFMTVPGVGPITALAFKATIDDPARFARSRSVGAYVGLTCRRHASGEVDWSGRISKCGDAMLRSYLFEAAGVLLTRVPKWSAVKAWGVKLVKRNGLRKAKVAVARKLAVILHRMWIDGTEFNWSKKEIAA

SEQ ID NO: 151963 - protein, 428 aa, unidentified
MTYRVAAIDVHKKMLAVVVADVAGEGEYQFERRKFGTTPEQLELLTRWLIQEEVEEVVMESTAEYWRPVWGALEQHWKPERQKREGATKMSGALHLCQAKSNRGRRGRKSDYADGERMVKRLVAQELVLSFVPDPEQRLWRTVTRRKYQLTRDKVRFQNQLESLLEQAYIKLSSLVSDLLGLSARRMLQALAEGETDPAALAALADHRLRATPAQLRDALGACAHLHPVYRRLLKMALEELKLLEDQIAKLDGEAAELLQGHQDALQRLAEVPGLGVSSAVQIIAEIGPEVAAFESAKELSSWVGVCPGSNETAGEAHSTTSPKGNQNMRRLLNQAAQAAVKVKGSIFEITFRKFLSSGMKYKEAIWAIAHRLCRLIWLLLRRKTHYEERGPAVSAKSKRTRTARMIKELRKLGYRVEGGAIPAGIQA

SEQ ID NO: 151964 - protein, 357 aa, unidentified
MEASPRPPGARKPETELGAVSTIAVPHPDSRSGPSPHLQGRVMDEQRTVFVGIDVSKDRLDVHLRPSGEAFFVSREGKGMDDLVIRLQGLSVALVVLEATGGFEATVAAALAGVGLPLCVVNPRQIRDFARAMGRLAKTDTLDAEVIALFAERVRPQARPLREPERVHLAELVGRRRQIIEMIGMETNRGRQAIDKPLARRLARHVAYLQKELDAIDHDIGEAIKHSPAWREAEALLKSVPCIGDVTARTLLAELPELGTVSRHQVAALVGVAPINRDSGLMRGRRAIAGGRTSVRAVLYMAALTAIRRRSPFRAFYDQLTARGRPKKVALVAMMRKLLTILNAILRDHTPWRPLNA

SEQ ID NO: 151965 - protein, 355 aa, unidentified
MSQNLDVSPAAIGIDIGKNSFHIVGQNQRGAIVLRQKWSRGQVEARLANLPPCRIGMEACVGAHHLSRTLKALGHDARLMPAKYVRPYSKGQKNDYRDAEAIAEAVQRPTMKFVATKTADQLDLQALHRVRERFVGQRTGIINQIRAFMLERGIAVRQGLRFLRAELPSILATRTDALSPRMLRILEDLSADWRRLDARIEDLSSEIEALARQDKGCERLMTVPGIGPIISSAMVAAIGTGDAFSKGRDFGAWLGLVPKQLSTGDRTILGSISKRGNRYLRSLFVQAAWVVLVKIGPKHWDRYGLKSWIEAARKRLHHNVLAIALANKLARIAWAVLHRGRAFECVKTNEAYRPA

SEQ ID NO: 151966 - protein, 321 aa, unidentified
MMFIGIDISKEKIDLSWLRDQLTNKIKTKVFKNKHQDFEKIEKWLLNTTKSVASELVITLEPTGVYHEALMYFLHEQGFNIILANTGKAKKYADALNIIHKTDKSDATMLAHYGCAKHAVVDYWQPEALEVRELKALIRRLDALESNRQREANRLEASEFSNVSARVRQSIKVTIAFLDDEIKQLKSDIDDHIDNEPGLKRNRKLLESIPGIGHVLSRELTYLFAAKKFNKAKEAAAYCGLIPRHNESGKLKGRTTISKLGPARIRCKLYMAAIVAGQWNKRIKRHKLTLINNGKTPMQAVCKYAEAHSYMFWCNKKPRRV

SEQ ID NO: 151967 - protein, 394 aa, unidentified
MHVKADRPEAPSAIRSDLGAIFVSLELSRSTWLITSLSPGGGEKMSKHSVPAGDIGALLARFSEIRQKALARTGKSFPIIVIQEAGLDGFWIHRVLQKEGIESHVVDPASIATSRRRRRAKTDRIDGEALLRALLAYKRGEPRVCAMVKAPTPEEEDRRRLCRERKTLIAERVRHVNRIKGLLFCQGVSGYEPLRRNRRQWLGELKTGDGRALPDHLKAQISRELDRLELLLEQIKAVETERDALFAVAKAAAATPTPAPAPVTMLLDIKGIGPEFAAILWMEAFFRSFANRRQVAAYAGLAPTPWQSGSVDCEQGVSKAGNPRLRTTLIQLAWLWLRHQPQSALALWFKERVTRNGGRFKKTTIVALARKLLVALWKYVTAGVIIEGAVMKVA

SEQ ID NO: 151968 - protein, 311 aa, unidentified
MSTDYDGRQYVGIDLHRRRSVIVRMTPEGQQLGWSRIDNDPVALGLELAKAGPDPEVVLEATYGWYWAVDALQATGARVHLAHPLGVKGFAYRRVKNDVRDAADLCDLLRMGRLPEAYIASRGERELRELVRHRAKLVALRAGLKAQVHAVLAKQGLLPECSDLFGAAGMAWLRRAPLDLVYRQRVLSLLELIGTYDEEIELFRTMITNRFTGHRGYRVIQQISGIGPTFAAIFIAEIGDIHRFARPQKLTCWAGLTPRHRESDTTIRRGPITKMGCGGRRRRPMRPTVSNWGGCRVSGGWNRYSSIPVDI

SEQ ID NO: 151969 - protein, 376 aa, unidentified
MVFENNVEGFEKLLIQVHALRARHALDKLVFGLEPTGSYHKPLAEHLIKCGYMVVMVAGEGIKNNRKLLDGRWNSNDTKDAANVADLISQGKFLFYEYPAMALRELRNLLSLKKRFKRQEHGLRVRIRNNLIAQYFPELDKYYGSGEKQILSIVQWCLNPSVIAGLEYEQFRRMVAPQLRTAAQEKRIESIWRLAVASIGCDAGESLDFEGNMMVEALKQTREALRKITDKIEDICLELPEYSYLLTIPGFGPDVSSRVLAAIGNPFRFQNAHQVLKLGGLDLSAKRSGKSSDHAVPVISKKGKADLRYALYQAAMIASIRNRNFMAYFTDKLRGREREKGIKTKMRVKLEAKLLIIAWTLMKKMEPFDPSYLKTE

SEQ ID NO: 151970 - protein, 367 aa, unidentified
MKKVSTAVHKQGRNISQPTLTIGLDLGDRNSWYCVLDDAGQIELEQRVRTTAKALQEVFGRMPRSRIALEIGTQSPWISRLLRELGHEVIVANARKVRLIGESRKKDDRVDAQTLARLARIDPELLYPVKHRSAQAQADLMMIRARAGLVRARTALVNTGRSLTKSHGERLRGCNVRNMNPEKAEGLSPELQSALQPLLAEIESLSERIAEYNDRIEALAEENYPQVKLLKQIKGVGTLIALTFLLTLEDPHRFAKSRDVGCYLGLQPGRRKSGESEPQLHISKEGDPYLRTLLVQGAQHILGPFGIDCDLRRWGLKLAERGGRNAKKRAIVATARKLAVLLHHLWVSGEVYEPLHKSGRPTVAVAA

SEQ ID NO: 151971 - protein, 363 aa, unidentified
MKNYIFVGCDSHEKTLVNKIAHNDGPLETKRFSARRAGRQKLIENLRERSRQAGGAQVVVAYEASSHGFILCDELRAAGFLCHVLAPTKIERSIKQKRNKNDDRDAERLLDIVRGHYLAATKMPAVWVADPQTRDDREPVRARQDLSEKQTTVKTQVQMLLKRQGIEKPEGVGTSWTKRYRLWLEALSGEGPAIQSGMRQTLKSLLRQLQFLEHEIEQMDQAMRELANTPRRKPIVDELMKEKGVGLATAMKYVTDIGDFKRFSRGRQIGAFFGLVPSTAESGENNDRKGHITREGSPSARKVLCQATWSRVQHDKQERDVYRRLVARNPKKKKIALVACMRRLAVRLWHIGFQAQLKMEAAG

SEQ ID NO: 151972 - protein, 331 aa, unidentified
MYVGVDYHKRYTVATQMDLQGVILNQVRLKNDPDSLRTFASSLPPGSKIALEATEGWYYFYEMLESYCPEIYLAHPLKTRAIAEARIKTDKIDSTILAHLLRANLLPTSYIPPREIRDIREILRYRASLVSLRTAIKNKVHAILSKNGVVMTYSDVTGKKALRSLDLLPLRACYREELQGYLQCIETLKRLIAEVSETIKRLAEESPQAKLLITIPGISYYSSLLIISEIGDIGRFPSARKLCSYAGLVPRVHSSGGKTRYGSITKQGSKWLRWILVELSHHFIKGSPRLKCLYARIARSHGRNTARVAVAREMLKIMYVMLRDNRAFVIK

SEQ ID NO: 151973 - protein, 317 aa, unidentified
MAEVTFPQLIQRACGIDVHLKVVVATIDGAGIQRETRSFKTFTSSLNELKEWLLSNGVTHVGMESTGVYLKPVYKVLEDSIPNVWIVNARHIKNVPGHKTDKMDSEWICKLLLAGLLKPSYIPPKEQRQLRDLTRYRNKLIQQIASEKNRMMRILEDCNIKLSSVVSNTSGTTATSLIDMLCEGKVLTLDDINSVYHGKLSASPEELLEACTGFVEEHHIYLLQMIRKDIDQTQTLVDDLSERIKRLLSKYENVLELLREIPGFSTKVVEDLVSEIGLDMSHFPSEKHLSSWAGLSPGNNESAGKKKAHESLTETNR

SEQ ID NO: 151974 - protein, 350 aa, unidentified
MTRYVVVDVGKARCRAALMDQKGKIEQEFFFENTPKGIQHLTSLLTSEDRVVMESTANLWLSLYDALDSKNVKVVLANPMKTKAIASARVKTDKVDAKILAHLLRADLIAESYVPPRQLRDMRGLVRHRLSLTKMRTMVKNKIHALIDKYGYHCEFSDMFGVSGLMWVKTLEMSALDRLVLENHLSHIESVDLQLGRVDEAILESACEDEDVRLLMSLPGVAVHTALLLKSEIGRIDRFLDYKHLVSWAGMAPRVHQSGNVLWNGSITKCGSGILRWAIIQSARTAVRCDEKFGEFYRRVAARRGDQKAIVAVANRMLKVVWVMLVRREVYGGVNRVRYERKLNRAGFDM

SEQ ID NO: 151975 - protein, 457 aa, unidentified
MPQPKRSRSRTGLSAVHPAAAAIDIGATMHVAAVGPDRDTEPVRTFQTFTDDLHRLADWFARCGVKTVAMESTGVYWIPVFEILEQRGFEVMVVNARDAKHVPGRKTDVSDAEWLQRLHEYGLLRPSFRPQAEIAGLRAYLRQRERLLDYAAAHIQHMQKALMQMNLQLHHVVSDITGVTGMNIIRAIVAGERDPNVLASHRERGCHASVETICQALVGNYREEHVFALSQAIELYDVYQTKVAACDRQIEVILKRLKKSATPPASKLLPPKHRSRQPNAPSFDARAALHAILGVDLTQIHGLGPYLALKLVGECGTNLTAWPTAKHFTSWLGLAPHNKISGGKVLSSKTRRTSNRAASLLRLAAVSVGRTDTALGAFYRRLAARAGKAKAITATARKIAVLFYNTLRHGMSYADPGATYYEERYRQRVLGNLQRRAKSLGYVLHQAERDPVQTVVS

SEQ ID NO: 151976 - protein, 344 aa, unidentified
MNIETLGIDVGKNVFHAVGLGATGQVVLRRQFTRSALMRFMGKLVPCAVGMEACGGAQHLGRRFERFGHTVRLMAAQFVKPYCKSNKSDFNDAEAIAEAMTRPTMRFVTLKTVEQQDLQALHRARSLLMGQRNAQINQLRAFLLERGLAIPRGVAALRRLLPEVLEDADNELSDRLRALVAQLWQQVSELEARITTLNAEIEAIAAADGACQRLLSIPGIGVLTATALVAAVGDAKQFRCGRELAAFLGLVPRQYSTGGKPRLLGISKRGNTYLRMLLIHGARALLRGADKRSDRLGPWLRELKARRPANVTAVALANKLARIAWAVLVHGEDYRPSLSLAEPA

SEQ ID NO: 151977 - protein, 343 aa, unidentified
MEYYAGIDVSLKESSVCVVDATGKLVREAKVGSEPECLVGYFAQLEFPVERIGLEAGPLSQWLYAALAAAGHEVVLLETRHVKAALSAMTVKTDRKDARGIAQLLRMGWYCPVHAKSLPAQDTRALLVGRKLLQSKLLDVELSIRGILRGYGLKVGEVSRGRFEVRIRELIAGHATLSTVIDAMLTARAVLWSEFTKLHREMLRIARADKVCQRLMSAPGVGALVALTYRSAVDDPARFQKSSTVGAYFGLTPKKYQSGETDRDGGVSKIGDAMVRTALFESAHIMLTRATRFSSLKRWALDVARRRGMKRAKVALARKLGVVLHRMWVDATDFRWSASPMAA

SEQ ID NO: 151978 - protein, 346 aa, unidentified
MMHAGLDLSRRRLEVQLVNEQGEPVERLAAVPTVDGLRDLAARVARHQESVRAVIESMTGARFIHDQLELLGWDVAIADAVKAKGLAPLTCKTDRIDAWVLAQLSRLNLVPEIWLPDPAIRADRERARWRLHLVRHRTALKNRIHQTLISFGHACPVSDLFGARGRELLRGLALPEPWQGAVIASLQLIDHLDRQIDACEAELHSLGEEQPYVSLLRTVPGIGWVLAYTIAGEIGDISRFASPAKLVSYTGLCPSVRQSGDRDYRGPLTKQGPKYLRWALIEAAQHAAMSSRYRDRYQAIKRRLGCQRGTNVATVAVARELAKAIWYMLIRNQPFAPRGANVSVAA

SEQ ID NO: 151979 - protein, 352 aa, unidentified
MPAATAQNAIAVVGIDIGKNSFHIVALDDRGAIVLRQKWSRSQMDARFANMPPCLIGMEACVGAHHLSRKLKAFGHDARLMPAKYVRPYSKGQKNDFRDAEAIAEAVQRPTMKFVTTKTADQLDLQALHRVRERLVSQRTGIINQIRAFLLERGIAVRQGQRFLRTELPRILTTPPDVLSPRMAHVIEGLTEDWRRLDQRITELSNEIEDLAKRDPACVRLMSVPGIGPIISSAMVAAIGTGDGFSKGRDFAAWLGLVPKQISTGDRTILGSISKRGNRYLRVLFVQAAWVTLVKVSPNRWEGHGLKPWIEAAKKRLHHNVLAIALANKLARIAWSVLARGRGFEANKLQAV

SEQ ID NO: 151980 - protein, 426 aa, unidentified
MFVESGDDELVIERVAALDIGKAEVVCCVRLPKPEGGKGRVQEVSTHSTMVPSLCDLANRLVGLGVTRVVMEATSDYWRPPFYLFEAHGLDPWLVNARDVKHLPGRPKTDKLDAVWLCKVAEKGMLRASFVPPADIRRLRDLTRYRVDLVGVRTAEKNRVEKLLEDACLKLSVVASDIFGVSGRAMMNALINGERDPHVLAAMAKTALRRKIPQLQEAFAGLRLGTFDDHHRFLLARMLARIDAVSVDIAAVEVEIGEHLAPFADAAARLDEIPGIGPAAAAAIIAEIGVDMSRFPSPGHLASWAKFAPGINSSAGKTKGNGSTGHGNAYLARALGEAAICASRTDTFLGERYRRIARRRGKKKAIVAVGRSILVIIWHLLSEPDTRFCDLGSDHYDRHVNTTAKRRNHIHQLEALGYKVTLEPAA

SEQ ID NO: 151981 - protein, 380 aa, unidentified
MDTTARRNECNAEEVLFVAVEMGWKQWKVGTTVALGQKPRMKTVSGGDVEAFLVELERAKYRFGLASTARVVSCYEAGRDGFWFHRFLEAKEIENVVVDPASVSVNRRRRRRKTDRLDAAKLLNHLMHWHQGQTKEWSVAHVPSVDDEDARQFHRELECLRKERTRSVNRIKGLLAAQGVRMRKVGHDFLQLLGEARLWDGSKVPPQLRSRLGREYDRMQLVQGQMNELESQRCEALKRVEDPRMDQIRQLRRLRSIGDKGSWLLVMEFFGWRQFRNGRHVGSLAGLTPTPFDSGGGVWEQGIDKAGNPRVRAMAIELAWCWLRFQPQSQLSLWFEERFGAGSKRSRRVGIVALARKLLIALWRYLETGVVPEGALLKST

SEQ ID NO: 151982 - protein, 364 aa, unidentified
MPKMIWLGMDVHAASITVARYEDQAATAMVQTIANDPAQVRRLVRRLPAGCDVRACYEAGSCGYGLHRQLTALGVHCDVIAPALIPRRPGERIKTDRRDAEKLGRFYRCGELTTITVPTPSQEAVRDLVRAREDVRRDRTAARQRLAKFLLRHGHRYPGSHWTKRHWEWVCGRPVDGAARTVFVHYCDHVLALNERLAHLEREIRTLAASPAYQPVVTRLSCLRGLATLSALMLIAELYDLRRFRTPRELMAYLGLVPSEHSSGARERRGRITKTGNALARRLLIEAAWAYRHPARQTRRVHQALTTQPPAVHAISDRALHRLTARYRRLLPRQDPPSRRDGHRPRALRLRLGHRPRARPRLAS

SEQ ID NO: 151983 - protein, 416 aa, unidentified
MAIKRLIERCAGLDVHKKSVTACVRVPGPGAGERTSETRTFSTTTAGLLVLRDWLTSFGVTVVGMESTGVLWKPVFYLLEDDFDCWLLNAQHLRNVPGRKTDVKDAAWIAELVEYGLVRPSFVPPKPIRQLRDLTRYRKAVIEEHTREAQRLHAVLQDAGIKLSSVATDILGRSGRDMLEALMGGTHDPQVLAELARGRMRPKIAALREALEGRFSAHHALLVAEMLARLDHADETIARLSAELERAMAPLAEQVELLRTIPGVDRRVAEVIVAETGGDMARFPSPEHLASWAGVAPGNNESAGKHRPSRTRKGDKWLRKTLTEAAWGAARTKDTYLAAQFARLKGRRGPTKANVAVAHSILVIAYYVLERGEPYSDLGADYFLHRQSSDAYKARLVHQLERMGLKVTLEPVEPAA

SEQ ID NO: 151984 - protein, 366 aa, unidentified
MKKISTVATNRNEIFKEHKLTIGLDLGDRSSHYCILDEAGEVILEHSLPTTPKGIHQVFDGIPRSRIALETGTHSPWVSRQLTQMSHEVIVAHARNVRLIGESSRKDDQLDARTLARLARIDPSLLGPVQHRSAKAQIHLTVIRARAGLVSARTALVNAARGLTKSYGERLRKCGTQQMNREMAKGLSQELRDALEPLFGEIESLNERIAEYDRRIEQIAKEVYPEVALLKQVKGVGTLIALTFVLTVDDPHRFQRSRDVGCFLGLRPGRRNSGMSQPQLHISKEGDRYLRTMMVQGAHYILGPFGQDSDLRRWGLRLAERGGKNAKKRAIVAVARKLAVLLHKLWVSGEVYEPLRNNPKVVGQVA

SEQ ID NO: 151985 - protein, 345 aa, unidentified
MIIGCDFHPSWQQIAWLDSETGETGEGKLVHASGDAKSFYARVPRPALIGMEATGNSQWFMEMVQDLGHEIWIGDAAQIRASYVRKQKTDKRDAAHILKLVVEGRFPRLWAPDGEQRDLRQLVLHRHKLVEIRSRVKNELQHLSMNKGMQRKHKLWSQAGQKLLRELPLKPWAACRREDLLGLLAMLNQQIGKLDEAVQQAAAEHPQARLLVTQPGVGPNTALAFVLTIGDVSRFPRGKQVASYLGLIPREESSGGRQKLGAITKQGNRLVRSLLVEAAQIAVRFDPGFRKQYLHRCHQKPKGVAKVAAARKLAVRLYWMLRTQKPYPEIVRIESSPRVALVGAS

SEQ ID NO: 151986 - protein, 335 aa, unidentified
MQIYGIDFAKDKFDVSFLAPTSKNVSNKPAHKVVRNNVSGVTKFIKTLPTDAVLVAEHTGVYGDLLLKHCTESHINIAYVGGYVIHTYKSAPDRAKTDMLDCAVLREFGERFADKLVYKTFPKKELYELKQLARHRTMLVEDRKRYVTANKGEDCRPYRSIQVKESMKRIMEILTEEIARTEKQMLDIIKAHEELSRNYDIITSVKGVGLVTAVELIVKTENFTTIKTARQYAAYAGTAPYEKSSGKMNKGAHISKIGNRRSKTLLYICAESARIHNKEIKLYYERRTIIDKKPHFYVLNAIVNKLLKIIFAIVAKGQMFDYGFVRKDPRVIKYN

SEQ ID NO: 151987 - protein, 351 aa, unidentified
MEHFAGLDVSVKQTSVCIVDGTGRLVREVRVASEPEALLPVLTNPLYRFKRIGLEAGPLSQWLFSALAEADLPVICVETRHMRAVLQAQINKTDRNDARGIAQMMRAGLYRPVHVKTLRSQKLRMLLTHRKLLQSKAIAIENDLRATLRNFGLKVGVVGTVKFEARIRELVETLPDLAELVEPLLIVRRTLREQIGILHGRLLAIVRHDDVCRRLMTVPGVGPVVALTYRATVDVPARFRNSKAVGAVFGLTPSRYQSGEVNRTGAISRCGDEMMRVMLYEAAHTMLLRLAKWSWLKAWAMKIARQRGIKKAVVALARRLAVILHRIWVDGTEFRWTEKPQQHESHADQTG

SEQ ID NO: 151988 - protein, 313 aa, unidentified
MKKTICGVDVSKAKLDVCIEPGHRFASFDNDAAGIAELAKFCRGNAAELVVMEASGGYERRAFVELWGHGISCALTNPRSVRRYAEAMGVLEKTDRIDASVIARFADAKNLAPTPLPSQAQQRLKALVARLRQVTGDLIVQKQRRSSVIDNAEMRASIDEIIALLKRQSRSLEGEIASMIDDDPLWAKLAGTWREMKGVAGRTVARLHAELPEIGTLSNKAIAKLAGLAPIADDSGKRKGKRSTRGGREGVRTILFLVAAGVARHDENLRNFRDRLVKAGKEKMVIRIALARKLLVVLNAKAREARAEYALAT

SEQ ID NO: 151989 - protein, 348 aa, unidentified
MAIVIGCDLHSCFQQVAVMDLETGELLKEQRLEHEGDEVRNFYQSWGEPVTVAIEATGYTLWFARLLQESGHRLVAGDAARLRAMEPRKQKTDRRDALLLATVYASGRYPVIWMPDEARRDLRHLLLHRHSLVRTRTRVKNHLHALAMNHGLCRKSALFAAAGRQRLEGIAMARFEGWRRAELLDSLDRLSDKVREADQELEKQLPAWPEAERLMSHPGVGLVTALAWVAFIGEAKRFPTSAQLCSYVGLIPSEASSGGRQRLGAISKQGNTFVRFLLVEAAQTAVRGDAELGRWYRRLAAAKGRPRAKVAVARKLAGRLYWMSVRSMGYSGLRTGGNMQASSRGPLA

SEQ ID NO: 151990 - protein, 466 aa, unidentified
MKHNGRRATGKPRVSPTVLERLNPHVAGIDCGAAAHYVAVPPDRDPQPVQRFSTFTTDLTRLADWLAACRVTSVAMEATGVYWIPVYEILEARGFEVLLVNARHLKNVPGRKSDVSDCEWIRELHSVGLLRASFRPTAEIVVLRAYLRHRQTLLETRSGHVLRMQKALVQMNVQLPLVVTDITGVTGLRILRDIVAGRHDPQQLATHRDHRCKASDAEIAAALTGNYRAEHLFVLQQHLALYDACETQLTACDAAIDAYVHVLTARVATPTTALPPPRVTKKARDNAPRFEMRAPLHQLTGGIDLSQIDGIAPYTALRVLAEIGTDMSRWPTEKHFTSWLTLAPKNKISGGRLLSSRTQPAANRAAATLRMAAMSLGRTDTALGAFYRRLAARIGKPQALTATARKLAILIYRALKGDLAYRDPGADAYHQQQRSRTLRRIRQRAASLGFNLVSRETGEVLHPLDA

SEQ ID NO: 151991 - protein, 410 aa, unidentified
MEVLHQRCAGLDVHKKTVVAAVRLVEGNKVITEVRTFATTTAGLLALADWLTQNGCTHVAMEATGVYWKPVWHVLSDGEIELVLANAAHVKNVPGRKTDVSDAVWLAELLAHGLIRASFVPDGQTQELRALLRTRKQLVRERSRHIQRIHKILEDANLKIDAELSDMLGKSGRAMLNAIVAGETDPVRLAALAHPNVKSPQAKLAEALRGRVTHHHRFLLQLHLQQIDGLDTALGTMDGEIEANLAPFRTAVEIVSTHPGLGKLSAQAIVSEIGTDMSRFATAGHLLSWTGLCPRNDESAGRRRSNRLRKGAQWLKTTMVQCAQAAKNKKGSYYQAQYLRLRSRRGPQKAICAVAASILTAIYHMLKNGTVYQDLGADHFNRRSKITQTQRLVKRLEHLGYAVEIQPLAA

SEQ ID NO: 151992 - protein, 344 aa, unidentified
MEIHTIGIDLGKTIFHLVGLNSRGEVVVRKKFSRLQLLRFTANRQVWLIGMEACGGSHFLGRALREQGHEVRLIPAQYVKPYVKTNKNDFIDAEAIAEAVGRPSMRFVPIKTDDQLDMQSLHRVRERWVTRRTAVVNQMRGLLLERGITLPKGRCHLEAALPMLLKDGDAKLSGVVRLLLAQLKLELEQLAERVEEADALIRHLAQESDVCRRLDAIPGIGPITATALIAAIGNGAAFRKGRDFAAWVGIVPREHSTGGKQKLLGISKRGNCYLRKLLVQGARAVLQFKEKQSSGLSTWLIQLASRTHYNVVGVALANKLARIAWAVLTTGKVYRPAVVASAPA

SEQ ID NO: 151993 - protein, 425 aa, unidentified
MNYKQNEKINQVKESTLVVGIDIGSTTQYARAFDWRGIELGKVFTFSNSREGFEAFKAWMQHLQDKYIKSDVIVGIEPTGHYWFDLGAYLEDEGILLVMVNPYAVKQTKELDDNSQSKNDRKDPKVIAKLVTEGRYSAPYTPDGVYADLRIMVANRKRLIREMTQIKNRFARWFAIYFPEYTDVFGDYEAQSSMLLLKKVCTPEAIVELGAEKINQIWRDAKLRAVGMKRATTLCETAKRSIGLKKGSSAARYEMKLLLEDYEYKKAQLDAVMEEIEKLCRKIPESEQMLAIKGIGVITVAGFLAEVGDVRRFESPRQIQKLAGLSLRENSSGKHKGQTTISKRGRSKLRAVLFNAAIPLIAKNPEFKSLHEYYTTRANNPLKKKQSVIAISCKLIRVFYAILANGVTYDPQKMLSDIHRQPQAA

SEQ ID NO: 151994 - protein, 411 aa, unidentified
MDVFCGIDWAEDHHDVALVDAGGQVLARLRITDDAAGLAALLELLAAHGDSPEDPVPAAIETPRGLLVACLRATGRPVYPVNPMAVARYRDRHSVAGRKSDKGDSAVLANVLRTDLHAHRPLPADSELAQAVAVLARAQQDAVWERVHAQNKLRSHLREYFPGFLAAFGSARGGITRPEARAVLAAAPTPADAGRLTRARLAGLLRKAGRQRGIETEAARLHAAFGREQMRQLPLVEQAMGRQALALLRQLDAACQSADDLEQAATESFSQHPDAGIITSFPGIGALTGARVLAEIGDDRSRFKDARGLKAYAGAAPITRASGKSRSVTQRKVKNNRLAAAGYTWAFAALTASPGARAHYDRRRDAGDRHTAAQRNLFNRLLGCLWHCLQTSRHYDEATAFPTRQATPQAA

SEQ ID NO: 151995 - protein, 377 aa, unidentified
MDKDSRFVGLDVHAETIAVGVAEPGGEVRSLGTIPNTPEAVRRLVKKLGPPETLRVCYEAGPTGYVLYRQLSALGVPCAVIAPTLVPVKAGDRVKTDRRDAEKLARSYRSGDLTPVWVPDPGHEALRDLVRAREAAKKDQLRARHRLGKFLLRQGRRAPTGSKAWGVKHRAWLQTIRFAHAAQDATLLDYLTEIDHAADRIARLERAIATAADLTPAPVRAVIAGLQALRGIAKLSAVSIVTEVGALSRFAKPRQLMGYSGAVASEHSSGPHRRRGGITKTGNAHLRRIVIEAAWAYRHRPAIGGTLRTRQEGLSEEVKALAWKAQHRLHGRYVRLIAKGKAPTQVVTAIGRELLGFIWAIGVHIEQHTAGGAPAAA

SEQ ID NO: 151996 - protein, 387 aa, unidentified
MPKPADLNRCLAPLDQDHTIIAVIEMSQSSWLVAGIVPGIARQPLKKLAPDQDALLKLLHRWRAEAGQAGREISRIAVAFEAGRDGFWLARWLRAHGIEAHVIHPTSVAVSREHRRAKTDRLDTALLKRVFLGWLRGEPEHCHMAAIPTLEDEDARRPTRERECLVGERTRIVNRIKAALVRLGVRGFKPTVRNALEHLDALRTPEGTALPPNTRAELHRDMARLHFVTEQIQQIEAARGERLEQAGAKEPNAMVRLLAQVVGVGIETADMLVHEVLSRNLRDRRAVARYAGLTGSPDESGSRRREKGLAKAGNARVRRGMIQLAWRFLLHQKESALAQWYRARTADARGSTRKTLIVALARKLLIALWRMVTTGEAPTGVVLRPAA

SEQ ID NO: 151997 - protein, 341 aa, unidentified
MLYAGIDIHKTVFQAVVLDPDTGELSESRFAPSRERLGEWAGAWEGKLAAVAIESTTGWRWVARELEQRGFEVHLVDPGRASALRGRRRRPKTDKLDARWLALVLARQLLSECEAWMPPAEIQLLRDQTRLRKSLVDNRTGWAQRLHALLAHEGWPCSRGRLLTAEGRRWVIALQLDPCVRAQVDVMLTLIVALDEQLKVVETELRRFARSDARCQALETIFGVGPIFACHLLAEIGDARRFKRSRQVVRASGLDPAVIESADSKRRGRLAKQGSPYLRWALVEAATHSSRTTSPDHDLYASTAQRCGRGRARLTVARKIARRSYHLLSAVEAATRETQKA

SEQ ID NO: 151998 - protein, 350 aa, unidentified
MNTVAQFYIGVDLHKTLVQVCVVDDGGSVVGERRFSVRTLGESHDLFTYLRPYRTDGRIAVEAIGVNRWFVNALRDGGYEVVVCDPTKLNLKMLGRKTDRRDAQDIARRLYLGDIDRKATTWYADDETYGRRKVLRARHAQIEQRQQVINQIRALLNAYKITGFASDLTSKRMIARLSALELVTEDLTAVLQSWVSIMTHLGDSISLLDRQLREMIRGSQAEALQRQLRYVGPVTASVLVNELGDVRRFKNSRAVAAYAGLVPRVNQSADTAHHGRLTKRGNRELRHVLGEWAVRLMSCDPTVIAWAKPRLRRSHKNKVRMALARRLLIGVYRTLLTGEAFAMDRCLGLT

SEQ ID NO: 151999 - protein, 354 aa, unidentified
MLAELVDHVIGIDPDRDWITAAVVDARTTGVVATERFPADSVGYDEALCWVDEFTVAGERAWAVEGTASYGRGLTAALARGGEWVIEFDRPREKATKDGAKSDELDAMRAAREVLGRDRLHVPRTHDGHREALRVHTVTRAGVVRARTAATNELKALVLTAPEDLRCELRDLTTKALVKRCAGFRDTPQRPIAERCARNAMRSIARRIRQLTDEIAVHDTAMKQLVGEAAPQLTAEPGIGHVTAAMFYIAWSHPGRCRNEAAFARLAGVAPIPTTSGQSQDRHRLNRNGDRQLNSALYVVALARANHHEPTRAYRDKRRAEGKTDREIRRCLKRYIARRVWRLLEHSATPETAP

SEQ ID NO: 152000 - protein, 406 aa, unidentified
MAGLPRECLDVGVIVAIDPGKASHRVWVTDRDGLVSDPVSLPSSRVGIDGLERLVGGREAVFAIEATGALHRAWMAELERRRPGALRLFAPSETVAARAQLGTRRFKTDDRDCAALVWLTRQGAGRPAPDSGVDAMRAAVAHRRQLVLALTPLRQRLHDQLNALAPGLSAPPGHGRALGLETPTGRAVLACAAAFAGRPPSLRSLQARAGGRLTTATATFWVERWKPCLAPPPDAELRAARLARDVERFHALRHDIAFVDGQLELLLADSSGHVLASLPGVATVRAAAFAAHTLPIERWPTPEQLYSATGLAPASYESASVRRRGAIARTGLPEHRDALMGIAWGLGQHAAAFQRRRAELNARGKTGIAARVALARHACRLCWRLLDTQQPYDDRRYDRARRDRGR

SEQ ID NO: 152001 - protein, 376 aa, unidentified
MTQIAPHSATVHLAIELSRSAWLVAARLPGVEKPSLHRIEGGDTAALLALVETLRARAAARLGAPIRVACCFEAGRDGFWLHRLLTAEGLAAHVLEPTSILVSRRARRAKTDRLDALGMLRVLAAYLGGDRQVCSMVRVPTPEEEDAKRPHREREELVRERVRLENRIAALLATQGVRERPSLRSWERDLAALRTGDGRPLPPHLRAELDRLRRRLVLTLELIREVEAERDAALAAEPRDAVGRKIAALCRLRGVGANFAAVLTREVFYRAFANRRQLAGYVGLTPVPHQSGEADRDRRISRAGNARARTTLIQLAWLWPRYQPDSAPARWFRDRVGTLRGRTRRIAIVAMARKLLIVLWRYAETGLVPEGVEVAA

SEQ ID NO: 152002 - protein, 315 aa, unidentified
MDVTHSGSRFVGIDVGKAHIDVHVRPSGEAFRLTRDPAGLAELVARLNPLTPALIVLEATGGFERVVTAALCGVGLPVAVVNPRQIRDFARATGRLAKTDRVDPKVIAHFADAVRPDQRPQPDAAARELADLITRRRQVVAMISSETMRSHQARLPAVRRRLAAHLDWLNQELRELDADLDTAVRANPAWQERATLLVSVPGVGDATTRTLLAELPELGTLGRRQIAALAGLAPVAHDSGQHRGTRHIRGGRGTVRAALYMAAWIGSRWNPTLKDIYQRLRAAGKPRKVALVACMRRLLTILNAMIRDKTPWRAA

SEQ ID NO: 152003 - protein, 384 aa, unidentified
MVGTYVGIDAHKNMCHATVMSRDGYIVSEKIFSTNVKVLEAWARTHPKDYVYAIEAGTPTKRLYWALKEMGREVHMAHPTEVRRMMGTKKKTDREDSAFLADLLRMGRLPEAYIPDPEKDEERQLLRYRMDLGKKTHVVKNQVHAILTSAGIPTSDFSDLFGEGGSEYLRSVRLHGHQQYILDGHLKQLALLAAQIDEVERALAKIAQKNPSARTLMQMKGISFYSALVILNEIGDVTRFPTAKHLTSYAGLVPRVYQSGNVARTGHIHKQGPKALRWIMVQCANSSVKGPGKFQSIYKRLKKRIGHQKAITAVARRMLAVIFVLLTRGCEYEERDDRNVHVKMRKMERIAKALPGVDMDKTFVGLPENARQLLRGERSITNAG

SEQ ID NO: 152004 - protein, 346 aa, unidentified
MEQIIRIGMDTSKHFFQLHGVDAAERPVLRRRLRRGEVLAFFAKQPPTVVGMEACAASHYWARELCKLGHEVKLIAPQHVKAYIKRNKNDGRDAEGLCEAMSRPTMQFVPVKTEEQQAALMLMGGRQQLMTRRTQLSNAIRGYAAEFGLITAKGLDKLEPLLARIAQDESLPALAREMFAVHGREYARLQVDLKAIDARLMAWYRANPDSWRLAKIPGVGPIGATALVMKAPDPRLFPSGRHFAAWIGLTPKDHSTAGKTRIGKITRAGDEMLRSVLVAGATSVIQQAKKGRGRPSPWLVALLARKSPKLAAVALANKTARIAWKLLTTGESYDGTRMPVASALAA

SEQ ID NO: 152005 - protein, 334 aa, unidentified
MLNLNEATFIGVDSHTTEHTALAINRFEEEKGHIRFENSKNGIINFLSWINEINADSKNVVLGVEGGGWEKNILFRRLALKYDEVYEVNPLFTKQRRSFGTKKDKSDKLDAKLIAKVLTKKLNQLPKIHPESLDIDRLLLKKHVWYWEHLVKEGTRIKNQLKALERERSLAEEKEHIKGLDLIIRLKRRELKGIKKYKAILKAKLEDFVGKLGGNLISMPGISTIQAAKIIGFTGPIARFKKADSFCKYAGVVPSERSSGKTIRRIKASTGNRHLNSTFYILALNQIRWDKKAKAYFDKKVSEGKTKKHAIRCLMKRLACITYGMMKSKEDYRN

SEQ ID NO: 152006 - protein, 409 aa, unidentified
MRLFVGLDVSSFDIKTCILNGEGEKLDSFSVNNDLPGAIALKERLLQRIANQKVEIFKIGLESTSVYSFHPSMFLHYDKELQSFGAKVFLMNPKQITNFKKSYSDMNKTDEIDAFVIADYLRFGRNQMSIVKESQYVALQQLTRSRYQLVRMLTKEKQHFLQHLSYKCNTFSQEVDSSIFGNAMMELFLEKFSLEELADMPLNELSEFLQAKGKNRFGDPKCVASTIQKAVRSSYRLDKVVEDSIDVLLGTSIAVIRTYQQQIKEIEKSIKQIMAGLPQTLESIPGVGPVFAAGIIAEIGQIERFDDETKIAKYAGLYWRKHQSGRFTAENTSLSRNGNHYLRYYLVEAANSVRKYVSDYQEYYVKKYNEVPKHQHKRALVLTARKLVRLVDALLRSHQLFTPERCVKV

SEQ ID NO: 152007 - protein, 421 aa, unidentified
MNIVQSEFVAFIGIDWADRKHDLCLQVADSGARERSLVEHSPKTLHAWADELRKRFNGAKIAVCVELAKGPIVSALLEHEFFVIFPVQPSFLAKYRRAFTPSRAKDDPTDAELALDLLLRYPERIQRLKPESPRMRMLRQLVETRRGLVEDRVRVTNRITANLKAYFPQVLELFREKDTGIFADFLERWPTIEAAKKARRSALEAFFRDHNVRNQATIDRRIAAIKDDQALTTDEAVIGPAKLFVELSLLQLKALCTAVARLDEEVDHCCAKLADYKLFAALPGAGPALAPRLLAAFGEQRERFPNAASFQKYVGVAPVTERSGNKCWVHWRYSCSTFLRQTFVEWVAQTITRSFWAKAYYEAYRARGGSHQAALRALAFKWIRILHRCWADRLPYDESKYLIALQKRQAPLLKHAIATIH

SEQ ID NO: 152008 - protein, 398 aa, unidentified
MILVGVDVASEKHDVSIMRDTGEVIRDIFTVPNKESGYKKLLDEIEKAEKLYPSDKVRIGLESTGVYSMSLTEFLATHYEDSVILINPILTSMFELSCHVHYAKTDKTDARGICRFLSKNEDIRPYAIVSYHTRQLRALYRERTRLNKRLNQDINRLKGQLHIAFPELLDKKHATIGLFELEFLSKYPTADSIRNMKPEKLVSAFSKVKYMRIDIARAGRLIEAAKTSIGCSALAEGFVIKETVERIKLYRKQINELSEAMVPLVKENHGNLLTIPGLGAVTVAGIVGEIGDVSNYHGSDCLVAMAGLNPKVYESGNYAASHTRISKRGSSYLRNALYMAAQSMYMHGAEPIYSFVNKKRKEGKRKVCALDHAARKLCNIIFSMMKTGSEFIPSSANS

SEQ ID NO: 152009 - protein, 309 aa, unidentified
MGTYVGIDVSKDRLDVHVLPQDEAFCVERNGKGLALLVERLKSFAPSLVAVEATGGFESTTAAAVAGAGLPLAVVNPAQVRHYAQALGKRAKTDPIDALVIARFAADVRPEPRALPDEMTQFLADLVARRRQIVEMLQAERQREKRATVKRLKKSIARLIAALEKELAELDRDIDDAVRSSPVWREKEDLLASVPGVGSKIAHALIAGLPELGTLDRKQVASLAGLAPYTRQSGTWKGKSRIGGGRKDVRTSIFMAALVGTRFNPLLKAFYQRLLAAGKPKMVALIATARKLLTILNAILRDKTPWQNA

SEQ ID NO: 152010 - protein, 352 aa, unidentified
MDRYIGLDAHSQTCTLAVMGTTGRRLREQVMETNGKLLVDFFKSIAGTKHLCFEEGTHSEWLYELLKPHVDEVVVIQPWRSGGQKSDSIDSWGMAERIRTGSIDCAVFKAPGIYSELRAAVRAHRALVGDLVRAKNRLKAIYRSRGLSGMGTEVYDPNERGKWIKKLPAHRRKLATILSSELDAVTNVHEEAEQWLLEEAARCSITKLLATAPGIGMIRAAQIIAIVVSPNRFRTRQQFWSYCGLGIVTRSSSDWTRDRRGNFVRRETALTRGLNRNRHPMLKAIFKGAAQNVESMTKHPLHADYQRMISAGMKPTLARITVARKIAAAVLAMWKNKEEYDPAKSQAKPHAA

SEQ ID NO: 152011 - protein, 345 aa, unidentified
MEHYAGIDVSLENASLCVVDATGRIVREAKVASEPEILIGWFHGLGLAVTRIGLEAGPLSQWLYAGMRDAGLTVELLETRHVRDAFKAMPVKTDRNDARGIAQLMRLGWFRPVHCKSLPAQEVRALLTARKLLQTKNHDVEMSLRGVLRGFGLKVGPTTPRNFPGRIRELVTGHATLSTVAEALLAARSTLFEQWQKLEKQLRSMAREDRRVRLLMTAPGVGSIVALTYASAIDDPGRFRSSKAVGAHFGLTPKKYQSGETDVTGRISKIGDGGVRTALYEAANVILTRPVKGSTLKSWGMRLAARTGMRKAKVALARKLAVVLHRMLADGTSFLANKAAAAVAR

SEQ ID NO: 152012 - protein, 371 aa, unidentified
MRADKKRSRKGCDMNSIVAGIDLGDRESLATVLSPVGDVTDRFSFPMNEEGYAFFSSRVPKDARVAFESTIMAYPIMRALKMHGYGDVTVAHPKTLAWIVKSKKKNDRVDSLKIAKLHMAGMLPESHLLDRDDQIARDLLVQRVKLGVEIGRLKSSVIGYLKREGLHSSLPKTRDNFSAARRQAIDSLRFHDERDLVLKTMMDRLRFLEDQCIPLENCIKENAKEKDDVKLLMSVPGVDYYLASLLSSFIGDVNRFPSDDHLASFFGIVPTSRDSADVKRRGRMTKDGSSIARWALSIMVDTVMRYNKPIRGHYLSVKKRTSSGKLAHVSTMRKLTRMLYHMLKTKQRWKWENPHLTERKMMRLEEGGDES

SEQ ID NO: 152013 - protein, 424 aa, unidentified
MCRVSRLLLTAKKTGESAMRVVGLDVHRSFAQVAFFENGTAKSGGRLPLEREKIVEFACAKLRTTDEVVLEATTNTTTIVKLLKQHVRRVVVANQIQVRAIAWAKVKTDKIDAAMLAKLHAAGFLPEVWCPDDETELLRRLVADRMQLVQHMTRLRNRIHAVLHAHLIPVYKGKLLSKAGRQWLAAQPLEPDQRRVVQRHLEEHDRIATELSVIERDLASRGLQDPRLKRMMTVGGVNIMVAVSLLAAIGDIARFSSPAKLVSYLGLNPRVRQSGDRPAYHGRITKHGRGQARAMLVEAAWSISKQPGPLRAFFNRIKSKRGGPIAATATARKLAVLIWHLLTKQEDYTWKRPALYEWKIRKLELAAGYPSERGGTKKGRASEYHLRSSRDRERKWIGMAEEEYRQFVNDWRTQPTRQSGSIKT

SEQ ID NO: 152014 - protein, 335 aa, unidentified
MDLLKTVFGIDVSSRKSNVCIMVNGQKVNDYAIFNDMVGFNRLLGDLKQVTKPQIIFEATGVYSRRLQAFLDMHELRYVMMNPLEAKRKTKDDLHQNKTDKLDALYLAKLQSEHPQRLAYVQNKEYQELMANNRIYEQASHDLITNKNRLHKAVQLTFPEIEHLLANPRGKNYWSIALRFPHPDIVLETKEADIIDFLKGLSGIGKKRANDITQNLIRLAKVACPAVKKNSAHIRGLKMAINNILSAEEECQTAMAKLAPKRDLEILTSIPGIGENTALRIISELGDIRRFNNPSQLNSFVGVDPQVYESGNLTAHLSISKRGTAIGRKVLYTWP

SEQ ID NO: 152015 - protein, 344 aa, unidentified
MGEVITIGLDIAKSVFQVHGVDEAGAVVIRKRISRAKMLGFFADLKPCLVGIEACPAAHHWGRELQALGHAVKLMPPSYVKAYLKRSKNDANDAAAICEAVTRPTMRFVPIKTKEQQAALMLHRARQLLVRQRTMLSNALRGHLAELGIVSAKGRNGTGALLEIIADAGDSRVPPAARGILEVLARQYCAIGAEIGSIDRSILAWHRSCEASRRLEEIPGIGPIVATALVAEIGDWKAFGSGRSLAAWIGLVPKQQSTGGKDKLGSITKQGNRYLRWLLVAGAMAVIRYAQKHGTLKRPWLGRLMARRPTKVAAVALANKIARMAWAITVHGDRYREPKPLLAA

SEQ ID NO: 152016 - protein, 338 aa, unidentified
MKLYAGIDLHSNNSMIAVIDEQDRVMFQKRLPNELERIVLALASFRQWLIGVVVESTYNWYWLVDGLMQAGYTLHLAHPAALVQYQGLKYSADEHDARWLAHLLRLGILHEGYIYPREARAVRDLMRRRMQLVQTRSAQVICMQTQFTRSTATSASSDALKRMLPEEIAPLLNEPNVASGIRANLEVVRTLNREIARLEREVLGQVRLAAQFEPLLSIAGIGRILALAIMLETGAIERFAKVGNFSSYARCVDSKRMSNDKKKGEGNSKCGNKYLAWAFVEAAHFAVRYNPRIKRFYERKAAKTNKIVATKAVAHKLARAAYHVMRERVPFDEARAFA

SEQ ID NO: 152017 - protein, 315 aa, unidentified
MDVLLKNCAGLDVHQKEIVACVIRETTDGHSLTEVRSFPTMTKDLYELLKWLEQCNVTHVALESTGIYWKPIFNIIEDYFDITLANAQRIKNVPGRKTDVADAEWIAKLLQHGLIEKSFVPPTDIRELRDLTRLRKKWVGNITAEKNRIQKTLECSNIKLGSVISDVFGVSGRKLLSKLVEQGYVDPKDVQDTIHFKMMPKAQQIVDSLFGTLNTHQIFLIRQSWNHIIFLEEQLEQLEKQISELLVPYKEQVDLLLTIPGVKENSVASIIAEIGIEMSQFPTAQHLASWAGLAPGNHESAGKKKALVQQKGIRI

SEQ ID NO: 152018 - protein, 425 aa, unidentified
MSAIQNTGSEAPLFAALVGIDWADEKHDICLLADGASQPEASVIASTPEAIQDWVQCIQQRFGNRPVAICLEQSRGALVFALMAHAFITLFPINPNQAAKYREAFAPSGAKDDPVDAKLLMDMLRLHREQLKPWKPDDVQTRKIRGLSEERRHAVNLRTNCAQRLAARLKAYFPQVISWFDDDLTSLMACDFLLRWPTVADAKKAKPAKLRAFFYGHNCRSEELIIRRLEAIAKAVPLTEDSGVVEPAVLTVQTLARVIRDMSCAISVFAQQLAQAFAVHPDAPIFDSFPGAGKVLGPRLLAAFGSDRERWTNPEDMQTFSGIAPVTERSGKSAWVHRRWKCPKFYLQTFFEYAQHSIPLSTWAGAYYQQEIAKGKGRNSIIRSLAFKWIRIQLACWQNRVPYDEARYLQALIKRGSPLAKLVAT

SEQ ID NO: 152019 - protein, 400 aa, unidentified
MSTAHERIWVGVDAGKGHHWAVAVGADGETLFSTKVINDEAQILTLIDTARERAAEVRWAVDISGRASTLLLALLIAHGQQVVYVPGRTVNRMTAAYKGEGKTDAKDARVIADQARMRRDFAPLDTPPELVSTLRVLTNYRADLIADRVRLINRLRDLLVGICPALERAFDYSAAKGPLVMLTEYQTPAALRRIGVKRLTTWLERRKVRGAADVAAKAVEAAQSQQIALAGEKRAAKLVCDLAHQLLALDERIKDNDREIRETFRLDERVEIIESLPGMGPILGAEFVAIVGDLSGYRDANRLASHAGLAPVPRDSGRRTGNYHRPKRYNRRLRWLFYMSAQSAMMRPGPSRDYYLKKRAEGLIHTQALLALARRRVDVLWAMLRDRRLFTSAPPVTQAA

SEQ ID NO: 152020 - protein, 341 aa, unidentified
MSIITVGIDLAKNVFAVHGVDEGGRAALVKPKVSREQLLPLIVQLPPCVIGMEACSGAHHWARQFRQYGHTVKLMAPKFVTPYRMSGKRGKNDAADAAAICEAVTRPNMRFVPVKEEHQQIILCLHRTRQGFVEERTALYNRLRGLIAEFGIVLPQKITCLRREICAHLEDLPGYANQCIGDLLAHADRLDERIGDYDRIIAQAAREDARSKRLMLLRGVGPTTASAMLASIGGGHDFANGRQVAAWIGLTPGQYSSGGKARLGRITKAGDPYLRSLLVMGARAVLASLGDKQDHFSRWARNLQERRGYWRAVVAIAAKNARLAWAVLKYGEDFRLTASTA

SEQ ID NO: 152021 - protein, 410 aa, unidentified
MELLHQRCCGLDVHKETVVACLRLLSDGKVTTEVRTFQTTTADLLGLSAWLAANGCTHVAMEATGVYWKPVWHILDDGEFALVLANAAHVKNVPGRKTDVNDAMWLAELLAHGLIRASFVPDSQTQEMRNLLRTRKQLVREQSRHLQRVQKTLEDANIKLDSVLSDVMGKSGRAMIEALIAGETNPAKLAGLADRRVKASPGELREALRGRVTKHHRFLLRLHLNQIDALDAAMATVDAQVEANLGPFRTAVDLIKSIPGFDDLGAHVVVSEIGIDMSRFPSEAHLISWAGICPRNDVSAGKRRSNRLRKGAPWLKTTLVQCSWAAIKKKNSYLQAQYHRIKARRGPKKAIMAVAASILTAIYHMLNDGTMYQDLGYNHFDRRSTDQQKQRLIKRLADLGYAVEIKPLAA

SEQ ID NO: 152022 - protein, 429 aa, unidentified
MKYNTQNAKIASITEKTLIVGIDVGSETHFARAFDWRNYEYTKKPLEFSNTEAGFMMFKAWVEDIAEKQGKTAVIPGMEPTGHYWFALGKFLQDSGMKPVHVNPHHVKKSKELDDNNPNKNDRKDPKTIAGLVNEGRFSYPYIPTGIYAEIRNLSNLRIQTQEELTRIKNRIARWFSIYFPEIKDVYKNPDAVSGMMVIKKAPLPCDIKELGVDGVNQVWRDAKLKGAGLKRARTLVSAAEHSIGSTEAPGSARIEIRNLLNDYEVYKNRMDDLMREIEAKLSEIPYIDKLMEINGIGLKTVSCFIAEVGDIRRFDNPKQLQKLAGYAIVADSSGKHNGESRISHRGRKRLRYALYEAAISVIGKNKEFREIHDYYRTRKQNPLKKMQSVIAIACKLIRIFYTILTKGVDYDGQKMLSDIVRPETIMAA

SEQ ID NO: 152023 - protein, 367 aa, unidentified
MDHFAGLDVSVKETSVCIVDDTGKIVREVKVASEPEALLKVLRSPSHQFKRVGLEAGPLSQWLYSALAEAGLSVICVETRHMRAVLKAQINKTDRNDARGMAQMMRVGLYRPVHVKTLRSQKLRMLLTHRKLLQSKAIAVDNDLRGTLRNFGLKVGMVGATRFEARVKELIENFSDLAVLVEPLLVVRRVLREQLGILHRRLLTVVRDDDVCRRLMTVPGVGPVVALTYRATIDVPARFRKSKAVGAVFGLTSAKYQSGEIDRSGAISRCGDEMMRTMLYEAAQSMLFHSIRWSWLKAWAMKIARHRGMKKAVVALARRLAVIMHRIYGPAVCCKGIRTEWSFWSALIYPASRRSSCSGPSWLSAHT

SEQ ID NO: 152024 - protein, 343 aa, unidentified
MDHFAGLDVSVKDTSVCIVDDTGKIAREVKVASEPDALLAVLKNPAYHFKRIGLEAGPLSQWLFSALAEASLPVICVETRHMRAVLKAQINKTDRNDARGIAQMIRVGLYRPVHVKTLRSQKLRILLTHRKLLQSKAIAVDNDLRATLRNFGLKVGIVGQAKFEARIKELVEDLPDLAVLVEPLLVVRRVLREQIGVLHRRVLTVVRDDEVCRRLMTVPGVGPVVALTYRATVDVPARFRHSKSVGAVFGLTPCRDQSGEHDHPGAISRCGDEMMRTTLYEAAQSMLMRSSRWCWLKAWAMKIARHRGIKRAIVALARRLAVIMHRIWVDGTAFRWTRQAVAA

SEQ ID NO: 152025 - protein, 483 aa, unidentified
MARRKLSTFERLQRGERLNRKERREVQRRLNLDDPGLEIMNRDAAGIDVGNESHFVSVPADRDPQPIREFGSWTAALEEMAQWLKQCRIRTVVMQSTGVYWIALHDVLQRHGLEVNLVDARGTKNVPGRKSDVQECQWLRKLHTYGLLRPCFLAPPEIHAVRTLWRLHQQHVRDAGRCIQQMQKAMIQMNVQLHIALSDISGVSGQAIIRALLQGERDAKVLAALRDPRCQASEEEIVQSLQGNWKEDILFELQQAVEAHDFYQRQMENCDQQLQRYMAALSTRTTVPAAASTLPSTKKEKKGRTGKPRKPKGNQPAFDLATELQRILGVDATTIDGIDVITIQTILAEIGPNLSAWKTEQHWTSWLNLAPKRDVSGGRVIRHVRQHHTNRVGNAFRMAAQSLVRSESYLGARYRYFRAKLGGLKAVKAMARYLACLYYRLLTRGQIWVDRGTQEFNRRSQERELAALQRKARKHGLQLVPAA

SEQ ID NO: 152026 - protein, 343 aa, unidentified
MEEYIGLDVSMKETAVSIRRAGERIWRGKCASDPSVIAALIRKRAPAVKRVVFETGPLSVWFYHSLRTEGLPAICVDARHDKAALDMAANKTDANDADGLAQLAEVGFFREVRVKGFNSMLTRTLVAARTRLVRITTELSNQIRGVMKTFGLLVPAGKGSTFENVRNLLVDQDGLASIVLPMLEAWRGIRIRAAELGRQLVRDARESQACRILMSIPGIGAITATSFATAIEEPDNFRKSRSVGAWIGLTTRRYQSGEVDYDGHISRRGDRHLRGLLYEAAAVILTRSSTDSALRTWGRHLRERIGFKRAAVAVARKLAVISIRCLRPASCSIRMPELPHKLG

SEQ ID NO: 152027 - protein, 345 aa, unidentified
MSEVYAGRQFVGMDLHRRRSVLVRMSEAGELLETVRILNDRDVLAEVMSRAGESPEVVLEATYGWYWAADALAELGATVHLAHPLGVKAFSYRRVKNDQRDAADLADLLRMGRLPHAWIAPPETRELRELVRHRAKLVAMRSQCKAHVHAVLAKGGIWVPMTDVFGVEGNLLLDNVTMPAPYKERIASLRRFIEGFDAEIDLFTALVQRRLTRDAGYIAIQQIPGIGPVLAAVFVAEIGDVHRFAGPAQLTCWAGLTPSHHESDTTVRRGRITKQGSRLVRWAAIESVKILPDTSHIGAIREQVAHRRGNRNIGAVAAARRQLELVFYGLRDHHVRALHRSPHAA

SEQ ID NO: 152028 - protein, 349 aa, unidentified
MTVYVAVDFHARQQTISYCDLADGEIHRLELQHQGDKVRAFYAGLTGEVIVGFEASGYSAWFEQMLAELGHTYWLGNPAEIRRKAPRRQKNDRRDADLMLDLMLKGDFPRLHTFSDESRLVLRQLRYRHKLVKIRTIAKNSLQAIGINAGLPLKRQLLTEKGIRQLQALPLSPVLAQQRAEWLQLIAFVNQRIAKVEADLQQIADKDPETVLLQTHPGIGLLTSLALRYTLLPVSRFTTTRQVTAYAGLDCIEDQSSERRRMGSISKAGSRLLRYLLNEAGQTACRKDPELKRFYQRLLLRRERPKAKVAVARKLLVRSFIMLRDQIDYAEFVRRGVAARVARHPHSLP

SEQ ID NO: 152029 - protein, 318 aa, unidentified
MNSPSITVGIDVSKHRLDFARFPQGDTFSVAYTDAGLAKMLKRLRGWSPQIILLEASGGYEYAVVAALVAANLTPVLINPRQVRDFARSLGILAKTDKIDAKVLAEFAFRVQPEPRPLPTAQQQELNHLLSRRRQLLEMMQMESNRREVSPFLRVRQSIDHNLDSLRRQLTDLEREIDDFFNKSPLWVQQDALLRTVPGVGSQTVLSLQAWLPELGALNRHQIAALVGLAPFNRDSGVFRGRRMIRGGRHKVRQALYMATLSAVRYNPVIKALFDRLAGQSGKPGKVALVACMRKLLTILNAMAKNQTSWRPMTPLTT

SEQ ID NO: 152030 - protein, 367 aa, unidentified
MKKHTTMNKPVSATDVSVCTTVAVDLAKKVFQVAGEDALGQLAYEQRIKSREAFQAFLQKLPEGVTVLMETGPGAQAWARLLQAQGNLVRILPAQRVAEHRSGAKNDRNDAHAILRAGRDSSIASVPVKSVAALAMQAWHRVRRGYVRRRTAMGNQIRGLLLEQGIALAQGDVGLKQGVTRVLEDARQPLPALLRELIDEMLNEWKRLGERISALTGRLEACAAADPTAKRLMTVRGIGPITATALLAKQVEPERFANARQFAAYFGIVPDQHSSGQKVRLGKMTKRGDAYVRSLMVVGSHAVLKQLRPDSEHPDDRRLQRWLQRLGRKGAAVRLANRNLRIAWVLLCSEQTYQRKPNACREMEMSH

SEQ ID NO: 152031 - protein, 406 aa, unidentified
MELVALHKRVIGLDVHQAQITACAILEEADGTTRIEQRQFGAFKRDRGALAAWAASLAPDELVMESTGIYWKSPYAALEAVGIRGQVVNARHVKNVPGRKTDVGDAQWLATLARAGLLRGSFVPPMRLRELRLISRQRQKLVGLLSSEKNRLHKVLTDGGIRLGAVVSDLHGQSARAMVKAIILGQPPNEVLQFASRRLKASREEIFDALQGELTDSHRFVLDELMRHIEEIEARIARFDTRLLDGLKDERNTLALLQTLPGVDLIGAAMLLVEIGSDMAAFGTADRLASWVGICPGNNESAGKRKSGRVRKGNLYVRRLLCEFAHAASRTKSVFQSKFKSLIVRRGHKRSIIALAHKILRTIFFMIKRREHYRDSATDYEALSVQRNAPRWIKALTRFGFIPAVA

SEQ ID NO: 152032 - protein, 338 aa, unidentified
MELYAGIDLHSNNSVVTVLDATDRTIYAKRLPNDLGMIVAALRSCRGTMRGVAVESTYNWYWMVDGLQDAGFTVHLVNTTAVKQYDGLKHSGDFSDARHLAHLLRLGILPEGHIYPRAQRAVRDLLRKRSQLVRYRSAQILSVQNLQARNLGARASSNEIKSWRAASIDALELLEEQKQSLKATLAVMRCIDTQISAVERSVLAKVKTRADYKALKTVSGIGEVLALTIALETGDIGRFAGAGNFASYARMVNSAHESNGKKKGQGNTKCGNKYLAWAFVEAAHFAVRYDATIKRWYQKKCASSLAVVAIKAVAHKLARACYYVMKDGRAFDAARAFG

SEQ ID NO: 152033 - protein, 371 aa, unidentified
MTNVIHIGIDVHKDSYSLCSYSFATKQSFGQTKIASKDSLVIKYVQRLQKEQPNSEVLCGYEAGPTGFGLYRELEKTGIACVLMAPTSLPKAPGNRVKNDRLDAQELAQHLAWGTYSAVHIPTSEDEAVKDYTRMRNARVLALKKAKQNLLSFLLRTGRTFTEGKSYWTLMHFSWLRKQEFVDPLAQETFNEYLQEVLDQQDKVDRYESQIEEIANREEYREKVSKLRCFRGIETHTALSLVAEIGDFSRFVTPEQFSSFLGLVPSEESSGQREKRGGITKAGNTRLRLLLIEGAKSTLRSDVYGKKSKRLQARQKGNDQAIIAYADRANRRLHRVYSRLTSRGVNTNKATVAVARELSCFVWGMMNDRIQ

SEQ ID NO: 152034 - protein, 346 aa, unidentified
MMIIGCDFHPSWQQVSWLDTETGETGEQKLVHVSGDARRFYRQLAAPVLIGMEATGNSQWFIELVQDMGHEIWIGDAAQIRASYVRQQKTDKRDAAHILKLVVEGRFPRLWTPDREQRDLRQLLLHRHKLVEIRSRVKNELQHLALNKGVQRKHRLWSQAGQKLLRELPLKPWAACRREDLLGLLAMFDQQIGKLDGAVQQAAEQHPQARLSMTQPGVGPNTALAYVLTIGEVSRFRRGKQVASYLGLIPREESSGGRQKLGAITKQGNRLLRSLLVEAAQVAVRYDPGFRKEYWHRCHHKPKGVAKVAAARKLALRLYWMLRTQKPYPEIVRIESSPRVALVGAS

SEQ ID NO: 152035 - protein, 415 aa, unidentified
MDAVYTHCAGLDVHKKTVVACVITPGGSSGWQRETHTFGTMTADLLALSDWLSGHGCTHVAMESTGEYWRPVFNILEGNFEVLLVNAQHIKAVPGRKTDVKDAEWIAQLLQHGLLRASFIPPVAQRDLRDLTRHRSNFIRERATLVNRVQKVLEGANIKLGSVASNVMGVSGRAMLDAIVAGEANPEVLADLAQGRLREKREQLSQALTGRVKPHHRFVLTELLCQIDSLDETIARFDLEIEAYCAPFEMAVVLLDTIPGVGRETAEVMVAEMGADMTHFPSADHLASWAGLVPGNHESAGKRLSAKTRKGNRTLCTALVQAAHGAAHTKNTYLAAQYHRLAARRGNKKAIIAVAHSILVIAYHLIQRQEPYRELGADYFDKRRPEATAKRLVKRLERLGFDVQLNRPVSVAATA

SEQ ID NO: 152036 - protein, 418 aa, unidentified
MKRRKSKKGNVVNEKTLIVAVDIGKSVHYGYMRAPHGKEVKPFPFYNNGHSFNEFWRTICCFQREEGLEKIVIGFESSGPYAEPLCEFLRRKPVTLVQTNPMHTKRLKELTGNSPNKTDKKDPRVIADIISLGHALTVVVPEGAAAELRRLTHTRERELKNQTADKNRLQHLMFSIFPEFLNILDVSTKSALYLIKRHPAPEDILSLGFESLCAILKKVSCGQLGIERAQELFQAAQTSVGIIQGKRSILIEISHLVDTIECEQRFIESLEEMMKNYLRQIPYSQHILSIHGIGTVTTAGIIGEVGDFSEFATSNEMTKLAGFDLFEVSSGRHKGQRHISKRGRSVMRKLLYYAAVNTVKSHGIMHDKYQQMLNKGKPKTKALIAIARKLLKIMYAIARDKTMYGEHTNHALKRTVAA

SEQ ID NO: 152037 - protein, 338 aa, unidentified
MKKYSGIDLHSNNSVVVVADEEDRIVFQKRLANKLDEILMALAPHKEEIVGVVVESTYNWYWLVDGLMDAGYQVHLANPSAIKKYEGLKYSGDFADAAYLAHLLRLGLLPEGYIFPRELRAVRDLARKRMQLVHYRTAQILSIENILTRETGGRMSSDRIKTMTSETVEAVGFLPDVTLAMESNRVVSQALQQQIEVLEKRLEAQVKLQPGYQLVKTIPGIGQILATTIMLEAGPMTRFANVGNFSSYCRCVGSLHESNGKKKGSGNTKNGNKYLAWAFMEAANFTLRYCPEAKRFYERKKSRTNRIVALKSVAHKLARACYHILREQRPFDVKRCFV

SEQ ID NO: 152038 - protein, 408 aa, unidentified
MAAVMIGVDPHKGSHTAVVIGASEELLGQLRVRACAAQAERLLAWAAPWPQRAWAIEGAGGLGHLLAQQLVAAGERVLDVPPKLGARVRLLGSGSTDKNDPNDARSVAIAALRSAACPLVRADDHATVLKVWAKRHRDLSRSRCQVVCRLHAVLCDLVPGGVSKRITAGQAARILDQVQPRGAAGAARWVLAGQFLTDLRRIDSQRLDVKKKLAAAVRASGTTVTEIFGVGPAVAAAVLGDVGDISRFPGPGSFAAYNGTAPTEVSSGGRVVHRLSLRGNRRMNHAIHMAAVTQVRYPGSEGRAYYDKKIAEGKTSREALRALKRQVSDALYKRMKADARRAAAAGPGGHPGNGSSASVTGSHPAGRLFGQATPGPAPTLRPRPGPAKATRPASSRPTRRSVPAHPST

SEQ ID NO: 152039 - protein, 362 aa, unidentified
MKIIGCDFHPSFQQVSVLDLETKQRVRKKLDHASGEAEQFYRGLQGEAVKVGIEACGNTGWFERLLAECGHELVMGNAARIRAMAVRKQKTDERDAEHLLELLESGKFPVIWVPSAENRDLRQLLLHRHKLVQMRTRIKNQLQHLALNQGLQKKRQLWTVRGRQWLEQLSLSPWSERRRCDLLVLLDGLQERITELSQAVEEQARQNERAQLLQTHPGVGAITALAFVLVIGEVSRFERSRKLTSYLGLIPSEDSSGKRTRRGSITKTGNAHLRRIVVEAAWSYHRPPCIWYGLRKRQESISEEAKEIAWKAQHRLHKRYMRLAAAGKDKRKITTAVARELLGFIWAIGTRAETTVRQRIAA

SEQ ID NO: 152040 - protein, 433 aa, unidentified
MEDVEDEPLFCERVTGIDIGKKMIMVTIRVPSDTRKGGRAQETREFGTTRMQLLTLADWLRAWQVEKAGMESTSDYWKPVYFLLEREGFDCILYQASQVKVLPGRPKTDKLDSAWLARITERGSLAGSFVPPEEIRRLRTHTRYRRKLVQMRTAQQERCEKLLEDAHLKLSSVISDIHGVSGREMLAAIAAGERNPKVLAQMARGVMRRKIAQLEEALDCSFFTGEHGFILAMMLDSIDQLTAQISVLDGKIADMCRPYERQIAQLDAIPGFGVITAQDLIAEIGTDMSVFPTAGHLCSWARTAPRVTESGGRRKGKNATGRGNPYIGGTLGEASVNVRRTQTFLGERYRQLTRRMPKQKAQVAIMRKQLVIVHALLSDPEAGYQDLGPDWHERRKSTQRRARSHLRELERLGYKVTLEAIDPETGEFLPAAS

SEQ ID NO: 152041 - protein, 342 aa, unidentified
MEYYAGIDVSLECSSLCVVDGTGKIVREGKVSSDPEELICWLRAQGQELHRIGLEAGPLSQWLFAAMREAGLAAELLETRHVRDAFKAMPVKSDRNDARGIAQLMRLGWFRPVHCKSINAQEVRAVLTARKLVQTKLQDVENSLRGILRGFGLKVGKTTARSFAGRIQELVKGHPSLETIGEALLSVRSVLLREFNAFEKRVRAMSRSDARARLLMSTPAVGPIVALTYSSAIDDPARFKSSKQTGSHFGLTPKKHQSGQTDRSGRISKIGDAAVREALYQAAHVMLTKPVKGCTQLKSWAMRIARRAGMRKAKVALARKLAVILHRMLANATPFKPAAAAA

SEQ ID NO: 152042 - protein, 342 aa, unidentified
MYYIGLDVHKKTISYCVKDASGRICQEGKVGATRWELDLWVKTLPQPWTVAMEATIFTGWIYDHLKPHAAAAKVAHPLMLRAIAAAKKKNDTIDAAKIADCLRCDFLPECYMAPTEIRERRRTLRYRHLLVRQMVQMKNRVSGLLMETGVSHNKQRLHKVGYFPELLANADAVSASIRPLLQLSRESITRLQRTEGAIIRSLQRDPLLAERVRRLQTIPAVGKVTALSWALEMGDISRFRSIRQAISYCGLCGDEKRSADKIAHTPISKQRNKHIQRVLVEAAKLAPRRNPDLALVYENARQKGNANCATLAVARKLVAYLMVVDREQRDFEPVRGLAGIAA

SEQ ID NO: 152043 - protein, 311 aa, unidentified
MKDTIGIDISKDTLDTYWLSKRKHKQFANNKTGLRALISWVREAEASLVVFEATGVYHRLLEVSLAAHDFSFARVNPRQARRFAEGTGTLAKTDRVDAAMLARMGSLLELKADKPKSEMLHNLKGMITARQALIKDRTAAKARLATATYPLLRKQATLRLRQVERDIAQIDATIETIITTDKTLSQKADILISIPGIAKITAYAMLVEMPELGSLSGKQAASLAGLAPISRQSGKWQGKERIQGGRAVLRKAIYLPAVVATRFNPDMKAKYHQLIGNGKCKKLAITAVMRKLVVMASALLRDGRKWTETRA

SEQ ID NO: 152044 - protein, 432 aa, unidentified
MKFTQSNKQNQRISRISETTLVIGTDIAKHNHVARAFNYRGIELGKRCLFQNDENGLLNLLAWAESIKQEHGLTDILLGVEPTGHYWFPLFHFLKQRGIEVVLVNPHHVKKSKELDDNSPTKNDIKDAKVVAKLVIDGRYTQPQLPEGIYADLRVLMNQRDRLCGDLNRVKGRIHNWLDRFFPEYRQVFKDWEGKASLITLTNFPLPQDVIAAGETTVVGTLKKNDVKRAVGPKRAELLYRKARKSIGLTEGATAAKHELAMYLEQYAMLCRQIEQLMEFVTGLVEQIPGASHMLSIPCIGLVTVAGFLAEVGDLGGYDHSQQIVRHAGLSLRENSSGLHKGETTISKRGRCRLRALLFRATLTMIAKNPEFRALHLYFTTRRDNPLKKKQSMIAICSKLIRVLFELGRKQKNYDSSKVLGPHREAQLQAVA

SEQ ID NO: 152045 - protein, 315 aa, unidentified
MHAPSATYYVGVDVAKDTLAIRRNPAAKIVVIPNTSDAVRPWLTSLSAGAHLICEATGRHHRLLQSECALRGVPYTCLNPARARAFALSLGCIEKSDPIDAGVLERFGRERQPPATVPPSPALRELSDLLMARRTVVEQVTAFTLRLPLLSTQARRALQKVITGLRAQRLSLDLALEAWLESAQGSCWCDKVYTLCLAPGVGVLSALSLIAHLPELGTLNRGQAAKLAGLAPILWDSGTMKGLRTIKGGRREARRVLYQCAIVAARWHPPTTQHYQQLRQRGKCATVAYVAIARKLLIYLNSLLRPASAATSLEA

SEQ ID NO: 152046 - protein, 361 aa, unidentified
MFTERTSVGLDVHARSVTAHGMDEITGEVFTARLSPGPEVRDWLAGLPGPVAVLYEAGPTGFGLARELRAAGMRCEIAAPSKLQRPAGERVKTDAKDAELLCQLLRLGAYAPVTVPDAAAEAARDLVRARDDCRTDLLRARHRLAKLLLRRQVAYSDGRAWTGAHMAWLARQRFDDANLQTTFDEYLDQVLATNARRDRLDARIEALAADSQWTPMVRRLCCLRGISTLTGFALAVEIGDWTRFDGNSIGAYLGLVPSEHSSGASKQRGGITRTGNGHVRRLLIEASLHHLRPYRRGVALRARWDLASPAARERGDAGNRRLHARWQQFQARKKRHHVATVAIARELAGWCWSIATIDDQP

SEQ ID NO: 152047 - protein, 355 aa, unidentified
MLNTNYIGMDIHKETTSIAVMNAAGKVVMECVIETKANTVLQFIHGLRGDLHVTFEEGTWAAWLYDLLKPHVTEVLVCDPRKNALLKQGSKSDKIDARKLAELLRLNHLKPVYHGEHGVRTLKELARSYLTITQDLTRVRNRLKALYRSWAIPCSGTQVYALRHRSEWLGKITEAGVRRRAEHFYQQFDALRPLRQEVRRDLLTEGQKHKAWKLLRQIPGIGAIRATLLIALIQTPHRFRTKRQLWNYSGLGLETHDSAQYCVVEGQLQRSKKPLMLRGLNQNHNHDLKAIFKGAALEASSGAGPFHDFYEALLTKGRKPSMARLTLARKIAAIALIVWKKEVSFDAKHLKQQAA

SEQ ID NO: 152048 - protein, 339 aa, unidentified
MSKRSIQVQGTMYCGIDVSAKNLIVAIQRVHQPVEQRSFPNTSVGYKALIVWLRKAKSPVRVSLEATGIYSLDLAFALDAAEGIEVAVLNPKVANRFAQTIRRSKTDAADAEVLAEYARRMPFTAWVAPSLGSMRLRSIVRHVESLSVQSAQNQNRLHAAQGSTSTPGCIVQDLKRSVASLELRIHKLRREATTLVRQDDLLRKRFELLVSIPGIAQVSAMQLLAELSTLPPDLTVREWVAHSGLDPAHEISGSSVRKASRISRAGNRHLRRALYMPALVASRCDPHVKAFFESLLARNKARLQALIAVARKLLHAIYGIFRSGLKYEGTKLFPRITLS

SEQ ID NO: 152049 - protein, 402 aa, unidentified
MAYDFVIGVDVGKYFHHACVLDPQGRQVLSKRINQHESSLRKLFGQFIADNASVLVIVDQPNNIGRLTVTVAQDMGADVRYLPGLAMRQLSRIHVGNSKTDVRDAYVIAHAGLNLPDALRSVDRVEEVFIQLKVLNGIDEDLARAYTRLINQMRSALVGTYPAFEHVLRGQMIHRKWILHLLAKYGGPTKIRRIGRTRLAAFARSHKARNPEPVIDAMLTAIHAQTVSIAGAEYAELGVAMSAKDALAKLENRKEIEAQVLKLIQDIPQTEILLSMPGIGPRSAAQILMTAGDMSDFPDAAHLASYAGLSPRTNQSGTSIMSSSPNRAGNKKLKNALWQSSFASIRFHERSRQFYERKRKEGKRHNAAVVALARRRLNVLFAMMRSGELYRDISTVREAAAA

SEQ ID NO: 152050 - protein, 402 aa, unidentified
MNAVGIDVSKGKSMIAIMRPFGEVVHSPFEVSHNNNELSDLAELINSLPGETRVVMEYTGYYHTSIAQVLCDAGIYVSVVNAMLVHNYGNNSLRRAKTDKKDAVRLANYAIDNWLSLPQYFPIDDTRFMLKTCYRQYEKFIRIRTMQRNNLISLLDTIFPEVNRLFSSHIRDDGSEKWVDFVWKFWHCQCVCELSVKTFTQQYKKWCCKHNYRFKEEKALDIYTSACGHVCMMPKTETTKFLVQQAVTQLNTTSKTIASICQQMNMLAASLPEYTIVMNMYGVGQTLGPQLIAEIGDVRRFHSKKALIAFAGIDAPPCQSGSIDVHSRSISKRGSSSLRRTLFLVMSVILQNSPEDEPVYQFMNKKRSEGKPYKVYMLASANKFLRIYYSSVKAYLDSLETD

SEQ ID NO: 152051 - protein, 325 aa, unidentified
MTHWVGIDVSKAELAVCVLDEHRQALIATFTNDHKGFRSLRNYLSKRVATGCQVCLEATGVYGEAVAAELHAHGYRVSVVNPLRIKRYAESQLRRNKTDMLDAQIIADFCRTQEAALWTPPSAAWQELRALVRRLDDLIAIQVQESQRLQTAHSPNVQADLQQHIAYLDAQIERLLKQIKDHIDQDPDLKRQQGLLNSIPGISDRTSSRLLAEIRDITAFETVEQLVAYAGLNPRLRQSGQYRGQVKISKIGNAALRAALYLPARSAKRHNPLVQGLVKRMAAQGHCANAITVAVMRKLLHYVYGVLKSGQPFDPAYLAKSPIPS

SEQ ID NO: 152052 - protein, 343 aa, unidentified
MQDPVVVGVDTHRDSHVACVLSESGARLSARRFAANEAGYGELIGWAGSFGEIAMVGVEGTGSWGAGLTRTLVTRGVTVVEINHGDRAVRRLRGKDDAIDAESAARAVLAGTHAGAPKRRDGVVEAIRALRVARGGAVKARTASVNQLRSLISTAPEPVRARLRGLKTAQMIAVCSRFRANSSRASDADEGTRVALRSVARRYAELDGEAVALEKQISQLVREAAPGLVELLGIGPDHAGQFLVTAGDNPDRLRCEASFAALCGVAPVPASSGVTNRHRLSRGGDRQANRALHMIAVCRLRHCERTIAYAQRRTAEGLSKKDILRCLKRYIAREVYAALPRTA

SEQ ID NO: 152053 - protein, 420 aa, unidentified
MEIDHGEQHLIERVAAVDIGKAEMVCCVRVPGAGRARAQEVRTYSTMTPSVLEMADWLTGLGVTRVVMEATSDYWKPVFYLLEEQVSETWLVNARDVKHLPGRPKTDRLDAVWLCKVAERQMLRASFVPPASIRRLRDVTRYRADLVAVRTAEKQRVEKLLEDAGVKLSVVASDIFGVSGRAMLAALIAGERNPAHLADMALGRMRARTGLLEKAFMARFTDHHAFMLTTMLARVDTATADIAAMDERITVILTEELHDAATRLTTIPGIGAVTAVAILAEIGTDMTRFPTAAHLCSWAKFTPLTSESAGRTKGRQSTGHGNRYLARSLGEVAVMAGRSHNFLSARYHRIARRRGKPRAIVAVGRSILVIIWHLLSRPGTTFVDLGADYYETRVNHQRTARTHVRALEDLGYQVTLATAS

SEQ ID NO: 152054 - protein, 365 aa, unidentified
MQKISTMRTSKKNILQGQLTIGVDLGDRSSAYCVLNAAGEIVLEHKVATTPEAMKQVFGSMPRCRIAMETGTHSPWVSRLLTALGHEVIVAHAQKVRLITKSRRKDDRLDARTLARLARIDPELLSPVKHRSAQAQLHLTEIRARAVLVSARTALVNAARGLVKSYGERLRKCGTQQFRQETASRLSAGLREALAPLLREVESLNERIQEYDRRIEKMAKQTYPETTLLKQVKGVGNLIATTYVLTIEDPHRFRKSRDAGCFVGLQPGRRNSGDSEPQMHISKEGDEYLRTLLVQGAHYILGPFGEDSDLRRWGKKLAARGGKNAKKRAVVAVARKLAVLLHRLWVSGEVYEPLRNSQKAMSTAA

SEQ ID NO: 152055 - protein, 384 aa, unidentified
MVTGITAYNKEVTMNTIVYVGMDVHKESYTLCCYSYDTDKVEYKQTIPSDYKLILKYMESMRKVYGEDATFICGYEAGCLGYSLYHQLRDHEVNCKILAPTTMAITNTSHVKTDKRDAANIARCLAFHTYSEVYVPDDEDNSIKEYIRMRDDQKLMLKKVKQQILAFVLRQGKKFEGGKTYWTIAHLKWLKSLELEGLDKETLSEYLVTYDYLTDKIERLDNRIEELASGEKYKEKVQNMRCFLGIKTHTALSMVVEIGDFSRFEKAPKFAGFLGLVPSEDSSGDKTNRYGITKAGNSHLRRLMVEAAQSYTRGNVGHKSLTLKERQKGCSAEVIAYADKANERLRRRFYKMTLNKGINRNVATTAIARELACFVWGMATGNIS

SEQ ID NO: 152056 - protein, 340 aa, unidentified
MKGTTMGIDIAKNVFEVYVEDEAGQVLERRRLSRKKLLSWLANRPPATVGMEACGGAHYWARELEQLGHTVRLIAPQYVKPWVQTNKSDAVDARAICRAVQEPGMRFVAIAGEAQQAVQAFHRVRSRLMGNRTALVNQIRGILLEYGVALPQGVASVRKALPLLLAEERWSPLVRQFLVEQQAELLDWDTRIEVVTGHIQRESATQPVCHRLEQVRGIGPLGASALWLKLAGGSYQNGRHVAAALGLVPKHTGTGGKVRLGGISKRGDRYLRQLLIHGARAVVAHLGEKQDGLSRWLRSLVARRGMNKAVVALANKNARVAFALMHGGQPYEVTKMCRAA

SEQ ID NO: 152057 - protein, 362 aa, unidentified
MTFPRRVVIGADTHLDTIHLAAISDTGQPLGDAEFRTNPTGYWAAICWARSFGEVVTVGVEGTSSYGAGLTQAMQANDIHVVEVNRPDRSARRRQGKSDPLDAYSAARAVLAGHGLAVAKDPHTGALKALLIARRGAIKARTAAIQQIKDLLVTAPVDLRERYRRYPTTLRLVEALAGCRPRAHEDPTTVSVLIACKALAQRIGYLERQDRELTAELDALTATINPALRAAYGVGPDTAAQLLITAGTNSHRLRSEAAFAMLAGVAPIPASSGKTSRHRRFPAAETAPPTTPCTASLWSAGPTTGAPVITSPANWPPGAARTTSYVYSSGPSPARYSDTSPPPAPSTTTATYVQPAKPATSH

SEQ ID NO: 152058 - protein, 407 aa, unidentified
MEVLHPVCCGVDVHKDLVVACLRVQQARGRAKVEVRKFGTTTGELLRLHAWLSEAGATHVAMESTSVYWKPVFNMLEGSVEVVLANAHHLKAVPGRKTDVKDCEWLADLLAHGLIRGSFIPPAPIRELRELTRHRKNLVRNRVDEVNRIQKLLETANIKLGSVVSDVLGVSGRTILRALVAGERDPMVLAKLAKGSLIPKVTKLAEALRGRFTDHHAFLLGQLLRHVEHLDEFISVCDERISRLAMPYAAELTRLQTIPGIKARASQALISEIGVDMSRFPTAGHLASWARICPGNHESAGKRRTGSTGTGNNWLRSTLLECAWAASRSRKTYFGAQYRRIVRRRGPKRAVTAVAHSILVAAYHVLRSGVAHRELGPDYFDRIQTAKLTRYHLRRLAELGYPVAPAA

SEQ ID NO: 152059 - protein, 417 aa, unidentified
MSLNVEGASIFVGIDWAAETHAVCVQDEAGRKVAAFTIEHTAEGLTALVRRLARIGEPETMPVGIERPDGRLVDVLLEAGHPVVPVKPNAIKAWRDGEVLSGAKSDAADAEVIAEYLRLRQRRLHLATPYSVETKALRTVVRTRGDLVEMRVAATNQLSALLDAHWPGAKAIFADVESPIALEFLTRYPTARHAAHLGVKRLTAFCVKHGYCGRRPAEHLLARLRGAPAGTLNETLCEAIRDAVLALVTVLKALAGAVKDLDRSVTATLGEHPDAPIFTSLPRSGQINAAQMLAEWGDCRQAYDSPDAVAALAGVTPVTNQSGRHRAVHFRWACNKRFRVAITTFADNSRHTSDWAAKVYTDARTRGHDHPHAIRILARAWTRIIWRCWTDRVPYDPNRHGNAARLNQPRQNEPLAA

SEQ ID NO: 152060 - protein, 351 aa, unidentified
MRKYYVGLDVHKVTIAIAVLDAHGKLITRTVIETSTEAVRDFLRNLGGEIHLTFEEGNHAAWLYDIVEPMVRRVVACNPNHNRIEGSRSDRVDALKLAELLRLNALKPVYHGEHGTRTLKHLMRCYECLVKDITRVKNRLKALYNSQAIKQRGRELYHASKRQSWIEKLPNQGQRTRAELFFQQLDELKVIKRAAQKAMVAESKRHPAYRVLSQVAELGPVRIAQIIPTVETPWRFRTKRPFWHYSGLAVVTRSTADHEIEDGRVRKRKQVIQTRGLNEDYNRRLKSIFKSAATHACHCGVYREYYEGLLKTGMREEMARLAVARKLSATVLAVWKSGESFEAGRILRKAV

SEQ ID NO: 152061 - protein, 327 aa, unidentified
MIHKTYSVGSDISAPWLDACLFKDRAYVQARFDQSSEGYAQFAAWLKEHGVSKAHICMEHTGCYEKAFAEFLIAQGYKVSIVDSGRIRGYKQSRGRKAKTDKIDAKDICDFCRTYKPEPWNPKPDPYQRLTELVRHRENLVEAITMWKNRRGAPGNREAFVREQQEGIIALFQLQLELAEKDIEVHVKAHPQMAQDVELIESIKGAKFISAVKFLAEAGPISGYSTPDSLALAAGLAPIPNTSGKRKGRSIMPIYGNKRLRQAVQMTATVAKQHNPALALFASRLTAKGKCPTLVTKAVQRKLLHIIWALLTHREPFDPAKAVRNFT

SEQ ID NO: 152062 - protein, 344 aa, unidentified
MNTIRVVGIDIAKSVFQVCVLMVDGSIAYNKKISRSKLLDCVRHFEPGTLIAMEACSTSHFWGRTFRTMGYNVRLIPAQHVKAFVRSQKNDANDALAICETALRPGIHFVPVKTAEQQDIKALRNTRQLMVEQRTALANQLRSLLAEYGLIIPVGIQCLQQHLPELMEDASNELTFTVRRLLSTLREDMQALNERVTGLDKEIAALSSQQAAYRHLLTIPGVGPLIAAAFISEVDAGQFSSGRELSAWCGLVPRQHSSGGKQRLSSVTKNGNRSLRTLIIHGARSVMRCMKKRDDSLGLWLQRLEARRGFLKTTVALANKLTRIIWRVLTDGVDFNMQKAVAMN

SEQ ID NO: 152063 - protein, 466 aa, unidentified
MQMTLGIDVACRAAHQCSLADESGRFAWSGRRFRTTVADLNQLWGQIPQPVALTVVMEPTRNAWVPLAAWFRRRGATVVMVPPEQSADLRDYYSKHAKSDRLDSRMLARLPLLHPEGLQPAEGLGPADALRRASRLRSSLVKRRNVILARLDSYLELLGPSWHAAFGGDLANITPLRFLAAGYADPHAVRRLGLARLTRFIWRYSHGAFGEHYAAGILAAAAETLDLWDGELSYPDLAEDIATEARLALALTAEIRDLERKLAALLHQLDPAGILSSVPGVGAIGAAQILARLGDPARFRSLAGARSFSGLVPSLTASGASGHHGPPTKSGDAALREALFMAANQARRIDPVLAARYHRLMVSCGKHHNSALCHISTAVLTRIIACWRAGTPYQIRDLDGTPLTTAQGRAIITQRYRVSDELRALRRTSHRKTGASRRHQESPGAPTPARPPATLRPDTAEHLDTA

SEQ ID NO: 152064 - protein, 343 aa, unidentified
MDHFAGLDVSVKEISVCIVDDTGKIVREVKVASEPQALLAVLRNPAYCFKRIGLEAGPLSQWLFGALAEAGLPVICVETRHMRAVLKAQINKTDRNDARGMAQMMRAGLYRPVHVKTLRSQKLRMLLTHRKLLQSKAIAIENDLRGTLRNFGLKVGMAGKVKFEARIKELVENFPDLAALVEPLLIVRRVLREQIAILHRRLLAVVRDDGVCRRLMTVPGVGPVVALTFRATVDVPARFRNSKAVGAVFGLTPSKYQSGEIERGGAISKCGDDMMRVMLYEAAQSMLFHSTKWSWLRAWAIKIARRRGMKKAIVALARRLAVIMHRIWVDGTEFRWTREAATA

SEQ ID NO: 152065 - protein, 313 aa, unidentified
MKEEKTFIGIDVSKEKLDVGVRPQVDFMTFANTEDGISLMTDFVKSKQPELIVLEATGGLEMAALRSLVVAKLPAVCVNPRQVRDFAKAMGVLAKTDKIDAHVIARFADSVRPEIRPLKTEETEMLDAFNTRRSQIIIMLTAEKNRLTTASKWTKKDVEKSIKGLEKALVKINREVENLIKKSPHWRHMDKILQSVPSVGPVMSLTILADLPEIGTMNRRQIAALVGVAPLNRDSGKYKGRRAIWGGRARIRSVLYMCVISGICHNPKIKAFYNRLISSGKKHKVAITACMRKLMIILNTMIKNGTCWNESGC

SEQ ID NO: 152066 - protein, 345 aa, unidentified
MRDVSITRYNVGVDFGSEQMEAKLAVQYEDGIRKILFSRRFENKETGFKNLDSWLKEKCRQKDVEVRISCEATGVYHERCCYFLHALGYYVAVEVPSRVKSYKKSCGYNSKNDNIDAVALAYIGLERNLRKWEPINSFYYELRMLTRYHQSVQEMQTSACNQLHALQAGMRTSTLVVKQLKANIKLYEKQLAELEKAIEEKLASEPEVKKKIDNLTEDMKGVGVMTVAVALAETNGFSWFTNRRQIVKYAGYDVVEDQSGKRKGKTKISKKGNAHIRRALYFPAINLVTYNVKPFVDKYERIFERTRIKMKGYTAVQKDLLLMLFTLWKNDQTFDPNYQNQQKKK

SEQ ID NO: 152067 - protein, 409 aa, unidentified
MRIIGLDIHRAFAEAVAWDDGKLRRLGRVDMRRELLTAFAEQLSQDDVVVVEATGNAAAVAAVITPHVKKVVIANPKQVRVIAHAKIKTDTIDAGVLAQLYASGFLPEVWIPDEPTQALRRQVTRRNQIVRQRSRLKNIIQSILHGHLIPSCPHADLCGPTGRAWLIDQVVPEDERLAIERHLREFDRLGEDLKVIERDLARSALADEGVKRLMTIPGVDMVVALAMKAAIGEITRFDEPQKLVSYLGLNPSVRQSGPGPAYHGRITKQGRGHARGMLVEAAWAAARAPGPLRAFFLRIRARRGQHVAAVATARKLTVIIWHLLTKGESYVWARPSLHAKKLRDLELKAGQKPARGQKGAAYAYNIKSHREQERRWVEQAETAYARFVTGWNPRGPKKLRTGTETEVRR

SEQ ID NO: 152068 - protein, 342 aa, unidentified
MDHFAGLDVSVKETSVCIVDDVGKVVREVKVTSEPEALLSVLKNPAYHFKRIGLEAGPLSQWLFSALAEAELPAVCVETRHMQAVLKAQINKTDRNDARGIAQMMRVGLYRPVHVKTLRSQKLRMLLTHRKLLQSKAIAIDNDLRGTLRNFGLKVGMVGTVKFEARIKELVENFPDLAVLIEPLLVVRRVLREQFVILHRRLLAIVRDDEVCRRLMTVPGVGPVVALTYRATVDVPARFRKSKAVGAVFGLTCSKYQSGEIDRSGRISRCGDEMMRVMLYEAAQSMLWSKKWSWLKAWAMQIARRRGMKKAIVALARRLAVIMHRIWVDGTEFRWTRGVVAA

SEQ ID NO: 152069 - protein, 323 aa, unidentified
MQGKVSPERSAMTPVYVGIDVCKDRLDVYIHPVGLRLEFANSPEGIKRLKRSLKLHQVALVVMEATGKFHRAAHRSLHAAGFAVAVVNPLRSRLFAEAAGALAKTDRVDCRMLAILGESLEPDAVAPPSALMESLQDLVRCREAASDARTALLNQLGATTVRPAVAEINRQLRATETAIENLGAEIERQIAADPFLTRRMAILTSIPGVGIATAIALIVGLAEIGSLSAKEAAMLVGLAPIACDSGQSSGPRHIKGGRAHVRRALYMAALSAARFNPALRAFHDRLIKKGKLAKVALTAVMRKLLVLANTLVRENRKWEPLHA

SEQ ID NO: 152070 - protein, 453 aa, unidentified
MEGTHEKSSSERHGLPVIHERAAGIDIGSRFHVVAVPADITEEPVQTFKAFTADVERMADWLGDLGVTTVAMESTGVYWIPVYEILESHGLHVVLANARDARAVPGRKTDVNDAQWIQRLHACGLLRASFHPDREIAALRSYLRLRERHLDYAAAHIQHMQKALTHMNLQLQHVVADITGATGMRIIRAIVAGERNAATLATLRDTRCKSSVETIQSALVGNYQPEHVFALAQALAMYDAYQAQLEVCDHQIAQSLQRLSRKRPSPSEPLPKPRHRARQPNALNFDVRALLYQLVGVDLTQIHGIGPYLALRLVAECGTDLSRWRTAHHFTSWLTLAPGCRISGGKVLSAHTRKTKNRVTAHLRLAAVTIGRTNTALGAFYRRLSARIGKAKAVTATARKIAILFYNAMRFGMAYQDPGADHYEQRYRERVVKGLHRRAAEFGFTLQAVEGVS

SEQ ID NO: 152071 - protein, 351 aa, unidentified
MEEYIAFDSHKRYTWVDRQEKATGKVRQYRVEHAPGAIRQALAGCAPGTAVAIEATANWYWITDEIEQAHCLPRLVHPRKAKLMMGQINKTDRLDAQGLNLLQRNGTLPTVWIPPGPLRELRELTRTRVVLVAQRTRWKNRITATLAKWGLPASEYSDAYGKGAREELEQRLERLPEQTRWATRQMLAQLDTLSEQIRQFEKRLEELVKVTPEMQRLMSLPGVGVILAATIALEIGEVSRFGSAERLASYSGTVPRVHASGGRTCYGRTRPDVNRYLKWAFAEAANSVAVHHRRSPERHVSELYRRLRARKGHAKAVGAVARHLAEAAFHVLSRQEAYRDPAAVEGRTREV

SEQ ID NO: 152072 - protein, 351 aa, unidentified
MTRTRRLIIGGVDTHASTHHAAVIDLKGRLLDDAEFAASPAGYAQLLIWMRERGQLQSVGIEGTGAYGAGLARHLHEKGVTVLEVPRPERRLRRQHGKSDPLDAEAAARTVLAGNASGAPKLATGRIEAIRMLRVARTGAVKAKTAAANTLQAVLVTAPEPLRSQLRTLSTSKLIAACLRFRPDTDSLHDPVQAAKLSLRSIATRARALDAEARSLKRQLDALTAAAAPATTAVFGLGPDTVSALLIAIGDNPDRLRSEAAFAHLCGVAPIPASSGKTHRHRLHRGGDRSGNRALHIAVVVRLRYHQRSRDYAARRTTEGLSMPEIIRCQKRYLAREVFTALRADYATITT

SEQ ID NO: 152073 - protein, 356 aa, unidentified
MSYGVKYIGMDVHKEAVVIAVLNDSGKLVMETIVETKASSILQFIHGLRGELHVTWEEGTWAAWLYDLLQPQVPHIVVCNPRRNALLKEGSKSDKVDAQKLADLLRTGMLRPVYHGENGLRTLRELARSYQTISKDLTRVMNRMKALYRGWGIPCAGTQVYAARSREEWLSKLPQVGVRRRAELLYQQLDGLQALRREVRPEFLAEGRKHKAAKLLRQIPCIGPIRAARLIALMQTPQRFRSKRQLWTYSGLGIETHDSAQYRFVSGQLQRSRKPQQLRGLNRNHNHEMKEIFKSAATRASCSRGPFHDFYTGLLAKGMRPEMARLTLARKIAAITLTLWKKEERFDVEQLKTQAA

SEQ ID NO: 152074 - protein, 328 aa, unidentified
MQKNKEYVGVDVSKESLDMVAYSTGETRIFGNDDAGIAKATTWLKQVNSAIIVMEATGGMEVSLYIALQEANLPMAVINPRQIRDFARSMGTLAKTDKVDAKVLARYAATIQPEARPLPDEEVRQLNTLVTRRCQLVEMITAESNRATITRDKTMKQRIHTHIDWLKQELTDIDKHISQMLKENPVWHAKDELLQSVPGVGPVLSATLIAELSELGILNRKKIAALVGVAPFNRDSGKHRGERSIWGGRCRVRQPLYMATLSAVRFNPTIRIFYERLLANGKEKKVALTACMHKLLIILNLMLKHNSYWSCNYAIFNNTCIPDAKTVA

SEQ ID NO: 152075 - protein, 405 aa, unidentified
MSELEKDLVFAGVDTHKDTHTLCLLDHMGRAIGTFRFAADAKGYDALAGKIGGPATCVGVGIEGTGSYGAGLTRRLLELGYCVYEVMVPGRARRKPGRPKSDPADAEVAARQVLARVNLSKPKDQSGWTEELRQLMIARDRLVQATSAMINAAKSLIVTAPEDLRRSLEGLSRKNLRSALSTLDPAAGGIILALGSLGKAWDLQDREADAIEERMKRVLEANAPALLTIYGCGTVSAAALAVAGGGNPERLKSEAEFASLCGVAPLLASSGKTERHRLNRGGDRRANRALYQIAVTRMSYDQRTKDYVGKRKRDGKSKKEAIRCLKRYIAREVFRALRNPLEIKGPSWKDLRPARQALGITLVEAGKALNVGFQRVSYAETGRLMNVRFLEEYDAWLKSQANRES

SEQ ID NO: 152076 - protein, 341 aa, unidentified
MKIIGCDFHPSFQQIAMVDTETGEQTAQRVTLSEAVEFYRELPGPARVGMEACGNTGWFERLLAELGHELWLGDAGRIRATEVRKQKTDRRDAELLLRLMLENRFPRLWIPSQEQRDLRQLLIHRHKLVGMRRQVKNQLQHLALNQGVQQKRKLWTRAGRKLLEELPLTGWTARRREELLELLDSLDRSVGELDQAVKQAAEKDTVAQLLETHPGIGPITALAFALTLGDIHRFAHSRQVVSYLGLNPAEHSSGGRQRLGSISKQGNAMVRSLLVEAGQSAARLVPELKRAYQRLKHRKHSAVAKVMVARKLAVRLYWMWKTQQPYAATRMQGSPSHPVAV

SEQ ID NO: 152077 - protein, 356 aa, unidentified
MLNDKKYIGMDVHKESISIAVRNDAGKIVMECVIETKASVILQFIDGLSGDLQVTFEEGTWAAWLYDLLKPHVTELVVCDPRKNASMREGNQSDKIDARRLAELLRLNHLNPVYPGEHGLRSLKELVRSYLTMTKDLGRVMTRVKAIYRSWAIPCSGKQVYAPRHRAEWLAKITEPGVRRRAEFYYQQLDALRALRQQVRRDLLAESKKHPAWKRLCQIPSIGPIRAAVLLGLLQTPHRFRGKRQLWAFSGFGIETQSSADHRSVDGQLQRVKKPSSIRGLNRNCNHDLKNLFKGAAIVASSKPGPFQEFYTALLTKGIRPEMARLTLARKIATIVWIVWKRGASFDAQHLKPQTA

SEQ ID NO: 152078 - protein, 424 aa, unidentified
MSSDLEIAAFIGLDWADQQHVIRLRMAGSASVEAQLLDQKPETLQTWIGQLRQRFGGRPVAIALEQSRGSLLYALMNVDFLRLYPVNPQNLAQFRKAFYPSGAKDDPQDALLLLEMLEKHRDRLRVWVPDDASTRCLRLLAENRRKLVNRRTALTNQLTSLLKESFPQALDWAGPLDSLRACDFLQHWPSLQILQKTSTSRLRRFYRVHTRLDSQAIHQRLDQIRQAQPLTSDSAVLAAAELMIPALVRQLRCLIESIQQFDQQLKDRFQQHDDYTLFHSFPGAGPALGPRLLSAFGSNRNRFECAAEVQMLSGIAPVTERSGKSHWVHWRLACPKFLRQSFHEFAAQSILFSTWARAFYDQLRSRGTSHHAAVRTLAFKWIRILFRCWKNRTPYQEQIYLASLRRHGSPLCAAPSSPTTGANL

SEQ ID NO: 152079 - protein, 363 aa, unidentified
MEEEKRRHVGIDLGKREYTMAVIGKNRKMTIHHGKTCIQGRQALYRLLEPTDKIALEAGNLAFIMAQEIIERIGCEVRVLNSAKLPFIWDAPTKTDKEDAMKLAHLVEERRDEKLPIVPLPSEKEMERRKTISSYGREMKNRTRLINTLHAIFVHQGHTTVVKKNLATAERRQQAIQALAGHEREEAEWLLKYLELHEQRIKELRGKIKEEATNDEDMKRLQSIPGIGPVVAYAFTAHVGDGSRFSKGAQVSNYIGFVPRLDYSGTIQRHGHITKRGNGYLRGLLVQAAWSMTLSKKGGALHTRYKYYTLCQEVSKKKTIVSIARKLAELMYSVLRNKTIYEPRKWDGPKNKPVILIGQTMCA

SEQ ID NO: 152080 - protein, 430 aa, unidentified
MKSNKQNAKIEAITEKTLVLGIDVGSETHYARAFDYRGVEYSKKPFKFSNTEAGFVTFKAWVLDIKEKHGKDKVIPGMEPTGHYWFNLGKFLQDNEMKPVLVNPHHVKKSKELDDNHPTKNDRKDPKVIAGLVREGRYMIPYLPDGVYADLRTASNIRFQLQAELTRIQNRINRWFNIYFPEYKTVYGKPDAKSGILILKEAPLPEDILTLGIDGVNQIWRDAKLRAVGKARAKTLIEAAEHSVGSKEGAVSARMEIRMLLEDYESRNIRLQEVMGLIEGLVNQIPMAEKLLEIKGVGIKTVSGFLAEVGDIRRFNDPKELQKLAGLALVENSSGKHKGKTTISRRGRKRLRYLLFEVAMSLVAKNPEFRELHNYYTTRRLNPLKKMQSLMAIAAKLLRVFYAILTKGVGYDPKKMVNDIRRPAAYAQAA

SEQ ID NO: 152081 - protein, 359 aa, unidentified
MSWSVRPSQSAGRCALLCGCPNSCMVFEDRILLERASPLYKKGGNMTEENVYIGIDVSKACLDVAVEPSGEYWRVANSDQAITDLSARLARLEPACIVVEATGGYEAKLVQHLCEANLPVARVNPGRVRRFAQGLNWLAKTDKIDAKLLARFGEKANPRLTKLPSEDEKRLSALVKRRKQVLEMLVSEHNRLETADPDVLPYIQDSMTMLQKQLNVLDQAIRLLIENTPDLKGKKDLLLSVPGVGEVTASTLASQLPELGTCDRKEIATLVGVAPISHDSGKKRGKRVIKGGRPAVRSVLYMATLSATRFNPVIKKFYDRLISFGKETKVALVACMHKLLIILNAMMRDRHYWNPDFAS

SEQ ID NO: 152082 - protein, 411 aa, unidentified
MQRVIGMDIHRTFAEVVFWETGRLRPAGRIDMTRSGLEGFGRSLSKEDEVVVEATGNAMAVVRVLSPYVARVIVANPLQVKAIAHAHVKTDKIDAGVLASLRAAGFLPEVWVPDADTECLRRLVSRRNQVVRHRTRIKNEVHAILQAHLIPPCPHADLFGRLGRSWLGRQELPVDERAAIERHLRELDRLGEDLELLDREIAERVIEDPSVKRLLTITGVNIIVAAGLIAAIGDIRRFSSPQKLVSYVGLNPRVRQSGLGLAQHGRISKRGRSHARAMLVEAAWAASKAPGPLRSFFLRIRARRGHQVAAVAVARKLAVLCWHLLTKDADYQWARPALVANKIRAMQLQAGQPARKGNKRGAAYAYNIKELRNREIDVARHAEHAYEQFVRRWQPRGPGKRRTGAANEERR

SEQ ID NO: 152083 - protein, 438 aa, unidentified
MWWNSQWLLSIFQKGALPMKVIYQTCCGVDVHKSFLVATIIKTTSEVQPSYQKKRFSTFNNSILEFKQWLLDNSCRDVCMESTGKYWIPVFNLLEDELNVTIANPKWVKAVKGNKDDTKDSKWIGDLFRLGLVPGSYIPCKPIRILREFTRYRYKLTSCRSSEKNRFQNALTVCNVALDSVVSDIFGKSATSVIDYLLEQSDNSINHEEISSRLLRSLKKKSESVIESIEGYQMTESQKYRMRLVHAHMDYITSTISDIDSMIDSLVEPYENAVQLLCTIPGVDRNSAITIISEIGTDMTQFSNSKRLCCWAGLTPGNNESAGKKKSVRITRAGVYLKPALVQVAHAAVKSNKSPYYKAKYERIMKRRGKKRAIIAVARMILTAIYHMLSTGEAWNPTDLYKIDMPEPLKNRQKEKAVTQAMKLLIAEGLIKESQLVS

SEQ ID NO: 152084 - protein, 326 aa, unidentified
MSNVQIYAGFDVSKKFFDICVLSIDGKSTSKQMEYDKQGLSRLTEWLPAGTHCVMEATGPYYLRLACWLHQQGFTVSVVNPLVIRRFSQMRLRRAKTDKTDAKLIAAYALMETPQSWEPPAQYLINLQQLDAASEQLQKQCTAWRNQLEAFTAGGLMDKSMKKFLTRMITQAEKELLEIQSRIDKIIVDHHQQMLKNLISIPGLGKKSASVLILITGGFTRFSDYKKLSAYVGLSPRIFESGSSIRGKSRICKLGMSRIRAVLYVCAWSAKRCNLACRELYERLVAKGKSKKLALIAVANKLIKLAFAIAVKNIPYDENIAKNICF

SEQ ID NO: 152085 - protein, 338 aa, unidentified
MTCYSGIDLHSTNSVVVVSDEADRVLYERRLPNDLLKIRAALEPYRGELAGVVVESTYNWYWLVDGLQAAGYAVHLANPAAMKRYEGIKHSGDETDAAYLAHLLRLKILPTGYICPPVERAVRDLARKRSQLVRTRTAQVLAVENVFARETGGRISANVIKRLEVAGLGEYGLGEDVTCSLAANVAVIQALTAEIEKLEARLRQRVRPRPQYRLLKTAPGIGEVLATTIMLETGPIERFAAVGNFASYARCVDSKRLSNGKKKGEGNVKNGNKYLAWAFIEAANFARRYCPEAKRFHDRKRAQTNTIVATKALAHKLARACYHMLKEGQPFDVKRCFA

SEQ ID NO: 152086 - protein, 388 aa, unidentified
MTTDHEFAVVASTTDVQKVFVAIELSKSTWVVAIQPPAVDKVSLFRIAGGEIERLFELFEQARRRAGQPIEICACYEAGYDGFWIYRALTARGVACTVLDSASIQVSRRARRVKTDRTDAESLVRVLMAIYRGEHQVAKIVQVPSPEEEDDKRLLRCRGNLLRDRIQHMNRIRGLLNLQGVRHIDPNRSNWENELVNLRTGDGRSFPRQLMNEIRREGKLLGTVVRMLKEVEAEIAGMIRDERKRRHPAQRGQNHPIARRLAEIHGVGPQTAGILATEVFYRGFKNRREVASYVGLTPTPYNSGTMVRDQGISKAGNRRARAVAIELAWIWLRNQPESKLSRWFRTRVGDSAGRVRRIAIVALARKLIVALWHFLEAGVIPEGAKTNA

SEQ ID NO: 152087 - protein, 372 aa, unidentified
MLPRLVTWKDSTPTMTDHQFEVIGGVDTHADTHTAVVIDEVGRMHGHRQFPTTVAGYRALLAWMSEHGPVRSIGIEGTGSYGVGLARYLRAQGVHLVEVDRPNRKMRRQRGKSDPIDAEAAARAVLAGTASTTPKNRDGQVEAIRVIRVARTSAVKSRTAALNALVGMVRTAPEPLRTQLLDLRNSELIMTAAALRPALDIADPIAATKTAIRRLARRIIDLDREIRAADVDLQVLLKQAAPQLLELPGVGPEVAAQLLITAGDNPERIRDERAFAALCGVSPIPASSGRTDRHRLNRGGDRMANRALYIVAVNRMRCHPETQTYVERRREQGLSNKDISRCLKRYIARQVYPLILESLRIRPPSSTALAEL

SEQ ID NO: 152088 - protein, 368 aa, unidentified
MTEITRATIVRVGVDIAKQVIQVHAVDASGRRQVARSLKRDQFLPWCAQLPAECVLAMEACGGAHHWARRLRAMGLDVRLIAAHFVAPYRMEGKGGKNDANDAAAICEAASRPRMRFVPIKTAAQQGLMSLHRVREGFKEERTACINRIRGVLAEFGLVFGKSPKVLRAVLADVLEDAGNELSGTARMVLQDAFEHWRELDEHLRWCDRQIGLHVRCSEAAQRAARITGIGAIGASAFTAAVGDFKQFHTGAQFGAWLGLVPRQNSTGGKASLGRITKRGDDYLRTLLIQGAKAAVMSAAKRDDPTSRWLQQLVERVGWQKACVAMANKNARILWAVMTRERGFDPQHVSVKPLAKQPPACEPAMACA

SEQ ID NO: 152089 - protein, 364 aa, unidentified
MRNVRFVGLDVHSDTIAIAVADQGRGEPVGLGIIPNDLPLLLRRLRKLGDVRCCYEAGPTGFGLQRALENAGIECAVIAPSLIPSRAGEQVKTDRRDASKLARFFRSGDLVPIFVPDEATEAMRDLERARDDAKKAERVARHQLSKFLLRHGHRYSGRTTWTKSHFEWIRRCVLAHEAQKRVLTDYLKAVQDQTARVEILTKHIAELVETWHLRPLVKALQAFRGIRLVSAVVIAAEIGDLRRFESAPRFMSYLGLVPSEHSSGDTTKRGRLTRAGNGHVRRVLIEASWAYRFRPRKGEALLKRSEGVSPDVERIAWKAQQRLWSVYRRLVGRGKNSKKAIAAVARELAGFIWAIGRQEALLAN

SEQ ID NO: 152090 - protein, 470 aa, unidentified
MVIRRSNDGASRPGQLSVTNKRAAGIDVHAAEHWVAVPPEAVAGTAVDPSSNLPLHVRRFGTFTADLEALADWLQECGVTTVAMESTGVYWIPVFELLERRGLQVILVDPRQMSRVPGRPKSDFLDCQWIQRLHSYGLLAASFRPQDQVVVLRSYLRQRQMLIGYASQHVQHAQKALEQMNVKLTEVVSDVMGVTGQAIIRAILKGERDPQSLASLRQPHCKRSLEEIAKALHGNWRAEHLLALRQAIALYDFYHRQLHDCDAALAAHLQTFADRSEGRELPPRSSKKTKRRANEPGFDVRAALYRMCGQDLTVIEGIDTNTSLVILSEIGSDMSKWPTVKHFVSWLGLCPQHRGSAGKIRSRRIRRGSSRAGRALRLAAQGCYHAKNALGAFYRRIQARSGGPKAVVATARKIGERVYRLLKYGESYVRQEMAAYEAKYRDRVVRGLTRKARELGFELVATASAASALS

SEQ ID NO: 152091 - protein, 346 aa, unidentified
MAYYVGLDVSVKETSICIMDDKGVVAARTDISTDPDLIARFIFEHAPEVERVVHESGILAIWLTRELEKRGVPIICIDARLAHKALSGRINKSDQGDAEGLAQLARTGWFTQVHIRSEASERVRVLIGARERLIRMRKDLESHVRGVLKVFGVCMTSVGTGKLRRNFRDQLAAAADTDPAIAMLSETFIPLHKTLCIARDVLDDEVRMMARESDLARRLMTVPGVGPIVALAYIATLDDEKRFRKSVDVGAFLGLTPKRHQSGEVDWSGKISKCGDCDMRRLLYSAASTLISCTRKPSRLKEWATKLAERKGHKKAAVAASRKIAVLLHCLWRNETVFEPGMEGAS

SEQ ID NO: 152092 - protein, 365 aa, unidentified
MFNDQDILLTVDYHDEHCVVRRREGTAGKSSVQRVPTEFVVLGSLMRSASRQAQARGGGAIWLQESTTGWARMQQLATECGVKFELANVLQMPLPPKAKRRKTDKIDTARLEREYLHGELPRAHQPSAWWRQVRRVVALRQNLVRRRTALTNWINRYLAHETWAPCGRFGSKRLERRLRKLPVPDLDRRVLDWKLDELKSLQAQLSQVEALITELSHESADARRLDAIRGLGPIGALAIVARIGPIDRFQSADQLIGFAGLAPGVQQSDGTRRDGKIGGGGTDKCLRHYLTEATMWARTIPRYRDAYQRAVRRRGTKIGRLVVARLLLRSIYKILKDGVEFQPESGTRTAPGNNVTAQETCPQTV

SEQ ID NO: 152093 - protein, 409 aa, unidentified
MVVHVAPASSSMVVVAVDVGKNEFAVSVTAADRRQLMRPRLGCPMTSPSLREVQAAIEAVLPVSVRVRVGVEAAGHYHLPLLSGSAWPSGWEVVELNPAQVSEQRKVLGKRTIKTDTVDLEAMTELVLAGRGWPVRDTAVVLTELTAWSAHRRSRVAVRSATKNQLLAQLDRTFPGLSIALPDVLGTKVGRLVAEEFADPTRLAALGEVRFIRFGATRGLQIRRRTAEKLVAAARDALPMPDARVARAVLRADLRLQADLDAQIDAATAELNRLVPLSPFATLTTVPGWGPVRVGSYGGALGDPARFGTARQVYRSAGLNPTQYESAGKRRDTTISREGSVELRRALIDLGIGLWLNDPSAKHYAATLRARGKNGGVIACALAHRANRIAFALARDHASYDPAIWNREG

SEQ ID NO: 152094 - protein, 370 aa, unidentified
MTKEQSAIYVGIDVSKDKLAVAIAGGGSHDEILSLGTFENTPASVDKLLKKLSGRGAVSVCYEAGPTGYGLYRQVRAFGYECCVVAPSLIPVRAGERVKTDRLDAMRLARLLRAGELTPVWVPDETHEAMRDLVRTRESAAEDQRHKRQLVSAFVLRHGRVYPRTKPWTMRYRRWLQSLTFDHPAHQIALQEMLQAERNATERLDRLTGHIEALVPEWDLAPAVNALQALRGVALISAVTFMAEIGDVRRFETPVKLMAYLGLVPSEYSTGKTTRRGGITRAGNARVRHKLIEGAWTYRLQARPGERKLYILMEQSPEVQDIAWKAQSRLTARYRKLILRGKKSTVVTTAIAREMAAFMWDIARRTMPVR

SEQ ID NO: 152095 - protein, 431 aa, unidentified
MKIDRGSCRKYFREVIHMKKVYDNCCGIDVHKKIMVACFIHGKEQEIREFGATTRELLLLADWLSQGGCQMAAMESTASYWKPLYNVLETSGLNAIVVNAQHMKAVPGRKTDVKDSEWIADLLQHGLLQPSFIPNKAQRELRELVSYRKSLIKVKTAELNRLQKMLEGANIKLSGTIADIDGVSGRNLLNALLSDQKVDETKLDEMRRKKQIAPNLKASNEQLLEDLNGMLTPLQKKMMKELLSHLDELIRHIKNLDDDISENMNGEEKKATAVIQDIPGIAAIGAQQIISVIGTDMSRFPTDAHISSWAGLCPGNNESAKKRRSGRSRKGNAMLRTTLITCAHAAVRNKNSFFYAEFQRVSGHRGSKRAYVAVAHSMLKAIYHILKDGVVFKDLGADYYNQFNKERKINSYLKKLRSLGWQPDAMNYLPA

SEQ ID NO: 152096 - protein, 340 aa, unidentified
MGEITTVGLDLAKNVFQVHGVDAEGATVLRKQLRRAQVPGFFGKLPRCLVGLEACATAHYWARELCALGHEVRLMPAQYVKAYVKRNKNDAADAEAICEAVMRPTMRFVPIKTADQQAAVLLHRGRERLVRQRTMLVNALRAHLAEFGIVAPQGLRNVGKLIAIIRDEDDARLPDLARQVLAVLAVQIEQLETAIAALEKQLMAWHKSNPVSQRLATIPGIGPIIATAIAAIVAEPSGFRSGREFAAWLGLVPRQKSTGGKTRLGGISKRGNQYLRRLLINGASANLLRSKATNADPWVIGLRRRRPSMVVAVALANKTARIAWAVMHRQENYQRTVLAA

SEQ ID NO: 152097 - protein, 340 aa, unidentified
MDIHTIGVDLGKTIFHLVGLDWRGEVVRKKFSRAQLLRFTANRHVQLIGMEACGGSHFLGKALQEQGHEVRLIPPQYVKPLVKTNKNDFIDAEAIAEAVGRPSMRFVPIKSDDQLDLQSVHRVRERWVTRRTAVVNQIRGLLLERGITVPKGRCHLEAALLPILTGAEAKLSGTIRLLVSQLKLELDQLTVRLEETDALIQQTAQENDACRRLDAIPGIGPVTATALLAAIGNGIAFHKGREFAAWVGLVPREHSTGGKQKLLGISKRGNSYLRKLFVQGARAVLQFREKQSPGLKAWLAKLSSRTHYNVVGVALANKLARMAWAVLARGDVYRPPVLPC

SEQ ID NO: 152098 - protein, 341 aa, unidentified
MGQVSTVGLDLAKSIFQAHGADASGEVVFRKKLGRSRLLAFFANLPPCVVAMEACAGAHYWGRELARLGHSIRLIPPIYVKPFVKRQKNDAADAEAICEAAQRPSMRFVPLKQEEQQASSVVFRARDLLVRQRTQTINALRGHLAEYGWVVPKGVPHVERLIARVEDPAEALPSAARSILLVLVSTLRTLDEQIAVLDAEIASRAKHDPVARRLMTIPGIGPITATALIALAPSHEAFKSGRHFAAWLGLTPRQRSTGGQQKLGSISKMGERTLRRLLTIGASAVIKQAAIRGAPTGSWLDQMLARKPKMLVIVALANKNARIVWALLAKGDVYRAPGAPA

SEQ ID NO: 152099 - protein, 409 aa, unidentified
MQYFVGLDWAAREHAVCVVDGRGAVVAQFTVAHTASGMTDLAARLAKLAPVAELRIAIERPTGLVVDTLVEGKFAVVPIHPNVVKAVRPRYSAAQPKTDLGDAYLLADLLRTDGHRFHTLVPLSDETKALRGLVRVRDDLVGQRVAAANQLRCLLEQFWPGAVELFADIDSPIALDFLERYPTPQSAASLGEKRMAAFLARHAYSGRRTAAELVQRLRSAVPSTAGELEAEAKGECVRALVAVIRPLVTQLATLSAAIEHAVDAHPDGKIVTPLFRSGRICAAQLLAELGDDRGRFVSADHLAAEGGAAPVTRESGKHRVVTFRWACNMHLRQALSTLADTTRHTNPWARSIYQRARDRGHEHPHAIRILARAWCRVIWTCWQQHVAYDPAKHRAARPFTLRSIDEAAA

SEQ ID NO: 152100 - protein, 430 aa, unidentified
MRSEVKSEKQEPQFAAFVSIDWGDKKHVWCLQAAGSEQRESGELEHTPEAVEAWVGQLCQRFAHRPIAVALEQSRGALVFMLSKYEPLHLFPVPSTMSASMRKALYPSGSKADPRDADLLLALLLKHRDDLRRLSPDTEATRRVQNLVEERRKLVDEKTAQTNRLTSDLKIYFPQVLDWFEHLDTELVCDLLERWPTLEELQKVPPAKLRTFFRKHYCRDEALIERRLLAIRQAIPAIRDRAVIEAKSMVVRVIVQVIVSLLEGIADLDKKIEEAAATHPDFFIFDSFPGAGAVMAPRLLAAFGSQRERYGNAGEVQTYTGIAPVMEKSGKKKWVHFRWACPKFLRQSFHEWAGHSIAQSAWARSCYQQLRSRGKGHHAAVRALAFKWIRILFRCWKDRVAYDENKYLAALARRGSPLAVAKVAIAGKGL

SEQ ID NO: 152101 - protein, 309 aa, unidentified
MDAVYVGIDVSKDRLDVHVRPSGESLAVARDGEGLAVLIARLQPLAPQLIAVEATGGFEIVVAAAIGGAGLPLVVVNPAQVRHDAQAVGQRAKTDAIDAEIIARFAEATKPPPRPLPDAATRLLADLVTRRRQIIAMMVAERQRAARLPNSLKKSCERVVRGLERELGELDRQLDTAVRGSPAWREREDLLASVPGIGPVTARTLIAELPELGQLDRRKIASLAGLAPFARQSGKWRGKSFISGGRASVRTALFIATLSAARHNPIIRAFRQRLIAAGKPKMVAAIACMRKLLTILNAIARDHKPWQTA

SEQ ID NO: 152102 - protein, 345 aa, unidentified
MTMVSVGSVTGGVDTHLDVHVAAALDPIGGLLGVEEFDTTQAGYEALLVWLLSFGAVGRVGVEGTSSYGTGLSRFLMDQEIEVIEVDRPNRQERSRHGKSDPIDAVEAARAALSGRATGLAKTKDGPVEAIRALLVARRSARKHRISALVQMRHLVFTAPQPLRERFFGLTKTQLVNQAAALRPRDTGDVVTYATKVALKLLAQRVQLLDAQIKQLRHMLPALINTAAPDLSDVYGVGVDNAAILLVAAGDNPGRLKSEAAFAHLCGVAPLPASSGKVIRHRLNRGGNRQANHALYQIVLSRLASDPETKRYVERRTKDGKSIGETVRMLKRYVAREVFKHLPAG

SEQ ID NO: 152103 - protein, 312 aa, unidentified
MEKLSYGGIDVSKDRLDVVVLPEGWFFSVSNDTAGWAELVARLRPLAVSAIGLEPSGGYERGIIRALLAAGLSVRRINPNKLRQFARARGVLAKNDRLDARLIAEYVAIMPTRVVQRDDAVERLAEIVTMRRQLCDEHVAVENQAAHLEDAMLRRLSKRRLVRLEADIRLLDKRLAEMVATNAAFAQLYELLTSMPGVGPVLAFTLIALLPELGKMSRKQIAALVGLAPYDFDSGKLRGHRSIYGGRMPIRNVLYMAALSASRYNPALKTFSNRLTHANKKSKVIIVAVMRKMITTLNAMLRDNAAWQPQSN

SEQ ID NO: 152104 - protein, 433 aa, unidentified
MHDAQDEPLFAERVAGLDIAKAGVEVTIRVPSDTTPGRRQQETRTFGTTRRELESLADWLRCWGVTKAGMEATGDYWKPVFFLLESRGFDCQLYNAAQVKALPGRPKTDRADSIWLARITERGMISSSFVPPEPIRRLRTHTRYRRHLTQARTAEKQRVEKLPEDGHLKLSSVISDIHGVSGRDMLNAIAAGQRDPRALAQLARGTMRGKIRRLEEALDCSFFTDDHAAVLAMMLAAIDHYTTQIGQLTARIEALIAPYLDQVGQLDAVDGIGTICAQDIIAEIGTDMTVFPTASHLASWAKWSPQARQSAGKRKGSNSTGRGNPYLGAALGEATISAGRTQSFLGAKYRRLTRRMPKKKALVATGNSMLAIIHALLSDPAASYQDLGADYYEQRMHVRRQARNHVKSLERLGYKVTIQALSPDTAQPLTATA

SEQ ID NO: 152105 - protein, 482 aa, unidentified
MKPNPQEKNKRATNHQTQHHWHEMNRKQRREMMRKIQSEDLGLEVIHPDAAGIDIGNESHYAAVPPSRDSQPVRCFGCTTAALRAMAVWLQQCRIRTVAMQSTGVYWVAVYDILEQAGLEVYLVNARDTKNLPGRKSDVQESQWLMKLHTYGLLRKSFRPSQEIRVMRTFWRQRNDLVQSASRHILRMQKALTQMNIQLANVLSDVSGLTGQTIIKAILAGEREPHKLAAFRDCRVKASEEQIAQSLEGNWQPELLFLLKQEQKGYEFCQRQIAECDRELAQYLQKREDRSQGAPLPEEKRKERLRKKRGNSPRFDLREGLFRMTGADLTRIDSIDVITAFMINREAGYDMSKWKTENHFVSWLRLCPDNRISGNKVIGKGRLPTNNPISITLKMAATSLRQSKTYLGAQFRRLRTKLGAPIAIKAMAAKLARLVYRMLRYGMKYVDQGAALYELKHREIQIQRLKWKAAQLGYKVTAIPVG

SEQ ID NO: 152106 - protein, 312 aa, unidentified
MNTEYIGIDVSKATLDVYILSSKEHMHVSNTVEGVKKIVSRIKSIKPSKVVMEATGSYDTLCAAHLASSGITLAVVNPRQVRDFARAVGKLAKTDTIDAQILAQFAQAVDPPCRPLPSSDERQLKELLKRRAQLIEMRIRESNRLRTIESERITDSIELVLNTVNKEIARIEDEIYKSIKRSPVWQQKAKLYKSVPSIGEGTATMLIANLPELGTLNRREIASLVGLAPMNRDSGTLRGRRMICGGRPEVRSALYMPTINAVRFNPLIRKMYERLIQSGKPFKVAITACMRKLLTILNAIARDNTPWAYKIT

SEQ ID NO: 152107 - protein, 366 aa, unidentified
MKKISTLRVNGNMIFKGHKLTIGVDLGDRWSCYCVLDEAGEILLEQKVATTPEAIKQTFGRIPRSLIAMETGTHSPWVSRLLRELGHEVLVAHAQKVELITKSKRKDDRHDARTLARLARIDPELLGPVRHRSAKAQIHLTVIRARAELVSARTALVNAARGLAKSYGERLPKCGTEQVSRELAAELSAELREVLEPLLKEIESLNERIKEYDARMEKIARESYPQVALLKQVKGVGTQIALTYVLTLDDPHRFPKSREVGCFLGLRPGRRDSGESQPQMHISKEGDRYLRTMLVQGAHYILGPFGEDSDLRRWGQKLAARGGKSAKKRAVVAVARKLAVLLHRLWVSGEVYEPLRNSHQAMRAVA

SEQ ID NO: 152108 - protein, 323 aa, unidentified
MQGKVSFQEDAMPVVYAGVDVSKEWLDIHLHPLGESRRFCNDKTGIRQLKRLLARHRLASIVMEATGKFHRPAHRSLWLDGFAVAVVDPLRARMFARACGYLAKTDRLDARFLALLAESLRPPADTPPSPHVEALQELVNARSAAKCDITALQNRSKTATTALLRGELNRLVRRLEQHVERLDKEIERCVGEDPQLCRKAEILTSIPGIGRVTALALMAGMDELGSCSGKQAAMLAGLAPIANDSGARTGRRSIRAGRPAPRRALYMAALSACRYNPALARFADTLKAAGKPAKVILVAVMRKLLVLANCLLSQDRLWTPTPP

SEQ ID NO: 152109 - protein, 353 aa, unidentified
MTEYVGIDWAYRRAAWCAMSAGGVITGEGFTPADEDGLAKLVLSLGSEVKACLEMMSGAVWVRDRLRSAGWQVEVADARRVKGVAPLACKTDRVDARVLAELCRRDLVPALWIPSLEERELRERLRRRMHLVRLRTSAMNRIFGLGTQWGLRLSAERLRRQGALELLAQRGVPAVWQRSIQEALAVIDLLEARIAPLEAELVPIARADRDVALLVTIPGVGEMLALTLAAEIADVSRFPSPGKLVGYAGMAPGVKQSGQSSRSGLPLSKAGSRTLRWAAVEAAQHAWRESNPWHQLYSDVAKRSGKNAAKSAVARKVLIASWHMLSRCEPFKPSRPRGGARTVPASSISVLAA

SEQ ID NO: 152110 - protein, 391 aa, unidentified
MIYAGIDVAKDKHDCFITNSVGEVLFKSFTIPNNREGFETLFQKIQSVSDDLTKVKVGLEATGHYSYNLLRFLLDKGLPTYVINPLHTNLYRKSLSLRKTKTDKVDAHTIASMIMSDVNLKSYSDTSYHNEELKSLTRYRFDKVKARAKLKSSVSRLVCILFPELEKLVPTLHMVSVYSLLSEFPSAHVIASAHLTRLTNLLSESSRGRYGKDTAICFRDAARSSIGSHIPAKSLELKHTIRLILELTSEIDEIEAEIKTIMDKINSPILTIPGISYKMGAMIIAEIGDFSRFDSPDKILAYAGMSPSIYQSGQLDNCYAHMEKRGSRYLRYALYNATKYVCHWDESFGTYLAKKRAEGKHYNVALSHATKKLVRTIYAMEKSGQAYTNAA

SEQ ID NO: 152111 - protein, 346 aa, unidentified
MNQIIRIGMDTSKHIFQLHGVDSAERAVLRRKLRRSQLLAFFAKLPPTVIGMEACGAAHYWARELRKLGHEARLMAPQHVKAYVKRNKNDGRDAEALCEAMSRPTMQFVPVKSEEQQAALMLAGVREQLIARRTQLCNAIRGYAAEFGLTAPKGLDKIEPLLAQITQDQTVPAMARELLALQGKDYARLQIEIKAIEAKLMAWHRANATSRRLAQIPGVGPIGATALVMKVLDPRLFPSGRHFAAWIGLTPKDHSTAGKRRLGKITRAGDERLRSVLVAGATAVVQQAKIGRGRASPWLLALLKRKAPKHAAVALANKIARIAWKLMVTGESYDGARMPGASAFAA

SEQ ID NO: 152112 - protein, 413 aa, unidentified
MEIVFRMCSGLDVHEKTVVACVILSLANGSVDKEKQTFATTLVGLQALRDWLRSKGVTHVTMESTGVYWKPVYNVLHEHFDVWVVNARHFRQVPGRKTDLNDAEWLAELMRFGLLERSFIPEEWQRDLRDLTRYRTRLLDERSAAANRLQKLLEDANIKLSSVVSDIQGVSARLMIAALIDNQLTAQQMAELAKRKLRQKIPQLVEALSGLVRPHHRFLLQEILTHLDELNARIDSLNQRIDELVKPYAGLIDRLDAITGVGVQTAQIVLAEIGVDVKAWPTANHLASWACLSSGNNQSAGKRRSGKTQKGQFWLVRTLVEAAHAASHAKNTYLAAQFHRLRARRGAKRAAVAVAHSIVVIIFHLLKQPDTSFQDLGGDYFLTKNKEQEQRRALKMLHSLGFEVTLSPAAVAA

SEQ ID NO: 152113 - protein, 366 aa, unidentified
MKKISTVAKRGNEIFEEPKLTIGLDLGDRTSHYGILDEAGNVILEHNLPTTPKGIQQVFSRIPRSRIALETGTHSSWVSRQLTELGHEVIMAHARNVRLGGESSRKDDQFDARTLARLARIDPDLLGPVRHRSAKAQIHLTVIRARAGLVSARTALVNTARGLAKSYGERLRKCGTGQVGRALAGGLSAALRDALDPLLQGIESLNERIAEYHRRIEQIAKEVYPEVALLKQVKGVGTLIALTYVLTLDDPHRFRRSRDAGCFLGLRPGRRNSGMSEPQMHISKEGDRYLRTLMVQGAHYILGPFGEDSDLRRWGLKLAERGGKNAKKRAVIAVARKLAVLLHKLWVSGEVYEPLRNNHKVVSAVA

SEQ ID NO: 152114 - protein, 339 aa, unidentified
MELYVGMDLHSNNTYVGILDKATQEKVYNKRLPNELPKIVYELEPFRKDIKAITVESTYNWYWLVDGLMDSGYEVCLANPVANQQYKGLKHANDKSDAFWLAHMLSLEVLRKGYIYPKEERPLRDLLRKRTFFVHQRTSNILSLQTMINRCIGDRMKSNAIKTLTEEEINKLFKDEHLRLTTISGVNTIKSLEREIKTLEKAVLEKASIRKEFKPLLSVPGIGKILALTIMYEVGDITRFEKVGNFSSYSRCISGKWTSNDKVKGKGNSKNGNKYLAWAFVEAANIARRHSKKLNAFYQRKMSSKNRIVAVKALANKLSRACYYIMKDQVFYKEEMLVS

SEQ ID NO: 152115 - protein, 323 aa, unidentified
MSIPTLGIDISKLKFHVALLRTDGKYRERTFANTPAGFGQLLEWLQRQEGAGAHVCMEATGSYGEALALFLHEAGWRVSVVNPAQIKAFAASELLRTKTDRVDARLIARFCRAHAPAPWQPLPLEVRTLRALVLRLEALQEMQQQERNRAQVCNAAVQPSIEALLVTIDTQLSTLKELIKKHIDNHPDLRAKRELLLSIPGVGEATLATVLAYFAATPERFADVGALIAYLGINPRQRQSGTSLNAAAHISRQGPPIVRKRLFFPTLSACSHNPIVRALYERMLAAGKPRKLGVLAAMTKFVRLIFGVVKSGKPFDPNWQPTA

SEQ ID NO: 152116 - protein, 355 aa, unidentified
MNSVRYVGMDVHRDTISVAVLDEGGRLTMQSVLATRAGAILDFIHGVRGTLHVTFEEGTHSAWLYDVLVRRVEKLVVCNPRKNALMKSGSKSDAIDARKLAELLRAGMLSAVYHGETSGLEVQQMARSYSQLTEDTTRVMARLKAVFRGQAVSCVGKKLYGKRHRDEYLGQLGGSGLRRRAEHLYQELDALQPLRHAVRRELIAECRKHAAARWLQSVPFLGPIRAALLIGRVQTPHRFRSKRQFWTYCGLGLETRDSGQYRVVHGQVERRRKPVLIRGLNWNHNHEMKNLFKSTATAASVREGVWREFYLGLLAKGMRPEMARLTLARKIAAITLKIWKKGETFHAEYLKLQAA

SEQ ID NO: 152117 - protein, 355 aa, unidentified
MNDAKYIGLDVHQATISVAVLDSAGKLVMEAILETKAETILQFIHGLHGSLHVTFEEGTCAAWLHDLLKPHVTQVLVCDPRKNALIKAGNKSDRIDARKLADLLYLDKLNPVYHGETGIRALKEVARSYLALTRDTTRVMNRLKALYRSWAIPCAGQRVYAPRYRSEWLAKITEAGVHRRAEIYYQQLDALRSLREQVRRDLLAEGRKHSAMNLLRQIPSIGPIRAALLIALMQTPHRFRTKRQLWAYCGLALKTSTSGEYRFVEGQLKRSKKFLAIRGLNANHNHDLKNIFKGAATRAAAVPGPFQEFHAGLVARGMKPTMARLTLARKIAAITLIVWKKGVGFDAEHLKQQAA

SEQ ID NO: 152118 - protein, 419 aa, unidentified
MGKIIENCAGIDIGKRFLLCCVLTGGAAEEPRSETLRFEATVTALQRLREWLTNKKVTHVVMESTGSYWIPVFNILEDHFVIVLANPEEVKNRKGHKTDRQDAEHLADLLRHNHVRSSYIPPKPVRDLRDLTRRRLQLTEDATRERNRVQKLLEHVNVKIGNVLSDVFGVSGHNMLLALLSGQATPEEIAQLARGQAKRKIPQLIEALEGHRMSEHERLLIRSCLRHLACLEEEVEELDGEILRRMQMPPFETAYRLMQTLPGVGQLAAASILAETGTDLSPFPTAHQMASWAGLCPGNRESAGIQKGGQTTHGNSYLRTALVQCAWAATRKQGSVFQSRFQQLSPRRGQKRAIVAVAHQMLTIAYCMLKQGVPFRDAESVPRQRRRKRRAHHHLCCLRRLGLSVRVVADSNGVLGETA

SEQ ID NO: 152119 - protein, 414 aa, unidentified
MDIVHTHCAGLDVHKKTVVAAVSVPNSGGGWYQATHTFATMTGDLLALSDWLMQCNVTHVAMESTGEYWKPVFNILETNFEVVLVNAQHIKAVPGRKTDVNDAEWLADLLKHGLVKASFVPPEGQRDLRELTRYRTTFVRERATLVNRVHKVLESANIKLTSVATDVTGASGRAILAEVIQGTASPAIMADLAKGRLRAKRDQLIKALEGRVKAHHRFVLTELLCQIDNLDEAIDRFDQQIQEYCRPFEEAVQHLDTIPGVARETAEIIVAEIGTDMSRFPSADHLAAWAGVAPGSNESAGRRRSGKTRKGDRPLGVALNQAAHGASHTKNTYLAAQYHRLAARRGKKKAIMAVAHSILVIAYHLILRKEDYRELGGDYFDKRRPEATANHLVKRLKALGYTVNIQSQTAAVAA

SEQ ID NO: 152120 - protein, 352 aa, unidentified
MYYVGADLHKEQTWFYVMDENGTKIDSKSIPNSQDSLKSYFVTIPTPFTLAVEATYNWYFFIDMAEKFAQTAYLANSYELKAFAKRHKKTDKIDARLIADILRKGFLPKVFIPNQSIRQLKELLHHRINLVRDRSRNIFRLKNTLDKLGADSSGDFTTVKRLQMIPVKTLPEHSQYVLTGYIEQIIQLSQRILKMKTYLRNELLEDKEIQNLITIDGLDYFSAALIKSEIVDINRFASFGRLCAYAGLAPKVSQSGDKAAYHGALMTNRRKDLQWILLETVFHFIRGSSERMSRYEELKIRKGANTAKVIMARQMLKVIYHVLKEQRPYYQDVTVTQEKQIQSVAAAALQGV

SEQ ID NO: 152121 - protein, 330 aa, unidentified
MKNLRDVIGIDVSKSTIDATLYHSKLHSVFANDEHGYMGLITWVDGQLESGSYFFCFENTGNYSLKLSLFLSSKGLPYVEESPMRIKRSTGLTREKTDKLDSYMIARFGWMYREELVFSEIRSKEFQELGRLLALRDQLVRDRSGLKSTLKEQKHLLSSPSTDTCCKTLRRCIDHLDRQVSRIEKKMQELMKTNDLLYNNYRLLRSVKGVGLILSCQLLYHTGNFNKFENWRKFSSYCGIAPFEYSSGSSIKRRKQSHYIGDRKMKTLLSMAAVSAIQSDQELKLYYHRKLEEGKHKMIALNNVRNKILARSFAVIKRGTPFVNIAATNY

SEQ ID NO: 152122 - protein, 373 aa, unidentified
MKTTITHVAMDTHKKEHVVALAYPDTGEIEVFRVRNSLREITKMVHRLQRRAPGEVRFCYEAGVCGFVLKRQIEALGSACAVIAPSLVPVKKGDRIKTDRRDARKLLGQFLAGQLTEVFSPSIEQEAAREQTRCRQAAQENLKRSRQQLNTFLTRHGYLYGEGRRWTQRHTRWLLSLEFDSPDLREVFECYYSEVEHCRQRLATLEKEVAALAERPAYREIVGLLRCLRGVDTLTAITLITELFEFGRFDSPRKLMAYLGLVPSEESSGEKRRPGAITKTGNGRVRRLLIESAWHYRHRPSVGGTLKKRRQGQPSWAIDTADRAMLRLHKRYRRLMERGKSANIVVVAVARELAGFLWAILRGHQMRASGPPA

SEQ ID NO: 152123 - protein, 356 aa, unidentified
MDKVIREGAVRVGVDLAKRVIQVHAVDGAGRVLSARALARDRFIEWCVHLPAGCVVAMEASSSAHHWARKLVALGLDARIISAQLVEPYRSQGASGKNDANDAAAICEAASRPTMRFVPIKSIEQQSMLCVHRLREGLKEDRTACINRIRGLLAEFGLVFPQSPRELQAVLSDVLEDASNELGSLARLTLLRAQAQWHELDEHLAWCDERITAHGQSNAAVKAAATLLGIGPITASAVVATVGDFKQFKNGAQFGAWMGLTPRQRSSGGKNNLGGITKRGDTYLRTLLIQGAKSAVMTAHRRQDKISTWAAALRERSGWQKAVVALANKNARVLWAVMTRGVAFDLNHLSVKPSAA

SEQ ID NO: 152124 - protein, 345 aa, unidentified
MQPMYYIGLDLHKRTISYCVKDVSGTIHAEGTIPAIRFHLDQWMNTLPQPWTAAMEATVFTGWIYDHLQPHAAGLKVAHPLMLRAIAAAKKKNDRIDARKLSDCLRCDFLPECYMAPTAIRERRRTLRYRNLLVRQMVQMKNKIAVLLMEAGVSYNKQRLHKAGYFRELLATNPDINEGLCSLLRVCRETVVRLQRTESALVRSLERDSLLKERVERLMTIPAVGPITALTWALEVGDVWRFSSIKKAISYCGLCGAEKSSANTVQRTPLSKQRNKHLQTMLIEAAKMAPRYSPHLALLYDKEKQKGSANRATLAVARKLVAYLMAVDRGQRPFELVEASHSTAA

SEQ ID NO: 152125 - protein, 361 aa, unidentified
MTQCSKTENQLTAGFDLGDSYSYLYVIDTATGEMIEETRLPTNPEKFERYFADREAMCVAVETGKHSPWVSRLLAACGHKVLVANARKLSFIYRNERKSDRSDAENLARVARLDPKLLAPVEHRNETAQADLALVRSRDTLVKTRTQLINHVRGVVKSFGGCLPRCSSASFHHKVLNHLPEPLRPALAPMLETLAELSQQIESCNETIQQLVEERYPETQTLRQISGVGALTALTFMLTLESPDRFKNGRQVGAYLGLTPALHQSGDANPRRRISKAGDELLRNLLVECAHFIVRPSSPDSDLKRHGEKLMQRGGAYARNQAVVAVARKLAVLLQHLWLTGGVYEPLHNSCTGDHRQLAKA

SEQ ID NO: 152126 - protein, 362 aa, unidentified
MGQALLVVCVRLVNGRGELSQEVRSFGATTPDLLVLRDWLASLGVTHVAMESTGVYWKAPYYMLEDDFEVLLVNAAHLKHVPGRKTDVIDAQWIAEILSYGLLRPSFVPPRPFRELRDLTRYRKALIRARTSEVNRLHKVLEDAGVKLATVATDVMGVSGREMMRALIGGVADPQVLADLARARLRAKLPELRKALTARFRDHHAFLLTRMLTNIEALEADIDVLSERIAELVEPWAGQLMILDSITGVGPRAAEVILAEIGPDMRRFPTAGHLASWAGRCPGQRNSAGRRGSAKPRKGSPQLSAVGGLFDRGVYPDPGAFIARIGEGRQSSGGGGVERPEHVRAGRGQVVYTVVYRARLDR

SEQ ID NO: 152127 - protein, 364 aa, unidentified
MLFLGVDWAEDHHDVCVMAEAGMVLGKRRVADSVAGIGELHGLVAEHADDDEAVVVGIEIDRGLVVWSLLGAGYEVYAVNPMASARYRDRHGTSGAKSDPGDAKVLADLVRTDRHNHRPIAGDSDLAEGVKLLARAHQSAIWSRQRQLNALRSALREYYPGALAAFGTDLASADALAVLAIAPTPELGRGLSRSKIASALRKGGRQRNIDRRAEEIQAALRSEYLEAPELITKAHGLVTHSTLALIITFNAQIAQLEAALSEHFEQHPDAKVVLSLPGLGTVLGARVLGEFGDDRTRFSGPKSRKNYAGTSPVTKASGHSQVVLARFSRNRRLGDACDQWAFCALTKSTGARSYYDQLRGRADR

SEQ ID NO: 152128 - protein, 397 aa, unidentified
MFYLGIDIAKHKHYASIIDSTGKPITKPFPFHNHKEGGQALLTWLYRYISSPTELSIGMEATGHYWIAVYSFLLDHGFSVIVLNPLQTNAWRKGTEIRKRKTDAIDATMIADVIRFGRFLETPLVDEKMFALKQLSRFRNSLVRNISDLKRKALVVLDQTFPEYQSIFSNVFGKTSSQLLIEYTSPSDYERLSIDDLTLIIEQASRCRLGKKTANQLMELASNSFGVTFCKDAFSFQLKMLMEQVRFIETQLRECENQMSQLLSDLDTPITTIPGIGPILGATILSEIGDIDRFDKPSKLVAYAGIDATISQSGQYESTGMSMSKRGSSHLRRALFQAAITAYKHDPVLKAFYEKKRNQGKHYYVCIGAVARKLCYIVYAILKSNKPYKIPPFPCQR

SEQ ID NO: 152129 - protein, 406 aa, unidentified
MQSIYARCCGIDVHKKLIVACLLNGNKSELREFQTLTGDIKKLAAWLVENKCQMVAMESTGVYWKPIYNILELMEIPVMVVNAHHMKNVPGRKTDVKDAQWIAQLTQNGLLRASYIPDKEQRELRDVVRYRKSLTEERSREMNRLEKTLEGSNIKLSSFVSSLTGVSSRKLLNQAMTEEGVTGENIASLLHVSMRDKRNDLLLAMEGVLTPVQRQLVMAILNHIDDMTRRIEEMDNIIKGQMLKYEEEIQRLDELTGIGKTSAEIILAEIGTDMSRFPTAAHICSWAGLSPGNNESAKKRKGGKTTKGNKTLKSTLIQCAQSAIKNHDSFFYAQYQRLVVRRGANRAKVAVAHSMLIAIYHMLKNNVPFHDLGSDYYSKFNAQSKVNYYIKKLNELGVALPVPAPA

SEQ ID NO: 152130 - protein, 411 aa, unidentified
MQPLYRCCAGLDVHKDTVVACVRRLDERGEAQEQVRTFGTMTESLLSLADWLAQEGVTHAAMESTGVYWKPVYHLLEDQFELLLVNAQHIKQVPGRKTDVKDCIWIAQLLQHGLLKASLVPPPFQRELRDLTRQRSQLIGESARVTQRIHKVLEDANIKLASVATDVMGASGRDMLRALIAGQTDVKELAKLARGRMKAKTPALRKALFGRVTDHHRFLLRMHVDHYEQLEALIAEFGKRIMEKLAPFAQEVELLKTIPGIHERTAQVLLAEIGPNLTPFATAAHLASWAGVCPGNNESAGKRRSGRTRKGNQWLRSALIQMAWAASRTKNTYLSAHFRRLSVRRGAKRAAVAVSHSLLVIVYNVLTRRTPYADLGPDYLDRRNEQRLTQRLIARLERLGHKVTVQPREAA

SEQ ID NO: 152131 - protein, 343 aa, unidentified
MQIRSVGIDLGKTTFHLVALGDNGKVLLKKKFTQRQLIAFTANLQTSLIGMEACSGAHFLGRALRAQGHDVKLIPAQFVKPFVKSNKNDFIDAEAIAEAVDRQNMRFVPIKTDDQLDLQALHRVRDRLMARRTSVINQLRAFLLERGMVFAKSPARLRECMPEVLENAEEDLTPRMRNLLAQLWNEWKDLEQQVGDLNHEVELIASSDAACQRLRQIPGIGPLVATAIVAAIGNGAAFHKGREFAAWMGLVPKQYSTGGNAKLAGISKRGNRYLRKILIHGARAVVLRSKRDRIAMGEWMTALEARAPRNVLIVATANKLARIAWAVLSSGQDYRAVQEPVPA

SEQ ID NO: 152132 - protein, 412 aa, unidentified
MEVVHARCAGMDISKTDAKVCVRIAGAGRRKTAETVTTWGAMTGQILALRDHLAAEKVTCVVMEATGDYWKPFCYLLEDLPRVQVMLVNARHVKNLPGRKTDVADATWLAQLGAHGLVAGSFVPPAPIRALRDLTRTRTAITRERGREAQRLEKLLEDAGIKLSSVASDILGVSGRAMLEALIAGQRDPDLLADLARRRLRAKIPELAQALEGQFGEHHGFLARVHLDLIDQHTAAIGELTRRIEQVIEPFRGFRDLICSIPGIAIVTADVIVAEIGDDMSRFPTAGHLASWAGTAPGSNESAGKVKSSKTRPGNPYLQGALGTAAMSCAQHPGTYLNAKYRRIATRRGPQKANVAIQHAILVAIWNMGTNGTFYEDPGGDYFTRLNPKRARTRAIRQLESLGYAVTLANAS

SEQ ID NO: 152133 - protein, 309 aa, unidentified
MQNPSFVAVDIGKDSLHIQTSSLAFETTSGPAGLRKLLAYLRKEEDPLVVCEATGGYERPLLEALAKAKIAYCLINPARLRAFAVSEGIKAKTDRIDARVILRFAQEKKLTPSLPLSPAQRLLADLLDRRSHLSDQIAREKNRLQKASKATATFIRRMIAFAQRQLQTLDRAIRLHLSKQPQLSAQARELISVQGVGEVTAWTILAYLPEIATLGRNQLVALAGVAPFNRDSCQTNRKRRILGGRAKVRRCLYMAAHTAATHNPVIRPYVQGLLARGKPYKCAIVAAMRKLLIHLQSKLKNLTNIPLAA

SEQ ID NO: 152134 - protein, 421 aa, unidentified
MKNKAARKLKQVPAGYLAIGVDPHKKVHAAVAITEDLTVRTKFKFSNSRAGFEQALENARAEMIKTCCCGVIFAIETGGHYWRNFAYFLDERGIPFRLISQITLKRMRDGRDINRRKSDFRDAEMAADILRTGDFTETRLPQGVYADLRSTHSAYFRLVKERSRIVNLMKGLLDGLFPEFTQVFKDPCGRNAMAVLLTCPSPAVIASIGEDVFIAKIRDRRQGRLMLKKLRALHQAAKTSVGVKPGADSVATEISLLAGRYGLIEEQIDKLVKSLISLVGRTEEGKYLLSIPGISYLSAAALLAETGPLKQYQNAKQVIKMAGTNPIESESGGKRLGETPMSKKGRPRLRYSAWNAVIPLFRHNPDFRCWAKRLRERPAHAHPLNGKEVVGAALNRLLCLVFALVKKQEFYHSPEIALVVN

SEQ ID NO: 152135 - protein, 358 aa, unidentified
MKIIGCDYHPSFQQIAMLDLDTGEYVELRLLHAGGEAQRFYESLSGPVRVGVESSGNMLWFERLLQRLGHELWLGDAGVIRAKAPRKQKTDVRDARHLLQLLRENNFPRIWVPSVAERDLRQLLKHRHTLVQMRTRVKNQLRHIALNQGLQKKQKLWTRAGQELLRGLELDRWTARRRDDLLHLLEYLGKQIEELDQAVKAEAEQRAEVRLLMTHPGVGPVVGLATVLTLGEVGRFPRGRQVAAYVGLIPSENSSGQRRRLGAITKQGSSFLRFLLVQAAASAVKGDAEWARAYKRLAHKKHHGVAKVAIARKLVVRLYWMLRTQTRYPEVVRMPGSPSHPVARFQADALSGHPASRR

SEQ ID NO: 152136 - protein, 459 aa, unidentified
MSPRQKSKKKIPSVAKTTPSLPVFHPHAAGIDIGAREIYVAVPPDRDPKPIRVFATFTEDLLALRDWLKACGVQSVAMESTGVYWIPLFQMLEAAGLEVCLVNARHCKNLPGRKTDVQDCQWLQYLHSVGLLRGSFRPPETVCAVRSLLRHRDGLVRAAATCVSRLHKALTQMNVQLQHVIADITGVTGLAILEAILAGERDPRTLAKLKDGRIRATSDVIAKSLRGDWRGEHLFTLRQCLDTWKHYQSQITACDGETARLIQGFAPKVDAVAQPLPPRTSTHKSPQRNEPRFNAREELYRTCGMDLTQVPGIQSGTALVLVAELGPDFAERFPTAKHFGSWLGLCPDNRITGGKIMSSSTRDVKSRAATALRLAAQSLNKAQNYFGDLYRRWKARLGTPKAITAMAHKLARILWHLFKYRQPFDPEVFKKEEEKIQRKKLARLHNSAAALGLKLVPNQ

SEQ ID NO: 152137 - protein, 338 aa, unidentified
MTIVMGLDQHRAQITAEWLETSTGEIGRARVAPAHRAGVRRFVERFRGQELEVALEATTGWRFVVEELRRVGATVHLAEPAEMAARRGNKKRAKSDRADARHLRELVMAGRLPESWIPPDHILDLRARVRLRHSLVDQRGEWQQRIQAVLYHHGCPQRRNLMTGEGRQWLAAMRLPVSAREQITVALAVIDALDGQLGPLDKELRAYARRQPGCRALMGQFGIGEVTAVTILAELGDARRFSSSREAVRYAGMDITVHQSDQRRSAGHLSRQGPPALRWALFEAAQSAARAGSPDRDYYRQAAERLGANRACLSVARKLLKRSYHTLRELGEEALQPA

SEQ ID NO: 152138 - protein, 366 aa, unidentified
MKKVSTVAAKPSKKISQQKLTVGLDLGDRNSWYCVLDESGQIQLEQRVRTTAKALQEVFGTMPRSRIALEIGTHSPWISRLLSELGHAVIVANARKVRLIGESRKKDDRLDAQTLARLARIDPQLLYPVKHRSAQAQADLMMIRARAGLVRARTALVNTARGLAKSYGERLRGCNVHNMNPEKAESLSPELQAALEPLLNAIESLSERIVEYNERIEQMAQQSYPKVALLKQIKGVGTLIALTFLLTLEDPHRFRKSRDVGCYLGLQPGRRNSGQSEPQLHISKEGDPYLRTLLVQGAQHILGPFGIDCDLRRWGLKLAEPGGRSGKKRAIVATARKLAVLLHHLWVSGEVYEPLHNSNRLTVAAA

SEQ ID NO: 152139 - protein, 450 aa, unidentified
MENSEISMQIVNPYAAGIDVGSRSHFVAIGQEAHQVKEFGVYATDLKSLADWLLENKIKTVAMESTGTYWQNLFATLQESGLDVILCNGKFTKNIKGKKTDVQDCQWIQRLHTLGLLSSSFLPDIETEKLRTYCRHRSNLVRSAAGTNKKMQKYLRLMNLRLDVVVRDVTGLTGLLIIDAICKGEKDPETLSELRHGNCRKSKEEIAKALHSNGREDYLFALKQEYELYQVLQSKISGCDLEIEKIISLQISSCETKSSLSIESKPHKRVNKNAPQNIDLNLKAYQYFEGIDLMAIEGVSHSTIMAVMSEVGPEGFKKFQTSKQFTSWLRLSPNNKISGGKVLSSKVPKGSNRLKIALRNTANAVGNLKNTHLSDFFNRISFRRGRHAAVSATARKLAVIIWNMIVKKVPYNPPSEYEYLDQKRKRKVREMQKQILKFGITSEELGVITT

SEQ ID NO: 152140 - protein, 324 aa, unidentified
MSSHEIVGIDVAARKLVVIGERLTLAQYENTAAGRSKLVNALCRNQRPVRVVLEATGIYFLDLACALAAAEIAVMVANPKATHHFAEAILQRRKNDPVDAAMLREFGRRMDFVSWQPPRHELFGFRALTREVQALSKTVAAARNRLHAITATQLAPTAVIGALERQIAHNQALIDELVAAAVAQTESDPELARLLARTDSVPGFAAKAAVLVIGELAVLPPMTARQWVAQAGLDVREECSGTSLARRPRLSKRGNKRLRVALFYPALTAARCCPAAQAFVERLVTHGKTRLQAIVALMRKLLHGLHAMWRNDEDFDAEKLFAPA

SEQ ID NO: 152141 - protein, 367 aa, unidentified
MRKHITTTESAVTRKRANRKLTVGIDRGDRSSRYCILDEQGEVLAEGSVATTKKGFAQVFGSKPRSRVALEVGTHSPWVSRYLADLGHEVIVANPRRVRLITDSTRKDDRLDAKTLARLARIDPELLSPIRHRSERAQADLMVIRARALLVEARTMLVNAARGLTKSYGERLGSCGTGQVGEELAQSLSEALQNALKPLLAEVESVSAHIREYDEQIENIGKSRYPEIGLLKQVHGVGTLTALTYVLTLEDPYRFRRSRDAGAYLGLRPRRRESGDSRPQLRITKEGDAYVRKLLVQCAHHILGPFGADSDLRRWGLELAARGGKNAKKRALVAVARKLAVLLHKLRVSGEVYEPLHVRRGNKTVAA

SEQ ID NO: 152142 - protein, 313 aa, unidentified
MSQEKYIGMDVHQATVSAAVRDRNGNLLMECILETKAETLLEFVQGLHGTLSLAFEEGTLAAWLHDLLKPHVNRVVVCDSRKAALLRDGNKSDRSDARNLSELLRNNQLKPVYHGEHGLRTLKELGRSYLTVSKEMTRTMNRIKSLYRSGAIPRPGTTVYAPRYRRQWLAKITEPGARMRAEHLYEQLDHLQPMRVRARREFLQESNKHDAVKRLRQIPSIGQIRAALLVALLQTPHRFRSKRQIWAYSGFAIETHDSGEYRYVRGKLQRNRERITVRGLNRNQPSRLAADLALCRIFMKHELPWGCGQPWPD

SEQ ID NO: 152143 - protein, 381 aa, unidentified
MTTPSTDNGQENTTEATLFVAFELSEKNWKLGFTTGAGQKPRERGMTARHQERMLDEIAQAKRRFGLPETTPVVSCYEAGREGFWLHRFLLAHGITNHVVDSSAIEVSRRQRRAKSDGLDVRKLLSMLIRYHGGERQVWHVVNAPSVEAEDQRHLHRDLETLKQERGDTTRRIKGLLSSQGLRVTTLSNLPEQLDALRLWDGSPIPPGLRRRLLRVYAHHMFLSQQIAEVEVERRAQLQTSPEASIEKVRQLMQLKGMGINGAWVLVMEFFGWRALKNRREVGGLAGLTPTPYQSGERAREQGITKSGNRRVRWMIMELAWGWLRFQPDSALSAWFRERFGDGGQRLRRIGIVAVARKLLIALWRFLKTGALPEGAELKAV

SEQ ID NO: 152144 - protein, 339 aa, unidentified
MKKVFIGIDFSKLKFDAAIYSIETKAIVSTEVFENEQSGFVEFLQWVKENTRCQKSVLLFCGEHTGYYSGSLSVFLYESGYDMWLVSGLEMKLTEGIKRNKTDRVDACKIAEYAYRYQDKVVLFQPVSKSLDEIRELLSYRERLVETRKVLTTSAKEMKRVKNNASCDFIYRDSFEYIKSLNASVRDCEKRIEALMKQDISLKTNYKLVSSVVGIGLVNAALILVATDNFTKFSDARKFGCYCGVVPFEHSSGSSVRGKTRVSKMANKRIKTTLTLAARNSIRFDPELKEYYQRKIAEGKNSWLVLNNVKNKLIHRIFAVVRDGQMYEKQYVHPLKQAA

SEQ ID NO: 152145 - protein, 397 aa, unidentified
MVNVGVDLHKTQFTVCVRDGEGCRFEQYPTTEEGYQAFFSKARSFQEKGEEVRVGVESTGNTRYFKSRMEKAGIGVTVINTLKFKVVNESVNKTDKHDAATIAEFLEKDMLPQSQLCSRQSEQLRRLLKVRTTLVRSEVVIKNQIHALLTSEGMEDVKKSLQSKRGRKRVLNALKQCENGLVAQPLFDMIGRLEENIKSIEEQLRALADGDRMVELLMTIPGCGEIGAWTIRAYTDDINRFGSAKKYASYAGLVPWVHNSNETVRHGKITKRGPQELRTAMVQVVMGVRRMKQKTCTWRMMRQYEAMKKSKIPGKAIIAAARKIATVIWHMLSGDTEFEEARMTDQKLAKKSETMSKTAMLVNAALVEEKEKPVVTLIGRKRERKTGVAREKRKKVG

SEQ ID NO: 152146 - protein, 376 aa, unidentified
MERGSLMLNTTTFVGLDVHARSIKAVALDAMTGEVRSATFGYDAAEVAGWVSSVDPSAKCVYESGVTGFNLQKRLASMGIDCVVGAVSKMIKPPADRKRKNDRNDAEFLARMLSVGNVVEVWVPDDGCEAARDLSRALDDAREDLKRRKQRLSKFLLRHGYVFSETTPTGRRKGSWTAAHWAWIKSISFPEKADDDVLAYYVDAVRQATEDKARLERLVEAEASKPRWKRRIDSIRCLKGIDVTSAADLVFEAGEFSRFKSARSFAAWLGLTPSEHSSGESVRQGGITKAGNKHLRRVLVESAWHYLGCSPRSKDLAKGQVPDPAARRHAAKGVRRLVERRRAMLERGVHKNKANVATARELACWCWAVGRMIENG

SEQ ID NO: 152147 - protein, 417 aa, unidentified
MHRELAQFSAVIGIDWSDKKHDICVQAVESDERQFSQIPHKADKIDEWAQSMHQRHGGQMAVALELSKGPIVAALQKYNFFVIYPINPTTLARYRQAFNPSGAKDDPSDAELALDLLVHHPDRFAPLNPQSVEMRTLMTLVEQRRRIMNDRVRTTNRLRNALKQYYPQVLDWFDRIDTVLFCDFIRRWPSLAQARRARRATFEKFFREHNMSRKPVLERRVKAIKSATPLTTDEAVIVPYRLQALTLVDQLEVALGSIRMYDNEIAALAPQHPDYDLFSALPGAGPLLAPRLLVAFGEQRDRFANAAEVQKYSGIAPVTERSGQKNWIHWRWQCPTFLRQTFVEWAAQTINKSYWAGLYYYQQRTKGCSYQAAVRALAFKWIRILYRCWKTRTPYDESRYLKALRDRGSPLLGVETT

SEQ ID NO: 152148 - protein, 375 aa, unidentified
MQTIYIGVDFHARQQTICYLTTETGELVTCELKHQDKEAVRAFYAAFRGQVIVGLEASGYSPWFERLLEELGYEVWLGHATEIRRRARWRQKNDRRDAELILDLMLHNEFPRLHRPALQSREVMRMLRYRHKLIKIRTMSKNSLQALALQAGVAKRSGLFTRAGKQELDAALMSPAMQWQREHWLQLLQPLDQQVLEAMAWLKAQSKDDVCIARLRTHPGIGLLSALCLVHTLQPVTRFRNTRKVAAYAGFDPVERSSAEHKRFLGISKAGSRLLRHLMVEAANIAVRKDEELKRFYQRVAARRGRPKAKVAVARKLLIRAYIMLRDEIDYAEFRRRAVAARLARASHRPNVPESLIGQPASAERQEQLTRTKKK

SEQ ID NO: 152149 - protein, 375 aa, unidentified
MKEKVRFLGMDVHAETIAVAIAEADGEVRSLGTIANRAESIRKLVKKLGPAEHLNACYEAGPTGYVLYWQLAELGVACEVIAPTLAPMKAGDRVKTDRRDAERLARSYRSGDLTAVWVPDEGSEALRDLVRAREAAKQDQLRARHRLGKFLLRTGRRPAVGMKAWTSPYMAWVRQVQFTQMAREATMLDYLHEVDHMGERVKRLEQAITEAVKLATPAVQEVVKGLQALRGIAEISAVTIIAELGSITRFDTPRQLMGYSGAVPSEDSSGKRTRRGSITKTGNAHLRRIVVEAAWSYRYRPAIGPRLRKRQEGVSEPIKEVAWNAQVRLTKRYARLAAAGKDQRKIITAVGRELLGFIWAIGVKAETAVTQQMAA

SEQ ID NO: 152150 - protein, 345 aa, unidentified
MPIVGGLDIHRKQLTFDYLDTETGEVKRGQVAPADRAHLRAWLARFAGRDGVAFALEGCTGWRYVTEELAAAGVAAHVAEPADTAFARGRKRHAKTDKTDCRHLRMLLAEGRLPECWIPPGHILECRALLETYHDLRAEHTAWVQRIHAVFFHQGAPALGDGALRTGKDLAALRAAAAAHLSPVGQLQVAVSLEVLEALEARMHQVRHQMLAAARHLTGAKVLAARLYGVGPVTALAMTCWLAGKDRFSSSRKAVRFAGLDVTVWSSDRKGPPGRLSRQGPPVLRWAVYEAGKTHARSSAPDHRYYAQVKDRQDGKRAALSEARKILRQACHILAELGDDALTAA

SEQ ID NO: 152151 - protein, 345 aa, unidentified
MKYYAGLDVSVKETSICIVDQTGKICREVKVTSHPDDLIAVLKDPAWNMERIGLEAGPLSQWLFVGLARAGLPVICIETRHTKAFLKAQPNKSARNDARGIAQMMRVHLYRAVHVKTLTSQKRRALLTARKLLQDKAIAIENDLRGLLRNFGLKVGVVGSAKFEARIRELVEGTLDLVEIVEPLLDARRNLREHFATLHRKLLMIARDDEVCRLLMTIPGVGPVVAVAYTATIDIPQRFKNSKAVGPILGLTPVLNQSGESHRVGRVSLCGDGMMRTLLYDAAQVLLNRVAKWSWLKAWAMSVAKRRGLQKAMVALARRLAVIMHRMWSDGTEFCWSREKLPAGA

SEQ ID NO: 152152 - protein, 430 aa, unidentified
MKSNTQNAKIEAITEKTLVLGIDVGSETHYARAFDYRGVEYSKKPFKFSNTEAGFVTFKAWVLDIKEKHGKDKVIPGMEPTGHYWFNLGKFLQDNEMKPVLVNPHHVKKSKELDDNHPTKNDRKDPKVIAGLVREGRYMIPYLPDGVYADLRTASNIRFQLQAELTRIQNRINRWFNIYFPEYKTVYGKPDAKSGILILKEAPLPEDILTLGIDGVNQIWRDAKLRAVGKARAKTLIEAAEHSVGSKEGAVSARMEIRMLLEDYESRNIRLQEVMGLIEGLVNQIPMAEKLLEIKGVGIKTVSGFLAEVGDIRRFNDPKELQKLAGLALVENSSGKHKGKTTISRRGRKRLRYLLFEVAMSLVAKNPEFRELHNYYTTRRLNPLKKMQSLMAIAAKLLRVFYAILTKNVGYDPKKMVNDIRRPATYAQAA

SEQ ID NO: 152153 - protein, 343 aa, unidentified
MQAVTTIGFDIAKSVFQVHGVDTVGQVIIRRQLKRRQVIGFFQKLPACLVGIEACASSHYWSRELQALGHNVRLMPPAYVRPYVKRQKNDMADAEAICEAVTRANMRFVPTKTAEQQSGLMLHRTRHLFMRQQTSVINAIRAHLAEFGIVAPVGRRGVEELLRVVADPSDKRLPEIVRACLAALGSQLLSLKKQILDFDRMIMAWHRSNQTSKRLNCISGVGPLLSTALVASVADPKTFRSGRNFSAWIGLVPKQNSSGGRDKLGSISKQGDRYLRGLFVAGAFAVIRYAKIHGTKHRPWLTALLARRHTKVAAIALANKLARMAWAMMATGERYNYPASLKV

SEQ ID NO: 152154 - protein, 369 aa, unidentified
MTVYIGVDLHKTQFTVHERTEETVESFEQIKQYPTTEVGYAAFLARITEYKIGGFTVKIGVESTGNTRFFKAQVEKVGAHVTVINTLKFKVINESTKKTDKHDASTISEFLSKDMLPESYLCSKGTENLRRLLKSRERLVHSIVGQKNEIHALLVSMGLQDESRSLQSKKGRQEVLDTLSSRSDLVLEAQSVKLMIEIIEQMSQSVKLIEKQLSELTKDDEMVSRLMTIRGCGKITAWIIRSYTEDIGRFASAKKYAAFCGLVPWVQDSNETVRHGRITKRGPQELRTAYVQLVLGIRRCKDTSGWRIMQRLDYMKKNKGSGKSIVAAARKMAEIVWALLTEKQDFDSTKMMGRYKPMSLAEQALVAMN

SEQ ID NO: 152155 - protein, 385 aa, unidentified
MAPPTKPRIVIGLDVGKSAHWACVVTREGELLASGPIPNRENAIDGLYAQHPGALVVVDQVRNIGSLALSRAKLAGMPRAHLPGLAAHGASKLFAGDAKTDERDAMVIAKTALGIPDALLAVADRPPEIEAARSLAAQRDFLACENTRSKNRLRSILLESCPEFEAQADLSDPATLELMAAVGGPWSISEASSQSVGALTRGCRRGEVAALVGSVESSSRPHPAAVACEDRAVRLLARRMSENAAEIESPTSEISALPAADETYRCLLTVPGIGPRTASELVISIDIADFAGHDRLASYCGLAPRNRRSGTSISSVSASRQGNKRLKNLLIFSCNCLARSRNRWGEYYARCRDRGMPHGKAPKAVARKRLKVIYAIMRDKVPYAA

SEQ ID NO: 152156 - protein, 429 aa, unidentified
MNNNRKRRINQIDEDSLIVGIDIAKNKHAARAQDFRGIEYGETVYFVNRDHGYERIKKWILKLAKKASKKDIIIGLEPTGHYWLPLYKYFTASGFKVVTVNPHHVEKSKELDDNNPTKCDKKDALVIAQLVKDGRYSTPNLPEKEYAELRVAINHRERLMKDLNGIKNRIIRWLDIYFPEFNDVFKDWEGMTALSTLKTMPLPEKINKKGVKEIVNIWREDGIKSRVGKKRAKKLKRCAQRSIGIQTGKKRAELEIKNLLKQYEQLSKQLENLEEKIEKILKEIPGAKEMISIPGVGAMTVAGFLSECGNLDDYNHPKQIIKLAGLNLMEHSSGKHKGETKITKRGRPQLRSLLYRVSMPLVRHNNEFSQIHEYYKNRSKNPLEKKQSLIAICCKLIKILYTLGTREIEYDGEKMLNDIKRPKEYKKAV

SEQ ID NO: 152157 - protein, 411 aa, unidentified
MKVVHEICCGIDVHAKMLVACLLLANGEKEIRSFSTMTEDLLRLRDWLVSSHCTHVAIESTGVYWKPVFNILEDALEVILINPEHARALRGHKTDVKDAEWLADLLRHGLLRASFIPPPEIRELRELTRYRESVVREQSSVANRIQKVIESGNIKLGQVASDALGASGRQMLWALARGETDAVKLAALAQRRLKEKIPQLQRALQGRLTTNQRFVLRELLRRWEELEAADQRVTQEVDRYLQDRPKLARGREILDSVVGVGPRAAEVIMAEIGVVMKPAFLSDAHLASWAGICPGNKASGGKRLSGRTRKGNTYLRSVLVQAAWGATMKKNCYLSSQYLRLVKRLGRKKALVAVAHSLLVIIYHVLDRDQTYTELGGDYFDRHHVEQQREYFIRRLQMLGLKVKVEALAAA

SEQ ID NO: 152158 - protein, 367 aa, unidentified
MKSYVGLDVHSKSSVFVIQNERGQELGRGEVPTSVEGFSALRIRFRLRASTLVALESGTMAFFAARKLRELGLSPVVVDAREVRMKAHRPRQKSDTRDAGELCEGVRRGIYQAIVHVPPEKIEHLRNTLSRRRHFVRLGTAQINAAKKMLRSAGLSELSRQHLGTLRAWRLVLGALAEHPQVRSFVELHHRAFQSAMEQKAACEKSLEQQHSLFGEDLERLKTVPGVGDIVALTAIAVFSDATRFPSAKHASSYAGLVPQTYQSGETNRQGHITRTGSPELRAMLVQAAHTARRQQSPLNPFLRSLTLRVGTRRAVIAVAHRLCRVLYAMLRDKTTFDASKLKAHESRTTAQSARVYRLNAQAAGSR

SEQ ID NO: 152159 - protein, 425 aa, unidentified
MPTALAWEASMEVLHERCAGLDVHKNTVVGCVRLAQGGRVEKEVKTFKTTTGELLALAEWLDGHRVNHVVMEATGVYWKPVWHILDDGERQLVLANAAHVKNVPGRKSDVSDCDWLSDLEAHGLIRPSFVPDGPTQELRGLLRTRKQLVRERTSHTLRLQKALEDANIKLDSVISNVVGVSGRRMIEALVAGESDPTALANLADRRIKAPPEALCEALRGRVTRHHRFLLSLHLGHIDAIDQAIDKIDQEVEASLQPFCQAVGLVKTIPGVSQLAGQGIIAEIGSDMSRFPTCGHLISWAGLCPRSDESAGKRRSTRTRKGNPWLKTLLVQCAWAATRTKATYLHAQFLSIRSRRGARKAIVAVAASILTAVYHMLKNGTSYRDLGPQHLENRNKEAQARRLLARLRRLGFVADFDTLRPVPVSC

SEQ ID NO: 152160 - protein, 413 aa, unidentified
MDVLHPRCCGLDVHKSSISACILLRESGRVQKHQRRFGAMTQNLHELAEWLQQFGVTQVAMESSGVYWKPVWNILEGQFTVVLANAQHIKNVPGRKTDQKDAEWIAQLLQHGLLRPSYVPCEIIRDLRDLTRMRASLSQEASRISSRIQKVLEDANVKLASVATNALGKSGRAMLEDIISGEDNPEQLASLALGHLRVKIPQLRLALEGKIRSHHRFLLRRLLDQMQFVEHEIALLEERMEDIGRQRPELSQAVARWDTIPGVDRVAAWALLAEVGDNMAQFPTAEQLASWASLCPGNHESAGKRLRGATRQGSPWLRRMACQCAWAAARTKNTYLSSQFRRLAARRGKKRAIIAVAHTLIVIGYHLQKNQSNYEDLGGNYFDRIHSDGLKRYLVKRLQQLGHKVTLEPMEAA

SEQ ID NO: 152161 - protein, 462 aa, unidentified
MAERREDESRSEEARQIEGLPVVRAQVGGIDLGSQRHWVCAPGLEGRGREIADFGATTPELQRMLEWLKVRQVESVAMESTGVYWIAPQEVLEAGGLEVLLVDTRQLARVPGRNKKTDPSDCEWIQRLHSCGLLTGAFRPPEQVGMLRTLVRDKANLVAEAGDWVRRMQKSLDQMNVRVHRAVSDLDGVTGLAIVRAIVAGERDARKLAQLRDRRCQKSEAEIAEQLSGHWREDHLFSLRQSLKMYEATQERIAAYEQEILRKLREMTPEERAGQTAPAVKNPHKANAIRKRGEEPRRQAWYRMSGVDATQIDAIGVGTIEVVLSEYGPDLSCFPTEKQFISHATLAPHVPRSGGKVVKKKKRYSASTRVAAALRMAALALRHSPTALGAYYRSLARRIGGDVAVFATARKLATLIYRLLRWGQPYVDEGAQTFEERYRQQRIRSLTAKAKELGYQLLPATT

SEQ ID NO: 152162 - protein, 460 aa, unidentified
MQDKREGKAGGDRRRLEGLPSIRPLVAGIDLGSERHWVCAPTADGTGREVADFGATTPELMRMAEWLKQRHVESVAMESTGVYWIAPHEILEAEGFEILLVDTRQLARVPGRDKKSDPTDCEWIQRLHSCGLLRGSFRPPEEVCMLRTLVRDKANLVAESGDWLRRMQKSLDQMNVRVHRAVSDIDGVTGMAILRAIVGGERDARNLAKLRDPRCRQSEEEIAEQLSGHWREDHLFSLQQALKMYEAIQQRIADYEREILRQLAAMPCEDLGDQPPPPVKNPQKAKAIKKRGEEPMREALYRMSGVDLTSIDAIGVETAQVVLSEYGPDLSRFATEKEFVSHLTLAPRRPTSGGKPVKKKQRNTASTRVAGALRMAALSLRNSATGLGAYYRRIARRIGGDVAVFATARKLATLIYRMLRWGQQYVDEGAEAYEKRYQAIRITTLKAKAKELGYELVQTP

SEQ ID NO: 152163 - protein, 319 aa, unidentified
MSKQKEERFVGIDVSKAMLEVAVRPSGEHWSVANEETGVRELVKALEKTAPTLIVVEATGGMQALVVAELAAAGLPVAVVNPRQARDFAKATGRLAKTDSIDAGVLAAFGQAIRPEVRELKDEQTQLLTALMGRRRQIVDMLTAEKNRLASAPKAVRKEIRKHIEWLEARLKAMDAQISDTIKENPAWHEKDLILRSTPGVGPVLSVSLLAGVPELGQLNRQKLAALIGVAPLNRDSGAYRGTRKVWGGRAQIRAVLYMAAVSASRANPVIREFYQRLVAAGKKPKVALTACMRRLLCILNTMIKNGTRWRQEEATARA

SEQ ID NO: 152164 - protein, 414 aa, unidentified
MEVVNTHCAGLDVHKKTVVACALTPDGKRGWRKEVRTFATMTVEVLGLSDWLQGQGVKQVTMESTGEYWKPVFNLLEANFEVILVNAGHVKHVPGRKTDVKDAEWLAELLQHGLLKASFIPPEPIRDLRDLTRHRSNFVRERATLVNRVQKTLEGANIKLASVATDILGVSGRQMLDALCAGNANPEVMAELAKGRMRTKRDLQAKALEGRVKVHHRFILTELLCQIDSLDETIGRFDEEIAQLSTPFDEAVALLDTIPGVGRETAQVIISEIGVDMSRFPSAGHLAAWAGVAPGNRESGGKRYSGKTRQGNQSLRKGLVQAAHAAAHTRNTFLAAQYHRLAPRRGKKRAIMAVAHSMLVIVYHLLTKHEPYQELGAGYYDQRNVTAITQRLTKRLQKLGYQVTLELLPEAVPA

SEQ ID NO: 152165 - protein, 457 aa, unidentified
MQQYYLGSDVSKGYSDFVILDSQKRRVEENFQLDDTIVGHSFLYDRLLIFFEEHPDAELCAAVESTGGYENNWYNTLRKFQSSLNIKTARLNPAGVCKNTEAGLKRVITDKISAQGVAEYLIAHSEKVMYQQQDYWASLRKQWSFIKMLTKQSTQLLNQLESLLYSANPEILKYCQDGVPAWVFKLLKKYPTAAKLGKARATSVARIPYISISRAEELVANAKTSVASATDTITGQLISAIVGQILQLKKIIKTQTKIMAAECTLQEVELLKTFTGIGDYSAIGLMLEIQAVARFSTAKKLAAFFGLHPVYKISGDGASGFRMSKKGRKEPRRILFMVAMSAINSNSLIRDLYQKHVENGMEKMTAIGLCMHKILRIVYGMLKNNTPFNPEIDLKNRERTSEQPQKERKDKSRRYQDFDATAPISGRQRKKRAERKLSQNAVSVECGICASAPQLSS

SEQ ID NO: 152166 - protein, 420 aa, unidentified
MPNIEIGVDSMVKENFIYVGIDLHKETHTAVMIDCYNQKLGEITFPNRPADFPKLVTKVKKCNTDAKEVVYGLENAYGYGRPLAVWLIDKGYFVKDVNTAISHRQAKHRGAMYRKSDSDDAEAIALATLNMLDKLPDACPNDAYWSLGQLVHRRDNIMKQRTRLVNQLHEQLCIAYPSYKQFFNDISRPTALYFWEHYPSRKYLKGKSVEDLRAELVPVSHNKCSTKTCEKILDAVASDKVKNNAYQDARDMVTLSIVSDLQHYDSQLAEVDKMLEQMYKMLGCTLTTIPGVNVITAVKILAEIGDIKRFSNANKLAQFAGIAPLHLSSSGKGKDVATKQGNRRLQATIYFLAIQMVQVSSKGTPRNSVVRAYYEKRKAEGKTSQQALICISRRLISIIYGMLKNGTEYRMPVVESAGEK

SEQ ID NO: 152167 - protein, 361 aa, unidentified
MDNVTHLGLDVHKDSIAVGLLRPRQQLPDHKVINNTPEAIRKLVSRLDVTSVIACYEAGPTGYDTYRLLDSLGVPCDVIAPALIPRRAGRRIKTDRLDARNLDRLHRAGELTAIRVPSRSEEALRDLIRVREDLKDDRRRAQQRIKGFLLRQGRRFPGNSKGWSAKFDSWVRAQRFDDKAAQLAFDHYLQARGARTVQLAAIDSEIEAAVTAPPLAEPVAHLRCLRGIDTLSAATIAAEVCDFRRFRDAPSFMAFTGLVPSEHSSGTRQHRGSITKTGNRHARRVLVEAAWSYRHRPYVGATLARRTQGQPREVVAHCYNAQVRLNSRYWRLVATRDSRVAVVAVARELAGFVWALMTKVA

SEQ ID NO: 152168 - protein, 392 aa, unidentified
MYIVGIDIGKNHHEASIVSPEGKQIGRSLRFATTHKGADSLMSFIFKNIGNSPCVFGMEATGHYWYPIYSFLKAKGYTIYVINPIQSDSLRKMYIRQTKNDSIDSFLIAEVIRFGQFGTTSMADENILAMRQLCRYRDSVISSRTEIKLRIGTIMEQIFPEYEKQFSSLWVSTSMGILEKYLTPENIENTPIDELFEIIKDKSHNRLTKAKAISIKEAAADTFGIKIAQDAFSFQLKQLIDRMNFLDKQIEALDCQILEYYEKFDCYLHTIPGIGIIGAATILAEIGDISRFKNSSALVAFAGIDPTVRQSGEFNSTHNHMSKRGSPYLRHAIFLAATTCSFHNSPLNAYYKKKRDQGKHHLTATGAVARKLTTVIYAVLRDSKPYEPKKFC

SEQ ID NO: 152169 - protein, 315 aa, unidentified
MSEVFVGIDVSKSQLDISIRPSGESFSVGNNDEAIAGLAVRLAPLAPRLIIVEASGGYQAAVVAGLALAQLPIAVVNPRQVRDFAKATGRRAKTDALDAAVLAHFGEALKPEPKPLEDEQAAALGALVARRRQVVEMITAETNRIAQSQTAVRAKIKLHINFLRHELSDLNRELDDALRRSPVWREQDELLRSVPGVGRVLAVTLLSELPELGRLNRKQVAALVGVAPVNRDSGTLHGHRHIVGGRASVRPALYMAALVATRWNPAIRAFYQRLCAAGKLKKVALTACMRKLLTILNAMVRSNRRWEPSTLPAAK

SEQ ID NO: 152170 - protein, 342 aa, unidentified
MIDTMIGVDLAKNVFQLHGASLTGEVKFRKKLSRPQFRKFMEAQPASIVVFEACGSAHFWTREMQQLGHQAKLIAPQYVKPFVKRQKNDAADAEAIVIAAQRPEMRFVEPKSNAQIARSVVFRSRDRLVHQRTEQINALRSVLYEQGQVFPTGVHQMKKIAEFLQQADNGLIALVREECEELIASISEHTTRIDAKTVKLKKLSQQSEMSRRLQTIPGVGPLTAMAIEAFAPTMDIFRCGRDFAAWVGLVPKQHSSGGKARLGKISKEGQVDIRRLLIIGAMTRIAWVGRKPIQDGSSLDRMLKRKPKMLVAIALANKMARTIWAVLTKQEDYRDPVKTAAA

SEQ ID NO: 152171 - protein, 348 aa, unidentified
MPNYNQPHQFYAGVDLHARSMFVHVLSAKGKTVLERDLPAEPDVFLDAIKPFRKNLVVGCECMFAWYWLADLCEDKRIPFVLGHALAMKHIHGGKAKSDKIDAGKLANMLRGGMFPLGYVYPRAKRQTRDLLRRRSFFVRQRAQLITHIVNTNSQFNLPPFAKKLSYAANRSAEIAERFPDPSTRLMIHADLHLIDAYDAQIAELERHLLQSAKVDDPVTFGFLRTIPGIGPILGLILLYEIDRISRFPEAGNFLSYSRLVRCAHESAGKVKGFGGKKIGNAHLKWAFSEAACLMLRTCLPVKAWLQRQEQKRGKRKALSVLEAKIGRTVYHLWNKQQAFDVKKFLHS

SEQ ID NO: 152172 - protein, 316 aa, unidentified
MVIGIDVGSRYLDAAATGAVPALPRRVPNTAEGIARLVHALNPLTPHLIVLEATGSYHCPVLAALLLAELSVAVVNPAQVAAFRTSRLGRHKPDRADAQLLARFAEVHHAELRRATPDAPDLARLRALVGYRDDLVARRTAMRNQQHAARWAGEAAVVAWLETDLTELAARLAEVEQAITAVLATRPETAVLTAQVGVGLMTAAAVLAYLPAGLLGNAKAAAAYAGLHPRHEQSRQRDRSRLSKQGCPALRRYLSLAALTAIRHDPEIAAWHHRLLARGKAARSATCAVAHKLLRRMMGRVRELGKHQPLTLPLAA

SEQ ID NO: 152173 - protein, 400 aa, unidentified
MKYYTSTTEFNCGIDLHARQMYVCVMDRQGQKRVHTNVRDNDFNFFLKLVEPYRHSLTVCCECMFGWYWLADACQNAGLTFVLAHALYVKAIHGGKNKNDRVDSEKLTHLLRSNLIPPAYVYPADKRPLRALLRQRLFYVWRRSELLARIHSHQLAHNRIPAKQTRRTRDLWEEALLNAEDHPLRQIALKNDLTMIKHFDTQIFQLEEELQRQTKKVACREYSLLQTVPGIGENLGLTILYEIGDISRFPTVKDFLSYCRLVKGTVASAGKIKGLRGAKLGNPYLRWAFGEAAVIAKRDHYLVGPLSQRLEAQMGGNKFKANTVLAIKLARAVYFMLKNKTVFDPERLVASMQKCFSPGRRPPGSLTGRAKKAMPPPVPEAASCAPSTALCVGQASSPAH

SEQ ID NO: 152174 - protein, 380 aa, unidentified
MSRTTQDDVMKTLTSRSIIGSGGAAMLYTGLDLHKSFSYITIMNDRGEVIGQKKLPSNGEILNFLKGFEDSMEVAIEATPSWYWLYDCLEDEGFEVKLSHPLRTKAIAYAKVKTDKVDSATLAHLLRSNLLPLSYVPEKPVRLNRELLRYRASLVKIQTGIKNKIHTILAKNNVSHDYTDLFGKEGMVFLHSLSLPENYRIALEGYLSVLEALRHEIRQASKRVQELAEENQDAVLLMTIPGVGYYSALMIKSEIGDVKRFPSAKQLCSYAGLVPSTYASGNTCYHGHITKQGSRWLRWILIEAAIHAVKRPGPLRRFYFRVERKKGGKVAKVATARKLLEWIYHMMRDDKSFQEVERLAELQGKGELVKKPGLYFRPSI
